(19) United States
(12) Patent Application Publication
(10) Pub. No.: US 2022/0098586 A1
(43) Pub. Date: Mar. 31, 2022

(54) OLIGONUCLEOTIDE

(71) Applicant: BioMarin Technologies B.V., Leiden (NL)

(72) Inventors: Peter Christian de Visser, Leiden (NL); Judith Christina Theodora van Deutekom, Dordrecht (NL)

(21) Appl. No.: 17/449,290

(22) Filed: Sep. 29, 2021

Related U.S. Application Data
(60) Provisional application No. 63/085,668, filed on Sep. 30, 2020.

(51) Int. Cl. C12N 15/113; A61P 21/00

(52) U.S. Cl. CPC C12N 15/113; A61P 21/00; C12N 2310/321; C12N 2310/3341; C12N 2310/315; C12N 2310/3231; C12N 2310/11

(57) ABSTRACT

Provided are splice-switching hydroxyalkoxylated antisense oligonucleotides for preventing, treating, and/or delaying neuromuscular disorders, more specifically Duchenne Muscular Dystrophy.

### RELATED APPLICATIONS

[0001] This application claims benefit of priority to U.S. Provisional Application No. 63/085,668, filed Sep. 30, 2020, the contents of which are incorporated by reference herein in their entirety.

### SEQUENCE LISTING

[0002] This application contains a Sequence Listing, which is being submitted herewith as an ASCII text file named “0105_26_US_SL.txt”, created on Sep. 20, 2021, size 15,293,355 bytes, which is incorporated by reference herein in its entirety.

### FIELD

[0003] Provided are hydroxyalkoxylated antisense oligonucleotides, more specifically splice-switching hydroxyalkoxylated antisense oligonucleotides for the treatment of genetic disorders, more specifically neuromuscular disorders. Also provided are methods of using the hydroxyalkoxylated antisense oligonucleotides for treating, preventing and/or delaying Duchenne Muscular Dystrophy (DMD).

### BACKGROUND

[0004] Antisense oligonucleotides (AONs) are in (pre)clinical development for many diseases and conditions, including cancer, inflammatory conditions, cardiovascular disease and neurodegenerative and neuromuscular disorders. Their mechanism of action is aimed at various targets, such as RNaseH-mediated degradation of target RNA in the nucleus or cytoplasm, at splice-modulation (exon inclusion or skipping) in the nucleus, or at translation inhibition by steric hindrance of ribosomal subunit binding in the cytoplasm. Splice-modulating or splice-switching oligonucleotides (SSOs) were first described for correction of aberrant splicing in human β-globin pre-mRNAs (Dominski and Kole PNAS, 1993, 90(18):8673-8677), and are currently being studied for a variety of genetic disorders including, but not limited to, cystic fibrosis (CFTR gene, Friedman et al., J Biol Chem 1999, 274(51):36193-36199), breast cancer (BRCA1 gene, Uchikawa et al., J Hum Genet 2007, 52(11):891-897), prostate cancer (FOLH1 gene, Williams et al., Oligonucleotides 2006, 16(2):186-95), inflammatory diseases (IL-5Ralpha and MyD88 genes, Karras et al., Biochemistry 2001, 40(26):7853-9, Vickers et al., J Immunol 2006, 176(6):3652-61), ocular albinism type 1 (OA1 gene, Vetrini et al., Hum Mutat 2006, 27(5):420-6), ataxia telangiectasia (ATM gene, Du et al., PNAS 2007, 104(14):6007-12), nevoid basal cell carcinoma syndrome (PTCH1 gene, J Invest Dermatol 2006, 126(12):2614-20 et al., J Hum Genet 2007, 52(11):891-897), methylmalonic acidemia (MUT gene, Rincon et al., Am J Hum Genet 2007, 81(6):1262-1270), preterm labor (COX-2 gene, Tyson-Capper et al., Mol Pharmacol 2006, 69(3):796-804), artherosclerosis (APOB gene, Khoo et al., BMC Mol Biol 2007, 8; 3), propionic acidemia (PCCA, PCCB genes, Rincon et al., Am J Hum Genet 2007, 81(6):1262-1270), leukemia (c-myc and WT1 genes, Renshaw et al., Mol Cancer Ther 2004, 3(11):1467-84, Giles et al., Antisense Nucleic Acid Drug Dev 1999, 9(2):213-20), dystrophic epidermolysis bullosa (COL7A1 gene, Goto et al., 2006), familial hypercholesterolemia (APOB gene, Disterer et al., Mol Ther 2013, 21(3):602-609), laser-induced choroidal neovascularization and corneal graft rejection (KDR gene, Uehara et al., FASEB J 2013, 27(1):76-85), hypertrophic cardiomyopathy (MYBPC3 gene, Gedicke-Hornung et al., EMBO Mol Med 2013, 5(7):1060-77), Usher syndrome (USH1C gene, Lentz et al., Nat Med 2013, 19(3):345-350), fukuyama congenital muscular dystrophy (FKTN gene, Taniguchi-Ikeda et al., Nature 2011, 478(7367):127-31), laser-induced choroidal neovascularization (FLT1 gene, Owen et al., PLoS One 2012, 7(3):e33576), cancer (STAT3 and bcl-X genes, Zammarchi et al., PNAS 2011, 108(43):17779-84, Mercatante et al., J Biol Chem 2002, 277(51):49374-82), and Hutchinson-Gilford progeria (LMNA gene, Osorio et al., Sci Transl Med 2011, 3(106):106ra107), Miyoshi myopathy (DYSF gene, Wein et al., Hum Mut 2010, 31(2):136-42), spinocerebellar ataxia type 1 (ATXN1 gene, Gao et al., Cell Transplant 2008, 17(7):723-34), Alzheimer's disease/FTDP-17 taupathies (MAPT gene, Peacey et al., NAR 2012, 40(19):9836-49), myotonic dystrophy (CLC1 gene, Wheeler et al., J Clin Invest 2007, 117(12):3952-7), and Huntington's disease (Evers et al., Nucleic Acid Ther 2014, 24(1):4-12). However, splice-switching AONs have progressed furthest in the treatment of the neuromuscular disorders Duchenne muscular dystrophy (DMD) and Becker muscular dsytrophy (BMD).

[0005] Duchenne muscular dystrophy (DMD) and Becker muscular dystrophy (BMD) are the most common childhood forms of muscular dystrophy. DMD is a severe, lethal neuromuscular disorder resulting in a dependency on wheelchair support before the age of 12 and patients often die before the age of thirty due to respiratory or heart failure. It is caused by reading frame-shifting deletions (˜67%) or duplications (˜7%) of one or more exons, or by point mutations (˜25%) in the 2.24 Mb dystrophin gene, resulting in the absence of functional dystrophin. BMD is also caused by mutations in the dystrophin gene, but these maintain the open reading frame, yield semi-functional dystrophin proteins, and result in a typically much milder phenotype and longer lifespan. During the last decade, specific modification of splicing in order to restore the disrupted reading frame of the transcript has emerged as a promising therapy for DMD (van Ommen et al., Curr Opin Mol Ther. 2008; 10(2):140-9; Yokota et al., Acta Myol. 2007; 26(3):179-84; van Deutekom et al., N Engl J Med. 2007; 357(26):2677-86; Goemans et al., N Engl J Med. 2011; 364(16):1513-22; Voit et al., Lancet Neurol 2014, 13(10):987-96; Cirak et al., Lancet 2011; 378: 595-605). Using highly sequence-specific splice-switching antisense oligonucleotides (AONs) which bind to the exon flanking or containing the mutation and which interfere with its splicing signals, the skipping of that exon can be induced during the processing of the dystrophin pre-mRNA. Despite the resulting truncated transcript, the open reading frame is restored and a protein is produced which is similar to those found in BMD patients. AON-induced exon skipping provides a mutation-specific, and thus personalized, therapeutic approach for DMD patients. As the majority of the mutations cluster around exons 45 to 55, the skipping of one specific exon may be therapeutic for many patients with different mutations. The skipping of exon 51 applies to the largest subset of patients (˜13%), including those with deletions of exons 45 to 50, 48 to 50, 50, or 52. The AONs applied can be chemically modified to resist endonucleases, exonucleases, and RNaseH, and to promote RNA binding and duplex stability. Different AON chemistries are currently being explored for inducing corrective exon skipping for DMD, including 2′-O-methyl phosphorothioate RNA (2OMePS; Voit et al., Lancet Neurol 2014, 13(10):987-96), phosphorodiamidate morpholino (PMO; Cirak et al., Lancet 2011; 378: 595-605), tricyclo DNA (tcDNA; Goyenvalle et al, Nat Med 2015, 21(3):270-5), and peptide nucleic acid (PNA; Gao et al., Mol Ther Nucleic Acids 2015, 4:e255). Although AONs are typically not well taken up by healthy muscle fibers, the dystrophin deficiency in DMD and the resulting pathology, characterized by activated satellite cells and damaged and thus more permeable fiber membranes, actually facilitates a better uptake. In studies in the dystrophin-deficient mdx mouse model, 2′-O-methyl phosphorothioate RNA oligonucleotides have indeed demonstrated an up to 10 times higher uptake in different muscle groups when compared to that in wild type mice (Heemskerk et al., Mol Ther 2010; 18(6):1210-7). Clinical study results with both 2′-O-methyl phosphorothioate RNA and phosphorodiamidate morpholino AONs in DMD patients confirm presence of the AONs in muscle biopsies, but the levels of novel dystrophin after treatment were still limited, which challenges the field to develop oligonucleotides with improved characteristics enhancing therapeutic index and clinical applicability.

[0006] Clinical efficacy of systemically administered AONs, such as splice-switching AONs, depends on multiple factors such as administration route, biostability, biodistribution, intra-tissue distribution, uptake by target cells, and routing to the desired intracellular location (nucleus). Thus, there is a need for AONs with improved characteristics for treating, preventing and/or delaying DMD.

### SUMMARY

[0007] In one embodiment, provided herein is a hydroxyalkoxylated AON. In another embodiment, provided is a hydroxyalkoxylated AON consisting of one antisense oligonucleotide (AON) and one or two hydroxyalkoxy groups. In certain embodiments, the hydroxyalkoxy group comprises or consists of an ethylene glycol monomer, ethylene glycol oligomer or ethylene glycol polymer. In other embodiments, the AONs for use in the hydroxyalkoxylated AONs provided herein are represented by a nucleotide sequence comprising or consisting of:

[0008] any one of SEQ ID NO: 9-404, or

[0009] a fragment of any one of SEQ ID NO: 9-404, or

[0010] any one of SEQ ID NO: 9-404 with 1, 2, 3, 4, or 5 additional nucleotides, or

[0011] any one of SEQ ID NO: 9-404 with 1, 2, 3, 4, or 5 nucleotides missing from said SEQ ID NO, or

[0012] a nucleotide sequence which has at least 90%, 91%, 92%, 93%, 94%, 95%, 96%, 97%, 98% or 99%, or at least 95%, or at least 97%, identity with any one of SEQ ID NO: 9-404.

[0013] In certain embodiments, the hydroxyalkoxylated AON provided herein consists of 2′-O-methyl RNA monomers linked by phosphorothioate backbone linkages. In another embodiment, the hydroxyalkoxylated AON provided herein consists of 2′-O-methyl RNA monomers linked by phosphate backbone linkages. In another embodiment, the hydroxyalkoxylated AON provided herein consists of 2′-O-methyl RNA monomers linked by a mixture of phosphorothioate and phosphate backbone linkages.

[0014] In some embodiments, the AONs for use in the hydroxyalkoxylated AONs provided herein are complementary or reverse complementary to a portion of an exon in human dystrophin pre-mRNA. In some embodiments, the AONs for use in the hydroxyalkoxylated AONs provided herein are complementary to a portion of an exon in human dystrophin pre-mRNA. In certain embodiments, the AONs are complementary to a portion of one of exons 51, 45, 53, 52 or 55 of hyman dystrophin pre-mRNA. In certain embodiments, the AONs are complementary to a portion of exon 51 of hyman dystrophin pre-mRNA.

[0015] In further embodiments, provided is a pharmaceutical composition comprising a hydroxyalkoxylated AON provided herein and a pharmaceutically acceptable carrier.

[0016] In another embodiment, provided is a method of preventing, treating, and/or delaying Duchenne Muscular Dystrophy (DMD), comprising administering to a subject a hydroxyalkoxylated AON provided herein or a pharmaceutical composition provided herein.

[0017] In another embodiment, provided is a method of inducing skipping of exon 51 of the dystrophin pre-mRNA by contacting the dystrophin pre-mRNA with a hydroxyalkoxylated AON provided herein.

[0018] In some embodiments, linking an AON described herein to one or two hydroxyalkoxy moieties leads to a hydroxyalkoxylated AON that shows improved characteristics for treatment of genetic disorders, such as DMD, as compared to the AON lacking a hydroxyalkoxy group.

### BRIEF DESCRIPTION OF THE FIGURES

[0019] FIG. 1 shows dystrophin expression and exon skipping levels in quadriceps and heart of hDMDΔ52/mdx mice treated with the AON with SEQ ID NO: 22333 (“Cmpd 1”, 18 mg/kg) or the PS-linked hydroxyalkoxylated AON with SEQ ID NO: 22345 (“Cmpd 2 PS”, 18.7 mg/kg) compared to mice treated with vehicle in a 13-week treatment (by weekly intravenous tail vein injections).

[0020] FIG. 2 shows dystrophin expression and exon skipping levels in quadriceps of hDMDΔ52/mdx mice treated with the PS-linked hydroxyalkoxylated AON with SEQ ID NO: 22345 (Cmpd 2 PS, 9.4, 18.7 or 37.5 mg/kg) at 14 or 28 days post-dosing QW, Q2W or Q4W.

[0021] FIG. 3A shows effects of the AON with SEQ ID NO: 22333 (Cmpd 1) or the PS-linked or PO-linked hydroxyalkoxylated AON with SEQ ID NO: 22345 (Cmpd 2 PS or Cmpd 2 PO, respectively) on liver function measured by alkaline phosphatase (“ALP”), alanine aminotransferase (“ALT”) and aspartate transaminase (“AST”) levels in healthy CD-1 mice.

[0022] FIG. 3B shows effects of the AON with SEQ ID NO: 22333 (Cmpd 1) or the hydroxyalkoxylated AON with SEQ ID NO: 22345 (Cmpd 2 PS) on liver function measured by alanine aminotransferase (“ALT”) and aspartate transaminase (“AST”) levels in hDMDΔ52/mdx mice. FIG. 3C shows effects of the hydroxyalkoxylated AON with SEQ ID NO. 22345 (Cmpd 2 PS) on kidney function in hDMDΔ52/mdx mice.

[0023] FIG. 4 shows effects of the AON with SEQ ID NO: 22333 (Cmpd 1) or the hydroxyalkoxylated AON with SEQ ID NO: 22345 (Cmpd 2 PO) on complement parameters Bb and C3a.

[0024] FIG. 5 shows dose proportional plasma pK (AON concentration) of the AON with SEQ ID NO: 22333 (Cmpd 1) or the hydroxyalkoxylated AON with SEQ ID NO: 22345 (Cmpd 2 PO) at day 1, 22 and 50 post-dosing.

[0025] FIG. 6 shows significant improvement in functional motor endpoints (distance from wild-type) for the hydroxyalkoxylated AON with SEQ ID NO: 22345 (Cmpd 2 PS) in hDMDΔ52/mdx mice compared to vehicle in wild-type mice and hDMDΔ52/mdx mice.

[0026] FIG. 7 shows correction of biomarkers (nNOS, C4 binding protein, Fibrinogen g3) after treatment with the AON with SEQ ID NO: 22333 (Cmpd 1) in hDMDΔ52/mdx mice compared to vehicle in wild-type mice and hDMDΔ52/mdx mice.

[0027] FIG. 8 shows effects on body weight of hDMDΔ52/mdx mice treated with the AON with SEQ ID NO: 22333 (Cmpd 1) compared to the vehicle-treated wild-type and hDMDΔ52/mdx mice.

### DETAILED DESCRIPTION

### Definitions

[0028] As used herein, when the word “oligonucleotide” is used it may be replaced by “antisense oligonucleotide” and vice versa as defined herein unless otherwise indicated.

[0029] As used herein, the term “complementary” encompasses both forward complementary and reverse complementary sequences, as will be apparent to a skilled person from the context. When an oligonucleotide is complementary, it is understood that it can also be reverse complementary. As such, when “an oligonucleotide is complementary to” a target sequence is used, this means that said oligonucleotide is reverse complementary to said target sequence as the sequence of the oligonucleotide is the reverse complement of the target sequence, unless otherwise stated. When “an antisense oligonucleotide is complementary to” a target sequence is used, this means that said antisense oligonucleotide is complementary to said target sequence as the sequence of the antisense oligonucleotide is the reverse of the target sequence, unless otherwise stated.

[0030] As used herein, “hydroxyalkoxylated AON consisting of one antisense oligonucleotide and one or two hydroxyalkoxy groups” means that the antisense oligonucleotide is attached to one or two hydroxyalkoxy groups (as described in the section entitled “Hydroxyalkoxy Groups”) and hence form one molecule. In one embodiment, the linkage between the antisense oligonucleotide and a hydroxyalkoxy group is covalent. The linkage may be, in some embodiments, a phosphate (i.e., —P(O)(OH)—) linkage (“PO”) or, in other embodiments, a thiophosphate (i.e., —P(S)(OH)—) linkage (“PS”).

[0031] As used herein, “an oligonucleotide consisting of 2′-O-methyl RNA monomers linked by or connected through phosphorothioate backbone linkages” may be replaced by “an oligonucleotide consisting of 2′-O-methyl phosphorothioate RNA”. In this disclosure, such terms are synonymous.

[0032] As used herein, the expression “a hydroxyalkoxy group present at the 5′ or 3′ terminal monomer of an AON” may be interchanged throughout the document with “a hydroxyalkoxy group linked to the 5′ or 3′ terminal monomer of an AON” as they have an identical meaning in this context.

[0033] As used herein, “5′ or 3′ terminal monomer” has the same meaning as and can be used interchangeably with “the monomer at the 5′ or 3′ terminus”.

[0034] As used herein, unless otherwise specified, “a fragment of a SEQ ID NO:” means a nucleotide sequence comprising or consisting of at least 8, 9, 10, 11, 12, 13, 14, 15, 16, 17 or 18 contiguous nucleotides from said SEQ ID NO, or at least 10 contiguous nucleotides, or at least 16 contiguous nucleotides. As such, “a fragment of a SEQ ID NO:” means a nucleotide sequence which comprises or consists of said SEQ ID NO, wherein no more than 10, 9, 8, 7, 6, 5, 4, 3, 2 or 1 contiguous nucleotides are missing, no more than 8 contiguous nucleotides, or no more than 5 contiguous nucleotides are missing. In another embodiment, “a fragment of a SEQ ID NO:” means a nucleotide sequence comprising or consisting of an amount of contiguous nucleotides from said SEQ ID NO and wherein said amount of contiguous nucleotides is at least 50%, 60%, 70%, 80%, 90%, 91%, 92%, 93%, 94%, 95; 96%, 97%, 98% or 99% of the length of said SEQ ID NO. As such, “a fragment of a SEQ ID NO:” means a nucleotide sequence which comprises or consists of said SEQ ID NO, wherein an amount of contiguous nucleotides are missing and wherein said amount is no more than 50%, 45%, 40%, 35%, 30%, 25%, 20%, 15%, 10%, 5%, 4%, 3%, 2% or 1%, in one embodiment, no more than 20%, or no more than 10%, of the length of said SEQ ID NO.

[0035] As used herein, the term “(reverse) complementarity” means a stretch of nucleic acids that can hybridize to another stretch of nucleic acids under physiological conditions. An antisense strand is generally said to be complementary to a matching sense strand. In this context, an antisense oligonucleotide is complementary to its target. Hybridization conditions are defined herein. It is thus not absolutely required that all the bases in the region of complementarity are capable of pairing with bases in the opposing strand. For instance, when designing an antisense oligonucleotide, one may want to incorporate for instance a residue that does not base pair with the base on the complementary strand. Mismatches may to some extent be allowed, if under the circumstances in the cell, the stretch of nucleotides is capable of hybridizing to the complementary part.

[0036] As used herein, unless mentioned otherwise, the term “binds to” can be replaced with “complementary to”, “hybridizes to”, “overlaps with” and/or “targets” when used in the context of an antisense oligonucleotide which is complementary to a part of a pre-mRNA as identified herein. In this disclosure, such terms are synonymous. As used herein, “hybridizes” is used under physiological conditions in a cell. In one embodiment, the cell is a muscle cell unless otherwise indicated.

[0037] As used herein, “carbohydrate cluster” means a compound having one or more carbohydrate residues attached to a scaffold or hydroxyalkoxy group, (see, e.g., Maier et al., “Synthesis of Antisense Oligonucleotides Linked to a Multivalent Carbohydrate Cluster for Cellular Targeting,” Bioconjugate Chem., 2003, (14): 18-29; Rensen et al., “Design and Synthesis of Novel N-Acetylgalactosamine-Terminated Glycolipids for Targeting of Lipoproteins to the Hepatic Asiaglycoprotein Receptor,” J. Med. Chem. 2004, (47): 5798-5808).

[0038] As used herein, “carbohydrate” means a naturally occurring carbohydrate, a modified carbohydrate, or a carbohydrate derivative.

[0039] As used herein, “modified carbohydrate” means a naturally occurring carbohydrate having one or more chemical modifications.

[0040] As used herein, “carbohydrate derivative” means any compound which may be synthesized using a naturally occurring carbohydrate as a starting material or intermediate.

[0041] As used herein, a “dystrophin pre-mRNA” means a pre-mRNA of a dystrophin gene coding for a dystrophin protein. A mutated dystrophin pre-mRNA corresponds to a pre-mRNA of a DMD patient with a mutation when compared to a wild type dystrophin pre-mRNA of a non-affected person, resulting in reduced levels or the absence of functional dystrophin (DMD).

[0042] As used herein, a “patient” means a subject having DMD as defined herein or a subject susceptible to develop DMD due to his genetic background.

[0043] As used herein, a “functional dystrophin” is a wild type dystrophin corresponding to a protein having the amino acid sequence as identified in SEQ ID NO: 1. As defined herein, a semi-functional dystrophin is a BMD-like dystrophin corresponding to a protein having an actin binding domain in its N terminal part (first 240 amino acids at the N terminus), a cysteine-rich domain (amino acid 3361 till 3685) and a C terminal domain (last 325 amino acids at the C terminus) each of these domains being present in a wild type dystrophin as known to the skilled person. The amino acids indicated herein correspond to amino acids of the wild type dystrophin being represented by SEQ ID NO: 1. In other words, a functional or a semi-functional dystrophin is a dystrophin which exhibits at least to some extent an activity of a wild type dystrophin. “At least to some extent” means at least 10%, 20%, 30%, 40%, 50%, 60%, 70%, 80%, 90%, 95% or 100% of a corresponding activity of a wild type functional dystrophin. In one embodiment, an activity of a functional dystrophin is binding to actin and to the dystrophin-associated glycoprotein complex (DGC or DAPC) (Ehmsen J et al, J. Cell Sci. 2002, 115 (Pt14): 2801-2803).

[0044] The terms “thymine” and “5-methyluracil” may be interchanged throughout the document. As used herein the expression “oligonucleotide comprises a 5-methylpyrimidine” means that at least one of the cytosine nucleobases of said oligonucleotide has being modified by substitution of the hydrogen at the 5-position of the pyrimidine ring with a methyl group, i.e. a 5-substituted cytosine, and/or that at least one of the uracil nucleobases of said oligonucleotide has been modified by substitution of the proton at the 5-position of the pyrimidine ring with a methyl group (i.e. a 5-methyluracil). As used herein, the expression “the substitution of a hydrogen with a methyl group in position 5 of the pyrimidine ring” may be replaced by the expression “the substitution of a pyrimidine with a 5-methylpyrimidine,” with pyrimidine referring to only uracil, only cytosine, or both.

[0045] As used herein, reference to an element by the indefinite article “a” or “an” does not exclude the possibility that more than one of the element is present, unless the context clearly requires that there be one and only one of the elements. The indefinite article “a” or “an” thus usually means “at least one”.

[0046] Each embodiment as identified herein may be combined together unless otherwise indicated. All patent, patent application publication and literature references cited in the present specification are hereby incorporated by reference in their entirety and for all intents and purposes.

[0047] When a structural formula or chemical name is understood by the skilled person to have chiral centers, yet no chirality is indicated, for each chiral center individual reference is made to all three of either the racemic mixture, the pure R enantiomer, and the pure S enantiomer.

[0048] Whenever a parameter of a substance is discussed herein, it is assumed that unless otherwise specified, the parameter is determined, measured, or manifested under physiological conditions. Physiological conditions are known to a person skilled in the art, and comprise aqueous solvent systems, atmospheric pressure, pH-values between 6 and 8, a temperature ranging from room temperature to about 37° C. (from about 20° C. to about 40° C.), and a suitable concentration of buffer salts or other components. It is understood that charge is often associated with equilibrium. A moiety that is said to carry or bear a charge is a moiety that will be found in a state where it bears or carries such a charge more often than that it does not bear or carry such a charge. As such, an atom that is indicated in this disclosure to be charged could be non-charged under specific conditions, and a neutral moiety could be charged under specific conditions, as is understood by a person skilled in the art.

[0049] As used herein, “modulation” refers to a perturbation of amount or quality of a function or activity when compared to the function or activity prior to modulation. For example, modulation includes the change, either an increase (stimulation or induction) or a decrease (inhibition or reduction) in dystrophin mRNA or protein as defined earlier herein. As a further example, modulation of expression can include perturbing splice site selection of pre-mRNA processing, resulting in a change in the amount of a particular splice-variant present compared to conditions that were not perturbed.

[0050] Generally, a substitution replaces one chemical group, which might be hydrogen, by another chemical group. When considering the carbon skeleton of organic molecules, an RNA monomer is inherently 2′-substituted because it has a hydroxyl group at its 2′-position. A DNA monomer would therefore not be 2′-substituted, and an RNA monomer can be seen as a 2′-substituted DNA monomer. When an RNA monomer in turn is 2′-substituted, this substitution can have replaced either the 2′-OH or the 2′-H. When an RNA monomer is 2′-O-substituted, this substitution replaces the H of the 2′-OH moiety. As a non-limiting example, 2′-O-methyl RNA is a 2′-substituted monomer (—OMe substitutes —H) and a 2′-substituted RNA monomer (—OMe substitutes —OH) and a 2′-O-substituted RNA monomer (-Me substitutes —H), while 2′-F RNA is a 2′-substituted RNA monomer (—F substitutes —OH or —H) yet not a 2′-O-substituted RNA monomer (2′-0 is either no longer present, or is not substituted). 2′-F RNA where F is substituted for 2′-OH is a 2′-F-2′-deoxy RNA, which is also a 2′-F DNA.

[0051] In one embodiment, a decrease or increase of a parameter to be assessed means a change of at least 5% of the value corresponding to that parameter. In another embodiment, a decrease or increase of the value means a change of at least 10%, at least 20%, at least 30%, at least 40%, at least 50%, at least 70%, at least 90%, or 100%. In this latter case, it can be the case that there is no longer a detectable value associated with the parameter.

[0052] The use of a substance as a medicament as described herein can also be interpreted as the use of said substance in the manufacture of a medicament. Similarly, whenever a substance is used for treatment or as a medicament, it can also be used for the manufacture of a medicament for treatment.

[0053] As used herein, the word “about” or “approximately” when used in association with a numerical value (e.g. about 10) means that the value may be the given value (of 10) more or less 0.1% of the value.

[0054] As will be understood by a skilled person, throughout this application, the terms “BNA”, “BNA scaffold”, “BNA nucleotide”, “BNA nucleoside”, “BNA modification”, or “BNA scaffold modification” may be replaced by conformationally restricted scaffold modification, locked scaffold modification, locked nucleotide, locked nucleoside, locked monomer, or Tm enhancing scaffold modification, or high-affinity modification and the like, as appropriate.

[0055] As used herein, “sequence identity” means a relationship between two or more nucleic acid (polynucleotide, nucleic acid or nucleotide or oligonucleotide) sequences, as determined by comparing the sequences. In one embodiment, sequence identity is calculated based on the full length of two given SEQ ID NO or on part thereof. Part thereof means at least 50%, 60%, 70%, 80%, 90%, or 100% of both SEQ ID NO. As used herein, “identity” also means the degree of sequence relatedness between nucleic acid sequences, as the case may be, as determined by the match between strings of such sequences.

[0056] Methods to determine identity are designed to give the largest match between the sequences tested. Methods to determine identity and similarity are codified in publicly available computer programs. Computer program methods to determine identity and similarity between two sequences include, e.g., the GCG program package (Devereux, J., et al., Nucleic Acids Research 12 (1): 387 (1984)), BestFit, BLASTN, and FASTA (Altschul, S. F. et al., J. Mol. Biol. 215:403-410 (1990)). The BLAST X program is publicly available from NCBI and other sources (BLAST Manual, Altschul, S., et al., NCBI NLM NIH Bethesda, Md. 20894; Altschul, S., et al., J. Mol. Biol. 215:403-410 (1990)). The well-known Smith Waterman algorithm may also be used to determine identity.

[0057] Parameters for nucleic acid comparison include the following: Algorithm: Needleman and Wunsch, J. Mol. Biol. 48:443-453 (1970); Comparison matrix: matches=+10, mismatch=0; Gap Penalty: 50; Gap Length Penalty: 3. Available as the Gap program from Genetics Computer Group, located in Madison, Wis.

[0058] Hybridization conditions for a nucleic acid molecules may have low or medium or high stringency (southern blotting procedures). Low or medium or high stringency conditions means pre-hybridization and hybridization at 42° C. in 5×SSPE, 0.3% SDS, 200 pg/ml sheared and denatured salmon sperm DNA, and either 25% or 35% or 50% formamide for low or medium or high stringencies respectively. Subsequently, the hybridization reaction is washed three times for 30 minutes each using 2×SSC, 0.2% SDS and either 55° C. or 65° C., or 75° C. for low or medium or high stringencies respectively.

[0059] Hydroxyalkoxylated AONs

[0060] In one embodiment, provided is a hydroxyalkoxylated AON consisting or consisting essentially of one antisense oligonucleotide (AON) and an ethylene glycol monomer, ethylene glycol oligomer or ethylene glycol polymer, wherein the antisense oligonucleotide is represented by a nucleotide sequence comprising or consisting of:

[0061] any one of SEQ ID NO: 9-404, or any one of SEQ ID NO: 9-11, or

[0062] a fragment of any one of SEQ ID NO: 9-404, or of any one of SEQ ID NO: 9-11 or

[0063] any one of SEQ ID NO: 9-404, or any one of SEQ ID NO: 9-11, with 1, 2, 3, 4, or 5 additional nucleotides, or

[0064] any one of SEQ ID NO: 9-404, or any one of SEQ ID NO: 9-11, with 1, 2, 3, 4, or 5 nucleotides missing from said SEQ ID NO, or

[0065] a nucleotide sequence which has at least 90%, 91%, 92%, 93%, 94%, 95%, 96%, 97%, 98% or 99%, or at least 95%, or at least 97%, identity with any one of SEQ ID NO: 9-404, or with any one of SEQ ID NO: 9-11,

[0066] and wherein said AON consists of 2′-O-methyl RNA monomers linked by phosphorothioate backbone linkages, for use as a medicament, or for treating, preventing and/or delaying Duchenne Muscular Dystrophy (DMD), or for inducing skipping of exon 51 of the dystrophin pre-mRNA. In one embodiment, said exon 51 of dystrophin pre-mRNA is from a human and is represented by a nucleotide sequence with SEQ ID NO: 2.

[0067] In one embodiment, said 1, 2, 3, 4 or 5 additional nucleotides may be present at the 5′ and/or 3′ terminus of any one of SEQ ID NO: 9-404. In another embodiment, said 1, 2, 3, 4 or 5 missing nucleotides may be nucleotides present at the 5′ and/or 3′ terminus of any one of SEQ ID NO: 9-404.

[0068] In another embodiment, provided is a hydroxyalkoxylated AON consisting or consisting essentially of one antisense oligonucleotide (AON) and one or two hydroxyalkoxy groups, said hydroxyalkoxy groups comprise or consist of an ethylene glycol monomer, ethylene glycol oligomer or ethylene glycol polymer, wherein said antisense oligonucleotide is represented by a nucleotide sequence comprising or consisting of:

[0069] any one of SEQ ID NO: 9-404, or any one of SEQ ID NO: 9-11, or

[0070] a fragment of any one of SEQ ID NO: 9-404, or any one of SEQ ID NO: 9-11 or

[0071] any one of SEQ ID NO: 9-404, or any one of SEQ ID NO: 9-11, with 1, 2, 3, 4, or 5 additional nucleotides, or

[0072] any one of SEQ ID NO: 9-404, or any one with SEQ ID NO: 9-11, with 1, 2, 3, 4, or 5 nucleotides missing from said SEQ ID NO, or

[0073] a nucleotide sequence which has at least 90%, 91%, 92%, 93%, 94%, 95%, 96%, 97%, 98% or 99%, or at least 95%, or at least 97%, identity with any one of SEQ ID NO: 9-404, or with any one of SEQ ID NO: 9-11,

[0074] and wherein said AON consists of 2′-O-methyl RNA monomers linked by phosphorothioate backbone linkages, for use as a medicament, or for treating, preventing and/or delaying Duchenne Muscular Dystrophy (DMD), or for inducing skipping of exon 51 of the dystrophin pre-mRNA. In one embodiment, said exon 51 of dystrophin pre-mRNA is from a human and is represented by a nucleotide sequence with SEQ ID NO: 2.

[0075] In one embodiment, said 1, 2, 3, 4 or 5 additional nucleotides may be present at the 5′ and/or 3′ terminus of any one of SEQ ID NO: 9-404. In another embodiment, said 1, 2, 3, 4 or 5 missing nucleotides may be nucleotides present at the 5′ and/or 3′ terminus of any one of SEQ ID NO: 9-404.

[0076] In some embodiments, a hydroxyalkoxy group of the hydroxyalkoxylated AON provided herein is present at the 5′ terminal monomer or the 3′ terminal monomer of said antisense oligonucleotide, or a first hydroxyalkoxy group is present at the 5′ terminal monomer and a second hydroxyalkoxy group is present at the 3′ terminal monomer of said antisense oligonucleotide. In some embodiments, a hydroxyalkoxy group of the hydroxyalkoxylated AON as described herein is present at the 5′ terminal monomer of said antisense oligonucleotide. In some embodiments, at least one hydroxyalkoxy group, or all hydroxyalkoxy groups of the hydroxyalkoxylated AON, comprises or consists of an ethylene glycol monomer, ethylene glycol oligomer or ethylene glycol polymer (as described in the section “Hydroxyalkoxy Groups”).

[0077] In one embodiment, provided is a hydroxyalkoxylated AON consisting or consisting essentially of one antisense oligonucleotide (AON) and one hydroxyalkoxy group (as described in the section “Hydroxyalkoxy Groups”), said hydroxyalkoxy group comprises or consists of an ethylene glycol monomer, ethylene glycol oligomer or ethylene glycol polymer, wherein said AON is represented by a nucleotide sequence as defined herein and wherein said AON consists of 2′-O-methyl RNA monomers linked by phosphorothioate backbone linkages, for use as a medicament, or for treating, preventing and/or delaying Duchenne Muscular Dystrophy (DMD), or for inducing skipping of exon 51 of the dystrophin pre-mRNA. In one embodiment, said exon 51 of dystrophin pre-mRNA is from a human and is represented by a nucleotide sequence with SEQ ID NO: 2. In one embodiment, said hydroxyalkoxy group is linked to the 5′ terminal monomer or the 3′ terminal monomer of said AON. In one embodiment, said hydroxyalkoxy group is linked to the 5′ terminal monomer of said AON. In another embodiment, said hydroxyalkoxy group is linked to the 3′ terminal monomer of said AON. In one embodiment, the linkage between the antisense oligonucleotide and a hydroxyalkoxy group is covalent.

[0078] In one embodiment, provided is a hydroxyalkoxylated AON consisting or consisting essentially of one antisense oligonucleotide (AON) and two hydroxyalkoxy groups (as described in the section “Hydroxyalkoxy Groups”), wherein at least one hydroxyalkoxy group, or both hydroxyalkoxy groups, comprises or consists of an ethylene glycol monomer, ethylene glycol oligomer or ethylene glycol polymer, wherein said AON is represented by a nucleotide sequence as defined herein and wherein said AON consists of 2′-O-methyl RNA monomers linked by phosphorothioate backbone linkages, for use as a medicament, or for treating, preventing and/or delaying Duchenne Muscular Dystrophy (DMD). In one embodiment, the hydroxyalkoxylated AON induces skipping of exon 51 of the dystrophin pre-mRNA. In one embodiment, said exon 51 of dystrophin pre-mRNA is from a human and is represented by a nucleotide sequence with SEQ ID NO: 2. In one embodiment, the first hydroxyalkoxy group is linked to the 5′ terminal monomer and the second hydroxyalkoxy group is linked to the 3′ terminal monomer of said AON. In one embodiment, the linkage between the antisense oligonucleotide and a hydroxyalkoxy group is covalent.

[0079] Dystrophin Exon

[0080] Throughout this application, unless explicitly specified otherwise, a hydroxyalkoxylated AON is for skipping exon 51 of dystrophin pre-mRNA.

[0081] In one embodiment, said exon 51 of dystrophin pre-mRNA is from a human and is represented by the following nucleotide sequence:

(SEQ ID NO: 2)
5′-CUCCUACUCAGACUGUUACUCUGGUGACACAACCUGUGGUUACUAAG
GAAACUGCCAUCUCCAAACUAGAAAUGCCAUCUUCCUUGAUGUUGGAGGU
ACCUGCUCUGGCAGAUUUCAACCGGGCUUGGACAGAACUUACCGACUGGC
UUUCUCUGCUUGAUCAAGUUAUAAAAUCACAGAGGGUGAUGGUGGGUGAC
CUUGAGGAUAUCAACGAGAUGAUCAUCAAGCAGAAG-3′.

[0082] Antisense Oligonucleotide of the Hydroxyalkoxylated AON

[0083] In one embodiment, provided is a hydroxyalkoxylated AON consisting or consisting essentially of one antisense oligonucleotide and one or two hydroxyalkoxy groups (as described in the section entitled “Hydroxyalkoxy Groups”), wherein said antisense oligonucleotide is represented by a nucleotide sequence comprising or consisting of any one of SEQ ID NO: 9-404, or any one of SEQ ID NO: 9-11, or a fragment thereof, and wherein said antisense oligonucleotide consists of 2′-O-methyl RNA monomers linked by phosphorothioate backbone linkages. The antisense oligonucleotide of the hydroxyalkoxylated AON may additionally have any of the chemistries disclosed herein or combinations thereof (as described in the section “Chemical modifications of the antisense oligonucleotide of the hydroxyalkoxylated AON”).

[0084] In one embodiment, said fragment of a SEQ ID NO has dystrophin pre-mRNA exon 51 skipping activity.

[0085] In another embodiment provided is a hydroxyalkoxylated AON consisting or consisting essentially of one antisense oligonucleotide and one or two hydroxyalkoxy groups (as described in the section entitled “Hydroxyalkoxy Groups”), wherein said antisense oligonucleotide is represented by a nucleotide sequence comprising or consisting of a nucleotide sequence which has at least 90%, 91%, 92%, 93%, 94%, 95%, 96%, 97%, 98% or 99%, in one embodiment at least 95%, or at least 97%, identity with any one of SEQ ID NO: 9-404, or any one of SEQ ID NO: 9-11 and wherein said antisense oligonucleotide consists of 2′-O-methyl RNA monomers linked by phosphorothioate backbone linkages. In one embodiment, said antisense oligonucleotide has dystrophin pre-mRNA exon 51 skipping activity.

[0086] The antisense oligonucleotide of the hydroxyalkoxylated AON may additionally have any of the modifications disclosed herein or combinations thereof (as described in the section “Chemical modifications of the antisense oligonucleotide of the hydroxyalkoxylated AON”).

[0087] In one embodiment, provided is a hydroxyalkoxylated AON, for skipping exon 51, consisting or consisting essentially of one antisense oligonucleotide (AON) and one or two hydroxyalkoxy groups (as described in the section entitled “Hydroxyalkoxy Groups”). In one embodiment, said hydroxyalkoxy group is a triethylene glycol (TEG) group, wherein said antisense oligonucleotide is represented by a nucleotide sequence comprising or consisting of:

[0088] any one of SEQ ID NO: 9-404, or any one of SEQ ID NO: 9-11, or

[0089] a fragment of any one of SEQ ID NO: 9-404, or any one of SEQ ID NO: 9-11 or

[0090] any one of SEQ ID NO: 9-404, or any one of SEQ ID NO: 9-11, with 1, 2, 3, 4, or 5 additional nucleotides, or

[0091] any one of SEQ ID NO: 9-404, or any one of SEQ ID NO: 9-11, with 1, 2, 3, 4, or 5 nucleotides missing from said SEQ ID NO, or

[0092] a nucleotide sequence which has at least 90%, 91%, 92%, 93%, 94%, 95%, 96%, 97%, 98% or 99%, or at least 95%, or at least 97%, identity with any on of SEQ ID NO: 9-404, or any one of SEQ ID NO: 9-11,

[0093] and wherein said AON consists of 2′-O-methyl RNA monomers linked by phosphorothioate backbone linkages.

[0094] In one embodiment, said “1, 2, 3, 4 or 5 additional nucleotides” may be present at the 5′ and/or 3′ terminus of any one of SEQ ID NO: 9-404.

[0095] In another embodiment, said “1, 2, 3, 4 or 5 missing nucleotides” may be nucleotides missing at the 5′ and/or 3′ terminus of any one of SEQ ID NO: 9-404.

[0096] The antisense oligonucleotide of the hydroxyalkoxylated AON may additionally have any of the chemistries disclosed herein or combinations thereof (as described in the section “Chemical modifications of the antisense oligonucleotide of the hydroxyalkoxylated AON”).

[0097] In some embodiments, there are 1 or 2 mismatch(es) in an oligonucleotide of 20 nucleotides or 1 to 4 mismatches in an oligonucleotide of 40 nucleotides as defined herein. In one embodiment, in an oligonucleotide of 10 to 33 nucleotides, 0, 1, 2 or 3 mismatches are present. In another embodiment, 0, 1 or 2 mismatches are present. In further embodiments, in an oligonucleotide of 16 to 22 nucleotides, 0, 1 or 2 mismatches are present, or 0 or 1 mismatch(es) is(are) present.

[0098] In another embodiment, a hydroxyalkoxylated AON as described herein is for skipping exon 51 of the pre-mRNA of dystrophin.

[0099] In one embodiment, a hydroxyalkoxylated AON as described herein is for skipping exon 51 of the pre-mRNA of dystrophin, and consists or consists essentially of one antisense oligonucleotide and a hydroxyalkoxy group (as described in the section entitled “Hydroxyalkoxy Groups”), said hydroxyalkoxy group is triethylene glycol (TEG), wherein said antisense oligonucleotide is represented by a nucleotide sequence comprising or consisting of any one of SEQ ID NO: 9-404, and wherein said antisense oligonucleotide consists of 2′-O-methyl RNA monomers linked by phosphorothioate backbone linkages.

[0100] In certain embodiments, a hydroxyalkoxy group (as described in the section entitled “Hydroxyalkoxy Groups”) of the hydroxyalkoxylated AON as described herein may be present at the 5′ terminal monomer or at the 3′ terminal monomer of the antisense oligonucleotide. If the hydroxyalkoxylated AON consists of one antisense oligonucleotide and two hydroxyalkoxy groups, a first hydroxyalkoxy group is present at the 5′ terminal monomer and a second hydroxyalkoxy group is present at the 3′ terminal monomer of said antisense oligonucleotide.

[0101] In one embodiment, a hydroxyalkoxylated AON consisting or consisting essentially of one antisense oligonucleotide and one or two hydroxyalkoxy groups (as described in the section “Hydroxyalkoxy Groups”), is represented by:

[0102] any one of SEQ ID NO: 405-800, if a hydroxyalkoxy group is present at the 5′ terminal monomer of the antisense oligonucleotide represented by any one of SEQ ID NO: 9-404, respectively,

[0103] or any one of SEQ ID NO: 405-407, if a hydroxyalkoxy group is present at the 5′ terminal monomer of the antisense oligonucleotide represented by any one of SEQ ID NO: 9-11, respectively; or

[0104] any one of SEQ ID NO: 801-1196, if a hydroxyalkoxy group is present at the 3′ terminal monomer of the antisense oligonucleotide represented by any one of SEQ ID NO: 9-404, respectively,

[0105] or any one of SEQ ID NO: 801-803, if a hydroxyalkoxy group is present at the 3′ terminal monomer of the antisense oligonucleotide represented by any one of SEQ ID NO: 9-11, respectively; or

[0106] any one of SEQ ID NO: 1197-1592, if a first hydroxyalkoxy group is present at the 5′ terminal monomer and a second hydroxyalkoxy group is present at the 3′ terminal monomer of the antisense oligonucleotide represented by any one of SEQ ID NO: 9-404,

[0107] or any one of SEQ ID NO: 1197-1199, if a first hydroxyalkoxy group is present at the 5′ terminal monomer and a second hydroxyalkoxy group is present at the 3′ terminal monomer of the antisense oligonucleotide represented by any one of SEQ ID NO: 9-11, respectively;

[0108] wherein said hydroxyalkoxy group, represented by n in the sequence listing, is a triethylene glycol (TEG) group.

[0109] In one embodiment, a hydroxyalkoxylated AON as described herein consists or consists essentially of one antisense oligonucleotide, represented by any one of SEQ ID NO: 9-11, and one or two hydroxyalkoxy groups (as described in the section “Hydroxyalkoxy Groups”), and can be represented by:

SEQ ID NO: 405
(nUCAAGGAAGAUGGCAUUUCU),
SEQ ID NO: 406
(nUCAAGGAAGAUGGCAUUUCUAG),
SEQ ID NO: 407
(nGGUAAGUUCUGUCCAAGC),

if a hydroxyalkoxy group is present at the 5′ terminal monomer of the antisense oligonucleotide represented by any one of SEQ ID NO: 9-11, respectively; or

[0110] SEQ ID NO: 801 (UCAAGGAAGAUGGCAUUUCUn), SEQ ID NO: 802 (UCAAGGAAGAUGGCAUUUCUAGn), SEQ ID NO: 803 (GGUAAGUUCUGUCCAAGCn), if a hydroxyalkoxy group is present at the 3′ terminal monomer of the antisense oligonucleotide represented by any one of SEQ ID NO: 9-11, respectively; or

[0111] SEQ ID NO: 1197 (nUCAAGGAAGAUGGCAUUUCUn), SEQ ID NO: 1198 (nUCAAGGAAGAUGGCAUUUCUAGn) and SEQ ID NO: 1199 (nGGUAAGUUCUGUCCAAGCn), if a first hydroxyalkoxy group is present at the 5′ terminal monomer and a second hydroxyalkoxy group is present at the 3′ terminal monomer of the antisense oligonucleotide represented by any one of SEQ ID NO: 9-11, respectively;

[0112] wherein said hydroxyalkoxy group, represented by n, is a triethylene glycol (TEG) group.

[0113] In one embodiment, said antisense oligonucleotide of the hydroxyalkoxylated AON described herein has a length of 8 to 33 nucleotides, of 12 to 24 nucleotides, of 13 to 23 nucleotides, or of 16 to 22 nucleotides. However, the length of said antisense oligonucleotide may be at least 8, 9, 10, 11, 12, 13, 14, 15, 16, 17, 18, 19, 20, 21, 22, 23, 24, 25, 26, 27, 28, 29, 30, 31 or 32 nucleotides.

[0114] In one embodiment, the antisense oligonucleotide of the hydroxyalkoxylated AON described herein is represented by a nucleotide sequence comprising any one of SEQ ID NO: 9-407, or any one of SEQ ID NO: 9-11, or a fragment thereof, wherein said nucleotide sequence or fragment is complementary to or binds to or targets or hybridizes to or overlaps with at least a part of an exonic splicing enhancer (ESE) sequence located within exon 51 of dystrophin pre-mRNA, wherein said exonic splicing enhancer (ESE) sequence is represented by SEQ ID NO: 3 (GGACAGAACUU) or SEQ ID NO: 5 (AUCUUC). Said binding or targeted or hybridized part may be at least 50% of the length of the antisense oligonucleotide, or at least 60%, or at least 70%, or at least 80%, or at least 90%, or at least 95%, or at least 98% and up to 100%. In one embodiment, said exonic splicing enhancer (ESE) sequence is represented by SEQ ID NO: 3. In another embodiment, said exonic splicing enhancer (ESE) sequence is represented by SEQ ID NO: 5.

[0115] In another embodiment, a hydroxyalkoxylated AON is provided wherein the antisense oligonucleotide is represented by a nucleotide sequence as defined herein and which has at least 95% identity with a contiguous stretch of at least 4, 5, 6, 7, 8, 9, 10 or 11 nucleotides, at least 8 nucleotides, at least 10 nucleotides, or all nucleotides of a reverse-complementary ESE sequence, wherein said reverse-complementary ESE sequence is SEQ ID NO: 4 or SEQ ID NO: 6. Said SEQ ID NO: 4 and SEQ ID NO: 6 represent the reverse-complement sequence of SEQ ID NO: 3 and SEQ ID NO: 5, respectively. Said contiguous stretch may be interrupted by one, two, three, four or more gaps as long as the identity percentage over the whole region is at least 95%, at least 96%, 97%, 98%, 99% or 100%. In one embodiment, the identity percentage over the whole region is at least 97%.

[0116] In one embodiment, said reverse-complementary ESE sequence is SEQ ID NO: 4. Examples of antisense oligonucleotides for use in the hydroxyalkoxylated AONs provided herein are represented by SEQ ID NO: 11-194.

[0117] In one embodiment, a hydroxyalkoxylated AON is provided consisting or consisting essentially of one antisense oligonucleotide and one or two hydroxyalkoxy groups, said hydroxyalkoxy groups comprise or consist of an ethylene glycol monomer, ethylene glycol oligomer or ethylene glycol polymer, wherein said antisense oligonucleotide is represented by a nucleotide sequence comprising or consisting of:

[0118] any one of SEQ ID NO: 11-194, or SEQ ID NO: 11, or

[0119] a fragment of any one of SEQ ID NO: 11-194, or SEQ ID NO: 11 or

[0120] any one of SEQ ID NO: 11-194, or SEQ ID NO: 11, with 1, 2, 3, 4, or 5 additional nucleotides, or

[0121] any one of SEQ ID NO: 11-194, or SEQ ID NO: 11, with 1, 2, 3, 4, or 5 nucleotides missing from said SEQ ID NO, or

[0122] a nucleotide sequence which has at least 90%, 91%, 92%, 93%, 94%, 95%, 96%, 97%, 98% or 99%, or at least 95%, or at least 97%, identity with any one of SEQ ID NO: 11-194, with SEQ ID NO: 11,

[0123] and wherein said AON consists of 2′-O-methyl RNA monomers linked by phosphorothioate backbone linkages, for use as a medicament, or for treating, preventing and/or delaying Duchenne Muscular Dystrophy (DMD), or for inducing skipping of exon 51 of the dystrophin pre-mRNA. In one embodiment, said exon 51 of dystrophin pre-mRNA is from a human and is represented by a nucleotide sequence with SEQ ID NO: 2.

[0124] In one embodiment, said 1, 2, 3, 4 or 5 additional nucleotides are present at the 5′ and/or 3′ terminus of any one of SEQ ID NO: 11-194. In another embodiment, said 1, 2, 3, 4 or 5 missing nucleotides are nucleotides present at the 5′ and/or 3′ terminus of any one of SEQ ID NO: 11-194.

[0125] In another embodiment, said reverse-complementary ESE sequences is SEQ ID NO: 6. Examples of antisense oligonucleotides for use in the hydroxyalkoxylated AONs provided herein are represented by SEQ ID NO: 195-395. It should be noted that SEQ ID NO: 195-196 are identical to SEQ ID NO: 9-10, respectively, and are interchangeable.

[0126] In one embodiment, provided is a hydroxyalkoxylated AON consisting or consisting essentially of one antisense oligonucleotide and one or two hydroxyalkoxy groups, said hydroxyalkoxy groups comprise or consist of an ethylene glycol monomer, ethylene glycol oligomer or ethylene glycol polymer, wherein said antisense oligonucleotide is represented by a nucleotide sequence comprising or consisting of:

[0127] any one of SEQ ID NO: 195-395, or any one of SEQ ID NO: 195-196, or

[0128] a fragment of any one of SEQ ID NO: 195-395, or any one of SEQ ID NO: 195-196 or

[0129] any one of SEQ ID NO: 195-395, or any one of SEQ ID NO: 195-196, with 1, 2, 3, 4, or 5 additional nucleotides, or

[0130] any one of SEQ ID NO: 195-395, or any one with SEQ ID NO: 195-196, with 1, 2, 3, 4, or 5 nucleotides missing from said SEQ ID NO, or

[0131] a nucleotide sequence which has at least 90%, 91%, 92%, 93%, 94%, 95%, 96%, 97%, 98% or 99%, or at least 95%, or at least 97%, identity with any one of SEQ ID NO: 195-395, or with any one of SEQ ID NO: 195-196,

[0132] and wherein said AON consists of 2′-O-methyl RNA monomers linked by phosphorothioate backbone linkages, for use as a medicament, or for treating, preventing and/or delaying Duchenne Muscular Dystrophy (DMD), or for inducing skipping of exon 51 of the dystrophin pre-mRNA. In one embodiment, said exon 51 of dystrophin pre-mRNA is from a human and is represented by a nucleotide sequence with SEQ ID NO: 2.

[0133] In one embodiment, said 1, 2, 3, 4 or 5 additional nucleotides are present at the 5′ and/or 3′ terminus of any one of SEQ ID NO: 195-395. In another embodiment, said 1, 2, 3, 4 or 5 missing nucleotides may be nucleotides present at the 5′ and/or 3′ terminus of any one of SEQ ID NO: 195-395.

[0134] Chemical Modifications of the Antisense Oligonucleotide of the Hydroxyalkoxylated AON

[0135] In one embodiment, the antisense oligonucleotide of the hydroxyalkoxylated AON provided herein consists of 2′-O-methyl RNA monomers linked by phosphorothioate backbone linkages and said antisense oligonucleotide is represented by a nucleotide sequence as defined herein (as described in the sections entitled “Hydroxyalkoxylated AON” and “Antisense oligonucleotide of the hydroxyalkoxylated AON”). In another embodiment, the phosphorothioate backbone linkages of said AON are chirally pure as described in, e.g., WO 2014/010250 (WaVe Life Sciences).

[0136] In another embodiment, the antisense oligonucleotide of the hydroxyalkoxylated AON can further comprise or consist of any chemical modification, or any combination thereof, as described herein. In one embodiment, a hydroxyalkoxylated AON described herein wherein said antisense oligonucleotide comprises or consists of any chemical modification, or any combination thereof, as described herein has an exon skipping activity that is at least as effective as said compound without said chemical modification or combination thereof. In one embodiment, said exon skipping activity is higher than said hydroxyalkoxylated AON without said chemical modification or combination thereof.

[0137] In one embodiment, said antisense oligonucleotide of the hydroxyalkoxylated AON is single stranded. The skilled person will understand that a single stranded oligonucleotide may form an internal double stranded structure. However, this oligonucleotide is still regarded as a single stranded oligonucleotide in this context.

[0138] In one embodiment, provided is a hydroxyalkoxylated AON wherein the antisense oligonucleotide consists of 2′-O-methyl RNA monomers linked by phosphorothioate backbone linkages and further comprise or consists of:

[0139] a 5-methylcytosine and/or a 5-methyluracil base, and/or

[0140] at least one monomer comprising a bicyclic nucleic acid (BNA) scaffold modification.

[0141] As known to the skilled person, an oligonucleotide such as an RNA oligonucleotide generally consists of repeating monomers. Such a monomer is most often a nucleotide or a nucleotide analogue. The most common naturally occurring nucleotides in RNA are adenosine monophosphate, cytidine monophosphate, guanosine monophosphate, thymidine monophosphate, and uridine monophosphate. These consist of a pentose sugar ribose, a 5′-linked phosphate group which is linked via a phosphate ester, and a 1′-linked base. The sugar connects the base and the phosphate, and is therefore often referred to as the scaffold of the nucleotide. A modification in the pentose sugar is therefore often referred to as a scaffold modification. For severe modifications, the original pentose sugar might be replaced in its entirety by another moiety that similarly connects the base and the phosphate. It is therefore understood that while a pentose sugar is often a scaffold, a scaffold is not necessarily a pentose sugar.

[0142] A base, sometimes called a nucleobase, is generally adenine, cytosine, guanine, thymine, or uracil, or a derivative thereof. Cytosine, thymine, and uracil are pyrimidine bases, and are generally linked to the scaffold through their 3′-nitrogen. Adenine and guanine are purine bases, and are generally linked to the scaffold through their 9′-nitrogen.

[0143] A nucleotide is generally connected to neighboring nucleotides through condensation of its 5′-phosphate moiety to the 3′-hydroxyl moiety of the neighboring nucleotide monomer. Similarly, its 3′-hydroxyl moiety is generally connected to the 5′-phosphate of a neighboring nucleotide monomer. This forms phosphodiester bonds. The phosphodiesters and the scaffold form an alternating copolymer. The bases are grafted to this copolymer, namely to the scaffold moieties. Because of this characteristic, the alternating copolymer formed by linked monomers of an oligonucleotide is often called the backbone of the oligonucleotide. Because the phosphodiester bonds connect neighboring monomers together, they are often referred to as backbone linkages. It is understood that when a phosphate group is modified so that it is instead an analogous moiety such as a phosphorothioate, such a moiety is still referred to as the backbone linkage of the monomer. This is referred to as a backbone linkage modification. In general terms, the backbone of an oligonucleotide is thus comprised of alternating scaffolds and backbone linkages.

[0144] In one embodiment, the antisense oligonucleotide of the hydroxyalkoxylated AON provided herein comprises a base modification that increases binding affinity to target strands, increases melting temperature of the resulting duplex of said oligonucleotide with its target, and/or decreases immunostimulatory effects, and/or increases biostability, and/or improves biodistribution and/or intra-tissue distribution, and/or cellular uptake and trafficking.

[0145] In one embodiment, said antisense oligonucleotide of the hydroxyalkoxylated AON provided herein comprises a 5-methylpyrimidine. In certain embodiments, the 5-methylpyrimidine is selected from 5-methylcytosine and/or 5-methyluracil and/or thymine, in which thymine is identical to 5-methyluracil. In other embodiments, if said oligonucleotide comprises 1, 2, 3, 4, 5, 6, 7, 8, 9, or more cytosines and/or uracils, at least 1, 2, 3, 4, 5, 6, 7, 8, 9, or more cytosines and/or uracils respectively have been modified this way.

[0146] In one embodiment, said antisense oligonucleotide of the hydroxyalkoxylated AON provided herein comprises at least one of either a 5-methylcytosine base or a 5-methyluracil base. In one embodiment, said antisense oligonucleotide of said hydroxyalkoxylated AON is provided wherein all cytosine bases are 5-methylcytosine bases, and optionally at least one uracil base is a 5-methyluracil base. In another embodiment, said antisense oligonucleotide of said hydroxyalkoxylated AON is provided wherein all cytosine bases are 5-methylcytosine bases, and optionally wherein also all uracil bases of said AON are 5-methyluracil bases.

[0147] In one embodiment, antisense oligonucleotides of the hydroxyalkoxylated AON described herein can be represented by any one of SEQ ID NO: 1593-1988, which correspond to any one of unmodified sequences SEQ ID NO: 9-404, respectively, wherein all cytosine bases are 5-methylcytosine bases.

[0148] In one embodiment, antisense oligonucleotides of the hydroxyalkoxylated AON described herein can be represented by any one of SEQ ID NO: 1593-1595, which correspond to any one of unmodified sequences SEQ ID NO: 9-11, respectively, wherein all cytosine bases are 5-methylcytosine bases.

[0149] In one embodiment, provided is a hydroxyalkoxylated AON, for skipping exon 51 of the pre-mRNA of dystrophin, consisting or consisting essentially of one antisense oligonucleotide and one or two hydroxyalkoxy groups (as described in the section “Hydroxyalkoxy Groups”), wherein said antisense oligonucleotide is represented by a nucleotide sequence comprising or consisting of any one of SEQ ID NO: 1593-1988 (derived from any one of SEQ ID NO: 9-404, wherein all cytosine bases are 5-methylcytosine bases), or any one of SEQ ID NO: 1593-1595 (derived from any one of SEQ ID NO: 9-11, wherein all cytosine bases are 5-methylcytosine bases), and wherein said hydroxyalkoxylated AON can be represented by:

[0150] any one of SEQ ID NO: 1989-2384, or any one of SEQ ID NO: 1989-1991, if a hydroxyalkoxy group is present at the 5′ terminal monomer of the antisense oligonucleotide; or

[0151] any one of SEQ ID NO: 2385-2780, or any one of SEQ ID NO: 2385-2387, if a hydroxyalkoxy group is present at the 3′ terminal monomer of the antisense oligonucleotide; or

[0152] any one of SEQ ID NO: 2781-3176, or any one of SEQ ID NO: 2781-2783, if a first hydroxyalkoxy group is present at the 5′ terminal monomer and a second hydroxyalkoxy group is present at the 3′ terminal monomer of the antisense oligonucleotide;

[0153] wherein said hydroxyalkoxy group, represented by n in the sequence listing, is a triethylene glycol (TEG) group.

[0154] In one embodiment, hydroxyalkoxylated AONs provided herein consist or consist essentially of one antisense oligonucleotide and one or two hydroxyalkoxy groups (as described in the section “Hydroxyalkoxy Groups”), wherein said antisense oligonucleotide is represented by a nucleotide sequence comprising or consisting of any one of SEQ ID NO: 1593-1595 (derived from any one of SEQ ID NO: 9-11, wherein all cytosine bases are 5-methylcytosine bases) and wherein said hydroxyalkoxylated AON can be represented by:

[0155] SEQ ID NO: 1989 (nUC*AAGGAAGAUGGC*AUUUC*U), SEQ ID NO: 1990 (nUC*AAGGAAGAUGGC*AUUUC*UAG), or SEQ ID NO: 1991 (nGGUAAGUUC*UGUC*C*AAGC*), if a hydroxyalkoxy group is present at the 5′ terminal monomer of the antisense oligonucleotide; or

[0156] SEQ ID NO: 2385 (UC*AAGGAAGAUGGC*AUUUC*Un), SEQ ID NO: 2386 (UC*AAGGAAGAUGGC*AUUUC*UAGn), or SEQ ID NO: 2387 (GGUAAGUUC*UGUC*C*AAGC*n), if a hydroxyalkoxy group is present at the 3′ terminal monomer of the antisense oligonucleotide; or

[0157] SEQ ID NO: 2781 (nUC*AAGGAAGAUGGC*AUUUC*Un), SEQ ID NO: 2782 (nUC*AAGGAAGAUGGC*AUUUC*UAGn) or SEQ ID NO: 2783 (nGGUAAGUUC*UGUC*C*AAGC*n), if a first hydroxyalkoxy group is present at the 5′ terminal monomer and a second hydroxyalkoxy group is present at the 3′ terminal monomer of the antisense oligonucleotide;

[0158] wherein said hydroxyalkoxy group, represented by n, is a triethylene glycol (TEG) group, and wherein C* is 5-methylcytosine.

[0159] In one embodiment, the antisense oligonucleotide of the hydroxyalkoxylated AON provided herein comprises a scaffold modification that increases binding affinity to target strands, and/or increases melting temperature of the resulting duplex of said first and/or second oligonucleotide with its target, and/or decreases immunostimulatory effects, and/or increases biostability, and/or improves biodistribution and/or intra-tissue distribution, and/or improves cellular uptake and trafficking.

[0160] In one embodiment, provided are those scaffold modifications that result in a bicyclic nucleic acid (BNA) monomer. A bicyclic scaffold is, in one embodiment, a pentose-derived scaffold that has been chemically altered to conformationally restrict the scaffold, leading to the improved effects above. Non-limiting examples of bicyclic scaffolds are scaffolds where a first cycle such as a pentose ring forms a spirane with a further cyclic moiety so that both cycles share only one atom, scaffolds where a first cycle such as a pentose cycle is fused to a further cyclic moiety so that both cycles share two adjacent atoms, and scaffolds where a first cycle such as a pentose cycle forms a bridged compound through a moiety that is linked to the first cyclic moiety at two non-adjacent atoms. Such non-adjacent atoms are referred to as bridgehead atoms. Bridged compounds comprise multiple cycles, each of which overlap over at least three atoms. A compound with two cycles wherein those cycles overlap over only two atoms is a fused compound instead. In some bridged compounds, the smallest link between two bridgehead atoms is referred to as the bridging moiety, or as the bridge moiety. In other bridged compounds, when one cycle is a characteristic cycle such as the pentose cycle of a nucleotide, the moiety that is not constitutive to that characteristic cycle is referred to as the bridging moiety. It follows that the nomenclature of bridged bicyclic compounds is context-dependent.

[chemical structure]

[0161] Bicyclic compounds can comprise additional cycles. A bicyclic compound contains at least two cycles, and said two cycles constitute a spirane, a fused system, or a bridged system, or a combination thereof. In one embodiment, not encompassed are scaffold modifications where two independent cycles are linked via a non-cyclic group, so as to not form a spirane, fused compound, or bridged compound. In one embodiment, bicyclic compounds are fused and bridged compounds. In some embodiments, a bicyclic nucleic acid monomer (BNA) is a bridged nucleic acid monomer.

[0162] In one embodiment, provided is a hydroxyalkoxylated AON wherein each occurrence of said bicyclic nucleic acid (BNA) scaffold modification in said antisense oligonucleotide results in a monomer that is independently chosen from the group consisting of a conformationally restricted nucleotide (CRN) monomer, a locked nucleic acid (LNA) monomer, a xylo-LNA monomer, an α-LNA monomer, an α-L-LNA monomer, a β-D-LNA monomer, a 2′-amino-LNA monomer, a 2′-(alkylamino)-LNA monomer, a 2′-(acylamino)-LNA monomer, a 2′-N-substituted-2′-amino-LNA monomer, a 2′-thio-LNA monomer, a (2′-O,4′-C) constrained ethyl (cEt) BNA monomer, a (2′-O,4′-C) constrained methoxyethyl (cMOE) BNA monomer, a 2′,4′-BNA^{NC}(N—H) monomer, a 2′,4′-BNA^{NC}(N-Me) monomer, a 2′,4′-BNA^{NC}(N-Bn) monomer, an ethylene-bridged nucleic acid (ENA) monomer, a carba LNA (cLNA) monomer, a 3,4-dihydro-2H-pyran nucleic acid (DpNA) monomer, a 2′-C-bridged bicyclic nucleotide (CBBN) monomer, a heterocyclic-bridged BNA monomer, an amido-bridged BNA monomer, an urea-bridged BNA monomer, a sulfonamide-bridged BNA monomer, a bicyclic carbocyclic nucleotide monomer, a TriNA monomer, an α-L-TriNA monomer, a bicyclo DNA (bcDNA) monomer, an F-bcDNA monomer, a tricyclo DNA (tcDNA) monomer, an F-tcDNA monomer, an oxetane nucleotide monomer, a locked PMO monomer derived from 2′-amino-LNA, and derivatives thereof. In one embodiment, more than one distinct scaffold BNA modification can be used in said oligonucleotide. In some embodiments, each occurrence of said BNA scaffold modification results in a monomer that is independently chosen from the group consisting of a conformationally restrained nucleotide (CRN) monomer, a locked nucleic acid (LNA) monomer, a xylo-LNA monomer, an α-L-LNA monomer, a β-D-LNA monomer, a 2′-amino-LNA monomer, a 2′-(alkylamino)-LNA monomer, a 2′-(acylamino)-LNA monomer, a 2′-N-substituted-2′-amino-LNA monomer, a (2′-O,4′-C) constrained ethyl (cEt) LNA monomer, a (2′-O,4′-C) constrained methoxyethyl (cMOE) BNA monomer, a 2′,4′-BNA^{NC}(N—H) monomer, a 2′,4′-BNA^{NC}(N-Me) monomer, an ethylene-bridged nucleic acid (ENA) monomer, a 2′-C-bridged bicyclic nucleotide (CBBN) monomer, and derivatives thereof. In one embodiment, each occurrence of said BNA scaffold modification is a locked nucleic acid (LNA) monomer.

[0163] Structural examples of monomers comprising these BNA scaffold modifications are shown below, where B is a base as defined herein, X is a variable and represents O, S or NR, where R is H or alkyl, X2 is a hydroxyl moiety or another 2′-substitution as defined herein, and L is a backbone linkage as described herein. As known to those of skill in the art, the naming of such modifications in the literature is often arbitrary and does not follow a uniform convention—in this application, the names as provided below are intended to refer to the structures provided below. For comparison, the cyclic scaffold of a conventional RNA monomer is shown first. In the structures shown below, monomers are typically depicted as 3′-terminal monomers. When chirality is not indicated, each enantiomer is individually referenced. A monomer resulting from the occurrence of a BNA scaffold modification in said antisense oligonucleotide of a hydroxyalkoxylated AON as described herein is not limited to this kind of monomers which are provided for illustrative purposes. Heteroatoms comprised in a cyclic moiety can be substituted by other heteroatoms, e.g., N, O or S.

[chemical structure]

[chemical structure]

[chemical structure]

[0164] In another embodiment, BNA scaffold modifications for use herein include cEt (2′-O,4′-C constrained ethyl) LNA (doi: 10.1021/ja710342q), cMOE (2′-O,4′-C constrained methoxyethyl) LNA (Seth et al., J. Org. Chem. 2010, 75, 1569-1581), 2′,4′-BNA^{NC}(N—H), 2′,4′-BNA^{NC}(N-Me), ethylene-bridged nucleic acid (ENA) (doi: 10.1093/nass/1.1.241), carba LNA (cLNA) (doi: 10.1021/jo100170g), DpNA (Osawa et al., J. Org. Chem., 2015, 80 (21), pp 10474-10481), 2′-C-bridged bicyclic nucleotide (CBBN, as in e.g. WO 2014/145356 (MiRagen Therapeutics)), heterocyclic-bridged LNA (as in e.g. WO 2014/126229 (Mitsuoka Y et al.)), amido-bridged LNA (as in e.g. Yamamoto et al. Org. Biomol. Chem. 2015, 13, 3757), urea-bridged LNA (as in e.g. Nishida et al. Chem. Commun. 2010, 46, 5283), sulfonamide-bridged LNA (as in e.g. WO 2014/112463 (Obika S et al.)), bicyclic carbocyclic nucleosides (as in e.g. WO 2015/142910 (Ions Pharmaceuticals)), TriNA (Hanessian et al., J. Org. Chem., 2013, 78 (18), pp 9064-9075), α-L-TriNA, bicyclo DNA (bcDNA) (Bolli et al., Chem Biol. 1996 March; 3(3):197-206), F-bcDNA (DOI: 10.1021/jo402690j), tricyclo DNA (tcDNA) (Murray et al., Nucl. Acids Res., 2012, Vol. 40, No. 13 6135-6143), F-tcDNA (doi: 10.1021/acs.joc.5b00184), or an oxetane nucleotide monomer (Nucleic Acids Res. 2004, 32, 5791-5799). In other embodiments, BNA scaffold modifications for use herein include those disclosed in WO 2011/097641 (ISIS/Ionis Pharmaceuticals) and WO 2016/017422 (Osaka University).

[0165] In one embodiment, the antisense oligonucleotide of the hydroxyalkoxylated AON provided herein comprises RNA monomers. In one embodiment, an RNA oligonucleotide comprises a modification providing the RNA with an additional property, for instance resistance to endonucleases, exonucleases, and RNaseH, additional hybridisation strength, increased stability (for instance in a bodily fluid), increased or decreased flexibility, increased activity, reduced toxicity, increased intracellular transport, increased cellular uptake, or tissue-specificity, etc. In one embodiment, the mRNA complexed with said oligonucleotide is resistant to RNaseH cleavage.

[0166] In one embodiment, provided is a hydroxyalkoxylated AON that consists of one antisense oligonucleotide (AON) and a hydroxyalkoxy group (as described in the section entitled “Hydroxyalkoxy Groups”), said hydroxyalkoxy group is a triethylene glycol (TEG) group, wherein said antisense oligonucleotide is represented by a nucleotide sequence as defined herein (as described in the sections entitled “Hydroxyalkoxylated AON” and “Antisense oligonucleotide of the hydroxyalkoxylated AON”), and wherein said antisense oligonucleotide comprises 2′-O-methyl phosphorothioate RNA monomers linked by phosphorothioate backbone linkages, said AON further comprises at least one BNA, and optionally at least one 5-methylpyrimidine base (i.e., 5-methylcytosine and/or 5-methyluracil) is present. Throughout this specification, reference to an antisense oligonucleotide comprising 2′-O-methyl (phosphorothioate) RNA monomers and further comprising a BNA means that there is at least one BNA in the AON with the remainder of the monomers (non-BNA) in the AON being 2′-O-methyl (phosphorothioate) RNA monomers. In one embodiment, all cytosine bases of said AON are 5-methylcytosine bases. In another embodiment, at least one but less than all cytosine bases of said AON are 5-methylcytosine bases. In another embodiment, 1, 2, 3, 4, 5, 6, 7, 8 or 9 cytosine bases of said AON are 5-methyl cytosine bases. In one embodiment, said AON of the hydroxyalkoxylated AON comprises 2′-O-methyl RNA monomers connected through a phosphorothioate backbone and all of its cytosines have been substituted by 5-methylcytosine, optionally also all of its uracils have been substituted by 5-methyluracil, and at least one 2′-O-methyl scaffold has been replaced by a BNA, or 1, 2, 3, 4, 5, 6, 7, 8 or 9 monomers are replaced by a BNA. In one embodiment, 1, 2, 3, 4, 5, 6, 7, 8 or 9 monomers are replaced by a bridged nucleic acid scaffold modification. In one embodiment, 1, 2, 3, 4, 5, 6, 7, 8 or 9 monomers are replaced by a LNA.

[0167] In one embodiment, provided is a hydroxyalkoxylated AON, wherein the antisense oligonucleotide of said hydroxyalkoxylated AON comprises 2′-O-substituted RNA monomers linked by phosphorothioate backbone linkages and comprises or consists of 1, 2, 3, 4, 5, 6, 7, 8 or 9 monomers that comprise a bicyclic nucleic acid (BNA) scaffold modification, a bridged nucleic acid scaffold modification, or a LNA modification, and wherein all cytosine bases are 5-methylcytosine, wherein also all uracil bases are 5-methyluracil bases in said AON of the hydroxyalkoxylated AON as described herein.

[0168] In other embodiments, at least one BNA scaffold modification is comprised in a terminal monomer of said antisense oligonucleotide of the hydroxyalkoxylated AON. In one embodiment, such modification is in the 5′-terminal monomer. In another embodiment, both terminal monomers comprise a BNA scaffold. In one embodiment, provided is an antisense oligonucleotide (AON) of the hydroxyalkoxylated AON wherein at least one bicyclic nucleic acid (BNA) scaffold modification is comprised in a terminal monomer of said AON. In one embodiment, such BNA modification is in the 5′-terminal monomer of said AON, or in both terminal monomers of said AON. In some embodiments, a terminal monomer and its neighboring monomer each comprise a BNA scaffold. In such a case, the first two monomers and/or the last two monomers of said antisense oligonucleotide of the hydroxyalkoxylated AON each comprise a BNA scaffold. This can be combined in any way, so that for example the first and the last two monomers, or the first two and the last monomer all comprise a BNA scaffold. When the antisense oligonucleotide of a hydroxyalkoxylated AON described herein comprises a terminal monomer comprising a BNA scaffold, additional monomers with a BNA scaffold are either at the other terminus, or adjacent to terminal monomers with a BNA scaffold.

[0169] In one embodiment, provided is a hydroxyalkoxylated AON wherein the antisense oligonucleotide of said hydroxyalkoxylated AON, comprises or consists of BNA modifications as selected from the set consisting of:
[0170] a single BNA scaffold modification in the monomer at the 5′-terminus,
[0171] a single BNA scaffold modification in the monomer at the 3′-terminus,
[0172] two BNA scaffold modifications where one is in the monomer at the 5′-terminus and the other is in the monomer at the 3′-terminus,
[0173] two BNA scaffold modifications, one in the monomer at the 5′-terminus and the other in the adjacent monomer,
[0174] two BNA scaffold modifications, one in the monomer at the 3′-terminus and the other in the adjacent monomer, and
[0175] four BNA scaffold modifications, one in the monomer at the 5′-terminus, one in the monomer adjacent to the 5′-terminus, one in the monomer at the 3′-terminus and one in the monomer adjacent to the 3′-terminus;

[0176] optionally 1, 2, 3, 4 or 5 additional BNA scaffold modifications are present, wherein said antisense oligonucleotide is represented by a nucleotide sequence as defined herein and wherein said antisense oligonucleotide of the hydroxyalkoxylated AON consists of 2′-O-substituted RNA monomers linked by phosphorothioate backbone linkages, wherein all cytosine bases are 5-methylcytosine, optionally wherein also all uracil bases are 5-methyluracil bases in said AON of the hydroxyalkoxylated AON as described herein.

[0177] In one embodiment, antisense oligonucleotides of the hydroxyalkoxylated AON provided herein can be represented by any one of SEQ ID NO: 3177-3572 (derived from any one of SEQ ID NO: 9-404), or any one of SEQ ID NO: 3177-3179 (derived from any one of SEQ ID NO: 9-11), wherein said antisense oligonucleotide comprises a single BNA scaffold modification in the monomer at the 5′ terminus.

[0178] In one embodiment, antisense oligonucleotides of the hydroxyalkoxylated AON provided herein can be represented by any one of SEQ ID NO: 12681-13076 (derived from any one of SEQ ID NO: 9-404 respectively), or any one of SEQ ID NO: 12681-12683 (derived from any one of SEQ ID NO: 9-11 respectively), wherein said antisense oligonucleotide comprises a single BNA scaffold modification in the monomer at the 5′ terminus and wherein all cytosine bases are 5-methylcytosine bases.

[0179] In one embodiment, provided is a hydroxyalkoxylated AON for skipping exon 51 of the pre-mRNA of dystrophin, consisting or consisting essentially of one antisense oligonucleotide and one or two hydroxyalkoxy groups (as described in the section “Hydroxyalkoxy Groups”), wherein said antisense oligonucleotide is represented by a nucleotide sequence comprising or consisting of any one of SEQ ID NO: 3177-3572 (derived from any one of SEQ ID NO: 9-404, wherein a single BNA scaffold modification is present in the monomer at the 5′ terminus), or any one of SEQ ID NO: 3177-3179 (derived from any one of SEQ ID NO: 9-11, wherein a single BNA scaffold modification is present in the monomer at the 5′ terminus), and wherein said hydroxyalkoxylated AON can be represented by:

[0180] any one of SEQ ID NO: 3573-3968, or any one of SEQ ID NO: 3573-3575, if a hydroxyalkoxy group is present at the 5′ terminal monomer of the antisense oligonucleotide; or

[0181] any one of SEQ ID NO: 3969-4364, or any one of SEQ ID NO: 3969-3971, if a hydroxyalkoxy group is present at the 3′ terminal monomer of the antisense oligonucleotide; or

[0182] any one of SEQ ID NO: 4365-4760, or any one of SEQ ID NO: 4365-4367, if a first hydroxyalkoxy group is present at the 5′ terminal monomer and a second hydroxyalkoxy group is present at the 3′ terminal monomer of the antisense oligonucleotide;

[0183] wherein said hydroxyalkoxy group, represented by n in the sequence listing, is a triethylene glycol (TEG) group.

[0184] In one embodiment, provided is a hydroxyalkoxylated AON for skipping exon 51 of the pre-mRNA of dystrophin, consisting or consisting essentially of one antisense oligonucleotide and one or two hydroxyalkoxy group (as described in the section “Hydroxyalkoxy Groups”), wherein said antisense oligonucleotide is represented by a nucleotide sequence comprising or consisting of any one of SEQ ID NO: 12681-13076 (derived from any one of SEQ ID NO: 9-404, wherein a single BNA scaffold modification is present in the monomer at the 5′ terminus, and wherein all cytosine bases are 5-methylcytosine bases), or any one of SEQ ID NO: 12681-12683 (derived from any one of SEQ ID NO: 9-11, wherein a single BNA scaffold modification is present in the monomer at the 5′ terminus, and wherein all cytosine bases are 5-methylcytosine bases), and wherein said hydroxyalkoxylated AON can be represented by:

[0185] any one of SEQ ID NO: 13077-13472, or any one of SEQ ID NO: 13077-13079, if a hydroxyalkoxy group is present at the 5′ terminal monomer of the antisense oligonucleotide; or

[0186] any one of SEQ ID NO: 13473-13868, or any one of SEQ ID NO: 13473-13475, if a hydroxyalkoxy group is present at the 3′ terminal monomer of the antisense oligonucleotide; or

[0187] any one of SEQ ID NO: 13869-14264, or any one of SEQ ID NO: 13869-13871, if a first hydroxyalkoxy group is present at the 5′ terminal monomer and a second hydroxyalkoxy group is present at the 3′ terminal monomer of the antisense oligonucleotide;

[0188] wherein said hydroxyalkoxy group, represented by n in the sequence listing, is a triethylene glycol (TEG) group.

[0189] In one embodiment, oligonucleotides of the hydroxyalkoxylated AON provided herein can be represented by any one of SEQ ID NO: 4761-5156 (derived from any one of SEQ ID NO: 9-404 respectively), or any one of SEQ ID NO: 4761-4763 (derived from any one of SEQ ID NO: 9-11 respectively), wherein said antisense oligonucleotide comprises a single BNA scaffold modification in the monomer at the 3′ terminus.

[0190] In one embodiment, antisense oligonucleotides of the hydroxyalkoxylated AON provided herein can be represented by any one of SEQ ID NO: 14265-14660 (derived from any one of SEQ ID NO: 9-404 respectively), or any one of SEQ ID NO: 14265-14267 (derived from any one of SEQ ID NO: 9-11 respectively), wherein said antisense oligonucleotide comprises a single BNA scaffold modification in the monomer at the 3′ terminus and wherein all cytosine bases are 5-methylcytosine bases.

[0191] In one embodiment is provided a hydroxyalkoxylated AON for skipping exon 51 of the pre-mRNA of dystrophin, consisting or consisting essentially of one antisense oligonucleotide and one or two hydroxyalkoxy groups (as described in the section “Hydroxyalkoxy Groups”), wherein said antisense oligonucleotide is represented by a nucleotide sequence comprising or consisting of any one of SEQ ID NO: 4761-5156 (derived from any one of SEQ ID NO: 9-404, wherein a single BNA scaffold modification is present in the monomer at the 3′ terminus), or any one of SEQ ID NO: 4761-4763 (derived from any one of SEQ ID NO: 9-11, wherein a single BNA scaffold modification is present in the monomer at the 3′ terminus), and wherein said hydroxyalkoxylated AON can be represented by:

[0192] any one of SEQ ID NO: 5157-5552, or any one of SEQ ID NO: 5157-5159, if a hydroxyalkoxy group is present at the 5′ terminal monomer of the antisense oligonucleotide; or

[0193] any one of SEQ ID NO: 5553-5948, or any one of SEQ ID NO: 5553-5555, if a hydroxyalkoxy group is present at the 3′ terminal monomer of the antisense oligonucleotide; or

[0194] any one of SEQ ID NO: 5949-6344, or any one of SEQ ID NO: 5949-5951, if a first hydroxyalkoxy group is present at the 5′ terminal monomer and a second hydroxyalkoxy group is present at the 3′ terminal monomer of the antisense oligonucleotide;

[0195] wherein said hydroxyalkoxy group, represented by n in the sequence listing, is a triethylene glycol (TEG) group.

[0196] In one embodiment is provided a hydroxyalkoxylated AON for skipping exon 51 of the pre-mRNA of dystrophin, consisting or consisting essentially of one antisense oligonucleotide and one or two hydroxyalkoxy group (as described in the section “Hydroxyalkoxy Groups”), wherein said antisense oligonucleotide is represented by a nucleotide sequence comprising or consisting of any one of SEQ ID NO: 14265-14660 (derived from any one of SEQ ID NO: 9-404, wherein a single BNA scaffold modification is present in the monomer at the 3′ terminus, and wherein all cytosine bases are 5-methylcytosine bases), or any one of SEQ ID NO: 14265-14267 (derived from any one of SEQ ID NO: 9-11, wherein a single BNA scaffold modification is present in the monomer at the 3′ terminus, and wherein all cytosine bases are 5-methylcytosine bases), and wherein said hydroxyalkoxylated AON can be represented by:

[0197] any one of SEQ ID NO: 14661-15056, or any one of SEQ ID NO: 14661-14663, if a hydroxyalkoxy group is present at the 5′ terminal monomer of the antisense oligonucleotide; or

[0198] any one of SEQ ID NO: 15057-15452, or any one of SEQ ID NO: 15057-15059, if a hydroxyalkoxy group is present at the 3′ terminal monomer of the antisense oligonucleotide; or

[0199] any one of SEQ ID NO: 15453-15848, or any one of SEQ ID NO: 15453-15455, if a first hydroxyalkoxy group is present at the 5′ terminal monomer and a second hydroxyalkoxy group is present at the 3′ terminal monomer of the antisense oligonucleotide;

[0200] wherein said hydroxyalkoxy group, represented by n in the sequence listing, is a triethylene glycol (TEG) group.

[0201] In one embodiment, antisense oligonucleotides of the hydroxyalkoxylated AON provided herein can be represented by any one of SEQ ID NO: 6345-6740 (derived from any one of SEQ ID NO: 9-404 respectively), or any one of SEQ ID NO: 6345-6347 (derived from any one of SEQ ID NO: 9-11 respectively), wherein said antisense oligonucleotide comprises a single BNA scaffold modification in the monomer at the 5′ terminus and a single BNA scaffold modification in the monomer at the 3′ terminus.

[0202] In one embodiment, antisense oligonucleotides of the hydroxyalkoxylated AON described herein can be represented by any one of SEQ ID NO: 15849-16244 (derived from any one of SEQ ID NO: 9-404 respectively), or any one of SEQ ID NO: 15849-15851 (derived from any one of SEQ ID NO: 9-11 respectively), wherein said antisense oligonucleotide comprises a single BNA scaffold modification in the monomer at the 5′ terminus and a single BNA scaffold modification in the monomer at the 3′ terminus, and wherein all cytosine bases are 5-methylcytosine bases.

[0203] In one embodiment provided is a hydroxyalkoxylated AON for skipping exon 51 of the pre-mRNA of dystrophin, consisting or consisting essentially of one antisense oligonucleotide and one or two hydroxyalkoxy groups (as described in the section “Hydroxyalkoxy Groups”), wherein said antisense oligonucleotide is represented by a nucleotide sequence comprising or consisting of any one of SEQ ID NO: 6345-6740 (derived from any one of SEQ ID NO: 9-404, wherein a single BNA scaffold modification is present in the monomer at the 5′ terminus and a single BNA scaffold modification is present in the monomer at the 3′ terminus), or any one of SEQ ID NO: 6345-6347 (derived from any one of SEQ ID NO: 9-11, wherein a single BNA scaffold modification is present in the monomer at the 5′ terminus and a single BNA scaffold modification is present in the monomer at the 3′ terminus), and wherein said hydroxyalkoxylated AON can be represented by:

[0204] any one of SEQ ID NO: 6741-7136, or any one of SEQ ID NO: 6741-6743, if a hydroxyalkoxy group is present at the 5′ terminal monomer of the antisense oligonucleotide; or

[0205] any one of SEQ ID NO: 7137-7532, or any one of SEQ ID NO: 7137-7139, if a hydroxyalkoxy group is present at the 3′ terminal monomer of the antisense oligonucleotide; or

[0206] any one of SEQ ID NO: 7533-7928, or any one of SEQ ID NO: 7533-7535, if a first hydroxyalkoxy group is present at the 5′ terminal monomer and a second hydroxyalkoxy group is present at the 3′ terminal monomer of the antisense oligonucleotide;

[0207] wherein said hydroxyalkoxy group, represented by n in the sequence listing, is a triethylene glycol (TEG) group.

[0208] In one embodiment provided is a hydroxyalkoxylated AON for skipping exon 51 of the pre-mRNA of dystrophin, consisting or consisting essentially of one antisense oligonucleotide and one or two hydroxyalkoxy groups (as described in the section “Hydroxyalkoxy Groups”), wherein said antisense oligonucleotide is represented by a nucleotide sequence comprising or consisting of any one of SEQ ID NO: 15849-16244 (derived from any one of SEQ ID NO: 9-404, wherein a single BNA scaffold modification is present in the monomer at the 5′ terminus and a single BNA scaffold modification is present in the monomer at the 3′ terminus, and wherein all cytosine bases are 5-methylcytosine bases), or any one of SEQ ID NO: 15849-15851 (derived from any one of SEQ ID NO: 9-11, wherein a single BNA scaffold modification is present in the monomer at the 5′ terminus and a single BNA scaffold modification is present in the monomer at the 3′ terminus, and wherein all cytosine bases are 5-methylcytosine bases), and wherein said hydroxyalkoxylated AON can be represented by:

[0209] any one of SEQ ID NO: 16245-16640, or any one of SEQ ID NO: 16245-16247, if a hydroxyalkoxy group is present at the 5′ terminal monomer of the antisense oligonucleotide; or

[0210] any one of SEQ ID NO: 16641-17036, or any one of SEQ ID NO: 16641-16643, if a hydroxyalkoxy group is present at the 3′ terminal monomer of the antisense oligonucleotide; or

[0211] any one of SEQ ID NO: 17037-17432, or any one of SEQ ID NO: 17037-17039, if a first hydroxyalkoxy group is present at the 5′ terminal monomer and a second hydroxyalkoxy group is present at the 3′ terminal monomer of the antisense oligonucleotide;

[0212] wherein said hydroxyalkoxy group, represented by n in the sequence listing, is a triethylene glycol (TEG) group.

[0213] In one embodiment, antisense oligonucleotides of the hydroxyalkoxylated AON provided herein can be represented by any one of SEQ ID NO: 7929-8324 (derived from any one of SEQ ID NO: 9-404 respectively), or any one of SEQ ID NO: 7929-7931 (derived from any one of SEQ ID NO: 9-11 respectively), wherein said antisense oligonucleotide comprises two BNA scaffold modifications, one in each of the two monomers that are “-terminus.

[0214] In one embodiment, antisense oligonucleotides of the hydroxyalkoxylated AON described herein can be represented by any one of SEQ ID NO: 17433-17828 (derived from any one of SEQ ID NO: 9-404 respectively), or any one of SEQ ID NO: 17433-17435 (derived from any one of SEQ ID NO: 9-11 respectively), wherein said antisense oligonucleotide comprises two BNA scaffold modifications, one in the monomer at the 5′-terminus and the other in the adjacent monomer, and wherein all cytosine bases are 5-methylcytosine bases.

[0215] In one embodiment, provided is a hydroxyalkoxylated AON for skipping exon 51 of the pre-mRNA of dystrophin, consisting or consisting essentially of one antisense oligonucleotide and one or two hydroxyalkoxy groups (as described in the section “Hydroxyalkoxy Groups”), wherein said antisense oligonucleotide is represented by a nucleotide sequence comprising or consisting of any one of SEQ ID NO: 7929-8324 (derived from any one of SEQ ID NO: 9-404, wherein two BNA scaffold modifications are present, one in the monomer at the 5′-terminus and the other in the adjacent monomer), or any one of SEQ ID NO: 7929-7931 (derived from any one of SEQ ID NO: 9-11, wherein two BNA scaffold modifications are present, one in the monomer at the 5′-terminus and the other in the adjacent monomer), and wherein said hydroxyalkoxylated AON can be represented by:

[0216] any one of SEQ ID NO: 8325-8720, or any one of SEQ ID NO: 8325-8327, if a hydroxyalkoxy group is present at the 5′ terminal monomer of the antisense oligonucleotide; or

[0217] any one of SEQ ID NO: 8721-9116, or any one of SEQ ID NO: 8721-8723, if a hydroxyalkoxy group is present at the 3′ terminal monomer of the antisense oligonucleotide; or

[0218] any one of SEQ ID NO: 9117-9512, or any one of SEQ ID NO: 9117-9119, if a first hydroxyalkoxy group is present at the 5′ terminal monomer and a second hydroxyalkoxy group is present at the 3′ terminal monomer of the antisense oligonucleotide;

[0219] wherein said hydroxyalkoxy group, represented by n in the sequence listing, is a triethylene glycol (TEG) group.

[0220] In one embodiment is provided a hydroxyalkoxylated AON for skipping exon 51 of the pre-mRNA of dystrophin, consisting or consisting essentially of one antisense oligonucleotide and one or two hydroxyalkoxy groups (as described in the section “Hydroxyalkoxy Groups”), or one or two hydroxyalkoxy groups, wherein said antisense oligonucleotide is represented by a nucleotide sequence comprising or consisting of any one of SEQ ID NO: 17433-17828 (derived from any one of SEQ ID NO: 9-404, wherein two BNA scaffold modifications are present, one in the monomer at the 5′-terminus and the other in the adjacent monomer, and wherein all cytosine bases are 5-methylcytosine bases), or any one of SEQ ID NO: 17433-17435 (derived from any one of SEQ ID NO: 9-11, wherein two BNA scaffold modifications are present, one in the monomer at the 5′-terminus and the other in the adjacent monomer, and wherein all cytosine bases are 5-methylcytosine bases), and wherein said hydroxyalkoxylated AON can be represented by:

[0221] any one of SEQ ID NO: 17829-18224, or any one of SEQ ID NO: 17829-17831, if a hydroxyalkoxy group is present at the 5′ terminal monomer of the antisense oligonucleotide; or

[0222] any one of SEQ ID NO: 18225-18620, or any one of SEQ ID NO: 18225-18227, if a hydroxyalkoxy group is present at the 3′ terminal monomer of the antisense oligonucleotide; or

[0223] any one of SEQ ID NO: 18621-19016, or any one of SEQ ID NO: 18621-18623, if a first hydroxyalkoxy group is present at the 5′ terminal monomer and a second hydroxyalkoxy group is present at the 3′ terminal monomer of the antisense oligonucleotide;

[0224] wherein said hydroxyalkoxy group, represented by n in the sequence listing, is a triethylene glycol (TEG) group.

[0225] In one embodiment, antisense oligonucleotides of the hydroxyalkoxylated AON provided herein can be represented by any one of SEQ ID NO: 9513-9908 (derived from any one of SEQ ID NO: 9-404 respectively), or any one of SEQ ID NO: 9513-9515 (derived from any one of SEQ ID NO: 9-11 respectively), wherein said antisense oligonucleotide comprises two BNA scaffold modifications, one in the monomer at the 3′-terminus and the other in the adjacent monomer.

[0226] In one embodiment, the antisense oligonucleotides of the hydroxyalkoxylated AON provided herein can be represented by any one of SEQ ID NO: 19017-19412 (derived from any one of SEQ ID NO: 9-404 respectively), or any one of SEQ ID NO: 19017-19019 (derived from any one of SEQ ID NO: 9-11 respectively), wherein said antisense oligonucleotide comprises two BNA scaffold modifications, one in the monomer at the 3′-terminus and the other in the adjacent monomer, and wherein all cytosine bases are 5-methylcytosine bases.

[0227] In one embodiment is provided a hydroxyalkoxylated AON for skipping exon 51 of the pre-mRNA of dystrophin, consisting or consisting essentially of one antisense oligonucleotide and one or two hydroxyalkoxy groups (as described in the section “Hydroxyalkoxy Groups”), wherein said antisense oligonucleotide is represented by a nucleotide sequence comprising or consisting of any one of SEQ ID NO: 9513-9908 (derived from any one of SEQ ID NO: 9-404, wherein two BNA scaffold modifications are present, one in the monomer at the 3′-terminus and the other in the adjacent monomer), or any one of SEQ ID NO: 9513-9515 (derived from any one of SEQ ID NO: 9-11, wherein two BNA scaffold modifications are present, one in the monomer at the 3′-terminus and the other in the adjacent monomer), and wherein said hydroxyalkoxylated AON can be represented by:

[0228] any one of SEQ ID NO: 9909-10304, or any one of SEQ ID NO: 9909-9911, if a hydroxyalkoxy group is present at the 5′ terminal monomer of the antisense oligonucleotide; or

[0229] any one of SEQ ID NO: 10305-10700, or any one of SEQ ID NO: 10305-10307, if a hydroxyalkoxy group is present at the 3′ terminal monomer of the antisense oligonucleotide; or

[0230] any one of SEQ ID NO: 10701-11096, or any one of SEQ ID NO: 10701-10703, if a first hydroxyalkoxy group is present at the 5′ terminal monomer and a second hydroxyalkoxy group is present at the 3′ terminal monomer of the antisense oligonucleotide;

[0231] wherein said hydroxyalkoxy group, represented by n in the sequence listing, is a triethylene glycol (TEG) group.

[0232] In one embodiment is provided a hydroxyalkoxylated AON for skipping exon 51 of the pre-mRNA of dystrophin, consisting or consisting essentially of one antisense oligonucleotide and one or two hydroxyalkoxy groups (as described in the section “Hydroxyalkoxy Groups”), wherein said antisense oligonucleotide is represented by a nucleotide sequence comprising or consisting of any one of SEQ ID NO: 19017-19412 (derived from any one of SEQ ID NO: 9-404, wherein two BNA scaffold modifications are present, one in the monomer at the 3′-terminus and the other in the adjacent monomer, and wherein all cytosine bases are 5-methylcytosine bases), or any one of SEQ ID NO: 19017-19019 (derived from any one of SEQ ID NO: 9-11, wherein two BNA scaffold modifications are present, one in the monomer at the 3′-terminus and the other in the adjacent monomer, and wherein all cytosine bases are 5-methylcytosine bases), and wherein said hydroxyalkoxylated AON can be represented by:

[0233] any one of SEQ ID NO: 19413-19808, or any one of SEQ ID NO: 19413-19415, if a hydroxyalkoxy group is present at the 5′ terminal monomer of the antisense oligonucleotide; or

[0234] any one of SEQ ID NO: 19809-20204, or any one of SEQ ID NO: 19809-19811, if a hydroxyalkoxy group is present at the 3′ terminal monomer of the antisense oligonucleotide; or

[0235] any one of SEQ ID NO: 20205-20600, or any one of SEQ ID NO: 20205-20207, if a first hydroxyalkoxy group is present at the 5′ terminal monomer and a second hydroxyalkoxy group is present at the 3′ terminal monomer of the antisense oligonucleotide;

[0236] wherein said hydroxyalkoxy group, represented by n in the sequence listing, is a triethylene glycol (TEG) group.

[0237] In one embodiment, antisense oligonucleotides of the hydroxyalkoxylated AON provided herein can be represented by any one of SEQ ID NO: 11097-11492 (derived from any one of SEQ ID NO: 9-404 respectively), or any one of SEQ ID NO: 11097-11099 (derived from any one of SEQ ID NO: 9-11 respectively), wherein said antisense oligonucleotide comprises four BNA scaffold modifications, one in the monomer at the 5′-terminus, one in the monomer adjacent to the 5′-terminus, one in the monomer at the 3′-terminus and one in the monomer adjacent to the 3′-terminus.

[0238] In one embodiment, antisense oligonucleotides of the hydroxyalkoxylated AON provided herein can be represented by any one of SEQ ID NO: 20601-20996 (derived from any one of SEQ ID NO: 9-404 respectively), or any one of SEQ ID NO: 20601-20603 (derived from any one of SEQ ID NO: 9-11 respectively), wherein said antisense oligonucleotide comprises four BNA scaffold modifications, one in the monomer at the 5′-terminus, one in the monomer adjacent to the 5′-terminus, one in the monomer at the 3′-terminus and one in the monomer adjacent to the 3′-terminus, and wherein all cytosine bases are 5-methylcytosine bases.

[0239] In one embodiment is provided a hydroxyalkoxylated AON for skipping exon 51 of the pre-mRNA of dystrophin, consisting or consisting essentially of one antisense oligonucleotide and one or two hydroxyalkoxy groups (as described in the section “Hydroxyalkoxy Groups”), wherein said antisense oligonucleotide is represented by a nucleotide sequence comprising or consisting of any one of SEQ ID NO: 11097-11492 (derived from any one of SEQ ID NO: 9-404, wherein four BNA scaffold modifications are present, one in the monomer at the 5′-terminus, one in the monomer adjacent to the 5′-terminus, one in the monomer at the 3′-terminus and one in the monomer adjacent to the 3′-terminus), or any one of SEQ ID NO: 11097-11099 (derived from any one of SEQ ID NO: 9-11, wherein four BNA scaffold modifications are present, one in the monomer at the 5′-terminus, one in the monomer adjacent to the 5′-terminus, one in the monomer at the 3′-terminus and one in the monomer adjacent to the 3′-terminus), and wherein said hydroxyalkoxylated AON can be represented by:

[0240] any one of SEQ ID NO: 11493-11888, or any one of SEQ ID NO: 11493-11495, if a hydroxyalkoxy group is present at the 5′ terminal monomer of the antisense oligonucleotide; or

[0241] any one of SEQ ID NO: 11889-12284, or any one of SEQ ID NO: 11889-11891, if a hydroxyalkoxy group is present at the 3′ terminal monomer of the antisense oligonucleotide; or

[0242] any one of SEQ ID NO: 12285-12680, or any one of SEQ ID NO: 12285-12287, if a first hydroxyalkoxy group is present at the 5′ terminal monomer and a second hydroxyalkoxy group is present at the 3′ terminal monomer of the antisense oligonucleotide;

[0243] wherein said hydroxyalkoxy group, represented by n in the sequence listing, is a triethylene glycol (TEG) group.

[0244] In one embodiment is provided a hydroxyalkoxylated AON for skipping exon 51 of the pre-mRNA of dystrophin, consisting or consisting essentially of one antisense oligonucleotide and one or two hydroxyalkoxy groups (as described in the section “Hydroxyalkoxy Groups”), wherein said antisense oligonucleotide is represented by a nucleotide sequence comprising or consisting of any one of SEQ ID NO: 20601-20996 (derived from any one of SEQ ID NO: 9-404, wherein four BNA scaffold modifications are present, one in the monomer at the 5′-terminus, one in the monomer adjacent to the 5′-terminus, one in the monomer at the 3′-terminus and one in the monomer adjacent to the 3′-terminus, and wherein all cytosine bases are 5-methylcytosine bases), or any one of SEQ ID NO: 20601-20603 (derived from any one of SEQ ID NO: 9-11, wherein four BNA scaffold modifications are present, one in the monomer at the 5′-terminus, one in the monomer adjacent to the 5′-terminus, one in the monomer at the 3′-terminus and one in the monomer adjacent to the 3′-terminus, and wherein all cytosine bases are 5-methylcytosine bases), and wherein said hydroxyalkoxylated AON can be represented by:

[0245] any one of SEQ ID NO: 20997-21392, or any one of SEQ ID NO: 20997-20999, if a hydroxyalkoxy group is present at the 5′ terminal monomer of the antisense oligonucleotide; or

[0246] any one of SEQ ID NO: 21393-21788, or any one of SEQ ID NO: 21393-21395, if a hydroxyalkoxy group is present at the 3′ terminal monomer of the antisense oligonucleotide; or

[0247] any one of SEQ ID NO: 21789-22184, or any one of SEQ ID NO: 21789-21791, if a first hydroxyalkoxy group is present at the 5′ terminal monomer and a second hydroxyalkoxy group is present at the 3′ terminal monomer of the antisense oligonucleotide;

[0248] wherein said hydroxyalkoxy group, represented by n in the sequence listing, is a triethylene glycol (TEG) group.

[0249] Throughout this application, whenever a SEQ ID NO references T or U, said monomer can optionally be replaced by U or T, respectively.

[0250] The antisense oligonucleotide of the hydroxyalkoxylated AON described herein comprises terminal and non-terminal monomers. In the context of this application, terminal monomers are defined as monomers chosen from the group consisting of the 5′-terminal monomer and the 3′-terminal monomer of said antisense oligonucleotide, as explained herein. Non-terminal monomers of said antisense oligonucleotide are defined herein as monomers comprised in said antisense oligonucleotide which are not terminal monomers.

[0251] In one embodiment, both terminal and non-terminal monomers of the antisense oligonucleotide of the hydroxyalkoxylated AON may comprise a BNA scaffold modification.

[0252] In one embodiment, provided is a hydroxyalkoxylated AON consisting of one antisense oligonucleotide (AON) and one or two hydroxyalkoxy groups (as described in the section entitled “Hydroxyalkoxy Groups”), said hydroxyalkoxy group is a triethylene glycol (TEG) group, wherein said antisense oligonucleotide is represented by a nucleotide sequence as defined herein, wherein said AON comprises 2′-O-methyl phosphorothioate RNA monomers linked by phosphorothioate backbone and wherein said AON comprises or consists of 1, 2, 3, 4, 5, 6, 7, 8 or 9 monomers, or 1, 2, 3, 4 or 5 monomers, that comprise a bicyclic nucleic acid (BNA) scaffold modification, or a bridged nucleic acid scaffold modification, or a LNA modification, and wherein all cytosine bases are 5-methylcytosine bases, optionally wherein also all uracil bases are 5-methyluracil bases as defined herein.

[0253] In one embodiment, the antisense oligonucleotide (AON) of the hydroxyalkoxylated AON provided herein, is selected wherein:

[0254] the 5′-terminal monomer of said AON comprises a BNA scaffold modification, or

[0255] the 3′-terminal monomer of said AON comprises a BNA scaffold modification, or

[0256] the 5′-terminal monomer and the 3′-terminal monomer of said AON comprise a BNA scaffold modification, or

[0257] the two most 5′-terminal monomers of said AON comprise a BNA scaffold modification, or

[0258] the two most 3′ terminal monomers of said AON comprise a BNA scaffold modification, or

[0259] the two most 5′-terminal monomers and the two most 3′-terminal monomers of said AON comprise a BNA scaffold modification;

[0260] and wherein said AON comprises or consists of 1, 2, 3, 4 or 5 additional non-terminal monomers comprising a BNA scaffold modification, or 1 or 2 additional non-terminal monomers comprising a BNA scaffold modification, wherein said additional non-terminal monomers comprise an adenosine, a uracil and/or thymine base; or a guanine, a cytosine and/or a 5-methylcytosine base. In one embodiment, a BNA scaffold modification is an LNA modification.

[0261] In another embodiment, the antisense oligonucleotide of the hydroxyalkoxylated AON described herein is selected wherein said antisense oligonucleotide is represented by the nucleotide sequence GGUAAGUUCUGUCCAAGC (SEQ ID NO: 22185, derived from SEQ ID NO: 11), wherein G is a guanine comprising a BNA scaffold modification and wherein C is a cytosine comprising a BNA scaffold modification.

[0262] In another embodiment, the antisense oligonucleotide of the hydroxyalkoxylated AON described herein, is selected wherein said antisense oligonucleotide is represented by the nucleotide sequence GGUAAGUUC*UGUC*C*AAGC* (SEQ ID NO: 22333, derived from SEQ ID NO: 11), wherein G is a guanine comprising a BNA scaffold modification, C* is 5-methylcytosine and wherein C* is a 5-methylcytosine comprising a BNA scaffold modification.

[0263] In another embodiment is provided a hydroxyalkoxylated AON consisting or consisting essentially of one antisense oligonucleotide and one or two hydroxyalkoxy groups (as described in the section “Hydroxyalkoxy Groups”), said hydroxyalkoxy group comprises or consists of an ethylene glycol monomer, ethylene glycol oligomer or ethylene glycol polymer, or a triethylene glycol (TEG) group, wherein said antisense oligonucleotide is represented by a nucleotide sequence comprising or consisting of any one of:

[0264] SEQ ID NO: 22185,

[0265] a fragment of SEQ ID NO: 22185 or

[0266] SEQ ID NO: 22185 with 1, 2, 3, 4, or 5 additional nucleotides, or

[0267] SEQ ID NO: 22185 with 1, 2, 3, 4, or 5 nucleotides missing, or

[0268] a nucleotide sequence which has at least 90%, 91%, 92%, 93%, 94%, 95%, 96%, 97%, 98% or 99%, or at least 95%, more or at least 97%, identity with SEQ ID NO: 22185,

[0269] and wherein said AON consists of 2′-O-methyl RNA monomers linked by phosphorothioate backbone linkages, for use as a medicament, or for treating, preventing and/or delaying Duchenne Muscular Dystrophy (DMD), or for inducing skipping of exon 51 of the dystrophin pre-mRNA. In one embodiment, said exon 51 of dystrophin pre-mRNA is from a human and is represented by a nucleotide sequence with SEQ ID NO: 2.

[0270] In one embodiment, said 1, 2, 3, 4 or 5 additional nucleotides may be present at the 5′ and/or 3′ terminus of SEQ ID NO: 22185.

[0271] In another embodiment, said 1, 2, 3, 4 or 5 missing nucleotides may be nucleotides present at the 5′ and/or 3′ terminus of SEQ ID NO: 22185.

[0272] In another embodiment, provided is a hydroxyalkoxylated AON consisting or consisting essentially of one antisense oligonucleotide and one or two hydroxyalkoxy groups (as described in the section “Hydroxyalkoxy Groups”), said hydroxyalkoxy group comprises or consists of an ethylene glycol monomer, ethylene glycol oligomer or ethylene glycol polymer, or a triethylene glycol (TEG) group, wherein said antisense oligonucleotide is represented by a nucleotide sequence comprising or consisting of any one of:

[0273] SEQ ID NO: 22333,

[0274] a fragment of SEQ ID NO: 22333 or

[0275] SEQ ID NO: 22333 with 1, 2, 3, 4, or 5 additional nucleotides, or

[0276] SEQ ID NO: 22333 with 1, 2, 3, 4, or 5 nucleotides missing, or

[0277] a nucleotide sequence which has at least 90%, 91%, 92%, 93%, 94%, 95%, 96%, 97%, 98% or 99%, or at least 95%, or at least 97%, identity with SEQ ID NO: 22333,

[0278] and wherein said AON consists of 2′-O-methyl RNA monomers linked by phosphorothioate backbone linkages, for use as a medicament, or for treating, preventing and/or delaying Duchenne Muscular Dystrophy (DMD), or for inducing skipping of exon 51 of the dystrophin pre-mRNA. In one embodiment, said exon 51 of dystrophin pre-mRNA is from a human and is represented by a nucleotide sequence with SEQ ID NO: 2.

[0279] In one embodiment, said 1, 2, 3, 4 or 5 additional nucleotides may be present at the 5′ and/or 3′ terminus of SEQ ID NO: 22333.

[0280] In another embodiment, said 1, 2, 3, 4 or 5 missing nucleotides may be nucleotides present at the 5′ and/or 3′ terminus of SEQ ID NO: 22333.

[0281] In another embodiment, provided is a hydroxyalkoxylated AON consisting or consisting essentially of one antisense oligonucleotide and one or two hydroxyalkoxy groups (as described in the section “Hydroxyalkoxy Groups”), said hydroxyalkoxy group comprises or consists of an ethylene glycol monomer, ethylene glycol oligomer or ethylene glycol polymer, or a triethylene glycol (TEG) group, wherein said antisense oligonucleotide is represented by a nucleotide sequence comprising or consisting of any one of:

[0282] SEQ ID NO: 22486,

[0283] a fragment of SEQ ID NO: 22486 or

[0284] SEQ ID NO: 22486 with 1, 2, 3, 4, or 5 additional nucleotides, or

[0285] SEQ ID NO: 22486 with 1, 2, 3, 4, or 5 nucleotides missing, or

[0286] a nucleotide sequence which has at least 90%, 91%, 92%, 93%, 94%, 95%, 96%, 97%, 98% or 99%, or at least 95%, or at least 97%, identity with SEQ ID NO: 22486,

[0287] and wherein said AON consists of 2′-O-methyl RNA monomers linked by phosphorothioate backbone linkages, for use as a medicament, or for treating, preventing and/or delaying Duchenne Muscular Dystrophy (DMD), or for inducing skipping of exon 51 of the dystrophin pre-mRNA. In one embodiment, said exon 51 of dystrophin pre-mRNA is from a human and is represented by a nucleotide sequence with SEQ ID NO: 2.

[0288] In one embodiment, said 1, 2, 3, 4 or 5 additional nucleotides may be present at the 5′ and/or 3′ terminus of SEQ ID NO: 22486.

[0289] In another embodiment, said 1, 2, 3, 4 or 5 missing nucleotides may be nucleotides present at the 5′ and/or 3′ terminus of SEQ ID NO: 22486.

[0290] In one embodiment, hydroxyalkoxylated AONs can be represented by SEQ ID NO: 22345 (nGGUAAGUUC*UGUC*C*AAGC*, wherein a hydroxyalkoxy group is present at the 5′ terminal monomer), SEQ ID NO: 22357 (GGUAAGUUC*UGUC*C*AAGC*n, wherein a hydroxyalkoxy group is present at the 3′ terminal monomer), SEQ ID NO: 22369 (nGGUAAGUUC*UGUC*C*AAGC*n, wherein a first hydroxyalkoxy group is present at the 5′ terminal monomer and a second hydroxyalkoxy group is present at the 3′ terminal monomer), SEQ ID NO: 22488 (nGGUAAGUUC*UGUC*C*AAG, wherein a hydroxyalkoxy group is present at the 5′ terminal monomer), SEQ ID NO: 22489 (nGGUAAGUUC*UGUC*C*AA, wherein a hydroxyalkoxy group is present at the 5′ terminal monomer), or SEQ ID NO: 22490 (nGGUAAGUUC*UGUC*C*AAGC*, wherein a hydroxyalkoxy group is present at the 5′ terminal monomer and the non-BNA monomers are 2′-O-methoxyethyl monomers), wherein the hydroxyalkoxy group, represented by n, is a triethylene glycol (TEG) group, wherein G and C* are a guanine and a 5-methylcytosine, respectively, comprising a BNA scaffold modification and wherein C* is a 5-methylcytosine.

[0291] In some embodiments, the hydroxyalkoxylated AON consisting of one antisense oligonucleotide and one or two hydroxyalkoxy groups (as described in the section “Hydroxyalkoxy Groups”), is one wherein said hydroxyalkoxylated AON has an improved parameter by comparison to said antisense oligonucleotide alone and/or to a mixture of said antisense oligonucleotide and said hydroxyalkoxy group(s) where both antisense oligonucleotide and hydroxyalkoxy group(s) are present as separate molecules, i.e., not linked to each other by a covalent linkage, wherein the concentration of said antisense oligonucleotide and the hydroxyalkoxy group(s) is the same as in the hydroxyalkoxylated AON described herein. In another embodiment, the hydroxyalkoxylated AON is one wherein said hydroxyalkoxylated AON has an improved parameter by comparison to drisapersen (SEQ ID NO: 7, i.e., UCAAGGAAGAUGGCAUUUCU, wherein each RNA monomer is 2′-O-methylated and wherein the whole backbone is phosphorothioate), suvodirsen (WVE-210201) as described in WO 2017/062862, having the same sequence as drisapersen but with stereopure internucleoside linkages, and/or eteplirsen (SEQ ID NO: 8, i.e., CTCCAACATCAAGGAAGATGGCATTTCTAG, wherein each monomer is modified as to form a phosphorodiamidate morpholino oligomer).

[0292] In one embodiment, the hydroxyalkoxylated AON has higher compound stability than the non-hydroxyalkoxylated AON. In one embodiment, the hydroxyalkoxylated AON has better bio-distribution than the non-hydroxyalkoxylated AON. In one embodiment, the hydroxyalkoxylated AON has better muscle uptake than the non-hydroxyalkoxylated AON. In one embodiment, the hydroxyalkoxylated AON has better quadriceps muscle uptake than the non-hydroxyalkoxylated AON. In one embodiment, the hydroxyalkoxylated AON has better heart muscle uptake than the non-hydroxyalkoxylated AON. In one embodiment, the hydroxyalkoxylated AON has more efficient nuclear trafficking than the non-hydroxyalkoxylated AON. In one embodiment, the hydroxyalkoxylated AON has a better hindrance of splicing factors than the non-hydroxyalkoxylated AON.

[0293] In one embodiment, the hydroxyalkoxylated AON has higher binding affinity than the non-hydroxyalkoxylated AON. In one embodiment, the hydroxyalkoxylated AON has better kinetics than the non-hydroxyalkoxylated AON. In one embodiment, the hydroxyalkoxylated AON has improved exon skipping activity than the non-hydroxyalkoxylated AON. In one embodiment, the hydroxyalkoxylated AON provides a subject with a functional or a semi-functional dystrophin protein. In one embodiment, the hydroxyalkoxylated AON has improved biostability than the non-hydroxyalkoxylated AON. In one embodiment, the hydroxyalkoxylated AON has improved (intra-tissue) distribution than the non-hydroxyalkoxylated AON. In one embodiment, the hydroxyalkoxylated AON has improved cellular uptake than the non-hydroxyalkoxylated AON. In one embodiment, the hydroxyalkoxylated AON has improved trafficking than the non-hydroxyalkoxylated AON. In one embodiment, the hydroxyalkoxylated AON has improved immunogenicity than the non-hydroxyalkoxylated AON. In some embodiments, the hydroxyalkoxylated AON has increased exon skipping activity. In some embodiments, the hydroxyalkoxylated AON has increased exon skipping activity and production of a functional or a semi-functional dystrophin protein.

[0294] Exon skipping activity can be measured by analysing total RNA isolated from hydroxyalkoxylated AON/mixture-treated muscle cell cultures or muscle tissue by reverse transcriptase quantitative or digital droplet polymerase chain reaction (RT-qPCR or RT-ddPCR) using dystrophin gene-specific primers flanking the targeted exon (Spitali et al., FASEB J 2013, 27(12): 4909-4916, Verheul et al., 2016; PLoS ONE 11(9):e0162467). The ratio of shorter transcript fragments, representing transcripts in which the targeted exon is skipped, to the total of transcript products is assessed (calculated as percentage of exon skipping induced by an oligonucleotide). Shorter fragments may also be sequenced to determine the correctness and specificity of the targeted exon to be skipped.

[0295] In certain embodiments, RNA modulation activity may be an increase or decrease in an amount of a nucleic acid or protein. In certain embodiments, such activity may be a change in the ratio of splice variants of a nucleic acid or protein. Detection and/or measuring of antisense activity may be direct or indirect. In certain embodiments, antisense activity is assessed by observing a phenotypic change in a cell or animal.

[0296] Biodistribution and biostability can be at least in part determined by a validated sandwich hybridization assay adapted from Straarup et al., Nucl. Acids Res. 2010, 38(20):7100-7111. In one embodiment, plasma or homogenized tissue samples are incubated with a specific capture oligonucleotide probe complementary to part of the AON analyte. After separation, a DIG-labeled oligonucleotide probe is hybridized to the other part of the AON analyte, and quantitative detection follows using an anti-DIG antibody-linked peroxidase. Plasma oligonucleotide concentrations (μg/mL) are monitored over time to assess the peak concentration (Cₘₐₓ), time to peak concentration (Tₘₐₓ), area under the curve (AUC) and half-life. End of study tissue sample concentrations (μg/g tissue) are measured to assess tissue distribution. Non-compartmental pharmacokinetic analysis is performed using the Phoenix software package (WinNonlin module, version 6.4, Pharsight, Mountainview, Calif.).

[0297] Accordingly, in one embodiment, the hydroxyalkoxylated AON has an increased exon skipping activity than the non-hydroxyalkoxylated AON. In one embodiment, the hydroxyalkoxylated AON has acceptable or a decreased immunogenicity as compared to the non-hydroxyalkoxylated AON. In one embodiment, the hydroxyalkoxylated AON has a better biodistribution than the non-hydroxyalkoxylated AON. In one embodiment, the hydroxyalkoxylated AON has acceptable or improved RNA binding kinetics than the non-hydroxyalkoxylated AON. In one embodiment, the hydroxyalkoxylated AON has improved thermodynamic properties, such as an increased exon skipping activity, by comparison to (i) the corresponding non-hydroxyalkoxylated antisense oligonucleotide, and/or to (ii) the corresponding mixture of said antisense oligonucleotide and hydroxyalkoxy group(s) constituting said hydroxyalkoxylated AON, wherein said mixture differs only from the hydroxyalkoxylated AON in that the hydroxyalkoxy group(s) are not linked to said AON by for example a covalent linkage. In other embodiments, the hydroxyalkoxylated AON has an improved pK profile and/or reduced side effect profile (e.g., complement activation and/or liver enzyme inhibition) as compared to (i) the corresponding non-hydroxyalkoxylated antisense oligonucleotide, and/or to (ii) the corresponding mixture of said antisense oligonucleotide and hydroxyalkoxy group(s) constituting said hydroxyalkoxylated AON, wherein said mixture differs only from the hydroxyalkoxylated AON in that the hydroxyalkoxy group(s) are not linked to said AON by for example a covalent linkage. In some embodiments, said corresponding antisense oligonucleotide and said AON of the corresponding mixture have the same sequence and are modified in the same way as the AON of the hydroxyalkoxylated AON.

[0298] Hydroxyalkoxy Groups

[0299] In one embodiment, a hydroxyalkoxy group of the hydroxyalkoxylated AONs provided herein comprises or consists of an ethylene glycol monomer, ethylene glycol oligomer or ethylene glycol polymer (also known as polyethylene glycol, PEG).

[0300] In another embodiment, a hydroxyalkoxy group, or at least one hydroxyalkoxy group, or all hydroxyalkoxy groups, of the hydroxyalkoxylated AON provided herein comprises or consists of an ethylene glycol monomer, ethylene glycol oligomer or ethylene glycol polymer (also known as polyethylene glycol, PEG). In one embodiment, the linkage between the AON and a hydroxyalkoxy group of the hydroxyalkoxylated AON is covalent.

[0301] PEGylation, i.e., the attachment of (chemically activated) hydroxyalkoxy groups, including ethylene glycol monomers or chains, is well known to a person skilled in the art. PEGylation can be done at the —OH group of the 5′ terminal monomer and/or the 3′ terminal monomer of a nucleic acid. This can be done directly or through a spacer (e.g. aminoalkyl hydroxyalkoxy group), for example by click chemistry as known by the person skilled in the art.

[0302] Also encompassed is the use of modified PEGylation, wherein said (poly)ethylene glycol is chemically modified and/or contains a moiety attached thereto. In this way said hydroxyalkoxy group acquires an additional property as known in the art. For example, said hydroxyalkoxy group may become cleavable or fluorescent. An example of modified PEGylation includes but is not limited to cleavable PEGylation, wherein the linkage is a degradable (cleavable) linkage. Examples include linkages that are responsive to, for example, pH, light, temperature, reductive or oxidative environments, nucleophiles, synthetic reagents, enzymes, proteases, cathepsin, click-to-release reactions or (other) external stimuli.

[0303] In one embodiment, the hydroxyalkoxy group is an unmodified ethylene glycol monomer, ethylene glycol oligomer or ethylene glycol polymer. In another embodiment, the hydroxyalkoxy group is a modified ethylene glycol monomer, ethylene glycol oligomer or ethylene glycol polymer (e.g., modified PEG).

[0304] In one embodiment, a hydroxyalkoxy group of the hydroxyalkoxylated AON comprises or consists of 1, 2, 3, 4, 5, 6, 7, 8, 9, 10, 11, 12, 13, 14, 15, 16, 17, 18, 19 or 20 ethylene glycol monomers. In some embodiments, said hydroxyalkoxy group comprises or consists of 1 to 20, 1 to 16, 1 to 12, 1 to 8, 1 to 6, 2 to 16, 2 to 12, 2 to 8, 2 to 6, 3 to 12, 3 to 8 or 3 to 6 ethylene glycol monomers. In some embodiments, said hydroxyalkoxy group comprises or consists of 1, 2, 3, 4, 5, 6, 7, 8, 9, 10, 11 or 12 ethylene glycol monomers. In some embodiments, said hydroxyalkoxy group comprises or consists of 3, 4, 5 or 6 ethylene glycol monomers. In some embodiments, said hydroxyalkoxy group comprises or consists of 3 or 6 ethylene glycol monomers. In some embodiments, said hydroxyalkoxy group comprises or consists of 3 ethylene glycol monomers.

[0305] In one embodiment, said hydroxyalkoxy group is a diethylene glycol, triethylene glycol (TEG), tetraethylene glycol, pentaethylene glycol or hexaethylene glycol (HEG) group. In some embodiments, said hydroxyalkoxy group is TEG or HEG. In some embodiments, said hydroxyalkoxy group is TEG.

[0306] In the hydroxyalkoxylated AONs provided herein, the hydroxyalkoxy group is attached to the AON using methods well known to those of skill in the art. For example, the 5′- and/or 3′-terminal OH of the AON may be derivatized as a phosphoramidite, chloroformate, chloramidate or thiophosphoramidite, which is then reacted with the hydroxyalkoxy group (e.g., diethylene glycol, triethylene glycol (TEG), tetraethylene glycol, pentaethylene glycol or hexaethylene glycol (HEG)) under standard coupling conditions to provide the hydroxyalkoxylated AON. Alternatively, the OH of the hydroxyalkoxy group (e.g., diethylene glycol, triethylene glycol (TEG), tetraethylene glycol, pentaethylene glycol or hexaethylene glycol (HEG)) is derivatized as a phosphoramidite, chloroformate, chloramidate or thiophosphoramidite, which is then reacted with the 5′- and/or 3′-terminal OH of the AON under standard coupling conditions to provide the hydroxyalkoxylated AON.

[0307] In one embodiment, the hydroxyalkoxy group is attached to the AON through a phosphate linker (PO). In another embodiment, the hydroxyalkoxy group is a TEG group and the hydroxyalkoxylated AON is TEG-PO-AON (i.e., HO(CH₂CH₂O)₃—P(O)(OH)-AON), where the TEG-PO is attached to the 5′-OH of the AON. In another embodiment, the hydroxyalkoxy group is a TEG group and the hydroxyalkoxylated AON is TEG-PO-AON, where the TEG-PO is attached to the 3′-OH of the AON. In another embodiment, two TEG groups are attached to the AON, one at the 3′-OH and the other at the 5′-OH, and the hydroxyalkoxylated AON is (TEG-PO)₂-AON.

[0308] In another embodiment, the hydroxyalkoxy group is attached to the AON through a phosphorothioate linker (PS). In another embodiment, the hydroxyalkoxy group is a TEG group and the hydroxyalkoxylated AON is TEG-PS-AON (i.e., HO(CH₂CH₂O)₃—P(S)(OH)-AON), where the TEG-PS is attached to the 5′-OH of the AON. In another embodiment, the hydroxyalkoxy group is a TEG group and the hydroxyalkoxylated AON is TEG-PS-AON, where the TEG-PS is attached to the 3′-OH of the AON. In another embodiment, two TEG groups are attached to the AON, one at the 3′-OH and the other at the 5′-OH, and the hydroxyalkoxylated AON is (TEG-PS)₂-AON.

[0309] In another embodiment, two TEG groups are attached to the AON, one at the 3′-OH and the other at the 5′-OH, and the hydroxyalkoxylated AON is TEG-PO-AON-PS-TEG; where TEG-PO is at 5′ and TEG-PS is at 3′; or where TEG-PO is at 3′ and TEG-PS is at 5′.

[0310] Compositions

[0311] In another embodiment, provided herein is a composition comprising a hydroxyalkoxylated AON provided herein.

[0312] In one embodiment, said composition comprises at least one excipient, and/or said hydroxyalkoxylated AON comprises at least one conjugated ligand that may further aid in enhancing the targeting and/or delivery of said composition and/or said hydroxyalkoxylated AON to a tissue and/or cell and/or into a tissue and/or cell. A composition can comprise one or more than one hydroxyalkoxylated AON as described herein. In one embodiment, an excipient can be a distinct molecule, but it can also be covalently linked to the hydroxyalkoxylated AON. In the first case, an excipient can be a filler, such as starch. In the latter case, an excipient can for example be a targeting ligand that is linked to the oligonucleotide of the hydroxyalkoxylated AON.

[0313] In one embodiment, said composition is for use as a medicament. Said composition is therefore a pharmaceutical composition. The pharmaceutical composition usually comprises a pharmaceutically acceptable carrier, including diluents and/or excipients. In one embodiment, a composition comprises a hydroxyalkoxylated AON provided herein and optionally further comprises a pharmaceutically acceptable carrier, including a formulation, filler, preservative, solubilizer, diluent, excipient, salt, adjuvant and/or solvent. Such pharmaceutically acceptable filler, preservative, solubilizer, diluent, salt, adjuvant, solvent and/or excipient may for instance be found in Remington: The Science and Practice of Pharmacy, 20th Edition. Baltimore, Md.: Lippincott Williams & Wilkins, 2000. The hydroxyalkoxylated AON as described herein may possess at least one ionizable group. An ionizable group may be a base or acid, and may be charged or neutral. An ionizable group may be present as ion pair with an appropriate counterion that carries opposite charge(s). Non-limiting examples of cationic counterions are sodium, potassium, cesium, Tris, lithium, calcium, magnesium, trialkylammonium, triethylammonium, and tetraalkylammonium. Non-limiting examples of anionic counterions are chloride, bromide, iodide, lactate, mesylate, besylate, triflate, acetate, trifluoroacetate, dichloroacetate, tartrate, lactate, and citrate. Examples of counterions have been described (e.g. Kumar, Pharm. Technol. 2008, 3, 128).

[0314] A pharmaceutical composition may comprise an aid in enhancing the stability, solubility, absorption, bioavailability, activity, pharmacokinetics, pharmacodynamics, cellular uptake, and intracellular trafficking of said hydroxyalkoxylated AON, in particular an excipient capable of forming complexes, nanoparticles, microparticles, nanotubes, nanogels, hydrogels, poloxamers or pluronics, polymersomes, colloids, microbubbles, vesicles, micelles, lipoplexes, and/or liposomes. Examples of nanoparticles include polymeric nanoparticles, (mixed) metal nanoparticles, carbon nanoparticles, gold nanoparticles, magnetic nanoparticles, silica nanoparticles, lipid nanoparticles, sugar particles, protein nanoparticles and peptide nanoparticles. An example of the combination of nanoparticles and oligonucleotides is spherical nucleic acid (SNA), as in e.g. Barnaby et al. Cancer Treat. Res. 2015, 166, 23.

[0315] In one embodiment, a pharmaceutical composition comprises at least one excipient that may further aid in enhancing the targeting and/or delivery of said composition and/or said hydroxyalkoxylated AON to a tissue and/or a cell and/or into a tissue and/or a cell. In one embodiment, a tissue or cell is a muscle tissue or muscle cell.

[0316] Many of these excipients are known in the art (e.g., see Bruno, Advanced Drug Delivery Reviews 2011; 63: 1210). Non-limiting examples of these excipients include polymers (e.g. polyethyleneimine (PEI), polypropyleneimine (PPI), dextran derivatives, butylcyanoacrylate (PBCA), hexylcyanoacrylate (PHCA), poly(lactic-co-glycolic acid) (PLGA), polyamines (e.g. spermine, spermidine, putrescine, cadaverine), chitosan, poly(amido amines) (PAMAM), poly(ester amine), polyvinyl ether, polyvinyl pyrrolidone (PVP), polyethylene glycol (PEG) cyclodextrins, hyaluronic acid, colominic acid, and derivatives thereof), dendrimers (e.g. poly(amidoamine)), lipids {e.g. 1,2-dioleoyl-3-dimethylammonium propane (DODAP), dioleoyldimethylammonium chloride (DODAC), phosphatidylcholine derivatives (e.g 1,2-distearoyl-sn-glycero-3-phosphocholine (DSPC)), lyso-phosphatidylcholine derivaties (e.g. 1-stearoyl-2-lyso-sn-glycero-3-phosphocholine (S-LysoPC)), sphingomyeline, 2-{3-(Bis-(3-amino-propyl)-amino)-propylamino}-N-ditetracedyl carbamoyl methylacetamide (RPR209120), phosphoglycerol derivatives (e.g. 1,2-dipalmitoyl-sn-glycero-3-phosphoglycerol, sodium salt (DPPG-Na), phosphaticid acid derivatives (1,2-di stearoyl-sn-glycero-3-phosphaticid acid, sodium salt (DSPA)), phosphatidylethanolamine derivatives (e.g. dioleoyl-L-R-phosphatidylethanolamine (DOPE), 1,2-distearoyl-sn-glycero-3-phosphoethanolamine (DSPE),2-diphytanoyl-sn-glycero-3-phosphoethanolamine (DPhyPE)), N-(1-(2,3-dioleoyloxy)propyl)-N,N,N-trimethylammonium (DOTAP), N-(1-(2,3-dioleyloxy)propyl)-N,N,N-trimethylammonium (DOTMA), 1,3-di-oleoyloxy-2-(6-carboxy-spermyl)-propylamid (DOSPER), (1,2-dimyristyolxypropyl-3-dimethylhydroxy ethyl ammonium (DMRIE), (N1-cholesteryloxycarbonyl-3,7-diazanonane-1,9-diamine (CDAN), dimethyldioctadecylammonium bromide (DDAB), 1-palmitoyl-2-oleoyl-sn-glycerol-3-phosphocholine (POPC), (β-L-Arginyl-2,3-L-diaminopropionic acid-N-palmityl-N-olelyl-amide trihydrochloride (AtuFECT01), N,N-dimethyl-3-aminopropane derivatives (e.g., 1,2-distearoyloxy-N,N-dimethyl-3-aminopropane (DSDMA), 1,2-dioleyloxy-N,N-dimethyl-3-aminopropane (DoDMA), 1,2-Dilinoleyloxy-N,N-3-dimethylaminopropane (DLinDMA)), 2,2-dilinoleyl-4-dimethylaminomethyl (1,3)-dioxolane (DLin-K-DMA), phosphatidylserine derivatives (e.g., 1,2-dioleyl-sn-glycero-3-phospho-L-serine, sodium salt (DOPS)), proteins (e.g. albumin, gelatins, atellocollagen), and peptides (e.g. protamine, PepFects, NickFects, polyarginine, polylysine, CADY, MPG). Carbohydrates and carbohydrate clusters as described herein, when used as distinct compounds, are also suitable for use as a first type of excipient.

[0317] In one embodiment, a composition may comprise at least one excipient that comprises or contains a covalently linked group as described herein to enhance targeting and/or delivery of the composition and/or of the hydroxyalkoxylated AON to a tissue and/or cell and/or into a tissue and/or cell, as for example muscle tissue or muscle cell. The covalently linked group may display one or more different or identical ligands. Non-limiting examples of covalently linked group ligands are e.g. peptides, carbohydrates or mixtures of carbohydrates (Han et al., Nature Communications, 2016, doi:10.1038/ncomms10981; Cao et al., Mol. Ther. Nucleic Acids, 2016, doi:10.1038/mtna.2016.46), proteins, small molecules, antibodies, polymers and drugs. Non-limiting examples of carbohydrate hydroxyalkoxylated AON group ligands are glucose, mannose, galactose, maltose, fructose, N-acetylgalactosamine (GalNac), glucosamine, N-acetylglucosamine (GlcNAc), glucose-6-phosphate, mannose-6-phosphate, and maltotriose. Carbohydrates may be present in plurality, for example as end groups on dendritic or branched hydroxyalkoxy group moieties that link the carbohydrates to the component of the composition. A carbohydrate can also be comprised in a carbohydrate cluster portion, such as a GalNAc cluster portion. A carbohydrate cluster portion can comprise a targeting moiety and, optionally, a hydroxyalkoxylated AON hydroxyalkoxy group. In some embodiments, the carbohydrate cluster portion comprises 1, 2, 3, 4, 5, 6, or more GalNAc groups. Any of the excipients disclosed herein may be combined together into one single composition as described herein.

[0318] The skilled person may select, combine and/or adapt one or more of the above or other alternative excipients and delivery systems to formulate and deliver a hydroxyalkoxylated AON for use as described herein.

[0319] Such a pharmaceutical composition as described herein may be administered in an effective concentration at set times to an animal, or a mammal. In one embodiment, a mammal is a human being. In another embodiment, the effective concentration of a hydroxyalkoxylated AON or composition is from 0.01 nM to 1 μM. In another embodiment, the concentration used is from 0.05 to 500 nM, or from 0.1 to 500 nM, or from 0.02 to 500 nM, or from 0.05 to 500 nM, or from 1 to 200 nM. Such concentrations are exemplary only and not intended to limit this disclosure in any way. Those skilled in the art will be able to readily determine the effective concentration of a hydroxyalkoxylated AON provided herein using methods well known in the art.

[0320] A hydroxyalkoxylated AON or a composition as defined herein for use may be suitable for direct administration to a cell, tissue and/or an organ in vivo of individuals affected by or at risk of developing a disease or condition as identified herein, and may be administered directly in vivo, ex vivo or in vitro. Administration may be via topical, systemic and/or parenteral routes, for example intravenous, subcutaneous, intraperitoneal, intrathecal, intramuscular, ocular, nasal, urogenital, intradermal, dermal, enteral, intravitreal, intracavernous, intracerebral, intrathecal, epidural or oral route.

[0321] In one embodiment, such a pharmaceutical composition may be encapsulated in the form of an emulsion, suspension, pill, tablet, capsule or soft-gel for oral delivery, or in the form of aerosol or dry powder for delivery to the respiratory tract and lungs.

[0322] In another embodiment, said hydroxyalkoxylated AON may be used together with another compound already known to be used for the treatment of said disease. Such other compounds may be used for reducing inflammation, for reducing muscle tissue inflammation, and/or an adjunct compound for improving muscle fiber function, integrity and/or survival and/or improve, increase or restore cardiac function.

[0323] Non-limiting examples of such other compounds are a steroid, a (gluco)corticosteroid, steroid-like agent (e.g., vamorolone (VBP15)), epicatechin, an ACE inhibitor (e.g., perindopril), an HDAC inhibitor (e.g., givinostat), an angiotensin II type 1 receptor blocker (e.g., losartan), angiotensin peptide (1-7) (e.g., TXA127), a tumor necrosis factor-alpha (TNFα) inhibitor, a TGFβ inhibitor (e.g., decorin), a NF-κB inhibitor (e.g., edasalonexent (CAT-1004)), human recombinant biglycan, a source of mIGF-1, a myostatin inhibitor (e.g., PF-06252616 or RG6206), mannose-6-phosphate, an antioxidant (e.g., idebenone), an ion channel inhibitor, dantrolene, a protease inhibitor, a phosphodiesterase inhibitor (e.g., a PDE5 inhibitor, such as sildenafil or tadalafil), an anti-inflammatory and/or antifibrotic agent (e.g., HT-100), an utrophin modulator (e.g., ezutromid), metformin, creatine monohydrate (CrM), heparin, a granulocyte colony-stimulating factor (GCSF) (e.g., filgrastim), a connective tissue growth factor (CTGF/CCN2) inhibitor (e.g., FG-3019), a calcium modulator (e.g., AT-300), an androgen receptor modulator (e.g., DT-200), L-citrulline, and/or L-arginine. Such combined use may be a sequential use: each component is administered in a distinct fashion, perhaps as a distinct composition. Alternatively each component may be used together in a single composition.

[0324] Compounds that are comprised in a composition described herein can also be provided separately, for example to allow sequential administration of the active components of the composition. In such a case, the composition is a combination of compounds comprising at least a hydroxyalkoxylated AON provided herein with or without a covalently linked ligand, and at least one excipient, as described above.

[0325] Methods of Use

[0326] In another embodiment, provided herein is a method for preventing, treating, curing, ameliorating and/or delaying a condition or disease as defined herein in an individual, in a cell (e.g., a muscle cell), tissue (e.g., a muscle tissue) or organ of said individual. The method comprises administering a hydroxyalkoxylated AON or a pharmaceutical composition as described herein to said individual or a subject.

[0327] The method provided herein wherein a hydroxyalkoxylated AON or a pharmaceutical composition as defined herein may be suitable for administration to a cell (e.g., a muscle cell), tissue (e.g., muscle tissue) and/or an organ in vivo of individuals affected by any of the herein defined diseases, and may be administered in vivo, ex vivo or in vitro. In one embodiment, an individual or a subject is a mammal. In one embodiment, an individual or a subject is a human being. In some embodiments, a subject is not a human. Administration may be via topical, systemic and/or parenteral routes, for example intravenous, subcutaneous, nasal, ocular, intraperitoneal, intrathecal, intramuscular, intracavernous, urogenital, intradermal, dermal, enteral, intravitreal, intracerebral, intrathecal, epidural or oral route, as is known to those of skill in the art.

[0328] Dose ranges of a hydroxyalkoxylated AON or pharmaceutical composition described herein are designed on the basis of rising dose studies in clinical trials (in vivo use), the design and execution of which are well known to those of skill in the art. A hydroxyalkoxylated AON as defined herein may be used at a dose from 0.01 to 200 mg/kg or 0.05 to 100 mg/kg or 0.1 to 50 mg/kg or 0.1 to 20 mg/kg, or from 0.5 to 10 mg/kg.

[0329] The ranges of dose of a hydroxyalkoxylated AON or pharmaceutical composition as provided herein are exemplary concentrations or doses for in vitro or ex vivo uses and are not exclusive. As well known to those of skill in the art, depending on the identity of the hydroxyalkoxylated AON used, the target cell to be treated, the gene target and its expression levels, the medium used and the transfection and incubation conditions, the concentration or dose of the hydroxyalkoxylated AON used may further vary.

[0330] In one embodiment, provided is a method for preventing, treating, and/or delaying Duchenne Muscular Dystrophy (DMD), comprising administering to a subject a hydroxyalkoxylated AON provided herein, or a pharmaceutical composition as described herein.

[0331] In another embodiment, provided is a method for diagnosis wherein the hydroxyalkoxylated AON provided herein is provided with a radioactive label or fluorescent label.

[0332] In another embodiment, provided herein is a hydroxyalkoxylated AON or a composition as described herein for use as a medicament or part of therapy, or applications in which said hydroxyalkoxylated AON or composition exert their activity intracellularly.

[0333] In one embodiment, a hydroxyalkoxylated AON or composition provided herein is for use as a medicament or part of a therapy for preventing, delaying, curing, ameliorating and/or treating Duchenne Muscular Dystrophy (DMD).

[0334] In another embodiment, provided herein is the use of a hydroxyalkoxylated AON or a composition provided herein in the manufacture of a medicament. In one embodiment, said use of a hydroxyalkoxylated AON or a composition provided herein in the manufacture of a medicament is for preventing, delaying, curing, ameliorating and/or treating Duchenne Muscular Dystrophy (DMD).

[0335] In one embodiment, a hydroxyalkoxylated AON provided herein is for use as a medicament for treating a disease or condition disclosed herein through splice modulation, such as through exon skipping, or exon inclusion, both of which are forms of splice switching. In one embodiment, exon 51 of dystrophin pre-mRNA is skipped. In one embodiment, exon 51 of human dystrophin pre-mRNA is skipped. In one embodiment, a disease is Duchenne Muscular Dystrophy (DMD).

[0336] In one embodiment, a hydroxyalkoxylated AON provided herein targets an exonic splicing enhancer (ESE). ESE sequences facilitate the recognition of genuine splice sites by the spliceosome (Cartegni et al., Nat Rev Genet 2002; 3(4):285-98; and Cartegni et al., Nucleic Acids Res 2003; 31(13):3568-71). A subgroup of splicing factors, called the SR proteins, can bind to these ESEs and recruit other splicing factors, such as U1 and U2AF to splice sites. The binding sites of the four most abundant SR proteins (SF2/ASF, SC35, SRp40 and SRp55) have been analyzed in detail and these results are implemented in ESE-finder, a web source that predicts potential binding sites for these SR proteins (Cartegni et al., Nat Rev Genet 2002; 3(4):285-98; and Cartegni et al., Nucleic Acids Res 2003; 31(13):3568-71).

[0337] In one embodiment, the hydroxyalkoxylated AON as described herein consisting or consisting essentially of one antisense oligonucleotide and one or two hydroxyalkoxy groups (as described in the section “Hydroxyalkoxy Groups”), induces skipping of exon 51 of the dystrophin pre-mRNA. In another embodiment, the antisense oligonucleotide of the hydroxyalkoxylated AON induces single-exon skipping and the complementarity of its sequence with the region targeted of a given dystrophin exon is from 90 to 100%. In certain embodiments, the hydroxyalkoxylated AONs contain 1 or 2 mismatch(es) in an oligonucleotide of 20 nucleotides or 1 to 4 mismatches in an oligonucleotide of 40 nucleotides. In other embodiments, the hydroxyalkoxylated AONs contain 1, 2, 3, 4 or 5 mismatches in an oligonucleotide of 10 to 50 nucleotides. In one embodiment, 0, 1 or 2 mismatches are present in an oligonucleotide of 10 to 50 nucleotides. In another embodiment, in an oligonucleotide of 10 to 33 nucleotides, 0, 1, 2 or 3 mismatches are present, or, 0, 1 or 2 mismatches are present. In other embodiments, in an oligonucleotide of 16 to 22 nucleotides, 0, 1 or 2 mismatches are present, or 0 or 1 mismatch is present.

[0338] In one embodiment, the antisense oligonucleotide of the hydroxyalkoxylated AON provided herein induces dystrophin pre-mRNA splicing modulation, said pre-mRNA splicing modulation alters production or composition of protein, which comprises exon skipping or exon inclusion. In one embodiment, said pre-mRNA splicing modulation comprises exon skipping. This pre-mRNA splicing modulation can be used in the context of a therapeutic application as disclosed herein. Splicing of a pre-mRNA occurs via two sequential transesterification reactions involving an intronic branch point and a splice site of an adjacent intron.

[0339] The objective of pre-mRNA splicing modulation can be to alter production of protein, most often the protein the RNA codes for. This production can be altered through increase or decrease of the level of said production. This production can also be altered through alteration of the composition of the protein that is actually produced, for example when pre-mRNA splicing modulation results in inclusion or exclusion of one or more exons, and in a protein that has a different amino acid sequence.

[0340] In the case of DMD, dystrophin pre-mRNA splicing modulation can be applied to skip one or more specific exons in the dystrophin pre-mRNA in order to restore the open reading frame of the transcript and to induce the expression of a shorter but (more) functional dystrophin protein, with the ultimate goal to be able to interfere with the course of the disease. In one embodiment, provided is a hydroxyalkoxylated AON, wherein said hydroxyalkoxylated AON induces dystrophin pre-mRNA splicing modulation, wherein said dystrophin pre-mRNA splicing modulation alters production of protein that is related to Duchenne Muscular Dystrophy (DMD).

[0341] In one embodiment, a hydroxyalkoxylated AON as disclosed herein can be used for inducing exon-skipping in the dystrophin pre-mRNA in a cell, in an organ, in a tissue and/or in an individual. In one embodiment, a hydroxyalkoxylated AON can be used for skipping exon 51 of the dystrophin pre-mRNA.

[0342] Binding of dystrophin to actin and to the DGC or DAPC complex may be visualized by either co-immunoprecipitation using total protein extracts or immunofluorescence analysis of cross-sections using various antibodies reacting with the different members of the complex, from a control (non-DMD) biopsy of one from a muscle suspected to be dystrophic, pre- and/or post-treatment, as known to the skilled person.

[0343] Individuals or patients suffering from Duchenne muscular dystrophy typically have a mutation in the gene encoding dystrophin (the DMD or dystrophin gene) that prevents synthesis of the complete protein, i.e. a premature stop codon prevents the synthesis of the C-terminus. In Becker muscular dystrophy the dystrophin gene also comprises a mutation compared to the wild type but the mutation does typically not result in a premature stop codon and the C-terminus is typically synthesized. As a result a functional or semi-functional dystrophin protein is synthesized that has at least the same activity in kind as the wild type protein, although not necessarily the same amount of activity. The genome of a BMD patient typically encodes a dystrophin protein comprising the N terminal part (first 240 amino acids at the N terminus), a cysteine-rich domain (amino acid 3361 till 3685) and a C-terminal domain (last 325 amino acids at the C-terminus) but in the majority of cases its central rod shaped domain is shorter than the one of a wild type dystrophin (Monaco et al., Genomics 1988; 2: 90-95). Antisense oligonucleotide-induced exon skipping for the treatment of DMD is typically directed to overcome a premature stop in the pre-mRNA by skipping an exon, in one embodiment in the central rod-domain shaped domain, to correct the open reading frame and allow synthesis of remainder of the dystrophin protein including the C-terminus, albeit that the protein is somewhat smaller as a result of a smaller rod domain. In one embodiment, an individual having DMD and being treated by a hydroxyalkoxylated AON as defined herein will be provided a dystrophin which exhibits at least to some extent an activity of a wild type dystrophin. In one embodiment, if said individual is a Duchenne patient or is suspected to be a Duchenne patient, a functional or a semi-functional dystrophin is a dystrophin of an individual having BMD: typically said dystrophin is able to interact with both actin and the DGC or DAPC, but its central rod shaped domain may be shorter than the one of a wild type dystrophin (Monaco et al., Genomics 1988; 2: 90-95). The central rod domain of wild type dystrophin comprises 24 spectrin-like repeats. For example, a central rod shaped domain of a dystrophin as provided herein may comprise 5 to 23, 10 to 22 or 12 to 18 spectrin-like repeats as long as it can bind to actin and to DGC.

[0344] Alleviating one or more symptom(s) of Duchenne Muscular Dystrophy in an individual using a hydroxyalkoxylated AON described herein may be assessed by any of the following non-limiting assays: prolongation of time to loss of walking, improvement of muscle strength, improvement of the ability to lift weight, improvement of the time taken to rise from the floor, improvement in the nine-meter walking time, improvement in the time taken for four-stairs climbing, improvement of the leg function grade, improvement of the pulmonary function, improvement of cardiac function, or improvement of the quality of life. Each of these assays is known to the skilled person. As an example, the publication of Manzur et al. (Wiley publishers, 2008. The Cochrane collaboration), gives an extensive explanation of each of these assays. For each of these assays, as soon as a detectable improvement or prolongation of a parameter measured in an assay has been found, it will mean that one or more symptoms of Duchenne Muscular Dystrophy has been alleviated in an individual using a compound described herein. Detectable improvement or prolongation is a statistically significant improvement or prolongation as described in Hodgetts et al. (Neuromuscular Disorders 2006; 16: 591-602). Alternatively, the alleviation of one or more symptom(s) of Duchenne Muscular Dystrophy may be assessed by measuring an improvement of a muscle fiber function, integrity and/or survival. In one embodiment, one or more symptom(s) of a DMD patient is/are alleviated and/or one or more characteristic(s) of one or more muscle cells from a DMD patient is/are improved. Such symptoms or characteristics may be assessed at the cellular, tissue level or on the patient self.

[0345] An alleviation of one or more characteristics of a muscle cell from a patient may be assessed by any of the following assays on a myogenic cell or muscle cell from a patient: reduced calcium uptake by muscle cells, decreased collagen synthesis, altered morphology, altered lipid biosynthesis, decreased oxidative stress, and/or improved muscle fiber function, integrity, and/or survival. These parameters are usually assessed using immunofluorescence and/or histochemical analyses of cross sections of muscle biopsies.

[0346] The improvement of muscle fiber function, integrity and/or survival may be assessed using at least one of the following assays: a detectable decrease of creatine kinase in blood, a detectable decrease of necrosis of muscle fibers in a biopsy cross-section of a muscle suspected to be dystrophic, and/or a detectable increase of the homogeneity of the diameter of muscle fibers in a biopsy cross-section of a muscle suspected to be dystrophic. Each of these assays is known to the skilled person.

[0347] Creatine kinase may be detected in blood as described in Hodgetts et al. (Neuromuscular Disorders 2006; 16: 591-602). A detectable decrease in creatine kinase may mean a decrease of 5%, 10%, 20%, 30%, 40%, 50%, 60%, 70%, 80%, 90% or more compared to the concentration of creatine kinase in a same DMD patient before treatment.

[0348] A detectable decrease of necrosis of muscle fibers can be assessed in a muscle biopsy, for example, as described in Hodgetts et al. (Neuromuscular Disorders 2006; 16: 591-602), using biopsy cross-sections. A detectable decrease of necrosis may be a decrease of 5%, 10%, 20%, 30%, 40%, 50%, 60%, 70%, 80%, 90% or more of the area wherein necrosis has been identified using biopsy cross-sections. The decrease is measured by comparison to the necrosis as assessed in a same DMD patient before treatment.

[0349] A detectable increase of the homogeneity of the diameter of a muscle fiber can be assessed in a muscle biopsy cross-section, for example, as described in Hodgetts et al. (Neuromuscular Disorders 2006; 16: 591-602). The increase is measured by comparison to the homogeneity of the diameter of a muscle fiber in a same DMD patient before treatment.

[0350] In one embodiment, a hydroxyalkoxylated AON as described herein provides said individual with a functional or a semi-functional dystrophin protein, and is able to, for at least in part decrease the production of an aberrant dystrophin protein in said individual.

[0351] In one embodiment, providing an individual with a functional or a semi-functional dystrophin protein means an increase in the production of functional or semi-functional dystrophin protein as earlier defined herein. Increasing the production of functional or semi-functional dystrophin mRNA, or functional or semi-functional dystrophin protein, means a detectable increase or at least 5%, 10%, 20%, 30%, 40%, 50%, 60%, 70%, 80%, 90%, 100%, 120%, 140%, 160%, 180%, 200% or more compared to the initial amount of functional or semi-functional mRNA, or functional or semi-functional dystrophin protein, as detectable by RT-digital droplet PCR (mRNA) (Verheul et al., PLoS ONE 2016; 11(9): e0162467) or immunofluorescence (Beekman et al., PLoS ONE 2014; 9(9): e107494), western blot, or capillary Western immunoassay (Wes; Beekman et al., PLoS ONE 2018; 13(4): e0195850) analysis (protein). In one embodiment, said initial amount is the amount of functional or semifunctional mRNA, or functional or semi-functional dystrophin protein, at the onset of inducing exon-skipping in the dystrophin pre-mRNA in a cell, in an organ, in a tissue and/or in an individual using a hydroxyalkoxylated AON as described herein. Decreasing the production of an aberrant dystrophin mRNA, or aberrant dystrophin protein, means that 90%, 80%, 70%, 60%, 50%, 40%, 30%, 20%, 10%, 5% or less of the initial amount of aberrant dystrophin mRNA, or aberrant dystrophin protein, is still detectable by RT-digital droplet PCR (mRNA) or immunofluorescence, western blot, or capillary Western immunoassay (Wes) analysis (protein). In one embodiment, said initial amount is the amount of aberrant dystrophin mRNA, or aberrant dystrophin protein, at the onset of inducing exon-skipping in the dystrophin pre-mRNA in a cell, in an organ, in a tissue and/or in an individual using a hydroxyalkoxylated AON as described herein. An aberrant dystrophin mRNA or protein is also referred to herein as a less functional (compared to a wild type functional dystrophin protein as earlier defined herein) or a non-functional dystrophin mRNA or protein. A non-functional dystrophin protein is a dystrophin protein which is not able to bind actin and/or members of the DGC protein complex. A non-functional dystrophin protein or dystrophin mRNA does typically not have, or does not encode a dystrophin protein with an intact C-terminus of the protein. The detection of a functional or semi-functional dystrophin mRNA or protein may be done as for an aberrant dystrophin mRNA or protein.

[0352] Once a DMD patient is provided with a functional or a semi-functional dystrophin protein by administration of a hydroxyalkoxylated AON provided herein, at least part of the cause of DMD is taken away. Hence, it would then be expected that the symptoms of DMD are at least partly alleviated, or that the rate with which the symptoms worsen is decreased, resulting in a slower decline.

[0353] Overview of the Sequence Listing

[0354] The table below is provided to assist the skilled reader in interpreting the disclosure herein, including the Sequence Listing. The Descriptions below are not intended to limit this disclosure in any way.

| SEQ ID NO | Description |
|---|---|
| 1 | Human dystrophin protein |
| 2 | Exon 51 |
| 3 | ESE motif 1 of exon 51 |
| 4 | Reverse complement of SEQ ID NO: 3 |
| 5 | ESE motif 2 of exon 51 |
| 6 | Reverse complement of SEQ ID NO: 5 |
| 7 | Drisapersen/Suvodirsen (WVE-210201) |
| 8 | Eteplirsen |
| 9-404 | Unmodified antisense oligonucleotides |
| 405-800 | Hydroxyalkoxylated AONs: AONs (SEQ ID NO: 9-404) with a |
| | hydroxyalkoxy group (TEG) at 5′ terminal monomer of said AON |
| 801-1196 | Hydroxyalkoxylated AONs: AONs (SEQ ID NO: 9-404) with a |
| | hydroxyalkoxy group (TEG) at 3′ terminal monomer of said AON |
| 1197-1592 | Hydroxyalkoxylated AONs: AONs (SEQ ID NO: 9-404) with a |
| | hydroxyalkoxy group (TEG) at 5′ terminal monomer of said AON |
| | and a hydroxyalkoxy group (TEG) at 3′ terminal monomer of said |
| | AON |
| 1593-1988 | Antisense oligonucleotides represented by |
| | SEQ ID NO: 9-404, wherein all cytosine bases are 5- |
| | methylcytosine |
| 1989-3176 | Hydroxyalkoxylated AONs represented by SEQ ID NO: 405-1592, |
| | wherein all cytosine bases are 5-methylcytosine |
| 3177-4760 | Antisense oligonucleotides represented by SEQ ID NO: 9-404 and |
| | hydroxyalkoxylated AONs represented by SEQ ID NO: 405-1592, |
| | comprising a single BNA scaffold modification in the monomer at |
| | the 5′-terminus |
| 4761-6344 | Antisense oligonucleotides represented by SEQ ID NO: 9-404 and |
| | hydroxyalkoxylated AONs represented by SEQ ID NO: 405-1592, |
| | comprising a single BNA scaffold modification in the monomer at |
| | the 3′-terminus |
| 6345-7928 | Antisense oligonucleotides represented by SEQ ID NO: 9-404 and |
| | hydroxyalkoxylated AONs represented by SEQ ID NO: 405-1592, |
| | comprising two BNA scaffold modifications where one is in the |
| | monomer at the 5′-terminus and the other is in the monomer at the |
| | 3′-terminus |
| 7929-9512 | Antisense oligonucleotides represented by SEQ ID NO: 9-404 and |
| | hydroxyalkoxylated AONs represented by SEQ ID NO: 405-1592, |
| | comprising two BNA scaffold modifications, one in the monomer |
| | at the 5′-terminus and the other in the adjacent monomer |
| 9513-11096 | Antisense oligonucleotides represented by SEQ ID NO: 9-404 and |
| | hydroxyalkoxylated AONs represented by SEQ ID NO: 405-1592, |
| | comprising two BNA scaffold modifications, one in the monomer |
| | at the 3′-terminus and the other in the adjacent monomer |
| 11097-12680 | Antisense oligonucleotides represented by SEQ ID NO: 9-404 and |
| | hydroxyalkoxylated AONs represented by SEQ ID NO: 405-1592, |
| | comprising four BNA scaffold modifications, one in the monomer |
| | at the 5′-terminus, one in the monomer adjacent to the 5′-terminus, |
| | one in the monomer at the 3′-terminus and one in the monomer |
| | adjacent to the 3′-terminus |
| 12681-22184 | Antisense oligonucleotides and hydroxyalkoxylated AONs |
| | represented by SEQ ID NO: 3177-12680, wherein all cytosine |
| | bases are 5-methylcytosine |
| 22185-22232 | Antisense oligonucleotides and hydroxyalkoxylated AONs |
| | comprising an antisense oligonucleotide with BNA scaffold |
| | modifications at specific monomers, wherein the corresponding |
| | unmodified antisense oligonucleotide may be represented by SEQ |
| | ID NO: 11. |
| 22233-22292 | Antisense oligonucleotides and hydroxyalkoxylated AONs |
| | comprising an antisense oligonucleotide with BNA scaffold |
| | modifications at specific monomers, wherein the corresponding |
| | unmodified antisense oligonucleotide may be represented by SEQ |
| | ID NO: 9. |
| 22293-22332 | Antisense oligonucleotides and hydroxyalkoxylated AONs |
| | comprising an antisense oligonucleotide with BNA scaffold |
| | modifications at specific monomers, wherein the corresponding |
| | unmodified antisense oligonucleotide may be represented by SEQ |
| | ID NO: 10. |
| 22333-22480 | Antisense oligonucleotide and hydroxyalkoxylated AONs |
| | represented by SEQ ID NO: 22185-22332, wherein all cytosine |
| | bases are 5-methylcytosine. |
| 22481-22485 | PCR primers |
| 22486-22490 | Further antisense oligonucleotides and hydroxyalkoxylated AONs |

### EXAMPLES

[0355] The following examples are offered for illustrative purposes only, and are not intended to limit the scope of the present application in any way.

### Example 1

[0356] Materials and Methods

[0357] Hydroxyalkoxylated AON

[0358] All antisense oligonucleotides (AONs) (Table 1) consist of 2′-O-methyl RNA monomers linked by phosphorothioate backbone linkages and at least one LNA modification (SEQ ID NO: 22333), the same applies to the AON of the hydroxyalkoxylated AON represented by SEQ ID NO: 22345. The AONs were synthesized using commercially available solid phase synthesis (SPS) oligonucleotide synthesizers, such as an OP-10 synthesizer (GE/ÄKTA Oligopilot), a MerMade 12 Synthesizer (BioAutomation), or a Cytiva synthesizer. Standard phosphoramidite protocols were utilized. Chemical synthesis of the oligonucleotide via phosphoramidite chemistry involves sequential coupling of activated phosphoramidite monomers to an elongating polymer, which is covalently attached via the 3′ terminus to a solid support matrix. The hydroxyalkoxy group, such as TEG or HEG (hexaethylene) group, in the hydroxyalkoxylated AONs was introduced using the corresponding phosphoramidite, chloroformate, chloramidate or thiophosphoramidite building blocks and standard synthesis protocols. The AONs were deprotected and cleaved in a two-step sequence (DEA followed by conc. NH₄OH treatment), purified by anion-exchange chromatography, desalted by size exclusion chromatography and lyophilized. Mass spectrometry confirmed the identity of all AONs, and purity (determined by UPLC-UV) was found acceptable for all AONs (>80%).

TABLE 1

| | SEQ |
|---|---|
| | ID |
| Sequence (5′-3′) | NO |
| GGUAAGUUC*UGUC*C*AAGC* | 22333 |
| TEG-GGUAAGUUC*UGUC*C*AAGC* | 22345 |

A = adenosine;
G = guanine;
U = uracil;
T = thymine;
C* = 5-methylcytosine;
G, C* = LNA nucleotides;
TEG = tri-ethylene glycol group.

[0359] Mouse Experiment

[0360] This mouse experiment was carried out according to the National Institute of Health (NIH) guidelines for the care and use of laboratory animals. hDMDΔ52/mdx mice (Leiden University Medical Center, Veltrop et al., 2018; PLoS ONE 13 (2):e0193289) were randomized into groups (n=10) taking into account baseline weight and male-female distribution. Mice received 1× weekly an intravenous tail vein injection with a single antisense oligonucleotide represented by SEQ ID NO: 22333 (18 mg/kg), starting at 5-6 weeks of age for a total of 13 weeks. Mice received the hydroxyalkoxylated AON represented by SEQ ID NO: 22345, starting at 5-6 weeks of age for a total of 13 weeks. Ten days after the last AON injection the animals were sacrificed and tissue samples collected (after transcardial perfusion with PBS in order to remove blood from the tissues). Quadriceps muscle tissue samples were snap frozen and stored at −80° C.

[0361] RNA Isolation and cDNA Synthesis

[0362] Quadriceps muscle tissue samples were homogenized in 1 mL Nucleozol (Macherey Nagel) by grinding in a MagNa Lyser using Lysing Matrix D Tubes (MP Biomedicals). Total RNA was extracted from the homogenate based on the manufacturer's instructions. For cDNA synthesis, 1000 ng of total RNA was used as input. cDNA was generated in 20 μL reactions using random hexamer primers and GoScript Reverse Transcriptase and an incubation of 40 minutes at 50° C.

[0363] Digital Droplet PCR Analysis

[0364] Specific Taqman minor groove binder (MGB) assays were designed (using Primer Express 3.0.1 software; Applied Biosystems) to detect the dystrophin transcript products with and without exon 51 (Table 2) and purchased from Applied Biosystems. Digital droplet PCR analysis was performed on 2 or 4 μL of cDNA in a 20 μL reaction volume using an annealing/extension temperature of 60 C according to the manufacturer's instructions (BioRad). Data was presented as percentage exon skip (N₀ skipped/(N₀ skipped+N₀ non-skipped)*100).

TABLE 2

| | | | | SEQ |
|---|---|---|---|---|
| | Target | | | ID |
| Assay | Exons | Sequences | | NO |
| DMD_ | 47/52 | Forward | TGAAAATAAGCTCAAGCAGA | 22481 |
| 47-52 | | primer | CAAATC | |
| | | Reverse | GACGCCTCTGTTCCAAATCC | 22482 |
| | | primer | | |
| | | Probe | CAGTGGATAAAGGCAACA | 22483 |
| DMD_ | 51/52 | Forward | GTGATGGTGGGTGACCTTGAG | 22484 |
| 51-52.2 | | primer | | |
| | | Reverse | GACGCCTCTGTTCCAAATCC | 22482 |
| | | primer | | |
| | | Probe | CAAGCAGAAGGCAACAA | 22485 |

[0365] Protein Lysate Preparation

[0366] Frozen muscle tissue sections were homogenized in a Lysing Matrix D Tube (MP Biomedicals) with 200 μL Protein Lysis Buffer (15% SDS; 75 mM Tris-HCl pH 6.8; 5% β-Mercaptoethanol and a Protease Inhibitor Cocktail tablet (Roche/Sigma), using a MagNA Lyser (Roche). The supernatants were transferred to a new tube and supplemented with glycerol (final concentration 20%). Twenty-fold dilutions of these lysates were measured for total protein concentration using Pierce 660 nm Protein Assay Reagent (Thermo Scientific) and Ionic Detergent Compatibility Reagent (Thermo Scientific), according to the manufacturer's instructions.

[0367] Wes Analysis

[0368] Wes (ProteinSimple) analysis was performed according to the manufacturer's instructions, using a 66-440 kDa Separation Module (ProteinSimple SM-W008) and instrument default settings. The muscle lysates were diluted to 312.5 μg/mL, resulting in a final loading amount of 1.25 μg per well. The antibodies used were 1:50 mouse anti-dystrophin antibody Mandys106 (Glenn Morris) and 1:100 rabbit anti-vinculin antibody E1E9V (Cell signaling), together with Anti-Mouse and Anti-Rabbit Detection Modules (ProteinSimple DM-002 and DM-001). Electropherograms were inspected for proper peak detection and peak areas were converted to percentage of healthy hDMD control using calibration curves. Dystrophin levels were normalized to vinculin. The reported results are (dystrophin/vinculin) expressed as hDMD.

[0369] Results

[0370] In this example, the exon skipping activity/efficiency and the production of a functional or semi-functional dystrophin protein were assessed for SEQ ID NOS: 22333 (Cmpd 1) and 22345 (Cmpd 2 PS). Exon skipping activity and production of a functional or semi-functional dystrophin protein is indicative of the bio-activity. Following a 13 week treatment (by weekly intravenous tail vein injections) with 18 mg/kg of the oligonucleotide with SEQ ID NO: 22333 (Cmpd 1), the dystrophin-deficient hDMDΔ52/mdx mice exhibited approximately a 30% increase in dystrophin expression in quadriceps biopsies (determined by WES analysis) when compared to mice treated with vehicle (FIG. 1). Similarly, when hDMDΔ52/mdx mice were treated with 18.7 mg/kg of the oligonucleotide hydroxyalkoxylated AON with SEQ ID NO: 22345 (Cmpd 2 PS) for 13 weeks by weekly intravenous tail vein injections, an approximately 30% increase in dystrophin expression in quadriceps was observed compared to mice treated with vehicle (FIG. 1). In these studies, both the oligonucleotide with SEQ ID NO: 22333 (Cmpd 1) and the oligonucleotide hydroxyalkoxylated AON with SEQ ID NO: 22345 (Cmpd 2 PS) exhibited approximately a 6% increase in dystrophin expression in heart at 14 days post-last-dose as compared to mice treated with vehicle, as determined by Western immunoassay (FIG. 1). In the case of SEQ ID NO: 22345 (Cmpd 2 PS), dystrophin continued to increase to 50% in quadriceps at 28-days post-last-dose, as compared to mice treated with vehicle (FIG. 2). When SEQ ID NO: 22333 (Cmpd 1) was evaluated for body weight effects, the drug-treated mice showed negligible body weight loss compared to the vehicle-treated mice (FIG. 8). SEQ ID NOS: 22333 (Cmpd 1) and 22345 (Cmpd 2 PS and Cmpd 2 PO) were evaluated for their impact on liver function by measuring alkaline phosphatase (“ALP”), alanine aminotransferase (“ALT”) and aspartate transaminase (“AST”) levels in healthy CD-1 mice. In healthy subjects, ALP, ALT and AST levels in the blood are low. If there is liver damage, more ALP, ALT or AST is released into the blood and levels will rise. The liver test showed ALP, ALT and AST levels in the drug-treated mice to be comparable to such levels the WT mice (with no disease) (FIG. 3A), and significantly lower ALT and AST levels than that in the vehicle-treated hDMDΔ52/mdx (diseased) mice (FIG. 3B). Dystrophin increases were accompanied by correction of neuronal nitric oxide synthase, and motor function improvement. Antisense oligonucleotide treatments with SEQ ID NO: 22345 (Cmpd 2 PS) (FIG. 3C) did not result in adverse renal effects, known to be a clinically translatable endpoint in mice. Absence of renal findings were, for the most part, confirmed in CD-1 mice (13 weekly doses at 9-18 mg/kg).

### Example 2

[0371] Cynomolgus Monkey Experiment

[0372] Eighteen normal male cynomolgus monkeys (˜3 kg at week one dose administration) were treated IV with the hydroxyalkoxylated AON with SEQ ID NO: 22345 (Cmpd 2 PO) or the AON having SEQ ID NO: 22333 (Cmpd 1) for 8-13 weeks at dose levels of 1-3 mg/kg as shown below (each Group had 6 monkeys). Each once-weekly IV dose given as a one-hour infusion via cephalic vein (chair restraint).

| | Dose | | | | Termination N | |
|---|---|---|---|---|---|---|
| | Article | | | | (Post-Final Dose) | |
| | (SEQ | | Dose | Dose | | 5 Weeks |
| | ID | IV Dose | Level | Volume | 1 Week | (Days 86 |
| Group | NO) | Regimen | (mg/kg) | (mL/kg) | (Day 57) | or 120) |
| 1 | 22333 | QW × 8 W | 1 | 2 | 3 | 3 (D86) |
| 2 | 22333 | QW × 8 W | 3 | 2 | 3 | 3 (D86) |
| 3 | 22345 | QW × 8 W/ | 1 | 2 | 3 (8 W) | 3 (13 W; |
| | PO | 13 W | | | | D120) |

[0373] In Groups 1 and 2, all animals were dosed QW×8W (i.e., on Days 1, 8, 15, 22, 29, 36, 43 and 50) for total of 8 doses before a 1- or 5-week recovery period (Days 57 & 86, respectively).

[0374] In Group 3, all animals were dosed QW×8W (i.e., on Days 1, 8, 15, 22, 29, 36, 43 and 50) for total of 8 doses. Subsequently,
[0375] (a) one cohort (n=3) had a 1-week recovery period (Day 57); and
[0376] (b) a second cohort (n=3) continued to receive five additional QW infusions (Days 57, 64, 71, 78 and 85) for total of 13 doses before a 5-week recovery period (Day 120).

[0377] Endpoint analysis (weekly BWs, observations and qualitative food consumption; clinical pathology (hematology, clinical chemistry & coagulation); extensive coagulation testing for dosing on Days 1, 22, 50 and 85; complement activation (Bb, C3a & sC5b-9); match extensive coagulation testing time points; urinalysis and urine chemistry; renal injury biomarkers; serum Cystatin C; urinary KIM-1, Clusterin, microalbumin & NAG; plasma and tissue TK; predose plasma collections through study; extensive plasma collections for dosing on Days 1, 22, 50 and 85; terminal plasma and tissue AON levels; tissue % exon skipping (liver, kidney, gastrocnemius); gross pathology and selected organ weights; histopathology (gall bladder, heart, kidney, liver, lung, lymph node (mesenteric), gastrocnemius, spleen, testis, kidney for possible Transmission Electron Microscopy (TEM))) demonstrated a lack of kidney or major organ toxicity.

[0378] Two complement analytes were tested to assess the level of complement activation. Bb is produced during alternative pathway complement activation, and C3a is produced during activation at the central part of complement. Bb and C3a have been demonstrated to be appropriate markers of activation in response to oligonucleotide-based therapeutics (Shen, L., Frazer-Abel, A., et al, J Pharmacol Exp Ther, 351:709-717, December 2014).

[0379] Figures of the data (FIG. 4) were calculated as percent Day −7. The data was presented this way to control for inter-animal differences in baseline complement levels.

[0380] The level of alternative pathway activation, as reflected by levels of the complement fragment Bb, increased after dosing on Day 1 for all treatment groups. The increase was greatest for animals treated with SEQ ID NO: 22333 (Cmpd 1) at 1 mg/kg with means exceeding two fold over baseline, in comparison to the 1 mg/kg SEQ ID NO: 22345 (Cmpd 2 PO)-treated animals which only increased to just below two fold. For SEQ ID NO: 22333 (Cmpd 1) the peak increase in measured Bb levels was reached on Day 1 at 6 hours post EOI. For SEQ ID NO: 22333 (Cmpd 1) dosed at 3 mg/kg (not shown), the pattern was consistent between 6 hours and 24 hours and, there was less of a decrease within 24 hours post EOI when compared to 1 mg/kg, indicating the alternative pathway activation observed in response to SEQ ID NO: 22333 (Cmpd 1) was not dose dependent. Additionally, the level of Bb measured on Day 22 and Day 50 trended to a lower group mean than that measured on first exposure on Day 1.

[0381] The second complement analyte measurement was C3a. C3a is produced when complement activation is strong enough to reach the central point of complement. Levels of C3a are important as it is an anaphylatoxin with downstream pro-inflammatory effects. Consistent with the measured Bb levels, the C3a levels measured in animals treated with SEQ ID NO: 22333 (Cmpd 1) were increased 1.6 fold increase over Day −7 levels. SEQ ID NO: 22345 (Cmpd 2 PO) at 1 mg/kg did not exhibit any increase in C3a across all days and timepoints measured.

[0382] The pattern of complement activation markers tested indicate the test article SEQ ID NO: 22333 (Cmpd 1) activates complement through the alternative pathway, impinging on the central point of complement but leading to an activation of the terminal pathway of less than three fold over pre-study levels, and was not consistent across the animals. This activation was transient, decreasing generally by 24 hours post EOI and returning to near baseline levels before the next once-weekly dose. The increases were generally not dose dependent and not additive, instead decreasing in level with repeat exposure. SEQ ID NO: 22345 (Cmpd 2 PO) only demonstrated mild activation of the alternative pathway with no clear increases downstream in the complement system. Further, the data at 22 and 50 days shows no overall accumulation of Bb and C3a.

[0383] Summary

[0384] Antisense oligonucleotide-induced activation of the alternative complement pathway was transient and at sub-clinical levels, as measured by Bb and C3a analysis (FIG. 4); coagulation effects were also mild and transient (<5 sec prolongation of APTT). Plasma pK concentration for these AONs showed a dose proportional profile (FIG. 5).

### Example 3

[0385] Functional Motor Assay

[0386] Mice were tested at baseline and one week after last dose of hydroxyalkoxylated AON having SEQ ID NO: 22345 (Cmpd 2 PS) for walking behavioral tasks (Step, Stride, Stance, Swing analyses, Limb Coordination) according to the protocols below.

[0387] Open Field

[0388] Mice were tested in the Open field test at baseline, midpoint (after the 8th i.v. injection) and 1 week after last dose using Activity chambers (Med Associates Inc, St Albans, Vt.; 27×27×20.3 cm). Mice were brought to the experimental room for at least 30 min acclimation to the experimental room conditions prior to testing. Activity chambers were equipped with IR beams. Mice were placed in the center of the chamber and their behavior was recorded for 30 min. The following parameters were recorded: distance traveled, number of vertical rearings and average velocity.

[0389] Fine Motor Kinematic Analysis

[0390] Mice were tested in the MotoRater test at baseline, midpoint (after the 8th i.v. injection) and 1 week after last dose using walking behavioral tasks (Step, Stride, Stance, Swing analyses, Limb Coordination). On the day of testing, the mice were marked in appropriate points of body, such as joints of limbs and parts of tail to ease the data analysis process. The movement data was captured using a high speed camera (300 frames/second) from three different dimensions, from below and both sides. The captured videos of each mouse were first converted to SimiMotion software to track the marked points of body to have the raw data, i.e., the movement of the different body points in coordinates in relation to the ground, and each of the three dimensions were correlated. Different gait patterns and movements were analyzed using a custom made automated analysis system. The analyzed parameters included: 1) general gait pattern parameters (stride time and speed, step width, stance and swing time during a stride, interlimb coordination), 2) body posture and balance (toe clearance, iliac crest and hip height, hind limb protraction and retraction, tail position and movement), and 3) fine motor skills (swing speed during a stride, jerk metric during swing phase, angle ranges and deviations of different joints, vertical and horizontal head movement).

[0391] Principal Component Analysis

[0392] The gait parameters have always several (and complex) inter-correlations. For example, a shorter stride duration and longer step lengths lead to higher speed. Different “gait features”, which are manifested in sets of highly correlating parameters, can be identified using Principal Component Analysis (PCA).

[0393] Principal Component Analysis is a statistical tool to:
[0394] (a) compact the information in a multivariate data set,
[0395] (b) reveal correlations between original variables, and ultimately,
[0396] (c) create a small set of new and sensitive uncorrelated parameters, the principal components (PC).

[0397] PCA is a linear transformation based on principal component coefficients and eigenvectors. The transformed, new, uncorrelated variables are called the PC scores. The first principal component (PC) corresponds to such linear combination of data which has the largest possible variance. The second PC has again the largest possible variance of what is left when the proportion of the first PC is discarded, and so on for the rest of the PCs. The eigenvectors also reveal information about the internal structure of the data, i.e., mutually correlated parameters. Each PC score represent combined information of all the parameters which are emphasized in the corresponding PC.

[0398] For making the PC interpretation easier, several eigenvector rotation techniques exist. Rotation is a procedure in which the eigenvectors are manipulated to achieve simple structure, or the number of clearly non-zero elements of each eigenvector is optimized to be as low as reasonably possible. In this study, the orthogonality preserving, Varimax rotation procedure was used.

[0399] Finally, an overall gait analysis score based on PCA was determined. The score is based on differences between the hDMD del52/mdx and C57BL/6J vehicle groups in all the PC scores. Thus, the purpose of that score is to identify a disease model specific combination of original variables—a “fingerprint”—which characterizes the disease model in the best possible way and differentiates the two groups. After the “fingerprint”, or discriminant direction vector, has been determined, the overall gait analysis scores can be obtained by projecting the (normalized) parameter data of each individual mouse onto the discriminant direction vector. Ultimately, the overall kinematic effects of a pharmacological agent can be seen in a highly sensitive manner.

[0400] Results are shown in FIG. 6. Distance from WT=overall similarity of series of gait parameters to vehicle-treated wild-type control mice (see, e.g., DOI: 10.1089/nat.2019.0824).

### Example 4

[0401] Detection and Quantification of Dystrophin Protein and Biomarkers in Mouse Muscle Homogenate Using Liquid Chromatography (LC)-Parallel Reaction Monitoring (PRM)-Based Targeted Mass Spectrometry (MS)

[0402] The amount of dystrophin protein in the background of wildtype or DMD mouse muscle protein extract was determined using liquid chromatography (LC)-Parallel Reaction Monitoring (PRM)-based targeted mass spectrometry (MS).

[0403] Sample Preparation

[0404] All solvents were HPLC-grade from Sigma-Aldrich and all chemicals where not stated otherwise were obtained from Sigma-Aldrich.

[0405] Proteins were reduced and alkylated using Biognosys' reduction and alkylation buffers and digested overnight (constant μg protein/sample) with sequencing grade modified trypsin (Promega, cat #V5113) at a protein:protease ratio of 50:1. C18 cleanup for mass spectrometry was carried out on a C18 BioPureSPE Midi 96-well plate (The Nest Group) according to the manufacturer's instructions. Peptides were dried down to complete dryness using a SpeedVac system and re-dissolved in LC solvent A (1% acetonitrile in water with 0.1% formic acid (FA)) containing Biognosys' iRT-peptide mix (Ki-3002 Biognosys) for retention time calibration. Peptide concentration was measured using the mBCA assay kit (Pierce™).

[0406] Five stable isotope labeled standard (SIS) peptides to detect dystrophin proteins are listed in Table 3 (New England Peptides, the quality grade of the SIS peptides was ±10% quantification precision, >95% purity) were spiked into the final peptide samples at known concentrations.

TABLE 3
Five peptides representing mouse/human
dystrophin protein and their corresponding
AAA-quantified SIS peptides were measured
for absolute quantification

| Peptide | Protein ID | Species |
|---|---|---|
| TIMAGLQQTNSEK | P11531 | mouse |
| SPFPSQHLEAPEDK | P11532 | human |
| NIMAGLQQTNSEK | P11532 | human |
| LLDLLEGLTGQK | P11531; P11532 | mouse; human |
| IFLTEQPLEGLEK | P11531 | mouse |

[0407] Also, 3 SIS peptides to detect various biomarkers are listed in Table 4 (JPT, Berlin/Germany, the quality grade of the SIS peptides was SpikeTides_L, crude peptides (=not purified)) were spiked into the final peptide samples for relative quantification of the selected biomarker and control proteins.

TABLE 4
List of peptides representing mouse biomarker
proteins for relative quantification

| Entrez | Peptide | |
|---|---|---|
| ID | Sequence | Protein description |
| Q8VCM7 | TLEDILFR | Fibrinogen gamma |
| | | chain |
| Q9Z0J4 | VSKPPVIISDLIR | Nitric oxide |
| | | synthase, brain |
| P08607 | YECLPGYGR | C4b-binding protein |

[0408] SIS peptides had heavy labeled Arginine (Arg+10 Da) or Lysine (Lys+8 Da).

[0409] LC-PRM Measurements and Data Analysis

[0410] Peptides (1 μg per sample) were injected to an in-house packed C18 column (Dr. Maisch ReproSil-Pur 120 C18-AQ, 1.9 μm particle size, 120 Å pore size; 75 μm inner diameter, 50 cm length, New Objective) on a Thermo Scientific Easy nLC 1200 nano-liquid chromatography system. LC solvents were A: 1% acetonitrile in water with 0.1% FA; B: 15% water in acetonitrile with 0.1% FA. The LC gradient was 5-40% solvent B in 60 minutes followed by 40-100% B in 2 minutes and 100% B for 12 minutes (total gradient length was 74 minutes). LC-PRM runs for peptide quantification were carried out on a Thermo Scientific Q Exactive™ mass spectrometer equipped with a standard nano-electrospray source. Collision energies were 25 eV according to the vendor's specifications. An unscheduled run in PRM mode was performed before data acquisition for retention time calibration using Biognosys' iRT concept (Escher, Reiter et al., Proteomics 12 (2012), 1111-1121). The acquisition window was 7 minutes per peptide. Signal processing and data analysis were carried out using SpectroDive™ 9.0—Biognosys' software for multiplexed MRM/PRM data analysis based on mProphet (Reiter, Rinner et al., Nature Methods 8 (2011), 430-435). A Q-value filter of 1% was applied with additional manual inspection. The ratio of the peak areas (between those of the endogenous and those of the reference peptides) was used to determine the absolute levels of DMD proteins in the samples (results were expressed in fmol/μg peptides injected).

[0411] For biomarkers (measured with crude quality peptides), ratios of endogenous signals to the reference peptide signals were used as relative quantities.

### Example 5

[0412] SEQ ID NO: 22345 (Cmpd 2 PO) was synthesized on a 1 kg scale by solid phase synthesis (SPS) with a Cytiva synthesizer, using a support from Kinovate preloaded with Universal Linker (UnyLinker HL, NittoPhase). The sequence was synthesized by growing from the 3′ to 5′ end, one nucleoside at a time, by initially de-tritylating the 5′-position of the first nucleoside, using dichloroacetic acid in toluene, which was covalently attached to the solid support at the 3′ terminus. The phosphoroamidite containing the 2nd base was coupled in the presence of an acidic activator, benzylmercaptotetrazole (BMT) in acetonitrile, to build up the skeleton of the first dinucleotide. Thiolation of the resulting phosphite ester was executed with (N′-(3-thioxo-3H-1,2,4-dithiazol-5-yl)-N,N-dimethylmethanimidamide (DDTT) in pyridine/acetonitrile to form a thiophosphate ester. The phosphoramidites used in the synthesis were: 2′-O-4′-C-locked-5-Me-C(Bz) phosphoramidite, 2′-O-4′-C-locked-G (dmf) phosphoramidite, DMT-2′-O-Methyl-rA(Bz) phosphoramidite, DMT-triethyloxy-glycol phosphoramidite, 5-Me-DMT-2′-O-Me-C(Bz) CE phosphoramidite, DMT-2′-O-Methyl-rG(Ib) phosphoramidite and DMT-2′-O-Methyl-rU phosphoramidite. The last coupling was stabilized by iodine in pyridine/water. Capping any un-reacted 5′-hydroxyl groups was accomplished using reagents constituted from N-methylimidazole/Lutidine/acetonitrile and TAc₂O in acetonitrile.

[0413] Following the synthesis of the oligonucleotide, a diethylamine in acetonitrile solution was used to cleave the β-cyanoethyl protecting groups from the phosphorothioate backbone. Cleavage of the oligonucleotide from the resin and deprotection of the protecting groups on the nucleobases was executed with ethanolic ammonia, at 55° C. for several hours. The crude oligonucleotide solution was then separated from the solid support through various filtration steps. The filtered crude oligonucleotide solution was desalted against water and further concentrated. The oligonucleotide solution was further purified by anion exchange chromatography using Source Q as resin. A high concentration of sodium was used to elute the product from the column. The product was desalted against water by ultrafiltration, concentrated, and lyophilized to provide purified product (MS: 6518.76 Da).

### Example 6

[0414] SEQ ID NO: 22345 (Cmpd 2 PS): A procedure similar to that of Example 5 was followed to provide the hydroxyalkoxylated AON product (MS: 6534.40 Da).

### Example 7

[0415] Exon 51 Skipping

[0416] The AONs provided here were tested for exon 51 skipping in vitro according to assays known in the art (see, e.g., WO 2018/007475). Results are shown below.

| SEQ ID NO | % exon 51 skip |
|---|---|
| 22486 | 7.7 |
| 22487 | 7.6 |
| 22488 | 5.3 |
| 22489 | 3.4 |
| 22357 | 3.6 |
| 22369 | 4.0 |
| 22490 | 3.9 |

[0417] This disclosure is not to be limited in scope by the embodiments disclosed in the examples which are intended as single illustrations of individual aspects, and any equivalents are within the scope of this disclosure. Various modifications in addition to those shown and described herein will become apparent to those skilled in the art from the foregoing description. Such modifications are intended to fall within the scope of the appended claims.

[0418] Various references such as patents, patent applications, and publications are cited herein, the disclosures of which are hereby incorporated by reference herein in their entireties.

What is claimed is:

1. A hydroxyalkoxylated AON consisting of one antisense oligonucleotide and one or two hydroxyalkoxy groups, wherein said hydroxyalkoxy group comprises or consists of an ethylene glycol monomer, ethylene glycol oligomer or ethylene glycol polymer, wherein the antisense oligonucleotide is represented by a nucleotide sequence comprising or consisting of:
i) any one of SEQ ID NO: 9-404, or
ii) a fragment of any one of SEQ ID NO: 9-404, or
iii) any one of SEQ ID NO: 9-404 with 1, 2, 3, 4, or 5 additional nucleotides, or
iv) any one of SEQ ID NO: 9-404 with 1, 2, 3, 4, or 5 nucleotides missing from said SEQ ID NO, or
v) a nucleotide sequence which has at least 90% identity with any one of SEQ ID NO: 9-404.

2. The hydroxyalkoxylated AON of claim 1, wherein the antisense oligonucleotide consists of 2′-O-methyl RNA monomers linked by phosphorothioate backbone linkages.

3. The hydroxyalkoxylated AON of claim 1, wherein the hydroxyalkoxy group is diethylene glycol, triethylene glycol (TEG), tetraethylene glycol, pentaethylene glycol or hexaethylene glycol (HEG).

4. The hydroxyalkoxylated AON of claim 1, wherein the 5′ terminal monomer or the 3′ terminal monomer of said antisense oligonucleotide is linked to the hydroxyalkoxy group.

5. The hydroxyalkoxylated AON of claim 1, consisting of two hydroxyalkoxy groups, wherein the 5′ terminal monomer of said antisense oligonucleotide is linked to a first hydroxyalkoxy group and wherein the 3′ terminal monomer of said antisense oligonucleotide is linked to a second hydroxyalkoxy group, wherein the first and second hydroxyalkoxy groups comprise or consist of an ethylene glycol monomer, ethylene glycol oligomer or ethylene glycol polymer.

6. The hydroxyalkoxylated AON of claim 1, wherein the hydroxyalkoxy group is attached to the AON through a phosphate linker (PO).

7. The hydroxyalkoxylated AON of claim 1, wherein the hydroxyalkoxy group is attached to the AON through a phosphorothioate linker (PS).

8. The hydroxyalkoxylated AON of claim 1, wherein the antisense oligonucleotide has a length from 8 to 33 nucleotides.

9. The hydroxyalkoxylated AON of claim 1, wherein all cytosine bases of the antisense oligonucleotide are 5-methylcytosine bases.

10. The hydroxyalkoxylated AON of claim 1, wherein the antisense oligonucleotide comprises or consists of 1, 2, 3, 4, 5, 6, 7, 8 or 9 monomers that comprise a bicyclic nucleic acid (BNA) scaffold modification.

11. The hydroxyalkoxylated AON of claim 10, wherein the antisense oligonucleotide comprises or consists of BNA modifications as selected from the set consisting of:
(i) a single BNA scaffold modification in the monomer at the 5′-terminus,
(ii) a single BNA scaffold modification in the monomer at the 3′-terminus,
(iii) two BNA scaffold modifications where one is in the monomer at the 5′-terminus and the other is in the monomer at the 3′-terminus,
(iv) two BNA scaffold modifications, one in the monomer at the 5′-terminus and the other in the adjacent monomer,
(v) two BNA scaffold modifications, one in the monomer at the 3′-terminus and the other in the adjacent monomer, and
(vi) four BNA scaffold modifications, one in the monomer at the 5′-terminus, one in the monomer adjacent to the 5′-terminus, one in the monomer at the 3′-terminus and one in the monomer adjacent to the 3′-terminus;
optionally 1, 2, 3, 4 or 5 additional BNA scaffold modifications are present.

12. The hydroxyalkoxylated AON of claim 11, wherein the BNA modification is a bridged nucleic acid scaffold modification, or a locked nucleic acid (LNA) scaffold modification.

13. The hydroxyalkoxylated AON of claim 1, wherein all uracil bases of the antisense oligonucleotide are 5-methyluracil bases.

14. The hydroxyalkoxylated AON of claim 1 that has SEQ ID NO: 22345, 22357, 22369, 22488, 22489 or 22490.

15. The hydroxyalkoxylated AON of claim 14 that has SEQ ID NO: 22345.

16. A pharmaceutical composition, comprising the hydroxyalkoxylated AON of claim 1 and a pharmaceutically acceptable carrier.

17. A method of preventing, treating, and/or delaying Duchenne Muscular Dystrophy (DMD) in a subject, comprising administering to the subject the hydroxyalkoxylated AON of claim 1.

18. A method of inducing skipping of exon 51 of dystrophin pre-mRNA, comprising contacting the dystrophin pre-mRNA with the hydroxyalkoxylated AON of claim 1.

19. The hydroxyalkoxylated AON of claim 1, wherein the hydroxyalkoxy group is triethylene glycol (TEG).

20. The hydroxyalkoxylated AON of claim 1, wherein the 5′ terminal monomer of said antisense oligonucleotide is linked to the hydroxyalkoxy group.

The application's sequence listing, which the Patent Office published only in electronic form, follows.

SEQUENCE LISTING (22490 sequences)

SEQ ID NO: 1 - protein, 3685 aa, Homo sapiens
  source: /note="dystrophin"
MLWWEEVEDCYEREDVQKKTFTKWVNAQFSKFGKQHIENLFSDLQDGRRLLDLLEGLTGQKLPKEKGSTRVHALNNVNKALRVLQNNNVDLVNIGSTDIVDGNHKLTLGLIWNIILHWQVKNVMKNIMAGLQQTNSEKILLSWVRQSTRNYPQVNVINFTTSWSDGLALNALIHSHRPDLFDWNSVVCQQSATQRLEHAFNIARYQLGIEKLLDPEDVDTTYPDKKSILMYITSLFQVLPQQVSIEAIQEVEMLPRPPKVTKEEHFQLHHQMHYSQQITVSLAQGYERTSSPKPRFKSYAYTQAAYVTTSDPTRSPFPSQHLEAPEDKSFGSSLMESEVNLDRYQTALEEVLSWLLSAEDTLQAQGEISNDVEVVKDQFHTHEGYMMDLTAHQGRVGNILQLGSKLIGTGKLSEDEETEVQEQMNLLNSRWECLRVASMEKQSNLHRVLMDLQNQKLKELNDWLTKTEERTRKMEEEPLGPDLEDLKRQVQQHKVLQEDLEQEQVRVNSLTHMVVVVDESSGDHATAALEEQLKVLGDRWANICRWTEDRWVLLQDILLKWQRLTEEQCLFSAWLSEKEDAVNKIHTTGFKDQNEMLSSLQKLAVLKADLEKKKQSMGKLYSLKQDLLSTLKNKSVTQKTEAWLDNFARCWDNLVQKLEKSTAQISQAVTTTQPSLTQTTVMETVTTVTTREQILVKHAQEELPPPPPQKKRQITVDSEIRKRLDVDITELHSWITRSEAVLQSPEFAIFRKEGNFSDLKEKVNAIEREKAEKFRKLQDASRSAQALVEQMVNEGVNADSIKQASEQLNSRWIEFCQLLSERLNWLEYQNNIIAFYNQLQQLEQMTTTAENWLKIQPTTPSEPTAIKSQLKICKDEVNRLSGLQPQIERLKIQSIALKEKGQGPMFLDADFVAFTNHFKQVFSDVQAREKELQTIFDTLPPMRYQETMSAIRTWVQQSETKLSIPQLSVTDYEIMEQRLGELQALQSSLQEQQSGLYYLSTTVKEMSKKAPSEISRKYQSEFEEIEGRWKKLSSQLVEHCQKLEEQMNKLRKIQNHIQTLKKWMAEVDVFLKEEWPALGDSEILKKQLKQCRLLVSDIQTIQPSLNSVNEGGQKIKNEAEPEFASRLETELKELNTQWDHMCQQVYARKEALKGGLEKTVSLQKDLSEMHEWMTQAEEEYLERDFEYKTPDELQKAVEEMKRAKEEAQQKEAKVKLLTESVNSVIAQAPPVAQEALKKELETLTTNYQWLCTRLNGKCKTLEEVWACWHELLSYLEKANKWLNEVEFKLKTTENIPGGAEEISEVLDSLENLMRHSEDNPNQIRILAQTLTDGGVMDELINEELETFNSRWRELHEEAVRRQKLLEQSIQSAQETEKSLHLIQESLTFIDKQLAAYIADKVDAAQMPQEAQKIQSDLTSHEISLEEMKKHNQGKEAAQRVLSQIDVAQKKLQDVSMKFRLFQKPANFEQRLQESKMILDEVKMHLPALETKSVEQEVVQSQLNHCVNLYKSLSEVKSEVEMVIKTGRQIVQKKQTENPKELDERVTALKLHYNELGAKVTERKQQLEKCLKLSRKMRKEMNVLTEWLAATDMELTKRSAVEGMPSNLDSEVAWGKATQKEIEKQKVHLKSITEVGEALKTVLGKKETLVEDKLSLLNSNWIAVTSRAEEWLNLLLEYQKHMETFDQNVDHITKWIIQADTLLDESEKKKPQQKEDVLKRLKAELNDIRPKVDSTRDQAANLMANRGDHCRKLVEPQISELNHRFAAISHRIKTGKASIPLKELEQFNSDIQKLLEPLEAEIQQGVNLKEEDFNKDMNEDNEGTVKELLQRGDNLQQRITDERKREEIKIKQQLLQTKHNALKDLRSQRRKKALEISHQWYQYKRQADDLLKCLDDIEKKLASLPEPRDERKIKEIDRELQKKKEELNAVRRQAEGLSEDGAAMAVEPTQIQLSKRWREIESKFAQFRRLNFAQIHTVREETMMVMTEDMPLEISYVPSTYLTEITHVSQALLEVEQLLNAPDLCAKDFEDLFKQEESLKNIKDSLQQSSGRIDIIHSKKTAALQSATPVERVKLQEALSQLDFQWEKVNKMYKDRQGRFDRSVEKWRRFHYDIKIFNQWLTEAEQFLRKTQIPENWEHAKYKWYLKELQDGIGQRQTVVRTLNATGEEIIQQSSKTDASILQEKLGSLNLRWQEVCKQLSDRKKRLEEQKNILSEFQRDLNEFVLWLEEADNIASIPLEPGKEQQLKEKLEQVKLLVEELPLRQGILKQLNETGGPVLVSAPISPEEQDKLENKLKQTNLQWIKVSRALPEKQGEIEAQIKDLGQLEKKLEDLEEQLNHLLLWLSPIRNQLEIYNQPNQEGPFDVQETEIAVQAKQPDVEEILSKGQHLYKEKPATQPVKRKLEDLSSEWKAVNRLLQELRAKQPDLAPGLTTIGASPTQTVTLVTQPVVTKETAISKLEMPSSLMLEVPALADFNRAWTELTDWLSLLDQVIKSQRVMVGDLEDINEMIIKQKATMQDLEQRRPQLEELITAAQNLKNKTSNQEARTIITDRIERIQNQWDEVQEHLQNRRQQLNEMLKDSTQWLEAKEEAEQVLGQARAKLESWKEGPYTVDAIQKKITETKQLAKDLRQWQTNVDVANDLALKLLRDYSADDTRKVHMITENINASWRSIHKRVSEREAALEETHRLLQQFPLDLEKFLAWLTEAETTANVLQDATRKERLLEDSKGVKELMKQWQDLQGEIEAHTDVYHNLDENSQKILRSLEGSDDAVLLQRRLDNMNFKWSELRKKSLNIRSHLEASSDQWKRLHLSLQELLVWLQLKDDELSRQAPIGGDFPAVQKQNDVHRAFKRELKTKEPVIMSTLETVRIFLTEQPLEGLEKLYQEPRELPPEERAQNVTRLLRKQAEEVNTEWEKLNLHSADWQRKIDETLERLQELQEATDELDLKLRQAEVIKGSWQPVGDLLIDSLQDHLEKVKALRGEIAPLKENVSHVNDLARQLTTLGIQLSPYNLSTLEDLNTRWKLLQVAVEDRVRQLHEAHRDFGPASQHFLSTSVQGPWERAISPNKVPYYINHETQTTCWDHPKMTELYQSLADLNNVRFSAYRTAMKLRRLQKALCLDLLSLSAACDALDQHNLKQNDQPMDILQIINCLTTIYDRLEQEHNNLVNVPLCVDMCLNWLLNVYDTGRTGRIRVLSFKTGIISLCKAHLEDKYRYLFKQVASSTGFCDQRRLGLLLHDSIQIPRQLGEVASFGGSNIEPSVRSCFQFANNKPEIEAALFLDWMRLEPQSMVWLPVLHRVAAAETAKHQAKCNICKECPIIGFRYRSLKHFNYDICQSCFFSGRVAKGHKMHYPMVEYCTPTTSGEDVRDFAKVLKNKFRTKRYFAKHPRMGYLPVQTVLEGDNMETPVTLINFWPVDSAPASSPQLSHDDTHSRIEHYASRLAEMENSNGSYLNDSISPNESIDDEHLLIQHYCQSLNQDSPLSQPRSPAQILISLESEERGELERILADLEEENRNLQAEYDRLKQQHEHKGLSPLPSPPEMMPTSPQSPRDAELIAEAKLLRQHKGRLEARMQILEDHNKQLESQLHRLRQLLEQPQAEAKVNGTTVSSPSTSLQRSDSSQPMLLRVVGSQTSDSMGEEDLLSPPQDTSTGLEEVMEQLNNSFPSSRGRNTPGKPMREDTM

SEQ ID NO: 2 - RNA, 233 nt, Homo sapiens
  source: /note="Exon 51"
cuccuacucagacuguuacucuggugacacaaccugugguuacuaaggaaacugccaucuccaaacuagaaaugccaucuuccuugauguuggagguaccugcucuggcagauuucaaccgggcuuggacagaacuuaccgacuggcuuucucugcuugaucaaguuauaaaaucacagagggugauggugggugaccuugaggauaucaacgagaugaucaucaagcagaag

SEQ ID NO: 3 - RNA, 11 nt, Homo sapiens
  source: /note="Exon Splicing Enhancer 1"
ggacagaacuu

SEQ ID NO: 4 - RNA, 11 nt, Homo sapiens
  source: /note="Exon Splicing Enhancer 1 (reverse complement)"
aaguucugucc

SEQ ID NO: 5 - RNA, 6 nt, Homo sapiens
  source: /note="Exon Splicing Enhancer 2"
aucuuc

SEQ ID NO: 6 - RNA, 6 nt, Homo sapiens
  source: /note="Exon Splicing Enhancer 2 (reverse complement)"
gaagau

SEQ ID NO: 7 - RNA, 20 nt, Artificial Sequence
  source: /note="Description of Artificial Sequence: Synthetic oligonucleotide"
  source: /note="Drisapersen/Suvodirsen"
ucaaggaagauggcauuucu

SEQ ID NO: 8 - DNA, 30 bp, Artificial Sequence
  source: /note="Description of Artificial Sequence: Synthetic oligonucleotide"
  source: /note="Eteplirsen"
ctccaacatcaaggaagatggcatttctag

SEQ ID NO: 9 - RNA, 20 nt, Artificial Sequence
  source: /note="Description of Artificial Sequence: Synthetic oligonucleotide"
  source: /note="Antisense Oligonucleotide"
ucaaggaagauggcauuucu

SEQ ID NO: 10 - RNA, 22 nt, Artificial Sequence
  source: /note="Description of Artificial Sequence: Synthetic oligonucleotide"
  source: /note="Antisense Oligonucleotide"
ucaaggaagauggcauuucuag

SEQ ID NO: 11 - RNA, 18 nt, Artificial Sequence
  source: /note="Description of Artificial Sequence: Synthetic oligonucleotide"
  source: /note="Antisense Oligonucleotide"
gguaaguucuguccaagc

SEQ ID NO: 12 - RNA, 18 nt, Artificial Sequence
  source: /note="Description of Artificial Sequence: Synthetic oligonucleotide"
  source: /note="Antisense Oligonucleotide"
guaaguucuguccaagcc

SEQ ID NO: 13 - RNA, 18 nt, Artificial Sequence
  source: /note="Description of Artificial Sequence: Synthetic oligonucleotide"
  source: /note="Antisense Oligonucleotide"
agucgguaaguucugucc

SEQ ID NO: 14 - RNA, 18 nt, Artificial Sequence
  source: /note="Description of Artificial Sequence: Synthetic oligonucleotide"
  source: /note="Antisense Oligonucleotide"
cuguccaagcccgguuga

SEQ ID NO: 15 - RNA, 15 nt, Artificial Sequence
  source: /note="Description of Artificial Sequence: Synthetic oligonucleotide"
  source: /note="Antisense Oligonucleotide"
uaaguucuguccaag

SEQ ID NO: 16 - RNA, 20 nt, Artificial Sequence
  source: /note="Description of Artificial Sequence: Synthetic oligonucleotide"
  source: /note="Antisense Oligonucleotide"
uucuguccaagcccgguuga

SEQ ID NO: 17 - RNA, 19 nt, Artificial Sequence
  source: /note="Description of Artificial Sequence: Synthetic oligonucleotide"
  source: /note="Antisense Oligonucleotide"
uucuguccaagcccgguug

SEQ ID NO: 18 - RNA, 18 nt, Artificial Sequence
  source: /note="Description of Artificial Sequence: Synthetic oligonucleotide"
  source: /note="Antisense Oligonucleotide"
uucuguccaagcccgguu

SEQ ID NO: 19 - RNA, 17 nt, Artificial Sequence
  source: /note="Description of Artificial Sequence: Synthetic oligonucleotide"
  source: /note="Antisense Oligonucleotide"
uucuguccaagcccggu

SEQ ID NO: 20 - RNA, 16 nt, Artificial Sequence
  source: /note="Description of Artificial Sequence: Synthetic oligonucleotide"
  source: /note="Antisense Oligonucleotide"
uucuguccaagcccgg

SEQ ID NO: 21 - RNA, 15 nt, Artificial Sequence
  source: /note="Description of Artificial Sequence: Synthetic oligonucleotide"
  source: /note="Antisense Oligonucleotide"
uucuguccaagcccg

SEQ ID NO: 22 - RNA, 14 nt, Artificial Sequence
  source: /note="Description of Artificial Sequence: Synthetic oligonucleotide"
  source: /note="Antisense Oligonucleotide"
uucuguccaagccc

SEQ ID NO: 23 - RNA, 13 nt, Artificial Sequence
  source: /note="Description of Artificial Sequence: Synthetic oligonucleotide"
  source: /note="Antisense Oligonucleotide"
uucuguccaagcc

SEQ ID NO: 24 - RNA, 12 nt, Artificial Sequence
  source: /note="Description of Artificial Sequence: Synthetic oligonucleotide"
  source: /note="Antisense Oligonucleotide"
uucuguccaagc

SEQ ID NO: 25 - RNA, 11 nt, Artificial Sequence
  source: /note="Description of Artificial Sequence: Synthetic oligonucleotide"
  source: /note="Antisense Oligonucleotide"
uucuguccaag

SEQ ID NO: 26 - RNA, 10 nt, Artificial Sequence
  source: /note="Description of Artificial Sequence: Synthetic oligonucleotide"
  source: /note="Antisense Oligonucleotide"
uucuguccaa

SEQ ID NO: 27 - RNA, 9 nt, Artificial Sequence
  source: /note="Description of Artificial Sequence: Synthetic oligonucleotide"
  source: /note="Antisense Oligonucleotide"
uucugucca

SEQ ID NO: 28 - RNA, 8 nt, Artificial Sequence
  source: /note="Description of Artificial Sequence: Synthetic oligonucleotide"
  source: /note="Antisense Oligonucleotide"
uucugucc

SEQ ID NO: 29 - RNA, 19 nt, Artificial Sequence
  source: /note="Description of Artificial Sequence: Synthetic oligonucleotide"
  source: /note="Antisense Oligonucleotide"
ucuguccaagcccgguuga

SEQ ID NO: 30 - RNA, 18 nt, Artificial Sequence
  source: /note="Description of Artificial Sequence: Synthetic oligonucleotide"
  source: /note="Antisense Oligonucleotide"
ucuguccaagcccgguug

SEQ ID NO: 31 - RNA, 17 nt, Artificial Sequence
  source: /note="Description of Artificial Sequence: Synthetic oligonucleotide"
  source: /note="Antisense Oligonucleotide"
ucuguccaagcccgguu

SEQ ID NO: 32 - RNA, 16 nt, Artificial Sequence
  source: /note="Description of Artificial Sequence: Synthetic oligonucleotide"
  source: /note="Antisense Oligonucleotide"
ucuguccaagcccggu

SEQ ID NO: 33 - RNA, 15 nt, Artificial Sequence
  source: /note="Description of Artificial Sequence: Synthetic oligonucleotide"
  source: /note="Antisense Oligonucleotide"
ucuguccaagcccgg

SEQ ID NO: 34 - RNA, 14 nt, Artificial Sequence
  source: /note="Description of Artificial Sequence: Synthetic oligonucleotide"
  source: /note="Antisense Oligonucleotide"
ucuguccaagcccg

SEQ ID NO: 35 - RNA, 13 nt, Artificial Sequence
  source: /note="Description of Artificial Sequence: Synthetic oligonucleotide"
  source: /note="Antisense Oligonucleotide"
ucuguccaagccc

SEQ ID NO: 36 - RNA, 12 nt, Artificial Sequence
  source: /note="Description of Artificial Sequence: Synthetic oligonucleotide"
  source: /note="Antisense Oligonucleotide"
ucuguccaagcc

SEQ ID NO: 37 - RNA, 11 nt, Artificial Sequence
  source: /note="Description of Artificial Sequence: Synthetic oligonucleotide"
  source: /note="Antisense Oligonucleotide"
ucuguccaagc

SEQ ID NO: 38 - RNA, 10 nt, Artificial Sequence
  source: /note="Description of Artificial Sequence: Synthetic oligonucleotide"
  source: /note="Antisense Oligonucleotide"
ucuguccaag

SEQ ID NO: 39 - RNA, 9 nt, Artificial Sequence
  source: /note="Description of Artificial Sequence: Synthetic oligonucleotide"
  source: /note="Antisense Oligonucleotide"
ucuguccaa

SEQ ID NO: 40 - RNA, 8 nt, Artificial Sequence
  source: /note="Description of Artificial Sequence: Synthetic oligonucleotide"
  source: /note="Antisense Oligonucleotide"
ucugucca

SEQ ID NO: 41 - RNA, 17 nt, Artificial Sequence
  source: /note="Description of Artificial Sequence: Synthetic oligonucleotide"
  source: /note="Antisense Oligonucleotide"
cuguccaagcccgguug

SEQ ID NO: 42 - RNA, 16 nt, Artificial Sequence
  source: /note="Description of Artificial Sequence: Synthetic oligonucleotide"
  source: /note="Antisense Oligonucleotide"
cuguccaagcccgguu

SEQ ID NO: 43 - RNA, 15 nt, Artificial Sequence
  source: /note="Description of Artificial Sequence: Synthetic oligonucleotide"
  source: /note="Antisense Oligonucleotide"
cuguccaagcccggu

SEQ ID NO: 44 - RNA, 14 nt, Artificial Sequence
  source: /note="Description of Artificial Sequence: Synthetic oligonucleotide"
  source: /note="Antisense Oligonucleotide"
cuguccaagcccgg

SEQ ID NO: 45 - RNA, 13 nt, Artificial Sequence
  source: /note="Description of Artificial Sequence: Synthetic oligonucleotide"
  source: /note="Antisense Oligonucleotide"
cuguccaagcccg

SEQ ID NO: 46 - RNA, 12 nt, Artificial Sequence
  source: /note="Description of Artificial Sequence: Synthetic oligonucleotide"
  source: /note="Antisense Oligonucleotide"
cuguccaagccc

SEQ ID NO: 47 - RNA, 11 nt, Artificial Sequence
  source: /note="Description of Artificial Sequence: Synthetic oligonucleotide"
  source: /note="Antisense Oligonucleotide"
cuguccaagcc

SEQ ID NO: 48 - RNA, 10 nt, Artificial Sequence
  source: /note="Description of Artificial Sequence: Synthetic oligonucleotide"
  source: /note="Antisense Oligonucleotide"
cuguccaagc

SEQ ID NO: 49 - RNA, 9 nt, Artificial Sequence
  source: /note="Description of Artificial Sequence: Synthetic oligonucleotide"
  source: /note="Antisense Oligonucleotide"
cuguccaag

SEQ ID NO: 50 - RNA, 8 nt, Artificial Sequence
  source: /note="Description of Artificial Sequence: Synthetic oligonucleotide"
  source: /note="Antisense Oligonucleotide"
cuguccaa

SEQ ID NO: 51 - RNA, 20 nt, Artificial Sequence
  source: /note="Description of Artificial Sequence: Synthetic oligonucleotide"
  source: /note="Antisense Oligonucleotide"
guucuguccaagcccgguug

SEQ ID NO: 52 - RNA, 19 nt, Artificial Sequence
  source: /note="Description of Artificial Sequence: Synthetic oligonucleotide"
  source: /note="Antisense Oligonucleotide"
guucuguccaagcccgguu

SEQ ID NO: 53 - RNA, 18 nt, Artificial Sequence
  source: /note="Description of Artificial Sequence: Synthetic oligonucleotide"
  source: /note="Antisense Oligonucleotide"
guucuguccaagcccggu

SEQ ID NO: 54 - RNA, 17 nt, Artificial Sequence
  source: /note="Description of Artificial Sequence: Synthetic oligonucleotide"
  source: /note="Antisense Oligonucleotide"
guucuguccaagcccgg

SEQ ID NO: 55 - RNA, 16 nt, Artificial Sequence
  source: /note="Description of Artificial Sequence: Synthetic oligonucleotide"
  source: /note="Antisense Oligonucleotide"
guucuguccaagcccg

SEQ ID NO: 56 - RNA, 15 nt, Artificial Sequence
  source: /note="Description of Artificial Sequence: Synthetic oligonucleotide"
  source: /note="Antisense Oligonucleotide"
guucuguccaagccc

SEQ ID NO: 57 - RNA, 14 nt, Artificial Sequence
  source: /note="Description of Artificial Sequence: Synthetic oligonucleotide"
  source: /note="Antisense Oligonucleotide"
guucuguccaagcc

SEQ ID NO: 58 - RNA, 13 nt, Artificial Sequence
  source: /note="Description of Artificial Sequence: Synthetic oligonucleotide"
  source: /note="Antisense Oligonucleotide"
guucuguccaagc

SEQ ID NO: 59 - RNA, 12 nt, Artificial Sequence
  source: /note="Description of Artificial Sequence: Synthetic oligonucleotide"
  source: /note="Antisense Oligonucleotide"
guucuguccaag

SEQ ID NO: 60 - RNA, 11 nt, Artificial Sequence
  source: /note="Description of Artificial Sequence: Synthetic oligonucleotide"
  source: /note="Antisense Oligonucleotide"
guucuguccaa

SEQ ID NO: 61 - RNA, 10 nt, Artificial Sequence
  source: /note="Description of Artificial Sequence: Synthetic oligonucleotide"
  source: /note="Antisense Oligonucleotide"
guucugucca

SEQ ID NO: 62 - RNA, 9 nt, Artificial Sequence
  source: /note="Description of Artificial Sequence: Synthetic oligonucleotide"
  source: /note="Antisense Oligonucleotide"
guucugucc

SEQ ID NO: 63 - RNA, 8 nt, Artificial Sequence
  source: /note="Description of Artificial Sequence: Synthetic oligonucleotide"
  source: /note="Antisense Oligonucleotide"
guucuguc

SEQ ID NO: 64 - RNA, 20 nt, Artificial Sequence
  source: /note="Description of Artificial Sequence: Synthetic oligonucleotide"
  source: /note="Antisense Oligonucleotide"
aguucuguccaagcccgguu

SEQ ID NO: 65 - RNA, 19 nt, Artificial Sequence
  source: /note="Description of Artificial Sequence: Synthetic oligonucleotide"
  source: /note="Antisense Oligonucleotide"
aguucuguccaagcccggu

SEQ ID NO: 66 - RNA, 18 nt, Artificial Sequence
  source: /note="Description of Artificial Sequence: Synthetic oligonucleotide"
  source: /note="Antisense Oligonucleotide"
aguucuguccaagcccgg

SEQ ID NO: 67 - RNA, 17 nt, Artificial Sequence
  source: /note="Description of Artificial Sequence: Synthetic oligonucleotide"
  source: /note="Antisense Oligonucleotide"
aguucuguccaagcccg

SEQ ID NO: 68 - RNA, 16 nt, Artificial Sequence
  source: /note="Description of Artificial Sequence: Synthetic oligonucleotide"
  source: /note="Antisense Oligonucleotide"
aguucuguccaagccc

SEQ ID NO: 69 - RNA, 15 nt, Artificial Sequence
  source: /note="Description of Artificial Sequence: Synthetic oligonucleotide"
  source: /note="Antisense Oligonucleotide"
aguucuguccaagcc

SEQ ID NO: 70 - RNA, 14 nt, Artificial Sequence
  source: /note="Description of Artificial Sequence: Synthetic oligonucleotide"
  source: /note="Antisense Oligonucleotide"
aguucuguccaagc

SEQ ID NO: 71 - RNA, 13 nt, Artificial Sequence
  source: /note="Description of Artificial Sequence: Synthetic oligonucleotide"
  source: /note="Antisense Oligonucleotide"
aguucuguccaag

SEQ ID NO: 72 - RNA, 12 nt, Artificial Sequence
  source: /note="Description of Artificial Sequence: Synthetic oligonucleotide"
  source: /note="Antisense Oligonucleotide"
aguucuguccaa

SEQ ID NO: 73 - RNA, 11 nt, Artificial Sequence
  source: /note="Description of Artificial Sequence: Synthetic oligonucleotide"
  source: /note="Antisense Oligonucleotide"
aguucugucca

SEQ ID NO: 74 - RNA, 10 nt, Artificial Sequence
  source: /note="Description of Artificial Sequence: Synthetic oligonucleotide"
  source: /note="Antisense Oligonucleotide"
aguucugucc

SEQ ID NO: 75 - RNA, 9 nt, Artificial Sequence
  source: /note="Description of Artificial Sequence: Synthetic oligonucleotide"
  source: /note="Antisense Oligonucleotide"
aguucuguc

SEQ ID NO: 76 - RNA, 8 nt, Artificial Sequence
  source: /note="Description of Artificial Sequence: Synthetic oligonucleotide"
  source: /note="Antisense Oligonucleotide"
aguucugu

SEQ ID NO: 77 - RNA, 20 nt, Artificial Sequence
  source: /note="Description of Artificial Sequence: Synthetic oligonucleotide"
  source: /note="Antisense Oligonucleotide"
aaguucuguccaagcccggu

SEQ ID NO: 78 - RNA, 19 nt, Artificial Sequence
  source: /note="Description of Artificial Sequence: Synthetic oligonucleotide"
  source: /note="Antisense Oligonucleotide"
aaguucuguccaagcccgg

SEQ ID NO: 79 - RNA, 18 nt, Artificial Sequence
  source: /note="Description of Artificial Sequence: Synthetic oligonucleotide"
  source: /note="Antisense Oligonucleotide"
aaguucuguccaagcccg

SEQ ID NO: 80 - RNA, 17 nt, Artificial Sequence
  source: /note="Description of Artificial Sequence: Synthetic oligonucleotide"
  source: /note="Antisense Oligonucleotide"
aaguucuguccaagccc

SEQ ID NO: 81 - RNA, 16 nt, Artificial Sequence
  source: /note="Description of Artificial Sequence: Synthetic oligonucleotide"
  source: /note="Antisense Oligonucleotide"
aaguucuguccaagcc

SEQ ID NO: 82 - RNA, 15 nt, Artificial Sequence
  source: /note="Description of Artificial Sequence: Synthetic oligonucleotide"
  source: /note="Antisense Oligonucleotide"
aaguucuguccaagc

SEQ ID NO: 83 - RNA, 14 nt, Artificial Sequence
  source: /note="Description of Artificial Sequence: Synthetic oligonucleotide"
  source: /note="Antisense Oligonucleotide"
aaguucuguccaag

SEQ ID NO: 84 - RNA, 13 nt, Artificial Sequence
  source: /note="Description of Artificial Sequence: Synthetic oligonucleotide"
  source: /note="Antisense Oligonucleotide"
aaguucuguccaa

SEQ ID NO: 85 - RNA, 12 nt, Artificial Sequence
  source: /note="Description of Artificial Sequence: Synthetic oligonucleotide"
  source: /note="Antisense Oligonucleotide"
aaguucugucca

SEQ ID NO: 86 - RNA, 11 nt, Artificial Sequence
  source: /note="Description of Artificial Sequence: Synthetic oligonucleotide"
  source: /note="Antisense Oligonucleotide"
aaguucugucc

SEQ ID NO: 87 - RNA, 10 nt, Artificial Sequence
  source: /note="Description of Artificial Sequence: Synthetic oligonucleotide"
  source: /note="Antisense Oligonucleotide"
aaguucuguc

SEQ ID NO: 88 - RNA, 9 nt, Artificial Sequence
  source: /note="Description of Artificial Sequence: Synthetic oligonucleotide"
  source: /note="Antisense Oligonucleotide"
aaguucugu

SEQ ID NO: 89 - RNA, 8 nt, Artificial Sequence
  source: /note="Description of Artificial Sequence: Synthetic oligonucleotide"
  source: /note="Antisense Oligonucleotide"
aaguucug

SEQ ID NO: 90 - RNA, 20 nt, Artificial Sequence
  source: /note="Description of Artificial Sequence: Synthetic oligonucleotide"
  source: /note="Antisense Oligonucleotide"
uaaguucuguccaagcccgg

SEQ ID NO: 91 - RNA, 19 nt, Artificial Sequence
  source: /note="Description of Artificial Sequence: Synthetic oligonucleotide"
  source: /note="Antisense Oligonucleotide"
uaaguucuguccaagcccg

SEQ ID NO: 92 - RNA, 18 nt, Artificial Sequence
  source: /note="Description of Artificial Sequence: Synthetic oligonucleotide"
  source: /note="Antisense Oligonucleotide"
uaaguucuguccaagccc

SEQ ID NO: 93 - RNA, 17 nt, Artificial Sequence
  source: /note="Description of Artificial Sequence: Synthetic oligonucleotide"
  source: /note="Antisense Oligonucleotide"
uaaguucuguccaagcc

SEQ ID NO: 94 - RNA, 16 nt, Artificial Sequence
  source: /note="Description of Artificial Sequence: Synthetic oligonucleotide"
  source: /note="Antisense Oligonucleotide"
uaaguucuguccaagc

SEQ ID NO: 95 - RNA, 14 nt, Artificial Sequence
  source: /note="Description of Artificial Sequence: Synthetic oligonucleotide"
  source: /note="Antisense Oligonucleotide"
uaaguucuguccaa

SEQ ID NO: 96 - RNA, 13 nt, Artificial Sequence
  source: /note="Description of Artificial Sequence: Synthetic oligonucleotide"
  source: /note="Antisense Oligonucleotide"
uaaguucugucca

SEQ ID NO: 97 - RNA, 12 nt, Artificial Sequence
  source: /note="Description of Artificial Sequence: Synthetic oligonucleotide"
  source: /note="Antisense Oligonucleotide"
uaaguucugucc

SEQ ID NO: 98 - RNA, 11 nt, Artificial Sequence
  source: /note="Description of Artificial Sequence: Synthetic oligonucleotide"
  source: /note="Antisense Oligonucleotide"
uaaguucuguc

SEQ ID NO: 99 - RNA, 10 nt, Artificial Sequence
  source: /note="Description of Artificial Sequence: Synthetic oligonucleotide"
  source: /note="Antisense Oligonucleotide"
uaaguucugu

SEQ ID NO: 100 - RNA, 9 nt, Artificial Sequence
  source: /note="Description of Artificial Sequence: Synthetic oligonucleotide"
  source: /note="Antisense Oligonucleotide"
uaaguucug

SEQ ID NO: 101 - RNA, 8 nt, Artificial Sequence
  source: /note="Description of Artificial Sequence: Synthetic oligonucleotide"
  source: /note="Antisense Oligonucleotide"
uaaguucu

SEQ ID NO: 102 - RNA, 20 nt, Artificial Sequence
  source: /note="Description of Artificial Sequence: Synthetic oligonucleotide"
  source: /note="Antisense Oligonucleotide"
guaaguucuguccaagcccg

SEQ ID NO: 103 - RNA, 19 nt, Artificial Sequence
  source: /note="Description of Artificial Sequence: Synthetic oligonucleotide"
  source: /note="Antisense Oligonucleotide"
guaaguucuguccaagccc

SEQ ID NO: 104 - RNA, 17 nt, Artificial Sequence
  source: /note="Description of Artificial Sequence: Synthetic oligonucleotide"
  source: /note="Antisense Oligonucleotide"
guaaguucuguccaagc

SEQ ID NO: 105 - RNA, 16 nt, Artificial Sequence
  source: /note="Description of Artificial Sequence: Synthetic oligonucleotide"
  source: /note="Antisense Oligonucleotide"
guaaguucuguccaag

SEQ ID NO: 106 - RNA, 15 nt, Artificial Sequence
  source: /note="Description of Artificial Sequence: Synthetic oligonucleotide"
  source: /note="Antisense Oligonucleotide"
guaaguucuguccaa

SEQ ID NO: 107 - RNA, 14 nt, Artificial Sequence
  source: /note="Description of Artificial Sequence: Synthetic oligonucleotide"
  source: /note="Antisense Oligonucleotide"
guaaguucugucca

SEQ ID NO: 108 - RNA, 13 nt, Artificial Sequence
  source: /note="Description of Artificial Sequence: Synthetic oligonucleotide"
  source: /note="Antisense Oligonucleotide"
guaaguucugucc

SEQ ID NO: 109 - RNA, 12 nt, Artificial Sequence
  source: /note="Description of Artificial Sequence: Synthetic oligonucleotide"
  source: /note="Antisense Oligonucleotide"
guaaguucuguc

SEQ ID NO: 110 - RNA, 11 nt, Artificial Sequence
  source: /note="Description of Artificial Sequence: Synthetic oligonucleotide"
  source: /note="Antisense Oligonucleotide"
guaaguucugu

SEQ ID NO: 111 - RNA, 10 nt, Artificial Sequence
  source: /note="Description of Artificial Sequence: Synthetic oligonucleotide"
  source: /note="Antisense Oligonucleotide"
guaaguucug

SEQ ID NO: 112 - RNA, 9 nt, Artificial Sequence
  source: /note="Description of Artificial Sequence: Synthetic oligonucleotide"
  source: /note="Antisense Oligonucleotide"
guaaguucu

SEQ ID NO: 113 - RNA, 8 nt, Artificial Sequence
  source: /note="Description of Artificial Sequence: Synthetic oligonucleotide"
  source: /note="Antisense Oligonucleotide"
guaaguuc

SEQ ID NO: 114 - RNA, 20 nt, Artificial Sequence
  source: /note="Description of Artificial Sequence: Synthetic oligonucleotide"
  source: /note="Antisense Oligonucleotide"
gguaaguucuguccaagccc

SEQ ID NO: 115 - RNA, 19 nt, Artificial Sequence
  source: /note="Description of Artificial Sequence: Synthetic oligonucleotide"
  source: /note="Antisense Oligonucleotide"
gguaaguucuguccaagcc

SEQ ID NO: 116 - RNA, 17 nt, Artificial Sequence
  source: /note="Description of Artificial Sequence: Synthetic oligonucleotide"
  source: /note="Antisense Oligonucleotide"
gguaaguucuguccaag

SEQ ID NO: 117 - RNA, 16 nt, Artificial Sequence
  source: /note="Description of Artificial Sequence: Synthetic oligonucleotide"
  source: /note="Antisense Oligonucleotide"
gguaaguucuguccaa

SEQ ID NO: 118 - RNA, 15 nt, Artificial Sequence
  source: /note="Description of Artificial Sequence: Synthetic oligonucleotide"
  source: /note="Antisense Oligonucleotide"
gguaaguucugucca

SEQ ID NO: 119 - RNA, 14 nt, Artificial Sequence
  source: /note="Description of Artificial Sequence: Synthetic oligonucleotide"
  source: /note="Antisense Oligonucleotide"
gguaaguucugucc

SEQ ID NO: 120 - RNA, 13 nt, Artificial Sequence
  source: /note="Description of Artificial Sequence: Synthetic oligonucleotide"
  source: /note="Antisense Oligonucleotide"
gguaaguucuguc

SEQ ID NO: 121 - RNA, 12 nt, Artificial Sequence
  source: /note="Description of Artificial Sequence: Synthetic oligonucleotide"
  source: /note="Antisense Oligonucleotide"
gguaaguucugu

SEQ ID NO: 122 - RNA, 11 nt, Artificial Sequence
  source: /note="Description of Artificial Sequence: Synthetic oligonucleotide"
  source: /note="Antisense Oligonucleotide"
gguaaguucug

SEQ ID NO: 123 - RNA, 10 nt, Artificial Sequence
  source: /note="Description of Artificial Sequence: Synthetic oligonucleotide"
  source: /note="Antisense Oligonucleotide"
gguaaguucu

SEQ ID NO: 124 - RNA, 9 nt, Artificial Sequence
  source: /note="Description of Artificial Sequence: Synthetic oligonucleotide"
  source: /note="Antisense Oligonucleotide"
gguaaguuc

SEQ ID NO: 125 - RNA, 8 nt, Artificial Sequence
  source: /note="Description of Artificial Sequence: Synthetic oligonucleotide"
  source: /note="Antisense Oligonucleotide"
gguaaguu

SEQ ID NO: 126 - RNA, 20 nt, Artificial Sequence
  source: /note="Description of Artificial Sequence: Synthetic oligonucleotide"
  source: /note="Antisense Oligonucleotide"
cgguaaguucuguccaagcc

SEQ ID NO: 127 - RNA, 19 nt, Artificial Sequence
  source: /note="Description of Artificial Sequence: Synthetic oligonucleotide"
  source: /note="Antisense Oligonucleotide"
cgguaaguucuguccaagc

SEQ ID NO: 128 - RNA, 18 nt, Artificial Sequence
  source: /note="Description of Artificial Sequence: Synthetic oligonucleotide"
  source: /note="Antisense Oligonucleotide"
cgguaaguucuguccaag

SEQ ID NO: 129 - RNA, 17 nt, Artificial Sequence
  source: /note="Description of Artificial Sequence: Synthetic oligonucleotide"
  source: /note="Antisense Oligonucleotide"
cgguaaguucuguccaa

SEQ ID NO: 130 - RNA, 16 nt, Artificial Sequence
  source: /note="Description of Artificial Sequence: Synthetic oligonucleotide"
  source: /note="Antisense Oligonucleotide"
cgguaaguucugucca

SEQ ID NO: 131 - RNA, 15 nt, Artificial Sequence
  source: /note="Description of Artificial Sequence: Synthetic oligonucleotide"
  source: /note="Antisense Oligonucleotide"
cgguaaguucugucc

SEQ ID NO: 132 - RNA, 14 nt, Artificial Sequence
  source: /note="Description of Artificial Sequence: Synthetic oligonucleotide"
  source: /note="Antisense Oligonucleotide"
cgguaaguucuguc

SEQ ID NO: 133 - RNA, 13 nt, Artificial Sequence
  source: /note="Description of Artificial Sequence: Synthetic oligonucleotide"
  source: /note="Antisense Oligonucleotide"
cgguaaguucugu

SEQ ID NO: 134 - RNA, 12 nt, Artificial Sequence
  source: /note="Description of Artificial Sequence: Synthetic oligonucleotide"
  source: /note="Antisense Oligonucleotide"
cgguaaguucug

SEQ ID NO: 135 - RNA, 11 nt, Artificial Sequence
  source: /note="Description of Artificial Sequence: Synthetic oligonucleotide"
  source: /note="Antisense Oligonucleotide"
cgguaaguucu

SEQ ID NO: 136 - RNA, 10 nt, Artificial Sequence
  source: /note="Description of Artificial Sequence: Synthetic oligonucleotide"
  source: /note="Antisense Oligonucleotide"
cgguaaguuc

SEQ ID NO: 137 - RNA, 9 nt, Artificial Sequence
  source: /note="Description of Artificial Sequence: Synthetic oligonucleotide"
  source: /note="Antisense Oligonucleotide"
cgguaaguu

SEQ ID NO: 138 - RNA, 8 nt, Artificial Sequence
  source: /note="Description of Artificial Sequence: Synthetic oligonucleotide"
  source: /note="Antisense Oligonucleotide"
cgguaagu

SEQ ID NO: 139 - RNA, 20 nt, Artificial Sequence
  source: /note="Description of Artificial Sequence: Synthetic oligonucleotide"
  source: /note="Antisense Oligonucleotide"
ucgguaaguucuguccaagc

SEQ ID NO: 140 - RNA, 19 nt, Artificial Sequence
  source: /note="Description of Artificial Sequence: Synthetic oligonucleotide"
  source: /note="Antisense Oligonucleotide"
ucgguaaguucuguccaag

SEQ ID NO: 141 - RNA, 18 nt, Artificial Sequence
  source: /note="Description of Artificial Sequence: Synthetic oligonucleotide"
  source: /note="Antisense Oligonucleotide"
ucgguaaguucuguccaa

SEQ ID NO: 142 - RNA, 17 nt, Artificial Sequence
  source: /note="Description of Artificial Sequence: Synthetic oligonucleotide"
  source: /note="Antisense Oligonucleotide"
ucgguaaguucugucca

SEQ ID NO: 143 - RNA, 16 nt, Artificial Sequence
  source: /note="Description of Artificial Sequence: Synthetic oligonucleotide"
  source: /note="Antisense Oligonucleotide"
ucgguaaguucugucc

SEQ ID NO: 144 - RNA, 15 nt, Artificial Sequence
  source: /note="Description of Artificial Sequence: Synthetic oligonucleotide"
  source: /note="Antisense Oligonucleotide"
ucgguaaguucuguc

SEQ ID NO: 145 - RNA, 14 nt, Artificial Sequence
  source: /note="Description of Artificial Sequence: Synthetic oligonucleotide"
  source: /note="Antisense Oligonucleotide"
ucgguaaguucugu

SEQ ID NO: 146 - RNA, 13 nt, Artificial Sequence
  source: /note="Description of Artificial Sequence: Synthetic oligonucleotide"
  source: /note="Antisense Oligonucleotide"
ucgguaaguucug

SEQ ID NO: 147 - RNA, 12 nt, Artificial Sequence
  source: /note="Description of Artificial Sequence: Synthetic oligonucleotide"
  source: /note="Antisense Oligonucleotide"
ucgguaaguucu

SEQ ID NO: 148 - RNA, 11 nt, Artificial Sequence
  source: /note="Description of Artificial Sequence: Synthetic oligonucleotide"
  source: /note="Antisense Oligonucleotide"
ucgguaaguuc

SEQ ID NO: 149 - RNA, 10 nt, Artificial Sequence
  source: /note="Description of Artificial Sequence: Synthetic oligonucleotide"
  source: /note="Antisense Oligonucleotide"
ucgguaaguu

SEQ ID NO: 150 - RNA, 9 nt, Artificial Sequence
  source: /note="Description of Artificial Sequence: Synthetic oligonucleotide"
  source: /note="Antisense Oligonucleotide"
ucgguaagu

SEQ ID NO: 151 - RNA, 20 nt, Artificial Sequence
  source: /note="Description of Artificial Sequence: Synthetic oligonucleotide"
  source: /note="Antisense Oligonucleotide"
gucgguaaguucuguccaag

SEQ ID NO: 152 - RNA, 19 nt, Artificial Sequence
  source: /note="Description of Artificial Sequence: Synthetic oligonucleotide"
  source: /note="Antisense Oligonucleotide"
gucgguaaguucuguccaa

SEQ ID NO: 153 - RNA, 18 nt, Artificial Sequence
  source: /note="Description of Artificial Sequence: Synthetic oligonucleotide"
  source: /note="Antisense Oligonucleotide"
gucgguaaguucugucca

SEQ ID NO: 154 - RNA, 17 nt, Artificial Sequence
  source: /note="Description of Artificial Sequence: Synthetic oligonucleotide"
  source: /note="Antisense Oligonucleotide"
gucgguaaguucugucc

SEQ ID NO: 155 - RNA, 16 nt, Artificial Sequence
  source: /note="Description of Artificial Sequence: Synthetic oligonucleotide"
  source: /note="Antisense Oligonucleotide"
gucgguaaguucuguc

SEQ ID NO: 156 - RNA, 15 nt, Artificial Sequence
  source: /note="Description of Artificial Sequence: Synthetic oligonucleotide"
  source: /note="Antisense Oligonucleotide"
gucgguaaguucugu

SEQ ID NO: 157 - RNA, 14 nt, Artificial Sequence
  source: /note="Description of Artificial Sequence: Synthetic oligonucleotide"
  source: /note="Antisense Oligonucleotide"
gucgguaaguucug

SEQ ID NO: 158 - RNA, 13 nt, Artificial Sequence
  source: /note="Description of Artificial Sequence: Synthetic oligonucleotide"
  source: /note="Antisense Oligonucleotide"
gucgguaaguucu

SEQ ID NO: 159 - RNA, 12 nt, Artificial Sequence
  source: /note="Description of Artificial Sequence: Synthetic oligonucleotide"
  source: /note="Antisense Oligonucleotide"
gucgguaaguuc

SEQ ID NO: 160 - RNA, 11 nt, Artificial Sequence
  source: /note="Description of Artificial Sequence: Synthetic oligonucleotide"
  source: /note="Antisense Oligonucleotide"
gucgguaaguu

SEQ ID NO: 161 - RNA, 10 nt, Artificial Sequence
  source: /note="Description of Artificial Sequence: Synthetic oligonucleotide"
  source: /note="Antisense Oligonucleotide"
gucgguaagu

SEQ ID NO: 162 - RNA, 20 nt, Artificial Sequence
  source: /note="Description of Artificial Sequence: Synthetic oligonucleotide"
  source: /note="Antisense Oligonucleotide"
agucgguaaguucuguccaa

SEQ ID NO: 163 - RNA, 19 nt, Artificial Sequence
  source: /note="Description of Artificial Sequence: Synthetic oligonucleotide"
  source: /note="Antisense Oligonucleotide"
agucgguaaguucugucca

SEQ ID NO: 164 - RNA, 17 nt, Artificial Sequence
  source: /note="Description of Artificial Sequence: Synthetic oligonucleotide"
  source: /note="Antisense Oligonucleotide"
agucgguaaguucuguc

SEQ ID NO: 165 - RNA, 16 nt, Artificial Sequence
  source: /note="Description of Artificial Sequence: Synthetic oligonucleotide"
  source: /note="Antisense Oligonucleotide"
agucgguaaguucugu

SEQ ID NO: 166 - RNA, 15 nt, Artificial Sequence
  source: /note="Description of Artificial Sequence: Synthetic oligonucleotide"
  source: /note="Antisense Oligonucleotide"
agucgguaaguucug

SEQ ID NO: 167 - RNA, 14 nt, Artificial Sequence
  source: /note="Description of Artificial Sequence: Synthetic oligonucleotide"
  source: /note="Antisense Oligonucleotide"
agucgguaaguucu

SEQ ID NO: 168 - RNA, 13 nt, Artificial Sequence
  source: /note="Description of Artificial Sequence: Synthetic oligonucleotide"
  source: /note="Antisense Oligonucleotide"
agucgguaaguuc

SEQ ID NO: 169 - RNA, 12 nt, Artificial Sequence
  source: /note="Description of Artificial Sequence: Synthetic oligonucleotide"
  source: /note="Antisense Oligonucleotide"
agucgguaaguu

SEQ ID NO: 170 - RNA, 11 nt, Artificial Sequence
  source: /note="Description of Artificial Sequence: Synthetic oligonucleotide"
  source: /note="Antisense Oligonucleotide"
agucgguaagu

SEQ ID NO: 171 - RNA, 20 nt, Artificial Sequence
  source: /note="Description of Artificial Sequence: Synthetic oligonucleotide"
  source: /note="Antisense Oligonucleotide"
cagucgguaaguucugucca

SEQ ID NO: 172 - RNA, 19 nt, Artificial Sequence
  source: /note="Description of Artificial Sequence: Synthetic oligonucleotide"
  source: /note="Antisense Oligonucleotide"
cagucgguaaguucugucc

SEQ ID NO: 173 - RNA, 18 nt, Artificial Sequence
  source: /note="Description of Artificial Sequence: Synthetic oligonucleotide"
  source: /note="Antisense Oligonucleotide"
cagucgguaaguucuguc

SEQ ID NO: 174 - RNA, 17 nt, Artificial Sequence
  source: /note="Description of Artificial Sequence: Synthetic oligonucleotide"
  source: /note="Antisense Oligonucleotide"
cagucgguaaguucugu

SEQ ID NO: 175 - RNA, 16 nt, Artificial Sequence
  source: /note="Description of Artificial Sequence: Synthetic oligonucleotide"
  source: /note="Antisense Oligonucleotide"
cagucgguaaguucug

SEQ ID NO: 176 - RNA, 15 nt, Artificial Sequence
  source: /note="Description of Artificial Sequence: Synthetic oligonucleotide"
  source: /note="Antisense Oligonucleotide"
cagucgguaaguucu

SEQ ID NO: 177 - RNA, 14 nt, Artificial Sequence
  source: /note="Description of Artificial Sequence: Synthetic oligonucleotide"
  source: /note="Antisense Oligonucleotide"
cagucgguaaguuc

SEQ ID NO: 178 - RNA, 13 nt, Artificial Sequence
  source: /note="Description of Artificial Sequence: Synthetic oligonucleotide"
  source: /note="Antisense Oligonucleotide"
cagucgguaaguu

SEQ ID NO: 179 - RNA, 12 nt, Artificial Sequence
  source: /note="Description of Artificial Sequence: Synthetic oligonucleotide"
  source: /note="Antisense Oligonucleotide"
cagucgguaagu

SEQ ID NO: 180 - RNA, 20 nt, Artificial Sequence
  source: /note="Description of Artificial Sequence: Synthetic oligonucleotide"
  source: /note="Antisense Oligonucleotide"
ccagucgguaaguucugucc

SEQ ID NO: 181 - RNA, 19 nt, Artificial Sequence
  source: /note="Description of Artificial Sequence: Synthetic oligonucleotide"
  source: /note="Antisense Oligonucleotide"
ccagucgguaaguucuguc

SEQ ID NO: 182 - RNA, 18 nt, Artificial Sequence
  source: /note="Description of Artificial Sequence: Synthetic oligonucleotide"
  source: /note="Antisense Oligonucleotide"
ccagucgguaaguucugu

SEQ ID NO: 183 - RNA, 17 nt, Artificial Sequence
  source: /note="Description of Artificial Sequence: Synthetic oligonucleotide"
  source: /note="Antisense Oligonucleotide"
ccagucgguaaguucug

SEQ ID NO: 184 - RNA, 16 nt, Artificial Sequence
  source: /note="Description of Artificial Sequence: Synthetic oligonucleotide"
  source: /note="Antisense Oligonucleotide"
ccagucgguaaguucu

SEQ ID NO: 185 - RNA, 15 nt, Artificial Sequence
  source: /note="Description of Artificial Sequence: Synthetic oligonucleotide"
  source: /note="Antisense Oligonucleotide"
ccagucgguaaguuc

SEQ ID NO: 186 - RNA, 14 nt, Artificial Sequence
  source: /note="Description of Artificial Sequence: Synthetic oligonucleotide"
  source: /note="Antisense Oligonucleotide"
ccagucgguaaguu

SEQ ID NO: 187 - RNA, 13 nt, Artificial Sequence
  source: /note="Description of Artificial Sequence: Synthetic oligonucleotide"
  source: /note="Antisense Oligonucleotide"
ccagucgguaagu

SEQ ID NO: 188 - RNA, 20 nt, Artificial Sequence
  source: /note="Description of Artificial Sequence: Synthetic oligonucleotide"
  source: /note="Antisense Oligonucleotide"
gccagucgguaaguucuguc

SEQ ID NO: 189 - RNA, 19 nt, Artificial Sequence
  source: /note="Description of Artificial Sequence: Synthetic oligonucleotide"
  source: /note="Antisense Oligonucleotide"
gccagucgguaaguucugu

SEQ ID NO: 190 - RNA, 18 nt, Artificial Sequence
  source: /note="Description of Artificial Sequence: Synthetic oligonucleotide"
  source: /note="Antisense Oligonucleotide"
gccagucgguaaguucug

SEQ ID NO: 191 - RNA, 17 nt, Artificial Sequence
  source: /note="Description of Artificial Sequence: Synthetic oligonucleotide"
  source: /note="Antisense Oligonucleotide"
gccagucgguaaguucu

SEQ ID NO: 192 - RNA, 16 nt, Artificial Sequence
  source: /note="Description of Artificial Sequence: Synthetic oligonucleotide"
  source: /note="Antisense Oligonucleotide"
gccagucgguaaguuc

SEQ ID NO: 193 - RNA, 15 nt, Artificial Sequence
  source: /note="Description of Artificial Sequence: Synthetic oligonucleotide"
  source: /note="Antisense Oligonucleotide"
gccagucgguaaguu

SEQ ID NO: 194 - RNA, 14 nt, Artificial Sequence
  source: /note="Description of Artificial Sequence: Synthetic oligonucleotide"
  source: /note="Antisense Oligonucleotide"
gccagucgguaagu

SEQ ID NO: 195 - RNA, 20 nt, Artificial Sequence
  source: /note="Description of Artificial Sequence: Synthetic oligonucleotide"
  source: /note="Antisense Oligonucleotide"
ucaaggaagauggcauuucu

SEQ ID NO: 196 - RNA, 22 nt, Artificial Sequence
  source: /note="Description of Artificial Sequence: Synthetic oligonucleotide"
  source: /note="Antisense Oligonucleotide"
ucaaggaagauggcauuucuag

SEQ ID NO: 197 - RNA, 16 nt, Artificial Sequence
  source: /note="Description of Artificial Sequence: Synthetic oligonucleotide"
  source: /note="Antisense Oligonucleotide"
ucaaggaagauggcau

SEQ ID NO: 198 - RNA, 15 nt, Artificial Sequence
  source: /note="Description of Artificial Sequence: Synthetic oligonucleotide"
  source: /note="Antisense Oligonucleotide"
gaagauggcauuucu

SEQ ID NO: 199 - RNA, 21 nt, Artificial Sequence
  source: /note="Description of Artificial Sequence: Synthetic oligonucleotide"
  source: /note="Antisense Oligonucleotide"
ucaaggaagauggcauuucua

SEQ ID NO: 200 - RNA, 19 nt, Artificial Sequence
  source: /note="Description of Artificial Sequence: Synthetic oligonucleotide"
  source: /note="Antisense Oligonucleotide"
ucaaggaagauggcauuuc

SEQ ID NO: 201 - RNA, 18 nt, Artificial Sequence
  source: /note="Description of Artificial Sequence: Synthetic oligonucleotide"
  source: /note="Antisense Oligonucleotide"
ucaaggaagauggcauuu

SEQ ID NO: 202 - RNA, 17 nt, Artificial Sequence
  source: /note="Description of Artificial Sequence: Synthetic oligonucleotide"
  source: /note="Antisense Oligonucleotide"
ucaaggaagauggcauu

SEQ ID NO: 203 - RNA, 15 nt, Artificial Sequence
  source: /note="Description of Artificial Sequence: Synthetic oligonucleotide"
  source: /note="Antisense Oligonucleotide"
ucaaggaagauggca

SEQ ID NO: 204 - RNA, 14 nt, Artificial Sequence
  source: /note="Description of Artificial Sequence: Synthetic oligonucleotide"
  source: /note="Antisense Oligonucleotide"
ucaaggaagauggc

SEQ ID NO: 205 - RNA, 13 nt, Artificial Sequence
  source: /note="Description of Artificial Sequence: Synthetic oligonucleotide"
  source: /note="Antisense Oligonucleotide"
ucaaggaagaugg

SEQ ID NO: 206 - RNA, 12 nt, Artificial Sequence
  source: /note="Description of Artificial Sequence: Synthetic oligonucleotide"
  source: /note="Antisense Oligonucleotide"
ucaaggaagaug

SEQ ID NO: 207 - RNA, 11 nt, Artificial Sequence
  source: /note="Description of Artificial Sequence: Synthetic oligonucleotide"
  source: /note="Antisense Oligonucleotide"
ucaaggaagau

SEQ ID NO: 208 - RNA, 10 nt, Artificial Sequence
  source: /note="Description of Artificial Sequence: Synthetic oligonucleotide"
  source: /note="Antisense Oligonucleotide"
ucaaggaaga

SEQ ID NO: 209 - RNA, 9 nt, Artificial Sequence
  source: /note="Description of Artificial Sequence: Synthetic oligonucleotide"
  source: /note="Antisense Oligonucleotide"
ucaaggaag

SEQ ID NO: 210 - RNA, 21 nt, Artificial Sequence
  source: /note="Description of Artificial Sequence: Synthetic oligonucleotide"
  source: /note="Antisense Oligonucleotide"
caaggaagauggcauuucuag

SEQ ID NO: 211 - RNA, 20 nt, Artificial Sequence
  source: /note="Description of Artificial Sequence: Synthetic oligonucleotide"
  source: /note="Antisense Oligonucleotide"
caaggaagauggcauuucua

SEQ ID NO: 212 - RNA, 19 nt, Artificial Sequence
  source: /note="Description of Artificial Sequence: Synthetic oligonucleotide"
  source: /note="Antisense Oligonucleotide"
caaggaagauggcauuucu

SEQ ID NO: 213 - RNA, 18 nt, Artificial Sequence
  source: /note="Description of Artificial Sequence: Synthetic oligonucleotide"
  source: /note="Antisense Oligonucleotide"
caaggaagauggcauuuc

SEQ ID NO: 214 - RNA, 17 nt, Artificial Sequence
  source: /note="Description of Artificial Sequence: Synthetic oligonucleotide"
  source: /note="Antisense Oligonucleotide"
caaggaagauggcauuu

SEQ ID NO: 215 - RNA, 16 nt, Artificial Sequence
  source: /note="Description of Artificial Sequence: Synthetic oligonucleotide"
  source: /note="Antisense Oligonucleotide"
caaggaagauggcauu

SEQ ID NO: 216 - RNA, 15 nt, Artificial Sequence
  source: /note="Description of Artificial Sequence: Synthetic oligonucleotide"
  source: /note="Antisense Oligonucleotide"
caaggaagauggcau

SEQ ID NO: 217 - RNA, 14 nt, Artificial Sequence
  source: /note="Description of Artificial Sequence: Synthetic oligonucleotide"
  source: /note="Antisense Oligonucleotide"
caaggaagauggca

SEQ ID NO: 218 - RNA, 13 nt, Artificial Sequence
  source: /note="Description of Artificial Sequence: Synthetic oligonucleotide"
  source: /note="Antisense Oligonucleotide"
caaggaagauggc

SEQ ID NO: 219 - RNA, 12 nt, Artificial Sequence
  source: /note="Description of Artificial Sequence: Synthetic oligonucleotide"
  source: /note="Antisense Oligonucleotide"
caaggaagaugg

SEQ ID NO: 220 - RNA, 11 nt, Artificial Sequence
  source: /note="Description of Artificial Sequence: Synthetic oligonucleotide"
  source: /note="Antisense Oligonucleotide"
caaggaagaug

SEQ ID NO: 221 - RNA, 10 nt, Artificial Sequence
  source: /note="Description of Artificial Sequence: Synthetic oligonucleotide"
  source: /note="Antisense Oligonucleotide"
caaggaagau

SEQ ID NO: 222 - RNA, 9 nt, Artificial Sequence
  source: /note="Description of Artificial Sequence: Synthetic oligonucleotide"
  source: /note="RNA/Antisense Oligonucleotide"
caaggaaga

SEQ ID NO: 223 - RNA, 8 nt, Artificial Sequence
  source: /note="Description of Artificial Sequence: Synthetic oligonucleotide"
  source: /note="RNA/Antisense Oligonucleotide"
caaggaag

SEQ ID NO: 224 - RNA, 20 nt, Artificial Sequence
  source: /note="Description of Artificial Sequence: Synthetic oligonucleotide"
  source: /note="Antisense Oligonucleotide"
aaggaagauggcauuucuag

SEQ ID NO: 225 - RNA, 19 nt, Artificial Sequence
  source: /note="Description of Artificial Sequence: Synthetic oligonucleotide"
  source: /note="Antisense Oligonucleotide"
aaggaagauggcauuucua

SEQ ID NO: 226 - RNA, 18 nt, Artificial Sequence
  source: /note="Description of Artificial Sequence: Synthetic oligonucleotide"
  source: /note="Antisense Oligonucleotide"
aaggaagauggcauuucu

SEQ ID NO: 227 - RNA, 17 nt, Artificial Sequence
  source: /note="Description of Artificial Sequence: Synthetic oligonucleotide"
  source: /note="Antisense Oligonucleotide"
aaggaagauggcauuuc

SEQ ID NO: 228 - RNA, 16 nt, Artificial Sequence
  source: /note="Description of Artificial Sequence: Synthetic oligonucleotide"
  source: /note="Antisense Oligonucleotide"
aaggaagauggcauuu

SEQ ID NO: 229 - RNA, 15 nt, Artificial Sequence
  source: /note="Description of Artificial Sequence: Synthetic oligonucleotide"
  source: /note="Antisense Oligonucleotide"
aaggaagauggcauu

SEQ ID NO: 230 - RNA, 14 nt, Artificial Sequence
  source: /note="Description of Artificial Sequence: Synthetic oligonucleotide"
  source: /note="Antisense Oligonucleotide"
aaggaagauggcau

SEQ ID NO: 231 - RNA, 13 nt, Artificial Sequence
  source: /note="Description of Artificial Sequence: Synthetic oligonucleotide"
  source: /note="Antisense Oligonucleotide"
aaggaagauggca

SEQ ID NO: 232 - RNA, 12 nt, Artificial Sequence
  source: /note="Description of Artificial Sequence: Synthetic oligonucleotide"
  source: /note="Antisense Oligonucleotide"
aaggaagauggc

SEQ ID NO: 233 - RNA, 11 nt, Artificial Sequence
  source: /note="Description of Artificial Sequence: Synthetic oligonucleotide"
  source: /note="Antisense Oligonucleotide"
aaggaagaugg

SEQ ID NO: 234 - RNA, 10 nt, Artificial Sequence
  source: /note="Description of Artificial Sequence: Synthetic oligonucleotide"
  source: /note="Antisense Oligonucleotide"
aaggaagaug

SEQ ID NO: 235 - RNA, 9 nt, Artificial Sequence
  source: /note="Description of Artificial Sequence: Synthetic oligonucleotide"
  source: /note="Antisense Oligonucleotide"
aaggaagau

SEQ ID NO: 236 - RNA, 8 nt, Artificial Sequence
  source: /note="Description of Artificial Sequence: Synthetic oligonucleotide"
  source: /note="RNA/Antisense Oligonucleotide"
aaggaaga

SEQ ID NO: 237 - RNA, 19 nt, Artificial Sequence
  source: /note="Description of Artificial Sequence: Synthetic oligonucleotide"
  source: /note="Antisense Oligonucleotide"
aggaagauggcauuucuag

SEQ ID NO: 238 - RNA, 18 nt, Artificial Sequence
  source: /note="Description of Artificial Sequence: Synthetic oligonucleotide"
  source: /note="Antisense Oligonucleotide"
aggaagauggcauuucua

SEQ ID NO: 239 - RNA, 17 nt, Artificial Sequence
  source: /note="Description of Artificial Sequence: Synthetic oligonucleotide"
  source: /note="Antisense Oligonucleotide"
aggaagauggcauuucu

SEQ ID NO: 240 - RNA, 16 nt, Artificial Sequence
  source: /note="Description of Artificial Sequence: Synthetic oligonucleotide"
  source: /note="Antisense Oligonucleotide"
aggaagauggcauuuc

SEQ ID NO: 241 - RNA, 15 nt, Artificial Sequence
  source: /note="Description of Artificial Sequence: Synthetic oligonucleotide"
  source: /note="Antisense Oligonucleotide"
aggaagauggcauuu

SEQ ID NO: 242 - RNA, 14 nt, Artificial Sequence
  source: /note="Description of Artificial Sequence: Synthetic oligonucleotide"
  source: /note="Antisense Oligonucleotide"
aggaagauggcauu

SEQ ID NO: 243 - RNA, 13 nt, Artificial Sequence
  source: /note="Description of Artificial Sequence: Synthetic oligonucleotide"
  source: /note="Antisense Oligonucleotide"
aggaagauggcau

SEQ ID NO: 244 - RNA, 12 nt, Artificial Sequence
  source: /note="Description of Artificial Sequence: Synthetic oligonucleotide"
  source: /note="Antisense Oligonucleotide"
aggaagauggca

SEQ ID NO: 245 - RNA, 10 nt, Artificial Sequence
  source: /note="Description of Artificial Sequence: Synthetic oligonucleotide"
  source: /note="Antisense Oligonucleotide"
aggaagaugg

SEQ ID NO: 246 - RNA, 9 nt, Artificial Sequence
  source: /note="Description of Artificial Sequence: Synthetic oligonucleotide"
  source: /note="Antisense Oligonucleotide"
aggaagaug

SEQ ID NO: 247 - RNA, 8 nt, Artificial Sequence
  source: /note="Description of Artificial Sequence: Synthetic oligonucleotide"
  source: /note="Antisense Oligonucleotide"
aggaagau

SEQ ID NO: 248 - RNA, 18 nt, Artificial Sequence
  source: /note="Description of Artificial Sequence: Synthetic oligonucleotide"
  source: /note="Antisense Oligonucleotide"
ggaagauggcauuucuag

SEQ ID NO: 249 - RNA, 17 nt, Artificial Sequence
  source: /note="Description of Artificial Sequence: Synthetic oligonucleotide"
  source: /note="Antisense Oligonucleotide"
ggaagauggcauuucua

SEQ ID NO: 250 - RNA, 16 nt, Artificial Sequence
  source: /note="Description of Artificial Sequence: Synthetic oligonucleotide"
  source: /note="Antisense Oligonucleotide"
ggaagauggcauuucu

SEQ ID NO: 251 - RNA, 15 nt, Artificial Sequence
  source: /note="Description of Artificial Sequence: Synthetic oligonucleotide"
  source: /note="Antisense Oligonucleotide"
ggaagauggcauuuc

SEQ ID NO: 252 - RNA, 14 nt, Artificial Sequence
  source: /note="Description of Artificial Sequence: Synthetic oligonucleotide"
  source: /note="Antisense Oligonucleotide"
ggaagauggcauuu

SEQ ID NO: 253 - RNA, 13 nt, Artificial Sequence
  source: /note="Description of Artificial Sequence: Synthetic oligonucleotide"
  source: /note="Antisense Oligonucleotide"
ggaagauggcauu

SEQ ID NO: 254 - RNA, 12 nt, Artificial Sequence
  source: /note="Description of Artificial Sequence: Synthetic oligonucleotide"
  source: /note="Antisense Oligonucleotide"
ggaagauggcau

SEQ ID NO: 255 - RNA, 11 nt, Artificial Sequence
  source: /note="Description of Artificial Sequence: Synthetic oligonucleotide"
  source: /note="Antisense Oligonucleotide"
ggaagauggca

SEQ ID NO: 256 - RNA, 10 nt, Artificial Sequence
  source: /note="Description of Artificial Sequence: Synthetic oligonucleotide"
  source: /note="Antisense Oligonucleotide"
ggaagauggc

SEQ ID NO: 257 - RNA, 8 nt, Artificial Sequence
  source: /note="Description of Artificial Sequence: Synthetic oligonucleotide"
  source: /note="Antisense Oligonucleotide"
ggaagaug

SEQ ID NO: 258 - RNA, 17 nt, Artificial Sequence
  source: /note="Description of Artificial Sequence: Synthetic oligonucleotide"
  source: /note="Antisense Oligonucleotide"
gaagauggcauuucuag

SEQ ID NO: 259 - RNA, 16 nt, Artificial Sequence
  source: /note="Description of Artificial Sequence: Synthetic oligonucleotide"
  source: /note="Antisense Oligonucleotide"
gaagauggcauuucua

SEQ ID NO: 260 - RNA, 14 nt, Artificial Sequence
  source: /note="Description of Artificial Sequence: Synthetic oligonucleotide"
  source: /note="Antisense Oligonucleotide"
gaagauggcauuuc

SEQ ID NO: 261 - RNA, 13 nt, Artificial Sequence
  source: /note="Description of Artificial Sequence: Synthetic oligonucleotide"
  source: /note="Antisense Oligonucleotide"
gaagauggcauuu

SEQ ID NO: 262 - RNA, 12 nt, Artificial Sequence
  source: /note="Description of Artificial Sequence: Synthetic oligonucleotide"
  source: /note="Antisense Oligonucleotide"
gaagauggcauu

SEQ ID NO: 263 - RNA, 11 nt, Artificial Sequence
  source: /note="Description of Artificial Sequence: Synthetic oligonucleotide"
  source: /note="Antisense Oligonucleotide"
gaagauggcau

SEQ ID NO: 264 - RNA, 10 nt, Artificial Sequence
  source: /note="Description of Artificial Sequence: Synthetic oligonucleotide"
  source: /note="Antisense Oligonucleotide"
gaagauggca

SEQ ID NO: 265 - RNA, 9 nt, Artificial Sequence
  source: /note="Description of Artificial Sequence: Synthetic oligonucleotide"
  source: /note="Antisense Oligonucleotide"
gaagauggc

SEQ ID NO: 266 - RNA, 8 nt, Artificial Sequence
  source: /note="Description of Artificial Sequence: Synthetic oligonucleotide"
  source: /note="Antisense Oligonucleotide"
gaagaugg

SEQ ID NO: 267 - RNA, 16 nt, Artificial Sequence
  source: /note="Description of Artificial Sequence: Synthetic oligonucleotide"
  source: /note="Antisense Oligonucleotide"
aagauggcauuucuag

SEQ ID NO: 268 - RNA, 15 nt, Artificial Sequence
  source: /note="Description of Artificial Sequence: Synthetic oligonucleotide"
  source: /note="Antisense Oligonucleotide"
aagauggcauuucua

SEQ ID NO: 269 - RNA, 14 nt, Artificial Sequence
  source: /note="Description of Artificial Sequence: Synthetic oligonucleotide"
  source: /note="Antisense Oligonucleotide"
aagauggcauuucu

SEQ ID NO: 270 - RNA, 13 nt, Artificial Sequence
  source: /note="Description of Artificial Sequence: Synthetic oligonucleotide"
  source: /note="Antisense Oligonucleotide"
aagauggcauuuc

SEQ ID NO: 271 - RNA, 12 nt, Artificial Sequence
  source: /note="Description of Artificial Sequence: Synthetic oligonucleotide"
  source: /note="Antisense Oligonucleotide"
aagauggcauuu

SEQ ID NO: 272 - RNA, 11 nt, Artificial Sequence
  source: /note="Description of Artificial Sequence: Synthetic oligonucleotide"
  source: /note="Antisense Oligonucleotide"
aagauggcauu

SEQ ID NO: 273 - RNA, 10 nt, Artificial Sequence
  source: /note="Description of Artificial Sequence: Synthetic oligonucleotide"
  source: /note="Antisense Oligonucleotide"
aagauggcau

SEQ ID NO: 274 - RNA, 9 nt, Artificial Sequence
  source: /note="Description of Artificial Sequence: Synthetic oligonucleotide"
  source: /note="Antisense Oligonucleotide"
aagauggca

SEQ ID NO: 275 - RNA, 8 nt, Artificial Sequence
  source: /note="Description of Artificial Sequence: Synthetic oligonucleotide"
  source: /note="Antisense Oligonucleotide"
aagauggc

SEQ ID NO: 276 - RNA, 15 nt, Artificial Sequence
  source: /note="Description of Artificial Sequence: Synthetic oligonucleotide"
  source: /note="Antisense Oligonucleotide"
agauggcauuucuag

SEQ ID NO: 277 - RNA, 14 nt, Artificial Sequence
  source: /note="Description of Artificial Sequence: Synthetic oligonucleotide"
  source: /note="Antisense Oligonucleotide"
agauggcauuucua

SEQ ID NO: 278 - RNA, 13 nt, Artificial Sequence
  source: /note="Description of Artificial Sequence: Synthetic oligonucleotide"
  source: /note="Antisense Oligonucleotide"
agauggcauuucu

SEQ ID NO: 279 - RNA, 12 nt, Artificial Sequence
  source: /note="Description of Artificial Sequence: Synthetic oligonucleotide"
  source: /note="Antisense Oligonucleotide"
agauggcauuuc

SEQ ID NO: 280 - RNA, 11 nt, Artificial Sequence
  source: /note="Description of Artificial Sequence: Synthetic oligonucleotide"
  source: /note="Antisense Oligonucleotide"
agauggcauuu

SEQ ID NO: 281 - RNA, 10 nt, Artificial Sequence
  source: /note="Description of Artificial Sequence: Synthetic oligonucleotide"
  source: /note="Antisense Oligonucleotide"
agauggcauu

SEQ ID NO: 282 - RNA, 9 nt, Artificial Sequence
  source: /note="Description of Artificial Sequence: Synthetic oligonucleotide"
  source: /note="Antisense Oligonucleotide"
agauggcau

SEQ ID NO: 283 - RNA, 8 nt, Artificial Sequence
  source: /note="Description of Artificial Sequence: Synthetic oligonucleotide"
  source: /note="Antisense Oligonucleotide"
agauggca

SEQ ID NO: 284 - RNA, 30 nt, Artificial Sequence
  source: /note="Description of Artificial Sequence: Synthetic oligonucleotide"
  source: /note="Antisense Oligonucleotide"
cuccaacaucaaggaagauggcauuucuag

SEQ ID NO: 285 - RNA, 29 nt, Artificial Sequence
  source: /note="Description of Artificial Sequence: Synthetic oligonucleotide"
  source: /note="Antisense Oligonucleotide"
cuccaacaucaaggaagauggcauuucua

SEQ ID NO: 286 - RNA, 28 nt, Artificial Sequence
  source: /note="Description of Artificial Sequence: Synthetic oligonucleotide"
  source: /note="Antisense Oligonucleotide"
cuccaacaucaaggaagauggcauuucu

SEQ ID NO: 287 - RNA, 27 nt, Artificial Sequence
  source: /note="Description of Artificial Sequence: Synthetic oligonucleotide"
  source: /note="Antisense Oligonucleotide"
cuccaacaucaaggaagauggcauuuc

SEQ ID NO: 288 - RNA, 26 nt, Artificial Sequence
  source: /note="Description of Artificial Sequence: Synthetic oligonucleotide"
  source: /note="Antisense Oligonucleotide"
cuccaacaucaaggaagauggcauuu

SEQ ID NO: 289 - RNA, 25 nt, Artificial Sequence
  source: /note="Description of Artificial Sequence: Synthetic oligonucleotide"
  source: /note="Antisense Oligonucleotide"
cuccaacaucaaggaagauggcauu

SEQ ID NO: 290 - RNA, 24 nt, Artificial Sequence
  source: /note="Description of Artificial Sequence: Synthetic oligonucleotide"
  source: /note="Antisense Oligonucleotide"
cuccaacaucaaggaagauggcau

SEQ ID NO: 291 - RNA, 23 nt, Artificial Sequence
  source: /note="Description of Artificial Sequence: Synthetic oligonucleotide"
  source: /note="Antisense Oligonucleotide"
cuccaacaucaaggaagauggca

SEQ ID NO: 292 - RNA, 22 nt, Artificial Sequence
  source: /note="Description of Artificial Sequence: Synthetic oligonucleotide"
  source: /note="Antisense Oligonucleotide"
cuccaacaucaaggaagauggc

SEQ ID NO: 293 - RNA, 21 nt, Artificial Sequence
  source: /note="Description of Artificial Sequence: Synthetic oligonucleotide"
  source: /note="Antisense Oligonucleotide"
cuccaacaucaaggaagaugg

SEQ ID NO: 294 - RNA, 20 nt, Artificial Sequence
  source: /note="Description of Artificial Sequence: Synthetic oligonucleotide"
  source: /note="Antisense Oligonucleotide"
cuccaacaucaaggaagaug

SEQ ID NO: 295 - RNA, 19 nt, Artificial Sequence
  source: /note="Description of Artificial Sequence: Synthetic oligonucleotide"
  source: /note="Antisense Oligonucleotide"
cuccaacaucaaggaagau

SEQ ID NO: 296 - RNA, 18 nt, Artificial Sequence
  source: /note="Description of Artificial Sequence: Synthetic oligonucleotide"
  source: /note="Antisense Oligonucleotide"
cuccaacaucaaggaaga

SEQ ID NO: 297 - RNA, 17 nt, Artificial Sequence
  source: /note="Description of Artificial Sequence: Synthetic oligonucleotide"
  source: /note="Antisense Oligonucleotide"
cuccaacaucaaggaag

SEQ ID NO: 298 - RNA, 29 nt, Artificial Sequence
  source: /note="Description of Artificial Sequence: Synthetic oligonucleotide"
  source: /note="Antisense Oligonucleotide"
uccaacaucaaggaagauggcauuucuag

SEQ ID NO: 299 - RNA, 28 nt, Artificial Sequence
  source: /note="Description of Artificial Sequence: Synthetic oligonucleotide"
  source: /note="Antisense Oligonucleotide"
uccaacaucaaggaagauggcauuucua

SEQ ID NO: 300 - RNA, 27 nt, Artificial Sequence
  source: /note="Description of Artificial Sequence: Synthetic oligonucleotide"
  source: /note="Antisense Oligonucleotide"
uccaacaucaaggaagauggcauuucu

SEQ ID NO: 301 - RNA, 26 nt, Artificial Sequence
  source: /note="Description of Artificial Sequence: Synthetic oligonucleotide"
  source: /note="Antisense Oligonucleotide"
uccaacaucaaggaagauggcauuuc

SEQ ID NO: 302 - RNA, 25 nt, Artificial Sequence
  source: /note="Description of Artificial Sequence: Synthetic oligonucleotide"
  source: /note="Antisense Oligonucleotide"
uccaacaucaaggaagauggcauuu

SEQ ID NO: 303 - RNA, 24 nt, Artificial Sequence
  source: /note="Description of Artificial Sequence: Synthetic oligonucleotide"
  source: /note="Antisense Oligonucleotide"
uccaacaucaaggaagauggcauu

SEQ ID NO: 304 - RNA, 23 nt, Artificial Sequence
  source: /note="Description of Artificial Sequence: Synthetic oligonucleotide"
  source: /note="Antisense Oligonucleotide"
uccaacaucaaggaagauggcau

SEQ ID NO: 305 - RNA, 22 nt, Artificial Sequence
  source: /note="Description of Artificial Sequence: Synthetic oligonucleotide"
  source: /note="Antisense Oligonucleotide"
uccaacaucaaggaagauggca

SEQ ID NO: 306 - RNA, 21 nt, Artificial Sequence
  source: /note="Description of Artificial Sequence: Synthetic oligonucleotide"
  source: /note="Antisense Oligonucleotide"
uccaacaucaaggaagauggc

SEQ ID NO: 307 - RNA, 20 nt, Artificial Sequence
  source: /note="Description of Artificial Sequence: Synthetic oligonucleotide"
  source: /note="Antisense Oligonucleotide"
uccaacaucaaggaagaugg

SEQ ID NO: 308 - RNA, 19 nt, Artificial Sequence
  source: /note="Description of Artificial Sequence: Synthetic oligonucleotide"
  source: /note="Antisense Oligonucleotide"
uccaacaucaaggaagaug

SEQ ID NO: 309 - RNA, 18 nt, Artificial Sequence
  source: /note="Description of Artificial Sequence: Synthetic oligonucleotide"
  source: /note="Antisense Oligonucleotide"
uccaacaucaaggaagau

SEQ ID NO: 310 - RNA, 17 nt, Artificial Sequence
  source: /note="Description of Artificial Sequence: Synthetic oligonucleotide"
  source: /note="Antisense Oligonucleotide"
uccaacaucaaggaaga

SEQ ID NO: 311 - RNA, 16 nt, Artificial Sequence
  source: /note="Description of Artificial Sequence: Synthetic oligonucleotide"
  source: /note="Antisense Oligonucleotide"
uccaacaucaaggaag

SEQ ID NO: 312 - RNA, 28 nt, Artificial Sequence
  source: /note="Description of Artificial Sequence: Synthetic oligonucleotide"
  source: /note="Antisense Oligonucleotide"
ccaacaucaaggaagauggcauuucuag

SEQ ID NO: 313 - RNA, 27 nt, Artificial Sequence
  source: /note="Description of Artificial Sequence: Synthetic oligonucleotide"
  source: /note="Antisense Oligonucleotide"
ccaacaucaaggaagauggcauuucua

SEQ ID NO: 314 - RNA, 26 nt, Artificial Sequence
  source: /note="Description of Artificial Sequence: Synthetic oligonucleotide"
  source: /note="Antisense Oligonucleotide"
ccaacaucaaggaagauggcauuucu

SEQ ID NO: 315 - RNA, 25 nt, Artificial Sequence
  source: /note="Description of Artificial Sequence: Synthetic oligonucleotide"
  source: /note="Antisense Oligonucleotide"
ccaacaucaaggaagauggcauuuc

SEQ ID NO: 316 - RNA, 24 nt, Artificial Sequence
  source: /note="Description of Artificial Sequence: Synthetic oligonucleotide"
  source: /note="Antisense Oligonucleotide"
ccaacaucaaggaagauggcauuu

SEQ ID NO: 317 - RNA, 23 nt, Artificial Sequence
  source: /note="Description of Artificial Sequence: Synthetic oligonucleotide"
  source: /note="Antisense Oligonucleotide"
ccaacaucaaggaagauggcauu

SEQ ID NO: 318 - RNA, 22 nt, Artificial Sequence
  source: /note="Description of Artificial Sequence: Synthetic oligonucleotide"
  source: /note="Antisense Oligonucleotide"
ccaacaucaaggaagauggcau

SEQ ID NO: 319 - RNA, 21 nt, Artificial Sequence
  source: /note="Description of Artificial Sequence: Synthetic oligonucleotide"
  source: /note="Antisense Oligonucleotide"
ccaacaucaaggaagauggca

SEQ ID NO: 320 - RNA, 20 nt, Artificial Sequence
  source: /note="Description of Artificial Sequence: Synthetic oligonucleotide"
  source: /note="Antisense Oligonucleotide"
ccaacaucaaggaagauggc

SEQ ID NO: 321 - RNA, 19 nt, Artificial Sequence
  source: /note="Description of Artificial Sequence: Synthetic oligonucleotide"
  source: /note="Antisense Oligonucleotide"
ccaacaucaaggaagaugg

SEQ ID NO: 322 - RNA, 18 nt, Artificial Sequence
  source: /note="Description of Artificial Sequence: Synthetic oligonucleotide"
  source: /note="Antisense Oligonucleotide"
ccaacaucaaggaagaug

SEQ ID NO: 323 - RNA, 17 nt, Artificial Sequence
  source: /note="Description of Artificial Sequence: Synthetic oligonucleotide"
  source: /note="Antisense Oligonucleotide"
ccaacaucaaggaagau

SEQ ID NO: 324 - RNA, 16 nt, Artificial Sequence
  source: /note="Description of Artificial Sequence: Synthetic oligonucleotide"
  source: /note="Antisense Oligonucleotide"
ccaacaucaaggaaga

SEQ ID NO: 325 - RNA, 15 nt, Artificial Sequence
  source: /note="Description of Artificial Sequence: Synthetic oligonucleotide"
  source: /note="Antisense Oligonucleotide"
ccaacaucaaggaag

SEQ ID NO: 326 - RNA, 27 nt, Artificial Sequence
  source: /note="Description of Artificial Sequence: Synthetic oligonucleotide"
  source: /note="Antisense Oligonucleotide"
caacaucaaggaagauggcauuucuag

SEQ ID NO: 327 - RNA, 26 nt, Artificial Sequence
  source: /note="Description of Artificial Sequence: Synthetic oligonucleotide"
  source: /note="Antisense Oligonucleotide"
caacaucaaggaagauggcauuucua

SEQ ID NO: 328 - RNA, 25 nt, Artificial Sequence
  source: /note="Description of Artificial Sequence: Synthetic oligonucleotide"
  source: /note="Antisense Oligonucleotide"
caacaucaaggaagauggcauuucu

SEQ ID NO: 329 - RNA, 24 nt, Artificial Sequence
  source: /note="Description of Artificial Sequence: Synthetic oligonucleotide"
  source: /note="Antisense Oligonucleotide"
caacaucaaggaagauggcauuuc

SEQ ID NO: 330 - RNA, 23 nt, Artificial Sequence
  source: /note="Description of Artificial Sequence: Synthetic oligonucleotide"
  source: /note="Antisense Oligonucleotide"
caacaucaaggaagauggcauuu

SEQ ID NO: 331 - RNA, 22 nt, Artificial Sequence
  source: /note="Description of Artificial Sequence: Synthetic oligonucleotide"
  source: /note="Antisense Oligonucleotide"
caacaucaaggaagauggcauu

SEQ ID NO: 332 - RNA, 21 nt, Artificial Sequence
  source: /note="Description of Artificial Sequence: Synthetic oligonucleotide"
  source: /note="Antisense Oligonucleotide"
caacaucaaggaagauggcau

SEQ ID NO: 333 - RNA, 20 nt, Artificial Sequence
  source: /note="Description of Artificial Sequence: Synthetic oligonucleotide"
  source: /note="Antisense Oligonucleotide"
caacaucaaggaagauggca

SEQ ID NO: 334 - RNA, 19 nt, Artificial Sequence
  source: /note="Description of Artificial Sequence: Synthetic oligonucleotide"
  source: /note="Antisense Oligonucleotide"
caacaucaaggaagauggc

SEQ ID NO: 335 - RNA, 18 nt, Artificial Sequence
  source: /note="Description of Artificial Sequence: Synthetic oligonucleotide"
  source: /note="Antisense Oligonucleotide"
caacaucaaggaagaugg

SEQ ID NO: 336 - RNA, 17 nt, Artificial Sequence
  source: /note="Description of Artificial Sequence: Synthetic oligonucleotide"
  source: /note="Antisense Oligonucleotide"
caacaucaaggaagaug

SEQ ID NO: 337 - RNA, 16 nt, Artificial Sequence
  source: /note="Description of Artificial Sequence: Synthetic oligonucleotide"
  source: /note="Antisense Oligonucleotide"
caacaucaaggaagau

SEQ ID NO: 338 - RNA, 15 nt, Artificial Sequence
  source: /note="Description of Artificial Sequence: Synthetic oligonucleotide"
  source: /note="Antisense Oligonucleotide"
caacaucaaggaaga

SEQ ID NO: 339 - RNA, 14 nt, Artificial Sequence
  source: /note="Description of Artificial Sequence: Synthetic oligonucleotide"
  source: /note="Antisense Oligonucleotide"
caacaucaaggaag

SEQ ID NO: 340 - RNA, 26 nt, Artificial Sequence
  source: /note="Description of Artificial Sequence: Synthetic oligonucleotide"
  source: /note="Antisense Oligonucleotide"
aacaucaaggaagauggcauuucuag

SEQ ID NO: 341 - RNA, 25 nt, Artificial Sequence
  source: /note="Description of Artificial Sequence: Synthetic oligonucleotide"
  source: /note="Antisense Oligonucleotide"
aacaucaaggaagauggcauuucua

SEQ ID NO: 342 - RNA, 24 nt, Artificial Sequence
  source: /note="Description of Artificial Sequence: Synthetic oligonucleotide"
  source: /note="Antisense Oligonucleotide"
aacaucaaggaagauggcauuucu

SEQ ID NO: 343 - RNA, 23 nt, Artificial Sequence
  source: /note="Description of Artificial Sequence: Synthetic oligonucleotide"
  source: /note="Antisense Oligonucleotide"
aacaucaaggaagauggcauuuc

SEQ ID NO: 344 - RNA, 22 nt, Artificial Sequence
  source: /note="Description of Artificial Sequence: Synthetic oligonucleotide"
  source: /note="Antisense Oligonucleotide"
aacaucaaggaagauggcauuu

SEQ ID NO: 345 - RNA, 21 nt, Artificial Sequence
  source: /note="Description of Artificial Sequence: Synthetic oligonucleotide"
  source: /note="Antisense Oligonucleotide"
aacaucaaggaagauggcauu

SEQ ID NO: 346 - RNA, 20 nt, Artificial Sequence
  source: /note="Description of Artificial Sequence: Synthetic oligonucleotide"
  source: /note="Antisense Oligonucleotide"
aacaucaaggaagauggcau

SEQ ID NO: 347 - RNA, 19 nt, Artificial Sequence
  source: /note="Description of Artificial Sequence: Synthetic oligonucleotide"
  source: /note="Antisense Oligonucleotide"
aacaucaaggaagauggca

SEQ ID NO: 348 - RNA, 18 nt, Artificial Sequence
  source: /note="Description of Artificial Sequence: Synthetic oligonucleotide"
  source: /note="Antisense Oligonucleotide"
aacaucaaggaagauggc

SEQ ID NO: 349 - RNA, 17 nt, Artificial Sequence
  source: /note="Description of Artificial Sequence: Synthetic oligonucleotide"
  source: /note="Antisense Oligonucleotide"
aacaucaaggaagaugg

SEQ ID NO: 350 - RNA, 16 nt, Artificial Sequence
  source: /note="Description of Artificial Sequence: Synthetic oligonucleotide"
  source: /note="Antisense Oligonucleotide"
aacaucaaggaagaug

SEQ ID NO: 351 - RNA, 15 nt, Artificial Sequence
  source: /note="Description of Artificial Sequence: Synthetic oligonucleotide"
  source: /note="Antisense Oligonucleotide"
aacaucaaggaagau

SEQ ID NO: 352 - RNA, 14 nt, Artificial Sequence
  source: /note="Description of Artificial Sequence: Synthetic oligonucleotide"
  source: /note="Antisense Oligonucleotide"
aacaucaaggaaga

SEQ ID NO: 353 - RNA, 13 nt, Artificial Sequence
  source: /note="Description of Artificial Sequence: Synthetic oligonucleotide"
  source: /note="Antisense Oligonucleotide"
aacaucaaggaag

SEQ ID NO: 354 - RNA, 25 nt, Artificial Sequence
  source: /note="Description of Artificial Sequence: Synthetic oligonucleotide"
  source: /note="Antisense Oligonucleotide"
acaucaaggaagauggcauuucuag

SEQ ID NO: 355 - RNA, 24 nt, Artificial Sequence
  source: /note="Description of Artificial Sequence: Synthetic oligonucleotide"
  source: /note="Antisense Oligonucleotide"
acaucaaggaagauggcauuucua

SEQ ID NO: 356 - RNA, 23 nt, Artificial Sequence
  source: /note="Description of Artificial Sequence: Synthetic oligonucleotide"
  source: /note="Antisense Oligonucleotide"
acaucaaggaagauggcauuucu

SEQ ID NO: 357 - RNA, 22 nt, Artificial Sequence
  source: /note="Description of Artificial Sequence: Synthetic oligonucleotide"
  source: /note="Antisense Oligonucleotide"
acaucaaggaagauggcauuuc

SEQ ID NO: 358 - RNA, 21 nt, Artificial Sequence
  source: /note="Description of Artificial Sequence: Synthetic oligonucleotide"
  source: /note="Antisense Oligonucleotide"
acaucaaggaagauggcauuu

SEQ ID NO: 359 - RNA, 20 nt, Artificial Sequence
  source: /note="Description of Artificial Sequence: Synthetic oligonucleotide"
  source: /note="Antisense Oligonucleotide"
acaucaaggaagauggcauu

SEQ ID NO: 360 - RNA, 19 nt, Artificial Sequence
  source: /note="Description of Artificial Sequence: Synthetic oligonucleotide"
  source: /note="Antisense Oligonucleotide"
acaucaaggaagauggcau

SEQ ID NO: 361 - RNA, 18 nt, Artificial Sequence
  source: /note="Description of Artificial Sequence: Synthetic oligonucleotide"
  source: /note="Antisense Oligonucleotide"
acaucaaggaagauggca

SEQ ID NO: 362 - RNA, 17 nt, Artificial Sequence
  source: /note="Description of Artificial Sequence: Synthetic oligonucleotide"
  source: /note="Antisense Oligonucleotide"
acaucaaggaagauggc

SEQ ID NO: 363 - RNA, 16 nt, Artificial Sequence
  source: /note="Description of Artificial Sequence: Synthetic oligonucleotide"
  source: /note="Antisense Oligonucleotide"
acaucaaggaagaugg

SEQ ID NO: 364 - RNA, 15 nt, Artificial Sequence
  source: /note="Description of Artificial Sequence: Synthetic oligonucleotide"
  source: /note="Antisense Oligonucleotide"
acaucaaggaagaug

SEQ ID NO: 365 - RNA, 14 nt, Artificial Sequence
  source: /note="Description of Artificial Sequence: Synthetic oligonucleotide"
  source: /note="Antisense Oligonucleotide"
acaucaaggaagau

SEQ ID NO: 366 - RNA, 13 nt, Artificial Sequence
  source: /note="Description of Artificial Sequence: Synthetic oligonucleotide"
  source: /note="Antisense Oligonucleotide"
acaucaaggaaga

SEQ ID NO: 367 - RNA, 12 nt, Artificial Sequence
  source: /note="Description of Artificial Sequence: Synthetic oligonucleotide"
  source: /note="Antisense Oligonucleotide"
acaucaaggaag

SEQ ID NO: 368 - RNA, 24 nt, Artificial Sequence
  source: /note="Description of Artificial Sequence: Synthetic oligonucleotide"
  source: /note="Antisense Oligonucleotide"
caucaaggaagauggcauuucuag

SEQ ID NO: 369 - RNA, 23 nt, Artificial Sequence
  source: /note="Description of Artificial Sequence: Synthetic oligonucleotide"
  source: /note="Antisense Oligonucleotide"
caucaaggaagauggcauuucua

SEQ ID NO: 370 - RNA, 22 nt, Artificial Sequence
  source: /note="Description of Artificial Sequence: Synthetic oligonucleotide"
  source: /note="Antisense Oligonucleotide"
caucaaggaagauggcauuucu

SEQ ID NO: 371 - RNA, 21 nt, Artificial Sequence
  source: /note="Description of Artificial Sequence: Synthetic oligonucleotide"
  source: /note="Antisense Oligonucleotide"
caucaaggaagauggcauuuc

SEQ ID NO: 372 - RNA, 20 nt, Artificial Sequence
  source: /note="Description of Artificial Sequence: Synthetic oligonucleotide"
  source: /note="Antisense Oligonucleotide"
caucaaggaagauggcauuu

SEQ ID NO: 373 - RNA, 19 nt, Artificial Sequence
  source: /note="Description of Artificial Sequence: Synthetic oligonucleotide"
  source: /note="Antisense Oligonucleotide"
caucaaggaagauggcauu

SEQ ID NO: 374 - RNA, 18 nt, Artificial Sequence
  source: /note="Description of Artificial Sequence: Synthetic oligonucleotide"
  source: /note="Antisense Oligonucleotide"
caucaaggaagauggcau

SEQ ID NO: 375 - RNA, 17 nt, Artificial Sequence
  source: /note="Description of Artificial Sequence: Synthetic oligonucleotide"
  source: /note="Antisense Oligonucleotide"
caucaaggaagauggca

SEQ ID NO: 376 - RNA, 16 nt, Artificial Sequence
  source: /note="Description of Artificial Sequence: Synthetic oligonucleotide"
  source: /note="Antisense Oligonucleotide"
caucaaggaagauggc

SEQ ID NO: 377 - RNA, 15 nt, Artificial Sequence
  source: /note="Description of Artificial Sequence: Synthetic oligonucleotide"
  source: /note="Antisense Oligonucleotide"
caucaaggaagaugg

SEQ ID NO: 378 - RNA, 14 nt, Artificial Sequence
  source: /note="Description of Artificial Sequence: Synthetic oligonucleotide"
  source: /note="Antisense Oligonucleotide"
caucaaggaagaug

SEQ ID NO: 379 - RNA, 13 nt, Artificial Sequence
  source: /note="Description of Artificial Sequence: Synthetic oligonucleotide"
  source: /note="Antisense Oligonucleotide"
caucaaggaagau

SEQ ID NO: 380 - RNA, 12 nt, Artificial Sequence
  source: /note="Description of Artificial Sequence: Synthetic oligonucleotide"
  source: /note="Antisense Oligonucleotide"
caucaaggaaga

SEQ ID NO: 381 - RNA, 11 nt, Artificial Sequence
  source: /note="Description of Artificial Sequence: Synthetic oligonucleotide"
  source: /note="Antisense Oligonucleotide"
caucaaggaag

SEQ ID NO: 382 - RNA, 23 nt, Artificial Sequence
  source: /note="Description of Artificial Sequence: Synthetic oligonucleotide"
  source: /note="Antisense Oligonucleotide"
aucaaggaagauggcauuucuag

SEQ ID NO: 383 - RNA, 22 nt, Artificial Sequence
  source: /note="Description of Artificial Sequence: Synthetic oligonucleotide"
  source: /note="Antisense Oligonucleotide"
aucaaggaagauggcauuucua

SEQ ID NO: 384 - RNA, 21 nt, Artificial Sequence
  source: /note="Description of Artificial Sequence: Synthetic oligonucleotide"
  source: /note="Antisense Oligonucleotide"
aucaaggaagauggcauuucu

SEQ ID NO: 385 - RNA, 20 nt, Artificial Sequence
  source: /note="Description of Artificial Sequence: Synthetic oligonucleotide"
  source: /note="Antisense Oligonucleotide"
aucaaggaagauggcauuuc

SEQ ID NO: 386 - RNA, 19 nt, Artificial Sequence
  source: /note="Description of Artificial Sequence: Synthetic oligonucleotide"
  source: /note="Antisense Oligonucleotide"
aucaaggaagauggcauuu

SEQ ID NO: 387 - RNA, 18 nt, Artificial Sequence
  source: /note="Description of Artificial Sequence: Synthetic oligonucleotide"
  source: /note="Antisense Oligonucleotide"
aucaaggaagauggcauu

SEQ ID NO: 388 - RNA, 17 nt, Artificial Sequence
  source: /note="Description of Artificial Sequence: Synthetic oligonucleotide"
  source: /note="Antisense Oligonucleotide"
aucaaggaagauggcau

SEQ ID NO: 389 - RNA, 16 nt, Artificial Sequence
  source: /note="Description of Artificial Sequence: Synthetic oligonucleotide"
  source: /note="Antisense Oligonucleotide"
aucaaggaagauggca

SEQ ID NO: 390 - RNA, 15 nt, Artificial Sequence
  source: /note="Description of Artificial Sequence: Synthetic oligonucleotide"
  source: /note="Antisense Oligonucleotide"
aucaaggaagauggc

SEQ ID NO: 391 - RNA, 14 nt, Artificial Sequence
  source: /note="Description of Artificial Sequence: Synthetic oligonucleotide"
  source: /note="Antisense Oligonucleotide"
aucaaggaagaugg

SEQ ID NO: 392 - RNA, 13 nt, Artificial Sequence
  source: /note="Description of Artificial Sequence: Synthetic oligonucleotide"
  source: /note="Antisense Oligonucleotide"
aucaaggaagaug

SEQ ID NO: 393 - RNA, 12 nt, Artificial Sequence
  source: /note="Description of Artificial Sequence: Synthetic oligonucleotide"
  source: /note="Antisense Oligonucleotide"
aucaaggaagau

SEQ ID NO: 394 - RNA, 11 nt, Artificial Sequence
  source: /note="Description of Artificial Sequence: Synthetic oligonucleotide"
  source: /note="Antisense Oligonucleotide"
aucaaggaaga

SEQ ID NO: 395 - RNA, 10 nt, Artificial Sequence
  source: /note="Description of Artificial Sequence: Synthetic oligonucleotide"
  source: /note="Antisense Oligonucleotide"
aucaaggaag

SEQ ID NO: 396 - RNA, 23 nt, Artificial Sequence
  source: /note="Description of Artificial Sequence: Synthetic oligonucleotide"
  source: /note="Antisense Oligonucleotide"
ccagagcagguaccuccaacauc

SEQ ID NO: 397 - RNA, 18 nt, Artificial Sequence
  source: /note="Description of Artificial Sequence: Synthetic oligonucleotide"
  source: /note="Antisense Oligonucleotide"
ccagagcagguaccucca

SEQ ID NO: 398 - RNA, 23 nt, Artificial Sequence
  source: /note="Description of Artificial Sequence: Synthetic oligonucleotide"
  source: /note="Antisense Oligonucleotide"
ccucugugauuuuauaacuugau

SEQ ID NO: 399 - RNA, 17 nt, Artificial Sequence
  source: /note="Description of Artificial Sequence: Synthetic oligonucleotide"
  source: /note="Antisense Oligonucleotide"
ucacccaccaucacccu

SEQ ID NO: 400 - RNA, 20 nt, Artificial Sequence
  source: /note="Description of Artificial Sequence: Synthetic oligonucleotide"
  source: /note="Antisense Oligonucleotide"
ugauauccucaaggucaccc

SEQ ID NO: 401 - RNA, 22 nt, Artificial Sequence
  source: /note="Description of Artificial Sequence: Synthetic oligonucleotide"
  source: /note="Antisense Oligonucleotide"
cugcuugaugaucaucucguug

SEQ ID NO: 402 - RNA, 18 nt, Artificial Sequence
  source: /note="Description of Artificial Sequence: Synthetic oligonucleotide"
  source: /note="Antisense Oligonucleotide"
cugcuugaugaucaucuc

SEQ ID NO: 403 - RNA, 19 nt, Artificial Sequence
  source: /note="Description of Artificial Sequence: Synthetic oligonucleotide"
  source: /note="Antisense Oligonucleotide"
guuuccuuaguaaccacag

SEQ ID NO: 404 - RNA, 17 nt, Artificial Sequence
  source: /note="Description of Artificial Sequence: Synthetic oligonucleotide"
  source: /note="Antisense Oligonucleotide"
guuuccuuaguaaccac

SEQ ID NO: 405 - RNA, 20 nt, Artificial Sequence
  source: /note="Description of Artificial Sequence: Synthetic oligonucleotide"
  source: /note="Antisense Oligonucleotide"
  source: /note="5' tri-ethylene glycol (TEG)"
ucaaggaagauggcauuucu

SEQ ID NO: 406 - RNA, 22 nt, Artificial Sequence
  source: /note="Description of Artificial Sequence: Synthetic oligonucleotide"
  source: /note="Antisense Oligonucleotide"
  source: /note="5' tri-ethylene glycol (TEG)"
ucaaggaagauggcauuucuag

SEQ ID NO: 407 - RNA, 18 nt, Artificial Sequence
  source: /note="Description of Artificial Sequence: Synthetic oligonucleotide"
  source: /note="Antisense Oligonucleotide"
  source: /note="5' tri-ethylene glycol (TEG)"
gguaaguucuguccaagc

SEQ ID NO: 408 - RNA, 18 nt, Artificial Sequence
  source: /note="Description of Artificial Sequence: Synthetic oligonucleotide"
  source: /note="Antisense Oligonucleotide"
  source: /note="5' tri-ethylene glycol (TEG)"
guaaguucuguccaagcc

SEQ ID NO: 409 - RNA, 18 nt, Artificial Sequence
  source: /note="Description of Artificial Sequence: Synthetic oligonucleotide"
  source: /note="Antisense Oligonucleotide"
  source: /note="5' tri-ethylene glycol (TEG)"
agucgguaaguucugucc

SEQ ID NO: 410 - RNA, 18 nt, Artificial Sequence
  source: /note="Description of Artificial Sequence: Synthetic oligonucleotide"
  source: /note="Antisense Oligonucleotide"
  source: /note="5' tri-ethylene glycol (TEG)"
cuguccaagcccgguuga

SEQ ID NO: 411 - RNA, 15 nt, Artificial Sequence
  source: /note="Description of Artificial Sequence: Synthetic oligonucleotide"
  source: /note="Antisense Oligonucleotide"
  source: /note="5' tri-ethylene glycol (TEG)"
uaaguucuguccaag

SEQ ID NO: 412 - RNA, 20 nt, Artificial Sequence
  source: /note="Description of Artificial Sequence: Synthetic oligonucleotide"
  source: /note="Antisense Oligonucleotide"
  source: /note="5' tri-ethylene glycol (TEG)"
uucuguccaagcccgguuga

SEQ ID NO: 413 - RNA, 19 nt, Artificial Sequence
  source: /note="Description of Artificial Sequence: Synthetic oligonucleotide"
  source: /note="Antisense Oligonucleotide"
  source: /note="5' tri-ethylene glycol (TEG)"
uucuguccaagcccgguug

SEQ ID NO: 414 - RNA, 18 nt, Artificial Sequence
  source: /note="Description of Artificial Sequence: Synthetic oligonucleotide"
  source: /note="Antisense Oligonucleotide"
  source: /note="5' tri-ethylene glycol (TEG)"
uucuguccaagcccgguu

SEQ ID NO: 415 - RNA, 17 nt, Artificial Sequence
  source: /note="Description of Artificial Sequence: Synthetic oligonucleotide"
  source: /note="Antisense Oligonucleotide"
  source: /note="5' tri-ethylene glycol (TEG)"
uucuguccaagcccggu

SEQ ID NO: 416 - RNA, 16 nt, Artificial Sequence
  source: /note="Description of Artificial Sequence: Synthetic oligonucleotide"
  source: /note="Antisense Oligonucleotide"
  source: /note="5' tri-ethylene glycol (TEG)"
uucuguccaagcccgg

SEQ ID NO: 417 - RNA, 15 nt, Artificial Sequence
  source: /note="Description of Artificial Sequence: Synthetic oligonucleotide"
  source: /note="Antisense Oligonucleotide"
  source: /note="5' tri-ethylene glycol (TEG)"
uucuguccaagcccg

SEQ ID NO: 418 - RNA, 14 nt, Artificial Sequence
  source: /note="Description of Artificial Sequence: Synthetic oligonucleotide"
  source: /note="Antisense Oligonucleotide"
  source: /note="5' tri-ethylene glycol (TEG)"
uucuguccaagccc

SEQ ID NO: 419 - RNA, 13 nt, Artificial Sequence
  source: /note="Description of Artificial Sequence: Synthetic oligonucleotide"
  source: /note="Antisense Oligonucleotide"
  source: /note="5' tri-ethylene glycol (TEG)"
uucuguccaagcc

SEQ ID NO: 420 - RNA, 12 nt, Artificial Sequence
  source: /note="Description of Artificial Sequence: Synthetic oligonucleotide"
  source: /note="Antisense Oligonucleotide"
  source: /note="5' tri-ethylene glycol (TEG)"
uucuguccaagc

SEQ ID NO: 421 - RNA, 11 nt, Artificial Sequence
  source: /note="Description of Artificial Sequence: Synthetic oligonucleotide"
  source: /note="Antisense Oligonucleotide"
  source: /note="5' tri-ethylene glycol (TEG)"
uucuguccaag

SEQ ID NO: 422 - RNA, 10 nt, Artificial Sequence
  source: /note="Description of Artificial Sequence: Synthetic oligonucleotide"
  source: /note="Antisense Oligonucleotide"
  source: /note="5' tri-ethylene glycol (TEG)"
uucuguccaa

SEQ ID NO: 423 - RNA, 9 nt, Artificial Sequence
  source: /note="Description of Artificial Sequence: Synthetic oligonucleotide"
  source: /note="Antisense Oligonucleotide"
  source: /note="5' tri-ethylene glycol (TEG)"
uucugucca

SEQ ID NO: 424 - RNA, 8 nt, Artificial Sequence
  source: /note="Description of Artificial Sequence: Synthetic oligonucleotide"
  source: /note="Antisense Oligonucleotide"
  source: /note="5' tri-ethylene glycol (TEG)"
uucugucc

SEQ ID NO: 425 - RNA, 19 nt, Artificial Sequence
  source: /note="Description of Artificial Sequence: Synthetic oligonucleotide"
  source: /note="Antisense Oligonucleotide"
  source: /note="5' tri-ethylene glycol (TEG)"
ucuguccaagcccgguuga

SEQ ID NO: 426 - RNA, 18 nt, Artificial Sequence
  source: /note="Description of Artificial Sequence: Synthetic oligonucleotide"
  source: /note="Antisense Oligonucleotide"
  source: /note="5' tri-ethylene glycol (TEG)"
ucuguccaagcccgguug

SEQ ID NO: 427 - RNA, 17 nt, Artificial Sequence
  source: /note="Description of Artificial Sequence: Synthetic oligonucleotide"
  source: /note="Antisense Oligonucleotide"
  source: /note="5' tri-ethylene glycol (TEG)"
ucuguccaagcccgguu

SEQ ID NO: 428 - RNA, 16 nt, Artificial Sequence
  source: /note="Description of Artificial Sequence: Synthetic oligonucleotide"
  source: /note="Antisense Oligonucleotide"
  source: /note="5' tri-ethylene glycol (TEG)"
ucuguccaagcccggu

SEQ ID NO: 429 - RNA, 15 nt, Artificial Sequence
  source: /note="Description of Artificial Sequence: Synthetic oligonucleotide"
  source: /note="Antisense Oligonucleotide"
  source: /note="5' tri-ethylene glycol (TEG)"
ucuguccaagcccgg

SEQ ID NO: 430 - RNA, 14 nt, Artificial Sequence
  source: /note="Description of Artificial Sequence: Synthetic oligonucleotide"
  source: /note="Antisense Oligonucleotide"
  source: /note="5' tri-ethylene glycol (TEG)"
ucuguccaagcccg

SEQ ID NO: 431 - RNA, 13 nt, Artificial Sequence
  source: /note="Description of Artificial Sequence: Synthetic oligonucleotide"
  source: /note="Antisense Oligonucleotide"
  source: /note="5' tri-ethylene glycol (TEG)"
ucuguccaagccc

SEQ ID NO: 432 - RNA, 12 nt, Artificial Sequence
  source: /note="Description of Artificial Sequence: Synthetic oligonucleotide"
  source: /note="Antisense Oligonucleotide"
  source: /note="5' tri-ethylene glycol (TEG)"
ucuguccaagcc

SEQ ID NO: 433 - RNA, 11 nt, Artificial Sequence
  source: /note="Description of Artificial Sequence: Synthetic oligonucleotide"
  source: /note="Antisense Oligonucleotide"
  source: /note="5' tri-ethylene glycol (TEG)"
ucuguccaagc

SEQ ID NO: 434 - RNA, 10 nt, Artificial Sequence
  source: /note="Description of Artificial Sequence: Synthetic oligonucleotide"
  source: /note="Antisense Oligonucleotide"
  source: /note="5' tri-ethylene glycol (TEG)"
ucuguccaag

SEQ ID NO: 435 - RNA, 9 nt, Artificial Sequence
  source: /note="Description of Artificial Sequence: Synthetic oligonucleotide"
  source: /note="Antisense Oligonucleotide"
  source: /note="5' tri-ethylene glycol (TEG)"
ucuguccaa

SEQ ID NO: 436 - RNA, 8 nt, Artificial Sequence
  source: /note="Description of Artificial Sequence: Synthetic oligonucleotide"
  source: /note="Antisense Oligonucleotide"
  source: /note="5' tri-ethylene glycol (TEG)"
ucugucca

SEQ ID NO: 437 - RNA, 17 nt, Artificial Sequence
  source: /note="Description of Artificial Sequence: Synthetic oligonucleotide"
  source: /note="Antisense Oligonucleotide"
  source: /note="5' tri-ethylene glycol (TEG)"
cuguccaagcccgguug

SEQ ID NO: 438 - RNA, 16 nt, Artificial Sequence
  source: /note="Description of Artificial Sequence: Synthetic oligonucleotide"
  source: /note="Antisense Oligonucleotide"
  source: /note="5' tri-ethylene glycol (TEG)"
cuguccaagcccgguu

SEQ ID NO: 439 - RNA, 15 nt, Artificial Sequence
  source: /note="Description of Artificial Sequence: Synthetic oligonucleotide"
  source: /note="Antisense Oligonucleotide"
  source: /note="5' tri-ethylene glycol (TEG)"
cuguccaagcccggu

SEQ ID NO: 440 - RNA, 14 nt, Artificial Sequence
  source: /note="Description of Artificial Sequence: Synthetic oligonucleotide"
  source: /note="Antisense Oligonucleotide"
  source: /note="5' tri-ethylene glycol (TEG)"
cuguccaagcccgg

SEQ ID NO: 441 - RNA, 13 nt, Artificial Sequence
  source: /note="Description of Artificial Sequence: Synthetic oligonucleotide"
  source: /note="Antisense Oligonucleotide"
  source: /note="5' tri-ethylene glycol (TEG)"
cuguccaagcccg

SEQ ID NO: 442 - RNA, 12 nt, Artificial Sequence
  source: /note="Description of Artificial Sequence: Synthetic oligonucleotide"
  source: /note="Antisense Oligonucleotide"
  source: /note="5' tri-ethylene glycol (TEG)"
cuguccaagccc

SEQ ID NO: 443 - RNA, 11 nt, Artificial Sequence
  source: /note="Description of Artificial Sequence: Synthetic oligonucleotide"
  source: /note="Antisense Oligonucleotide"
  source: /note="5' tri-ethylene glycol (TEG)"
cuguccaagcc

SEQ ID NO: 444 - RNA, 10 nt, Artificial Sequence
  source: /note="Description of Artificial Sequence: Synthetic oligonucleotide"
  source: /note="Antisense Oligonucleotide"
  source: /note="5' tri-ethylene glycol (TEG)"
cuguccaagc

SEQ ID NO: 445 - RNA, 9 nt, Artificial Sequence
  source: /note="Description of Artificial Sequence: Synthetic oligonucleotide"
  source: /note="Antisense Oligonucleotide"
  source: /note="5' tri-ethylene glycol (TEG)"
cuguccaag

SEQ ID NO: 446 - RNA, 8 nt, Artificial Sequence
  source: /note="Description of Artificial Sequence: Synthetic oligonucleotide"
  source: /note="Antisense Oligonucleotide"
  source: /note="5' tri-ethylene glycol (TEG)"
cuguccaa

SEQ ID NO: 447 - RNA, 20 nt, Artificial Sequence
  source: /note="Description of Artificial Sequence: Synthetic oligonucleotide"
  source: /note="Antisense Oligonucleotide"
  source: /note="5' tri-ethylene glycol (TEG)"
guucuguccaagcccgguug

SEQ ID NO: 448 - RNA, 19 nt, Artificial Sequence
  source: /note="Description of Artificial Sequence: Synthetic oligonucleotide"
  source: /note="Antisense Oligonucleotide"
  source: /note="5' tri-ethylene glycol (TEG)"
guucuguccaagcccgguu

SEQ ID NO: 449 - RNA, 18 nt, Artificial Sequence
  source: /note="Description of Artificial Sequence: Synthetic oligonucleotide"
  source: /note="Antisense Oligonucleotide"
  source: /note="5' tri-ethylene glycol (TEG)"
guucuguccaagcccggu

SEQ ID NO: 450 - RNA, 17 nt, Artificial Sequence
  source: /note="Description of Artificial Sequence: Synthetic oligonucleotide"
  source: /note="Antisense Oligonucleotide"
  source: /note="5' tri-ethylene glycol (TEG)"
guucuguccaagcccgg

SEQ ID NO: 451 - RNA, 16 nt, Artificial Sequence
  source: /note="Description of Artificial Sequence: Synthetic oligonucleotide"
  source: /note="Antisense Oligonucleotide"
  source: /note="5' tri-ethylene glycol (TEG)"
guucuguccaagcccg

SEQ ID NO: 452 - RNA, 15 nt, Artificial Sequence
  source: /note="Description of Artificial Sequence: Synthetic oligonucleotide"
  source: /note="Antisense Oligonucleotide"
  source: /note="5' tri-ethylene glycol (TEG)"
guucuguccaagccc

SEQ ID NO: 453 - RNA, 14 nt, Artificial Sequence
  source: /note="Description of Artificial Sequence: Synthetic oligonucleotide"
  source: /note="Antisense Oligonucleotide"
  source: /note="5' tri-ethylene glycol (TEG)"
guucuguccaagcc

SEQ ID NO: 454 - RNA, 13 nt, Artificial Sequence
  source: /note="Description of Artificial Sequence: Synthetic oligonucleotide"
  source: /note="Antisense Oligonucleotide"
  source: /note="5' tri-ethylene glycol (TEG)"
guucuguccaagc

SEQ ID NO: 455 - RNA, 12 nt, Artificial Sequence
  source: /note="Description of Artificial Sequence: Synthetic oligonucleotide"
  source: /note="Antisense Oligonucleotide"
  source: /note="5' tri-ethylene glycol (TEG)"
guucuguccaag

SEQ ID NO: 456 - RNA, 11 nt, Artificial Sequence
  source: /note="Description of Artificial Sequence: Synthetic oligonucleotide"
  source: /note="Antisense Oligonucleotide"
  source: /note="5' tri-ethylene glycol (TEG)"
guucuguccaa

SEQ ID NO: 457 - RNA, 10 nt, Artificial Sequence
  source: /note="Description of Artificial Sequence: Synthetic oligonucleotide"
  source: /note="Antisense Oligonucleotide"
  source: /note="5' tri-ethylene glycol (TEG)"
guucugucca

SEQ ID NO: 458 - RNA, 9 nt, Artificial Sequence
  source: /note="Description of Artificial Sequence: Synthetic oligonucleotide"
  source: /note="Antisense Oligonucleotide"
  source: /note="5' tri-ethylene glycol (TEG)"
guucugucc

SEQ ID NO: 459 - RNA, 8 nt, Artificial Sequence
  source: /note="Description of Artificial Sequence: Synthetic oligonucleotide"
  source: /note="Antisense Oligonucleotide"
  source: /note="5' tri-ethylene glycol (TEG)"
guucuguc

SEQ ID NO: 460 - RNA, 20 nt, Artificial Sequence
  source: /note="Description of Artificial Sequence: Synthetic oligonucleotide"
  source: /note="Antisense Oligonucleotide"
  source: /note="5' tri-ethylene glycol (TEG)"
aguucuguccaagcccgguu

SEQ ID NO: 461 - RNA, 19 nt, Artificial Sequence
  source: /note="Description of Artificial Sequence: Synthetic oligonucleotide"
  source: /note="Antisense Oligonucleotide"
  source: /note="5' tri-ethylene glycol (TEG)"
aguucuguccaagcccggu

SEQ ID NO: 462 - RNA, 18 nt, Artificial Sequence
  source: /note="Description of Artificial Sequence: Synthetic oligonucleotide"
  source: /note="Antisense Oligonucleotide"
  source: /note="5' tri-ethylene glycol (TEG)"
aguucuguccaagcccgg

SEQ ID NO: 463 - RNA, 17 nt, Artificial Sequence
  source: /note="Description of Artificial Sequence: Synthetic oligonucleotide"
  source: /note="Antisense Oligonucleotide"
  source: /note="5' tri-ethylene glycol (TEG)"
aguucuguccaagcccg

SEQ ID NO: 464 - RNA, 16 nt, Artificial Sequence
  source: /note="Description of Artificial Sequence: Synthetic oligonucleotide"
  source: /note="Antisense Oligonucleotide"
  source: /note="5' tri-ethylene glycol (TEG)"
aguucuguccaagccc

SEQ ID NO: 465 - RNA, 15 nt, Artificial Sequence
  source: /note="Description of Artificial Sequence: Synthetic oligonucleotide"
  source: /note="Antisense Oligonucleotide"
  source: /note="5' tri-ethylene glycol (TEG)"
aguucuguccaagcc

SEQ ID NO: 466 - RNA, 14 nt, Artificial Sequence
  source: /note="Description of Artificial Sequence: Synthetic oligonucleotide"
  source: /note="Antisense Oligonucleotide"
  source: /note="5' tri-ethylene glycol (TEG)"
aguucuguccaagc

SEQ ID NO: 467 - RNA, 13 nt, Artificial Sequence
  source: /note="Description of Artificial Sequence: Synthetic oligonucleotide"
  source: /note="Antisense Oligonucleotide"
  source: /note="5' tri-ethylene glycol (TEG)"
aguucuguccaag

SEQ ID NO: 468 - RNA, 12 nt, Artificial Sequence
  source: /note="Description of Artificial Sequence: Synthetic oligonucleotide"
  source: /note="Antisense Oligonucleotide"
  source: /note="5' tri-ethylene glycol (TEG)"
aguucuguccaa

SEQ ID NO: 469 - RNA, 11 nt, Artificial Sequence
  source: /note="Description of Artificial Sequence: Synthetic oligonucleotide"
  source: /note="Antisense Oligonucleotide"
  source: /note="5' tri-ethylene glycol (TEG)"
aguucugucca

SEQ ID NO: 470 - RNA, 10 nt, Artificial Sequence
  source: /note="Description of Artificial Sequence: Synthetic oligonucleotide"
  source: /note="Antisense Oligonucleotide"
  source: /note="5' tri-ethylene glycol (TEG)"
aguucugucc

SEQ ID NO: 471 - RNA, 9 nt, Artificial Sequence
  source: /note="Description of Artificial Sequence: Synthetic oligonucleotide"
  source: /note="Antisense Oligonucleotide"
  source: /note="5' tri-ethylene glycol (TEG)"
aguucuguc

SEQ ID NO: 472 - RNA, 8 nt, Artificial Sequence
  source: /note="Description of Artificial Sequence: Synthetic oligonucleotide"
  source: /note="Antisense Oligonucleotide"
  source: /note="5' tri-ethylene glycol (TEG)"
aguucugu

SEQ ID NO: 473 - RNA, 20 nt, Artificial Sequence
  source: /note="Description of Artificial Sequence: Synthetic oligonucleotide"
  source: /note="Antisense Oligonucleotide"
  source: /note="5' tri-ethylene glycol (TEG)"
aaguucuguccaagcccggu

SEQ ID NO: 474 - RNA, 19 nt, Artificial Sequence
  source: /note="Description of Artificial Sequence: Synthetic oligonucleotide"
  source: /note="Antisense Oligonucleotide"
  source: /note="5' tri-ethylene glycol (TEG)"
aaguucuguccaagcccgg

SEQ ID NO: 475 - RNA, 18 nt, Artificial Sequence
  source: /note="Description of Artificial Sequence: Synthetic oligonucleotide"
  source: /note="Antisense Oligonucleotide"
  source: /note="5' tri-ethylene glycol (TEG)"
aaguucuguccaagcccg

SEQ ID NO: 476 - RNA, 17 nt, Artificial Sequence
  source: /note="Description of Artificial Sequence: Synthetic oligonucleotide"
  source: /note="Antisense Oligonucleotide"
  source: /note="5' tri-ethylene glycol (TEG)"
aaguucuguccaagccc

SEQ ID NO: 477 - RNA, 16 nt, Artificial Sequence
  source: /note="Description of Artificial Sequence: Synthetic oligonucleotide"
  source: /note="Antisense Oligonucleotide"
  source: /note="5' tri-ethylene glycol (TEG)"
aaguucuguccaagcc

SEQ ID NO: 478 - RNA, 15 nt, Artificial Sequence
  source: /note="Description of Artificial Sequence: Synthetic oligonucleotide"
  source: /note="Antisense Oligonucleotide"
  source: /note="5' tri-ethylene glycol (TEG)"
aaguucuguccaagc

SEQ ID NO: 479 - RNA, 14 nt, Artificial Sequence
  source: /note="Description of Artificial Sequence: Synthetic oligonucleotide"
  source: /note="Antisense Oligonucleotide"
  source: /note="5' tri-ethylene glycol (TEG)"
aaguucuguccaag

SEQ ID NO: 480 - RNA, 13 nt, Artificial Sequence
  source: /note="Description of Artificial Sequence: Synthetic oligonucleotide"
  source: /note="Antisense Oligonucleotide"
  source: /note="5' tri-ethylene glycol (TEG)"
aaguucuguccaa

SEQ ID NO: 481 - RNA, 12 nt, Artificial Sequence
  source: /note="Description of Artificial Sequence: Synthetic oligonucleotide"
  source: /note="Antisense Oligonucleotide"
  source: /note="5' tri-ethylene glycol (TEG)"
aaguucugucca

SEQ ID NO: 482 - RNA, 11 nt, Artificial Sequence
  source: /note="Description of Artificial Sequence: Synthetic oligonucleotide"
  source: /note="Antisense Oligonucleotide"
  source: /note="5' tri-ethylene glycol (TEG)"
aaguucugucc

SEQ ID NO: 483 - RNA, 10 nt, Artificial Sequence
  source: /note="Description of Artificial Sequence: Synthetic oligonucleotide"
  source: /note="Antisense Oligonucleotide"
  source: /note="5' tri-ethylene glycol (TEG)"
aaguucuguc

SEQ ID NO: 484 - RNA, 9 nt, Artificial Sequence
  source: /note="Description of Artificial Sequence: Synthetic oligonucleotide"
  source: /note="Antisense Oligonucleotide"
  source: /note="5' tri-ethylene glycol (TEG)"
aaguucugu

SEQ ID NO: 485 - RNA, 8 nt, Artificial Sequence
  source: /note="Description of Artificial Sequence: Synthetic oligonucleotide"
  source: /note="Antisense Oligonucleotide"
  source: /note="5' tri-ethylene glycol (TEG)"
aaguucug

SEQ ID NO: 486 - RNA, 20 nt, Artificial Sequence
  source: /note="Description of Artificial Sequence: Synthetic oligonucleotide"
  source: /note="Antisense Oligonucleotide"
  source: /note="5' tri-ethylene glycol (TEG)"
uaaguucuguccaagcccgg

SEQ ID NO: 487 - RNA, 19 nt, Artificial Sequence
  source: /note="Description of Artificial Sequence: Synthetic oligonucleotide"
  source: /note="Antisense Oligonucleotide"
  source: /note="5' tri-ethylene glycol (TEG)"
uaaguucuguccaagcccg

SEQ ID NO: 488 - RNA, 18 nt, Artificial Sequence
  source: /note="Description of Artificial Sequence: Synthetic oligonucleotide"
  source: /note="Antisense Oligonucleotide"
  source: /note="5' tri-ethylene glycol (TEG)"
uaaguucuguccaagccc

SEQ ID NO: 489 - RNA, 17 nt, Artificial Sequence
  source: /note="Description of Artificial Sequence: Synthetic oligonucleotide"
  source: /note="Antisense Oligonucleotide"
  source: /note="5' tri-ethylene glycol (TEG)"
uaaguucuguccaagcc

SEQ ID NO: 490 - RNA, 16 nt, Artificial Sequence
  source: /note="Description of Artificial Sequence: Synthetic oligonucleotide"
  source: /note="Antisense Oligonucleotide"
  source: /note="5' tri-ethylene glycol (TEG)"
uaaguucuguccaagc

SEQ ID NO: 491 - RNA, 14 nt, Artificial Sequence
  source: /note="Description of Artificial Sequence: Synthetic oligonucleotide"
  source: /note="Antisense Oligonucleotide"
  source: /note="5' tri-ethylene glycol (TEG)"
uaaguucuguccaa

SEQ ID NO: 492 - RNA, 13 nt, Artificial Sequence
  source: /note="Description of Artificial Sequence: Synthetic oligonucleotide"
  source: /note="Antisense Oligonucleotide"
  source: /note="5' tri-ethylene glycol (TEG)"
uaaguucugucca

SEQ ID NO: 493 - RNA, 12 nt, Artificial Sequence
  source: /note="Description of Artificial Sequence: Synthetic oligonucleotide"
  source: /note="Antisense Oligonucleotide"
  source: /note="5' tri-ethylene glycol (TEG)"
uaaguucugucc

SEQ ID NO: 494 - RNA, 11 nt, Artificial Sequence
  source: /note="Description of Artificial Sequence: Synthetic oligonucleotide"
  source: /note="Antisense Oligonucleotide"
  source: /note="5' tri-ethylene glycol (TEG)"
uaaguucuguc

SEQ ID NO: 495 - RNA, 10 nt, Artificial Sequence
  source: /note="Description of Artificial Sequence: Synthetic oligonucleotide"
  source: /note="Antisense Oligonucleotide"
  source: /note="5' tri-ethylene glycol (TEG)"
uaaguucugu

SEQ ID NO: 496 - RNA, 9 nt, Artificial Sequence
  source: /note="Description of Artificial Sequence: Synthetic oligonucleotide"
  source: /note="Antisense Oligonucleotide"
  source: /note="5' tri-ethylene glycol (TEG)"
uaaguucug

SEQ ID NO: 497 - RNA, 8 nt, Artificial Sequence
  source: /note="Description of Artificial Sequence: Synthetic oligonucleotide"
  source: /note="Antisense Oligonucleotide"
  source: /note="5' tri-ethylene glycol (TEG)"
uaaguucu

SEQ ID NO: 498 - RNA, 20 nt, Artificial Sequence
  source: /note="Description of Artificial Sequence: Synthetic oligonucleotide"
  source: /note="Antisense Oligonucleotide"
  source: /note="5' tri-ethylene glycol (TEG)"
guaaguucuguccaagcccg

SEQ ID NO: 499 - RNA, 19 nt, Artificial Sequence
  source: /note="Description of Artificial Sequence: Synthetic oligonucleotide"
  source: /note="Antisense Oligonucleotide"
  source: /note="5' tri-ethylene glycol (TEG)"
guaaguucuguccaagccc

SEQ ID NO: 500 - RNA, 17 nt, Artificial Sequence
  source: /note="Description of Artificial Sequence: Synthetic oligonucleotide"
  source: /note="Antisense Oligonucleotide"
  source: /note="5' tri-ethylene glycol (TEG)"
guaaguucuguccaagc

SEQ ID NO: 501 - RNA, 16 nt, Artificial Sequence
  source: /note="Description of Artificial Sequence: Synthetic oligonucleotide"
  source: /note="Antisense Oligonucleotide"
  source: /note="5' tri-ethylene glycol (TEG)"
guaaguucuguccaag

SEQ ID NO: 502 - RNA, 15 nt, Artificial Sequence
  source: /note="Description of Artificial Sequence: Synthetic oligonucleotide"
  source: /note="Antisense Oligonucleotide"
  source: /note="5' tri-ethylene glycol (TEG)"
guaaguucuguccaa

SEQ ID NO: 503 - RNA, 14 nt, Artificial Sequence
  source: /note="Description of Artificial Sequence: Synthetic oligonucleotide"
  source: /note="Antisense Oligonucleotide"
  source: /note="5' tri-ethylene glycol (TEG)"
guaaguucugucca

SEQ ID NO: 504 - RNA, 13 nt, Artificial Sequence
  source: /note="Description of Artificial Sequence: Synthetic oligonucleotide"
  source: /note="Antisense Oligonucleotide"
  source: /note="5' tri-ethylene glycol (TEG)"
guaaguucugucc

SEQ ID NO: 505 - RNA, 12 nt, Artificial Sequence
  source: /note="Description of Artificial Sequence: Synthetic oligonucleotide"
  source: /note="Antisense Oligonucleotide"
  source: /note="5' tri-ethylene glycol (TEG)"
guaaguucuguc

SEQ ID NO: 506 - RNA, 11 nt, Artificial Sequence
  source: /note="Description of Artificial Sequence: Synthetic oligonucleotide"
  source: /note="Antisense Oligonucleotide"
  source: /note="5' tri-ethylene glycol (TEG)"
guaaguucugu

SEQ ID NO: 507 - RNA, 10 nt, Artificial Sequence
  source: /note="Description of Artificial Sequence: Synthetic oligonucleotide"
  source: /note="Antisense Oligonucleotide"
  source: /note="5' tri-ethylene glycol (TEG)"
guaaguucug

SEQ ID NO: 508 - RNA, 9 nt, Artificial Sequence
  source: /note="Description of Artificial Sequence: Synthetic oligonucleotide"
  source: /note="Antisense Oligonucleotide"
  source: /note="5' tri-ethylene glycol (TEG)"
guaaguucu

SEQ ID NO: 509 - RNA, 8 nt, Artificial Sequence
  source: /note="Description of Artificial Sequence: Synthetic oligonucleotide"
  source: /note="Antisense Oligonucleotide"
  source: /note="5' tri-ethylene glycol (TEG)"
guaaguuc

SEQ ID NO: 510 - RNA, 20 nt, Artificial Sequence
  source: /note="Description of Artificial Sequence: Synthetic oligonucleotide"
  source: /note="Antisense Oligonucleotide"
  source: /note="5' tri-ethylene glycol (TEG)"
gguaaguucuguccaagccc

SEQ ID NO: 511 - RNA, 19 nt, Artificial Sequence
  source: /note="Description of Artificial Sequence: Synthetic oligonucleotide"
  source: /note="Antisense Oligonucleotide"
  source: /note="5' tri-ethylene glycol (TEG)"
gguaaguucuguccaagcc

SEQ ID NO: 512 - RNA, 17 nt, Artificial Sequence
  source: /note="Description of Artificial Sequence: Synthetic oligonucleotide"
  source: /note="Antisense Oligonucleotide"
  source: /note="5' tri-ethylene glycol (TEG)"
gguaaguucuguccaag

SEQ ID NO: 513 - RNA, 16 nt, Artificial Sequence
  source: /note="Description of Artificial Sequence: Synthetic oligonucleotide"
  source: /note="Antisense Oligonucleotide"
  source: /note="5' tri-ethylene glycol (TEG)"
gguaaguucuguccaa

SEQ ID NO: 514 - RNA, 15 nt, Artificial Sequence
  source: /note="Description of Artificial Sequence: Synthetic oligonucleotide"
  source: /note="Antisense Oligonucleotide"
  source: /note="5' tri-ethylene glycol (TEG)"
gguaaguucugucca

SEQ ID NO: 515 - RNA, 14 nt, Artificial Sequence
  source: /note="Description of Artificial Sequence: Synthetic oligonucleotide"
  source: /note="Antisense Oligonucleotide"
  source: /note="5' tri-ethylene glycol (TEG)"
gguaaguucugucc

SEQ ID NO: 516 - RNA, 13 nt, Artificial Sequence
  source: /note="Description of Artificial Sequence: Synthetic oligonucleotide"
  source: /note="Antisense Oligonucleotide"
  source: /note="5' tri-ethylene glycol (TEG)"
gguaaguucuguc

SEQ ID NO: 517 - RNA, 12 nt, Artificial Sequence
  source: /note="Description of Artificial Sequence: Synthetic oligonucleotide"
  source: /note="Antisense Oligonucleotide"
  source: /note="5' tri-ethylene glycol (TEG)"
gguaaguucugu

SEQ ID NO: 518 - RNA, 11 nt, Artificial Sequence
  source: /note="Description of Artificial Sequence: Synthetic oligonucleotide"
  source: /note="Antisense Oligonucleotide"
  source: /note="5' tri-ethylene glycol (TEG)"
gguaaguucug

SEQ ID NO: 519 - RNA, 10 nt, Artificial Sequence
  source: /note="Description of Artificial Sequence: Synthetic oligonucleotide"
  source: /note="Antisense Oligonucleotide"
  source: /note="5' tri-ethylene glycol (TEG)"
gguaaguucu

SEQ ID NO: 520 - RNA, 9 nt, Artificial Sequence
  source: /note="Description of Artificial Sequence: Synthetic oligonucleotide"
  source: /note="Antisense Oligonucleotide"
  source: /note="5' tri-ethylene glycol (TEG)"
gguaaguuc

SEQ ID NO: 521 - RNA, 8 nt, Artificial Sequence
  source: /note="Description of Artificial Sequence: Synthetic oligonucleotide"
  source: /note="Antisense Oligonucleotide"
  source: /note="5' tri-ethylene glycol (TEG)"
gguaaguu

SEQ ID NO: 522 - RNA, 20 nt, Artificial Sequence
  source: /note="Description of Artificial Sequence: Synthetic oligonucleotide"
  source: /note="Antisense Oligonucleotide"
  source: /note="5' tri-ethylene glycol (TEG)"
cgguaaguucuguccaagcc

SEQ ID NO: 523 - RNA, 19 nt, Artificial Sequence
  source: /note="Description of Artificial Sequence: Synthetic oligonucleotide"
  source: /note="Antisense Oligonucleotide"
  source: /note="5' tri-ethylene glycol (TEG)"
cgguaaguucuguccaagc

SEQ ID NO: 524 - RNA, 18 nt, Artificial Sequence
  source: /note="Description of Artificial Sequence: Synthetic oligonucleotide"
  source: /note="Antisense Oligonucleotide"
  source: /note="5' tri-ethylene glycol (TEG)"
cgguaaguucuguccaag

SEQ ID NO: 525 - RNA, 17 nt, Artificial Sequence
  source: /note="Description of Artificial Sequence: Synthetic oligonucleotide"
  source: /note="Antisense Oligonucleotide"
  source: /note="5' tri-ethylene glycol (TEG)"
cgguaaguucuguccaa

SEQ ID NO: 526 - RNA, 16 nt, Artificial Sequence
  source: /note="Description of Artificial Sequence: Synthetic oligonucleotide"
  source: /note="Antisense Oligonucleotide"
  source: /note="5' tri-ethylene glycol (TEG)"
cgguaaguucugucca

SEQ ID NO: 527 - RNA, 15 nt, Artificial Sequence
  source: /note="Description of Artificial Sequence: Synthetic oligonucleotide"
  source: /note="Antisense Oligonucleotide"
  source: /note="5' tri-ethylene glycol (TEG)"
cgguaaguucugucc

SEQ ID NO: 528 - RNA, 14 nt, Artificial Sequence
  source: /note="Description of Artificial Sequence: Synthetic oligonucleotide"
  source: /note="Antisense Oligonucleotide"
  source: /note="5' tri-ethylene glycol (TEG)"
cgguaaguucuguc

SEQ ID NO: 529 - RNA, 13 nt, Artificial Sequence
  source: /note="Description of Artificial Sequence: Synthetic oligonucleotide"
  source: /note="Antisense Oligonucleotide"
  source: /note="5' tri-ethylene glycol (TEG)"
cgguaaguucugu

SEQ ID NO: 530 - RNA, 12 nt, Artificial Sequence
  source: /note="Description of Artificial Sequence: Synthetic oligonucleotide"
  source: /note="Antisense Oligonucleotide"
  source: /note="5' tri-ethylene glycol (TEG)"
cgguaaguucug

SEQ ID NO: 531 - RNA, 11 nt, Artificial Sequence
  source: /note="Description of Artificial Sequence: Synthetic oligonucleotide"
  source: /note="Antisense Oligonucleotide"
  source: /note="5' tri-ethylene glycol (TEG)"
cgguaaguucu

SEQ ID NO: 532 - RNA, 10 nt, Artificial Sequence
  source: /note="Description of Artificial Sequence: Synthetic oligonucleotide"
  source: /note="Antisense Oligonucleotide"
  source: /note="5' tri-ethylene glycol (TEG)"
cgguaaguuc

SEQ ID NO: 533 - RNA, 9 nt, Artificial Sequence
  source: /note="Description of Artificial Sequence: Synthetic oligonucleotide"
  source: /note="Antisense Oligonucleotide"
  source: /note="5' tri-ethylene glycol (TEG)"
cgguaaguu

SEQ ID NO: 534 - RNA, 8 nt, Artificial Sequence
  source: /note="Description of Artificial Sequence: Synthetic oligonucleotide"
  source: /note="Antisense Oligonucleotide"
  source: /note="5' tri-ethylene glycol (TEG)"
cgguaagu

SEQ ID NO: 535 - RNA, 20 nt, Artificial Sequence
  source: /note="Description of Artificial Sequence: Synthetic oligonucleotide"
  source: /note="Antisense Oligonucleotide"
  source: /note="5' tri-ethylene glycol (TEG)"
ucgguaaguucuguccaagc

SEQ ID NO: 536 - RNA, 19 nt, Artificial Sequence
  source: /note="Description of Artificial Sequence: Synthetic oligonucleotide"
  source: /note="Antisense Oligonucleotide"
  source: /note="5' tri-ethylene glycol (TEG)"
ucgguaaguucuguccaag

SEQ ID NO: 537 - RNA, 18 nt, Artificial Sequence
  source: /note="Description of Artificial Sequence: Synthetic oligonucleotide"
  source: /note="Antisense Oligonucleotide"
  source: /note="5' tri-ethylene glycol (TEG)"
ucgguaaguucuguccaa

SEQ ID NO: 538 - RNA, 17 nt, Artificial Sequence
  source: /note="Description of Artificial Sequence: Synthetic oligonucleotide"
  source: /note="Antisense Oligonucleotide"
  source: /note="5' tri-ethylene glycol (TEG)"
ucgguaaguucugucca

SEQ ID NO: 539 - RNA, 16 nt, Artificial Sequence
  source: /note="Description of Artificial Sequence: Synthetic oligonucleotide"
  source: /note="Antisense Oligonucleotide"
  source: /note="5' tri-ethylene glycol (TEG)"
ucgguaaguucugucc

SEQ ID NO: 540 - RNA, 15 nt, Artificial Sequence
  source: /note="Description of Artificial Sequence: Synthetic oligonucleotide"
  source: /note="Antisense Oligonucleotide"
  source: /note="5' tri-ethylene glycol (TEG)"
ucgguaaguucuguc

SEQ ID NO: 541 - RNA, 14 nt, Artificial Sequence
  source: /note="Description of Artificial Sequence: Synthetic oligonucleotide"
  source: /note="Antisense Oligonucleotide"
  source: /note="5' tri-ethylene glycol (TEG)"
ucgguaaguucugu

SEQ ID NO: 542 - RNA, 13 nt, Artificial Sequence
  source: /note="Description of Artificial Sequence: Synthetic oligonucleotide"
  source: /note="Antisense Oligonucleotide"
  source: /note="5' tri-ethylene glycol (TEG)"
ucgguaaguucug

SEQ ID NO: 543 - RNA, 12 nt, Artificial Sequence
  source: /note="Description of Artificial Sequence: Synthetic oligonucleotide"
  source: /note="Antisense Oligonucleotide"
  source: /note="5' tri-ethylene glycol (TEG)"
ucgguaaguucu

SEQ ID NO: 544 - RNA, 11 nt, Artificial Sequence
  source: /note="Description of Artificial Sequence: Synthetic oligonucleotide"
  source: /note="Antisense Oligonucleotide"
  source: /note="5' tri-ethylene glycol (TEG)"
ucgguaaguuc

SEQ ID NO: 545 - RNA, 10 nt, Artificial Sequence
  source: /note="Description of Artificial Sequence: Synthetic oligonucleotide"
  source: /note="Antisense Oligonucleotide"
  source: /note="5' tri-ethylene glycol (TEG)"
ucgguaaguu

SEQ ID NO: 546 - RNA, 9 nt, Artificial Sequence
  source: /note="Description of Artificial Sequence: Synthetic oligonucleotide"
  source: /note="Antisense Oligonucleotide"
  source: /note="5' tri-ethylene glycol (TEG)"
ucgguaagu

SEQ ID NO: 547 - RNA, 20 nt, Artificial Sequence
  source: /note="Description of Artificial Sequence: Synthetic oligonucleotide"
  source: /note="Antisense Oligonucleotide"
  source: /note="5' tri-ethylene glycol (TEG)"
gucgguaaguucuguccaag

SEQ ID NO: 548 - RNA, 19 nt, Artificial Sequence
  source: /note="Description of Artificial Sequence: Synthetic oligonucleotide"
  source: /note="Antisense Oligonucleotide"
  source: /note="5' tri-ethylene glycol (TEG)"
gucgguaaguucuguccaa

SEQ ID NO: 549 - RNA, 18 nt, Artificial Sequence
  source: /note="Description of Artificial Sequence: Synthetic oligonucleotide"
  source: /note="Antisense Oligonucleotide"
  source: /note="5' tri-ethylene glycol (TEG)"
gucgguaaguucugucca

SEQ ID NO: 550 - RNA, 17 nt, Artificial Sequence
  source: /note="Description of Artificial Sequence: Synthetic oligonucleotide"
  source: /note="Antisense Oligonucleotide"
  source: /note="5' tri-ethylene glycol (TEG)"
gucgguaaguucugucc

SEQ ID NO: 551 - RNA, 16 nt, Artificial Sequence
  source: /note="Description of Artificial Sequence: Synthetic oligonucleotide"
  source: /note="Antisense Oligonucleotide"
  source: /note="5' tri-ethylene glycol (TEG)"
gucgguaaguucuguc

SEQ ID NO: 552 - RNA, 15 nt, Artificial Sequence
  source: /note="Description of Artificial Sequence: Synthetic oligonucleotide"
  source: /note="Antisense Oligonucleotide"
  source: /note="5' tri-ethylene glycol (TEG)"
gucgguaaguucugu

SEQ ID NO: 553 - RNA, 14 nt, Artificial Sequence
  source: /note="Description of Artificial Sequence: Synthetic oligonucleotide"
  source: /note="Antisense Oligonucleotide"
  source: /note="5' tri-ethylene glycol (TEG)"
gucgguaaguucug

SEQ ID NO: 554 - RNA, 13 nt, Artificial Sequence
  source: /note="Description of Artificial Sequence: Synthetic oligonucleotide"
  source: /note="Antisense Oligonucleotide"
  source: /note="5' tri-ethylene glycol (TEG)"
gucgguaaguucu

SEQ ID NO: 555 - RNA, 12 nt, Artificial Sequence
  source: /note="Description of Artificial Sequence: Synthetic oligonucleotide"
  source: /note="Antisense Oligonucleotide"
  source: /note="5' tri-ethylene glycol (TEG)"
gucgguaaguuc

SEQ ID NO: 556 - RNA, 11 nt, Artificial Sequence
  source: /note="Description of Artificial Sequence: Synthetic oligonucleotide"
  source: /note="Antisense Oligonucleotide"
  source: /note="5' tri-ethylene glycol (TEG)"
gucgguaaguu

SEQ ID NO: 557 - RNA, 10 nt, Artificial Sequence
  source: /note="Description of Artificial Sequence: Synthetic oligonucleotide"
  source: /note="Antisense Oligonucleotide"
  source: /note="5' tri-ethylene glycol (TEG)"
gucgguaagu

SEQ ID NO: 558 - RNA, 20 nt, Artificial Sequence
  source: /note="Description of Artificial Sequence: Synthetic oligonucleotide"
  source: /note="Antisense Oligonucleotide"
  source: /note="5' tri-ethylene glycol (TEG)"
agucgguaaguucuguccaa

SEQ ID NO: 559 - RNA, 19 nt, Artificial Sequence
  source: /note="Description of Artificial Sequence: Synthetic oligonucleotide"
  source: /note="Antisense Oligonucleotide"
  source: /note="5' tri-ethylene glycol (TEG)"
agucgguaaguucugucca

SEQ ID NO: 560 - RNA, 17 nt, Artificial Sequence
  source: /note="Description of Artificial Sequence: Synthetic oligonucleotide"
  source: /note="Antisense Oligonucleotide"
  source: /note="5' tri-ethylene glycol (TEG)"
agucgguaaguucuguc

SEQ ID NO: 561 - RNA, 16 nt, Artificial Sequence
  source: /note="Description of Artificial Sequence: Synthetic oligonucleotide"
  source: /note="Antisense Oligonucleotide"
  source: /note="5' tri-ethylene glycol (TEG)"
agucgguaaguucugu

SEQ ID NO: 562 - RNA, 15 nt, Artificial Sequence
  source: /note="Description of Artificial Sequence: Synthetic oligonucleotide"
  source: /note="Antisense Oligonucleotide"
  source: /note="5' tri-ethylene glycol (TEG)"
agucgguaaguucug

SEQ ID NO: 563 - RNA, 14 nt, Artificial Sequence
  source: /note="Description of Artificial Sequence: Synthetic oligonucleotide"
  source: /note="Antisense Oligonucleotide"
  source: /note="5' tri-ethylene glycol (TEG)"
agucgguaaguucu

SEQ ID NO: 564 - RNA, 13 nt, Artificial Sequence
  source: /note="Description of Artificial Sequence: Synthetic oligonucleotide"
  source: /note="Antisense Oligonucleotide"
  source: /note="5' tri-ethylene glycol (TEG)"
agucgguaaguuc

SEQ ID NO: 565 - RNA, 12 nt, Artificial Sequence
  source: /note="Description of Artificial Sequence: Synthetic oligonucleotide"
  source: /note="Antisense Oligonucleotide"
  source: /note="5' tri-ethylene glycol (TEG)"
agucgguaaguu

SEQ ID NO: 566 - RNA, 11 nt, Artificial Sequence
  source: /note="Description of Artificial Sequence: Synthetic oligonucleotide"
  source: /note="Antisense Oligonucleotide"
  source: /note="5' tri-ethylene glycol (TEG)"
agucgguaagu

SEQ ID NO: 567 - RNA, 20 nt, Artificial Sequence
  source: /note="Description of Artificial Sequence: Synthetic oligonucleotide"
  source: /note="Antisense Oligonucleotide"
  source: /note="5' tri-ethylene glycol (TEG)"
cagucgguaaguucugucca

SEQ ID NO: 568 - RNA, 19 nt, Artificial Sequence
  source: /note="Description of Artificial Sequence: Synthetic oligonucleotide"
  source: /note="Antisense Oligonucleotide"
  source: /note="5' tri-ethylene glycol (TEG)"
cagucgguaaguucugucc

SEQ ID NO: 569 - RNA, 18 nt, Artificial Sequence
  source: /note="Description of Artificial Sequence: Synthetic oligonucleotide"
  source: /note="Antisense Oligonucleotide"
  source: /note="5' tri-ethylene glycol (TEG)"
cagucgguaaguucuguc

SEQ ID NO: 570 - RNA, 17 nt, Artificial Sequence
  source: /note="Description of Artificial Sequence: Synthetic oligonucleotide"
  source: /note="Antisense Oligonucleotide"
  source: /note="5' tri-ethylene glycol (TEG)"
cagucgguaaguucugu

SEQ ID NO: 571 - RNA, 16 nt, Artificial Sequence
  source: /note="Description of Artificial Sequence: Synthetic oligonucleotide"
  source: /note="Antisense Oligonucleotide"
  source: /note="5' tri-ethylene glycol (TEG)"
cagucgguaaguucug

SEQ ID NO: 572 - RNA, 15 nt, Artificial Sequence
  source: /note="Description of Artificial Sequence: Synthetic oligonucleotide"
  source: /note="Antisense Oligonucleotide"
  source: /note="5' tri-ethylene glycol (TEG)"
cagucgguaaguucu

SEQ ID NO: 573 - RNA, 14 nt, Artificial Sequence
  source: /note="Description of Artificial Sequence: Synthetic oligonucleotide"
  source: /note="Antisense Oligonucleotide"
  source: /note="5' tri-ethylene glycol (TEG)"
cagucgguaaguuc

SEQ ID NO: 574 - RNA, 13 nt, Artificial Sequence
  source: /note="Description of Artificial Sequence: Synthetic oligonucleotide"
  source: /note="Antisense Oligonucleotide"
  source: /note="5' tri-ethylene glycol (TEG)"
cagucgguaaguu

SEQ ID NO: 575 - RNA, 12 nt, Artificial Sequence
  source: /note="Description of Artificial Sequence: Synthetic oligonucleotide"
  source: /note="Antisense Oligonucleotide"
  source: /note="5' tri-ethylene glycol (TEG)"
cagucgguaagu

SEQ ID NO: 576 - RNA, 20 nt, Artificial Sequence
  source: /note="Description of Artificial Sequence: Synthetic oligonucleotide"
  source: /note="Antisense Oligonucleotide"
  source: /note="5' tri-ethylene glycol (TEG)"
ccagucgguaaguucugucc

SEQ ID NO: 577 - RNA, 19 nt, Artificial Sequence
  source: /note="Description of Artificial Sequence: Synthetic oligonucleotide"
  source: /note="Antisense Oligonucleotide"
  source: /note="5' tri-ethylene glycol (TEG)"
ccagucgguaaguucuguc

SEQ ID NO: 578 - RNA, 18 nt, Artificial Sequence
  source: /note="Description of Artificial Sequence: Synthetic oligonucleotide"
  source: /note="Antisense Oligonucleotide"
  source: /note="5' tri-ethylene glycol (TEG)"
ccagucgguaaguucugu

SEQ ID NO: 579 - RNA, 17 nt, Artificial Sequence
  source: /note="Description of Artificial Sequence: Synthetic oligonucleotide"
  source: /note="Antisense Oligonucleotide"
  source: /note="5' tri-ethylene glycol (TEG)"
ccagucgguaaguucug

SEQ ID NO: 580 - RNA, 16 nt, Artificial Sequence
  source: /note="Description of Artificial Sequence: Synthetic oligonucleotide"
  source: /note="Antisense Oligonucleotide"
  source: /note="5' tri-ethylene glycol (TEG)"
ccagucgguaaguucu

SEQ ID NO: 581 - RNA, 15 nt, Artificial Sequence
  source: /note="Description of Artificial Sequence: Synthetic oligonucleotide"
  source: /note="Antisense Oligonucleotide"
  source: /note="5' tri-ethylene glycol (TEG)"
ccagucgguaaguuc

SEQ ID NO: 582 - RNA, 14 nt, Artificial Sequence
  source: /note="Description of Artificial Sequence: Synthetic oligonucleotide"
  source: /note="Antisense Oligonucleotide"
  source: /note="5' tri-ethylene glycol (TEG)"
ccagucgguaaguu

SEQ ID NO: 583 - RNA, 13 nt, Artificial Sequence
  source: /note="Description of Artificial Sequence: Synthetic oligonucleotide"
  source: /note="Antisense Oligonucleotide"
  source: /note="5' tri-ethylene glycol (TEG)"
ccagucgguaagu

SEQ ID NO: 584 - RNA, 20 nt, Artificial Sequence
  source: /note="Description of Artificial Sequence: Synthetic oligonucleotide"
  source: /note="Antisense Oligonucleotide"
  source: /note="5' tri-ethylene glycol (TEG)"
gccagucgguaaguucuguc

SEQ ID NO: 585 - RNA, 19 nt, Artificial Sequence
  source: /note="Description of Artificial Sequence: Synthetic oligonucleotide"
  source: /note="Antisense Oligonucleotide"
  source: /note="5' tri-ethylene glycol (TEG)"
gccagucgguaaguucugu

SEQ ID NO: 586 - RNA, 18 nt, Artificial Sequence
  source: /note="Description of Artificial Sequence: Synthetic oligonucleotide"
  source: /note="Antisense Oligonucleotide"
  source: /note="5' tri-ethylene glycol (TEG)"
gccagucgguaaguucug

SEQ ID NO: 587 - RNA, 17 nt, Artificial Sequence
  source: /note="Description of Artificial Sequence: Synthetic oligonucleotide"
  source: /note="Antisense Oligonucleotide"
  source: /note="5' tri-ethylene glycol (TEG)"
gccagucgguaaguucu

SEQ ID NO: 588 - RNA, 16 nt, Artificial Sequence
  source: /note="Description of Artificial Sequence: Synthetic oligonucleotide"
  source: /note="Antisense Oligonucleotide"
  source: /note="5' tri-ethylene glycol (TEG)"
gccagucgguaaguuc

SEQ ID NO: 589 - RNA, 15 nt, Artificial Sequence
  source: /note="Description of Artificial Sequence: Synthetic oligonucleotide"
  source: /note="Antisense Oligonucleotide"
  source: /note="5' tri-ethylene glycol (TEG)"
gccagucgguaaguu

SEQ ID NO: 590 - RNA, 14 nt, Artificial Sequence
  source: /note="Description of Artificial Sequence: Synthetic oligonucleotide"
  source: /note="Antisense Oligonucleotide"
  source: /note="5' tri-ethylene glycol (TEG)"
gccagucgguaagu

SEQ ID NO: 591 - RNA, 20 nt, Artificial Sequence
  source: /note="Description of Artificial Sequence: Synthetic oligonucleotide"
  source: /note="Antisense Oligonucleotide"
  source: /note="5' tri-ethylene glycol (TEG)"
ucaaggaagauggcauuucu

SEQ ID NO: 592 - RNA, 22 nt, Artificial Sequence
  source: /note="Description of Artificial Sequence: Synthetic oligonucleotide"
  source: /note="Antisense Oligonucleotide"
  source: /note="5' tri-ethylene glycol (TEG)"
ucaaggaagauggcauuucuag

SEQ ID NO: 593 - RNA, 16 nt, Artificial Sequence
  source: /note="Description of Artificial Sequence: Synthetic oligonucleotide"
  source: /note="Antisense Oligonucleotide"
  source: /note="5' tri-ethylene glycol (TEG)"
ucaaggaagauggcau

SEQ ID NO: 594 - RNA, 15 nt, Artificial Sequence
  source: /note="Description of Artificial Sequence: Synthetic oligonucleotide"
  source: /note="Antisense Oligonucleotide"
  source: /note="5' tri-ethylene glycol (TEG)"
gaagauggcauuucu

SEQ ID NO: 595 - RNA, 21 nt, Artificial Sequence
  source: /note="Description of Artificial Sequence: Synthetic oligonucleotide"
  source: /note="Antisense Oligonucleotide"
  source: /note="5' tri-ethylene glycol (TEG)"
ucaaggaagauggcauuucua

SEQ ID NO: 596 - RNA, 19 nt, Artificial Sequence
  source: /note="Description of Artificial Sequence: Synthetic oligonucleotide"
  source: /note="Antisense Oligonucleotide"
  source: /note="5' tri-ethylene glycol (TEG)"
ucaaggaagauggcauuuc

SEQ ID NO: 597 - RNA, 18 nt, Artificial Sequence
  source: /note="Description of Artificial Sequence: Synthetic oligonucleotide"
  source: /note="Antisense Oligonucleotide"
  source: /note="5' tri-ethylene glycol (TEG)"
ucaaggaagauggcauuu

SEQ ID NO: 598 - RNA, 17 nt, Artificial Sequence
  source: /note="Description of Artificial Sequence: Synthetic oligonucleotide"
  source: /note="Antisense Oligonucleotide"
  source: /note="5' tri-ethylene glycol (TEG)"
ucaaggaagauggcauu

SEQ ID NO: 599 - RNA, 15 nt, Artificial Sequence
  source: /note="Description of Artificial Sequence: Synthetic oligonucleotide"
  source: /note="Antisense Oligonucleotide"
  source: /note="5' tri-ethylene glycol (TEG)"
ucaaggaagauggca

SEQ ID NO: 600 - RNA, 14 nt, Artificial Sequence
  source: /note="Description of Artificial Sequence: Synthetic oligonucleotide"
  source: /note="Antisense Oligonucleotide"
  source: /note="5' tri-ethylene glycol (TEG)"
ucaaggaagauggc

SEQ ID NO: 601 - RNA, 13 nt, Artificial Sequence
  source: /note="Description of Artificial Sequence: Synthetic oligonucleotide"
  source: /note="Antisense Oligonucleotide"
  source: /note="5' tri-ethylene glycol (TEG)"
ucaaggaagaugg

SEQ ID NO: 602 - RNA, 12 nt, Artificial Sequence
  source: /note="Description of Artificial Sequence: Synthetic oligonucleotide"
  source: /note="Antisense Oligonucleotide"
  source: /note="5' tri-ethylene glycol (TEG)"
ucaaggaagaug

SEQ ID NO: 603 - RNA, 11 nt, Artificial Sequence
  source: /note="Description of Artificial Sequence: Synthetic oligonucleotide"
  source: /note="Antisense Oligonucleotide"
  source: /note="5' tri-ethylene glycol (TEG)"
ucaaggaagau

SEQ ID NO: 604 - RNA, 10 nt, Artificial Sequence
  source: /note="Description of Artificial Sequence: Synthetic oligonucleotide"
  source: /note="Antisense Oligonucleotide"
  source: /note="5' tri-ethylene glycol (TEG)"
ucaaggaaga

SEQ ID NO: 605 - RNA, 9 nt, Artificial Sequence
  source: /note="Description of Artificial Sequence: Synthetic oligonucleotide"
  source: /note="Antisense Oligonucleotide"
  source: /note="5' tri-ethylene glycol (TEG)"
ucaaggaag

SEQ ID NO: 606 - RNA, 21 nt, Artificial Sequence
  source: /note="Description of Artificial Sequence: Synthetic oligonucleotide"
  source: /note="Antisense Oligonucleotide"
  source: /note="5' tri-ethylene glycol (TEG)"
caaggaagauggcauuucuag

SEQ ID NO: 607 - RNA, 20 nt, Artificial Sequence
  source: /note="Description of Artificial Sequence: Synthetic oligonucleotide"
  source: /note="Antisense Oligonucleotide"
  source: /note="5' tri-ethylene glycol (TEG)"
caaggaagauggcauuucua

SEQ ID NO: 608 - RNA, 19 nt, Artificial Sequence
  source: /note="Description of Artificial Sequence: Synthetic oligonucleotide"
  source: /note="Antisense Oligonucleotide"
  source: /note="5' tri-ethylene glycol (TEG)"
caaggaagauggcauuucu

SEQ ID NO: 609 - RNA, 18 nt, Artificial Sequence
  source: /note="Description of Artificial Sequence: Synthetic oligonucleotide"
  source: /note="Antisense Oligonucleotide"
  source: /note="5' tri-ethylene glycol (TEG)"
caaggaagauggcauuuc

SEQ ID NO: 610 - RNA, 17 nt, Artificial Sequence
  source: /note="Description of Artificial Sequence: Synthetic oligonucleotide"
  source: /note="Antisense Oligonucleotide"
  source: /note="5' tri-ethylene glycol (TEG)"
caaggaagauggcauuu

SEQ ID NO: 611 - RNA, 16 nt, Artificial Sequence
  source: /note="Description of Artificial Sequence: Synthetic oligonucleotide"
  source: /note="Antisense Oligonucleotide"
  source: /note="5' tri-ethylene glycol (TEG)"
caaggaagauggcauu

SEQ ID NO: 612 - RNA, 15 nt, Artificial Sequence
  source: /note="Description of Artificial Sequence: Synthetic oligonucleotide"
  source: /note="Antisense Oligonucleotide"
  source: /note="5' tri-ethylene glycol (TEG)"
caaggaagauggcau

SEQ ID NO: 613 - RNA, 14 nt, Artificial Sequence
  source: /note="Description of Artificial Sequence: Synthetic oligonucleotide"
  source: /note="Antisense Oligonucleotide"
  source: /note="5' tri-ethylene glycol (TEG)"
caaggaagauggca

SEQ ID NO: 614 - RNA, 13 nt, Artificial Sequence
  source: /note="Description of Artificial Sequence: Synthetic oligonucleotide"
  source: /note="Antisense Oligonucleotide"
  source: /note="5' tri-ethylene glycol (TEG)"
caaggaagauggc

SEQ ID NO: 615 - RNA, 12 nt, Artificial Sequence
  source: /note="Description of Artificial Sequence: Synthetic oligonucleotide"
  source: /note="Antisense Oligonucleotide"
  source: /note="5' tri-ethylene glycol (TEG)"
caaggaagaugg

SEQ ID NO: 616 - RNA, 11 nt, Artificial Sequence
  source: /note="Description of Artificial Sequence: Synthetic oligonucleotide"
  source: /note="Antisense Oligonucleotide"
  source: /note="5' tri-ethylene glycol (TEG)"
caaggaagaug

SEQ ID NO: 617 - RNA, 10 nt, Artificial Sequence
  source: /note="Description of Artificial Sequence: Synthetic oligonucleotide"
  source: /note="Antisense Oligonucleotide"
  source: /note="5' tri-ethylene glycol (TEG)"
caaggaagau

SEQ ID NO: 618 - RNA, 9 nt, Artificial Sequence
  source: /note="Description of Artificial Sequence: Synthetic oligonucleotide"
  source: /note="RNA/Antisense Oligonucleotide"
  source: /note="5' tri-ethylene glycol (TEG)"
caaggaaga

SEQ ID NO: 619 - RNA, 8 nt, Artificial Sequence
  source: /note="Description of Artificial Sequence: Synthetic oligonucleotide"
  source: /note="RNA/Antisense Oligonucleotide"
  source: /note="5' tri-ethylene glycol (TEG)"
caaggaag

SEQ ID NO: 620 - RNA, 20 nt, Artificial Sequence
  source: /note="Description of Artificial Sequence: Synthetic oligonucleotide"
  source: /note="Antisense Oligonucleotide"
  source: /note="5' tri-ethylene glycol (TEG)"
aaggaagauggcauuucuag

SEQ ID NO: 621 - RNA, 19 nt, Artificial Sequence
  source: /note="Description of Artificial Sequence: Synthetic oligonucleotide"
  source: /note="Antisense Oligonucleotide"
  source: /note="5' tri-ethylene glycol (TEG)"
aaggaagauggcauuucua

SEQ ID NO: 622 - RNA, 18 nt, Artificial Sequence
  source: /note="Description of Artificial Sequence: Synthetic oligonucleotide"
  source: /note="Antisense Oligonucleotide"
  source: /note="5' tri-ethylene glycol (TEG)"
aaggaagauggcauuucu

SEQ ID NO: 623 - RNA, 17 nt, Artificial Sequence
  source: /note="Description of Artificial Sequence: Synthetic oligonucleotide"
  source: /note="Antisense Oligonucleotide"
  source: /note="5' tri-ethylene glycol (TEG)"
aaggaagauggcauuuc

SEQ ID NO: 624 - RNA, 16 nt, Artificial Sequence
  source: /note="Description of Artificial Sequence: Synthetic oligonucleotide"
  source: /note="Antisense Oligonucleotide"
  source: /note="5' tri-ethylene glycol (TEG)"
aaggaagauggcauuu

SEQ ID NO: 625 - RNA, 15 nt, Artificial Sequence
  source: /note="Description of Artificial Sequence: Synthetic oligonucleotide"
  source: /note="Antisense Oligonucleotide"
  source: /note="5' tri-ethylene glycol (TEG)"
aaggaagauggcauu

SEQ ID NO: 626 - RNA, 14 nt, Artificial Sequence
  source: /note="Description of Artificial Sequence: Synthetic oligonucleotide"
  source: /note="Antisense Oligonucleotide"
  source: /note="5' tri-ethylene glycol (TEG)"
aaggaagauggcau

SEQ ID NO: 627 - RNA, 13 nt, Artificial Sequence
  source: /note="Description of Artificial Sequence: Synthetic oligonucleotide"
  source: /note="Antisense Oligonucleotide"
  source: /note="5' tri-ethylene glycol (TEG)"
aaggaagauggca

SEQ ID NO: 628 - RNA, 12 nt, Artificial Sequence
  source: /note="Description of Artificial Sequence: Synthetic oligonucleotide"
  source: /note="Antisense Oligonucleotide"
  source: /note="5' tri-ethylene glycol (TEG)"
aaggaagauggc

SEQ ID NO: 629 - RNA, 11 nt, Artificial Sequence
  source: /note="Description of Artificial Sequence: Synthetic oligonucleotide"
  source: /note="Antisense Oligonucleotide"
  source: /note="5' tri-ethylene glycol (TEG)"
aaggaagaugg

SEQ ID NO: 630 - RNA, 10 nt, Artificial Sequence
  source: /note="Description of Artificial Sequence: Synthetic oligonucleotide"
  source: /note="Antisense Oligonucleotide"
  source: /note="5' tri-ethylene glycol (TEG)"
aaggaagaug

SEQ ID NO: 631 - RNA, 9 nt, Artificial Sequence
  source: /note="Description of Artificial Sequence: Synthetic oligonucleotide"
  source: /note="Antisense Oligonucleotide"
  source: /note="5' tri-ethylene glycol (TEG)"
aaggaagau

SEQ ID NO: 632 - RNA, 8 nt, Artificial Sequence
  source: /note="Description of Artificial Sequence: Synthetic oligonucleotide"
  source: /note="RNA/Antisense Oligonucleotide"
  source: /note="5' tri-ethylene glycol (TEG)"
aaggaaga

SEQ ID NO: 633 - RNA, 19 nt, Artificial Sequence
  source: /note="Description of Artificial Sequence: Synthetic oligonucleotide"
  source: /note="Antisense Oligonucleotide"
  source: /note="5' tri-ethylene glycol (TEG)"
aggaagauggcauuucuag

SEQ ID NO: 634 - RNA, 18 nt, Artificial Sequence
  source: /note="Description of Artificial Sequence: Synthetic oligonucleotide"
  source: /note="Antisense Oligonucleotide"
  source: /note="5' tri-ethylene glycol (TEG)"
aggaagauggcauuucua

SEQ ID NO: 635 - RNA, 17 nt, Artificial Sequence
  source: /note="Description of Artificial Sequence: Synthetic oligonucleotide"
  source: /note="Antisense Oligonucleotide"
  source: /note="5' tri-ethylene glycol (TEG)"
aggaagauggcauuucu

SEQ ID NO: 636 - RNA, 16 nt, Artificial Sequence
  source: /note="Description of Artificial Sequence: Synthetic oligonucleotide"
  source: /note="Antisense Oligonucleotide"
  source: /note="5' tri-ethylene glycol (TEG)"
aggaagauggcauuuc

SEQ ID NO: 637 - RNA, 15 nt, Artificial Sequence
  source: /note="Description of Artificial Sequence: Synthetic oligonucleotide"
  source: /note="Antisense Oligonucleotide"
  source: /note="5' tri-ethylene glycol (TEG)"
aggaagauggcauuu

SEQ ID NO: 638 - RNA, 14 nt, Artificial Sequence
  source: /note="Description of Artificial Sequence: Synthetic oligonucleotide"
  source: /note="Antisense Oligonucleotide"
  source: /note="5' tri-ethylene glycol (TEG)"
aggaagauggcauu

SEQ ID NO: 639 - RNA, 13 nt, Artificial Sequence
  source: /note="Description of Artificial Sequence: Synthetic oligonucleotide"
  source: /note="Antisense Oligonucleotide"
  source: /note="5' tri-ethylene glycol (TEG)"
aggaagauggcau

SEQ ID NO: 640 - RNA, 12 nt, Artificial Sequence
  source: /note="Description of Artificial Sequence: Synthetic oligonucleotide"
  source: /note="Antisense Oligonucleotide"
  source: /note="5' tri-ethylene glycol (TEG)"
aggaagauggca

SEQ ID NO: 641 - RNA, 10 nt, Artificial Sequence
  source: /note="Description of Artificial Sequence: Synthetic oligonucleotide"
  source: /note="Antisense Oligonucleotide"
  source: /note="5' tri-ethylene glycol (TEG)"
aggaagaugg

SEQ ID NO: 642 - RNA, 9 nt, Artificial Sequence
  source: /note="Description of Artificial Sequence: Synthetic oligonucleotide"
  source: /note="Antisense Oligonucleotide"
  source: /note="5' tri-ethylene glycol (TEG)"
aggaagaug

SEQ ID NO: 643 - RNA, 8 nt, Artificial Sequence
  source: /note="Description of Artificial Sequence: Synthetic oligonucleotide"
  source: /note="Antisense Oligonucleotide"
  source: /note="5' tri-ethylene glycol (TEG)"
aggaagau

SEQ ID NO: 644 - RNA, 18 nt, Artificial Sequence
  source: /note="Description of Artificial Sequence: Synthetic oligonucleotide"
  source: /note="Antisense Oligonucleotide"
  source: /note="5' tri-ethylene glycol (TEG)"
ggaagauggcauuucuag

SEQ ID NO: 645 - RNA, 17 nt, Artificial Sequence
  source: /note="Description of Artificial Sequence: Synthetic oligonucleotide"
  source: /note="Antisense Oligonucleotide"
  source: /note="5' tri-ethylene glycol (TEG)"
ggaagauggcauuucua

SEQ ID NO: 646 - RNA, 16 nt, Artificial Sequence
  source: /note="Description of Artificial Sequence: Synthetic oligonucleotide"
  source: /note="Antisense Oligonucleotide"
  source: /note="5' tri-ethylene glycol (TEG)"
ggaagauggcauuucu

SEQ ID NO: 647 - RNA, 15 nt, Artificial Sequence
  source: /note="Description of Artificial Sequence: Synthetic oligonucleotide"
  source: /note="Antisense Oligonucleotide"
  source: /note="5' tri-ethylene glycol (TEG)"
ggaagauggcauuuc

SEQ ID NO: 648 - RNA, 14 nt, Artificial Sequence
  source: /note="Description of Artificial Sequence: Synthetic oligonucleotide"
  source: /note="Antisense Oligonucleotide"
  source: /note="5' tri-ethylene glycol (TEG)"
ggaagauggcauuu

SEQ ID NO: 649 - RNA, 13 nt, Artificial Sequence
  source: /note="Description of Artificial Sequence: Synthetic oligonucleotide"
  source: /note="Antisense Oligonucleotide"
  source: /note="5' tri-ethylene glycol (TEG)"
ggaagauggcauu

SEQ ID NO: 650 - RNA, 12 nt, Artificial Sequence
  source: /note="Description of Artificial Sequence: Synthetic oligonucleotide"
  source: /note="Antisense Oligonucleotide"
  source: /note="5' tri-ethylene glycol (TEG)"
ggaagauggcau

SEQ ID NO: 651 - RNA, 11 nt, Artificial Sequence
  source: /note="Description of Artificial Sequence: Synthetic oligonucleotide"
  source: /note="Antisense Oligonucleotide"
  source: /note="5' tri-ethylene glycol (TEG)"
ggaagauggca

SEQ ID NO: 652 - RNA, 10 nt, Artificial Sequence
  source: /note="Description of Artificial Sequence: Synthetic oligonucleotide"
  source: /note="Antisense Oligonucleotide"
  source: /note="5' tri-ethylene glycol (TEG)"
ggaagauggc

SEQ ID NO: 653 - RNA, 8 nt, Artificial Sequence
  source: /note="Description of Artificial Sequence: Synthetic oligonucleotide"
  source: /note="Antisense Oligonucleotide"
  source: /note="5' tri-ethylene glycol (TEG)"
ggaagaug

SEQ ID NO: 654 - RNA, 17 nt, Artificial Sequence
  source: /note="Description of Artificial Sequence: Synthetic oligonucleotide"
  source: /note="Antisense Oligonucleotide"
  source: /note="5' tri-ethylene glycol (TEG)"
gaagauggcauuucuag

SEQ ID NO: 655 - RNA, 16 nt, Artificial Sequence
  source: /note="Description of Artificial Sequence: Synthetic oligonucleotide"
  source: /note="Antisense Oligonucleotide"
  source: /note="5' tri-ethylene glycol (TEG)"
gaagauggcauuucua

SEQ ID NO: 656 - RNA, 14 nt, Artificial Sequence
  source: /note="Description of Artificial Sequence: Synthetic oligonucleotide"
  source: /note="Antisense Oligonucleotide"
  source: /note="5' tri-ethylene glycol (TEG)"
gaagauggcauuuc

SEQ ID NO: 657 - RNA, 13 nt, Artificial Sequence
  source: /note="Description of Artificial Sequence: Synthetic oligonucleotide"
  source: /note="Antisense Oligonucleotide"
  source: /note="5' tri-ethylene glycol (TEG)"
gaagauggcauuu

SEQ ID NO: 658 - RNA, 12 nt, Artificial Sequence
  source: /note="Description of Artificial Sequence: Synthetic oligonucleotide"
  source: /note="Antisense Oligonucleotide"
  source: /note="5' tri-ethylene glycol (TEG)"
gaagauggcauu

SEQ ID NO: 659 - RNA, 11 nt, Artificial Sequence
  source: /note="Description of Artificial Sequence: Synthetic oligonucleotide"
  source: /note="Antisense Oligonucleotide"
  source: /note="5' tri-ethylene glycol (TEG)"
gaagauggcau

SEQ ID NO: 660 - RNA, 10 nt, Artificial Sequence
  source: /note="Description of Artificial Sequence: Synthetic oligonucleotide"
  source: /note="Antisense Oligonucleotide"
  source: /note="5' tri-ethylene glycol (TEG)"
gaagauggca

SEQ ID NO: 661 - RNA, 9 nt, Artificial Sequence
  source: /note="Description of Artificial Sequence: Synthetic oligonucleotide"
  source: /note="Antisense Oligonucleotide"
  source: /note="5' tri-ethylene glycol (TEG)"
gaagauggc

SEQ ID NO: 662 - RNA, 8 nt, Artificial Sequence
  source: /note="Description of Artificial Sequence: Synthetic oligonucleotide"
  source: /note="Antisense Oligonucleotide"
  source: /note="5' tri-ethylene glycol (TEG)"
gaagaugg

SEQ ID NO: 663 - RNA, 16 nt, Artificial Sequence
  source: /note="Description of Artificial Sequence: Synthetic oligonucleotide"
  source: /note="Antisense Oligonucleotide"
  source: /note="5' tri-ethylene glycol (TEG)"
aagauggcauuucuag

SEQ ID NO: 664 - RNA, 15 nt, Artificial Sequence
  source: /note="Description of Artificial Sequence: Synthetic oligonucleotide"
  source: /note="Antisense Oligonucleotide"
  source: /note="5' tri-ethylene glycol (TEG)"
aagauggcauuucua

SEQ ID NO: 665 - RNA, 14 nt, Artificial Sequence
  source: /note="Description of Artificial Sequence: Synthetic oligonucleotide"
  source: /note="Antisense Oligonucleotide"
  source: /note="5' tri-ethylene glycol (TEG)"
aagauggcauuucu

SEQ ID NO: 666 - RNA, 13 nt, Artificial Sequence
  source: /note="Description of Artificial Sequence: Synthetic oligonucleotide"
  source: /note="Antisense Oligonucleotide"
  source: /note="5' tri-ethylene glycol (TEG)"
aagauggcauuuc

SEQ ID NO: 667 - RNA, 12 nt, Artificial Sequence
  source: /note="Description of Artificial Sequence: Synthetic oligonucleotide"
  source: /note="Antisense Oligonucleotide"
  source: /note="5' tri-ethylene glycol (TEG)"
aagauggcauuu

SEQ ID NO: 668 - RNA, 11 nt, Artificial Sequence
  source: /note="Description of Artificial Sequence: Synthetic oligonucleotide"
  source: /note="Antisense Oligonucleotide"
  source: /note="5' tri-ethylene glycol (TEG)"
aagauggcauu

SEQ ID NO: 669 - RNA, 10 nt, Artificial Sequence
  source: /note="Description of Artificial Sequence: Synthetic oligonucleotide"
  source: /note="Antisense Oligonucleotide"
  source: /note="5' tri-ethylene glycol (TEG)"
aagauggcau

SEQ ID NO: 670 - RNA, 9 nt, Artificial Sequence
  source: /note="Description of Artificial Sequence: Synthetic oligonucleotide"
  source: /note="Antisense Oligonucleotide"
  source: /note="5' tri-ethylene glycol (TEG)"
aagauggca

SEQ ID NO: 671 - RNA, 8 nt, Artificial Sequence
  source: /note="Description of Artificial Sequence: Synthetic oligonucleotide"
  source: /note="Antisense Oligonucleotide"
  source: /note="5' tri-ethylene glycol (TEG)"
aagauggc

SEQ ID NO: 672 - RNA, 15 nt, Artificial Sequence
  source: /note="Description of Artificial Sequence: Synthetic oligonucleotide"
  source: /note="Antisense Oligonucleotide"
  source: /note="5' tri-ethylene glycol (TEG)"
agauggcauuucuag

SEQ ID NO: 673 - RNA, 14 nt, Artificial Sequence
  source: /note="Description of Artificial Sequence: Synthetic oligonucleotide"
  source: /note="Antisense Oligonucleotide"
  source: /note="5' tri-ethylene glycol (TEG)"
agauggcauuucua

SEQ ID NO: 674 - RNA, 13 nt, Artificial Sequence
  source: /note="Description of Artificial Sequence: Synthetic oligonucleotide"
  source: /note="Antisense Oligonucleotide"
  source: /note="5' tri-ethylene glycol (TEG)"
agauggcauuucu

SEQ ID NO: 675 - RNA, 12 nt, Artificial Sequence
  source: /note="Description of Artificial Sequence: Synthetic oligonucleotide"
  source: /note="Antisense Oligonucleotide"
  source: /note="5' tri-ethylene glycol (TEG)"
agauggcauuuc

SEQ ID NO: 676 - RNA, 11 nt, Artificial Sequence
  source: /note="Description of Artificial Sequence: Synthetic oligonucleotide"
  source: /note="Antisense Oligonucleotide"
  source: /note="5' tri-ethylene glycol (TEG)"
agauggcauuu

SEQ ID NO: 677 - RNA, 10 nt, Artificial Sequence
  source: /note="Description of Artificial Sequence: Synthetic oligonucleotide"
  source: /note="Antisense Oligonucleotide"
  source: /note="5' tri-ethylene glycol (TEG)"
agauggcauu

SEQ ID NO: 678 - RNA, 9 nt, Artificial Sequence
  source: /note="Description of Artificial Sequence: Synthetic oligonucleotide"
  source: /note="Antisense Oligonucleotide"
  source: /note="5' tri-ethylene glycol (TEG)"
agauggcau

SEQ ID NO: 679 - RNA, 8 nt, Artificial Sequence
  source: /note="Description of Artificial Sequence: Synthetic oligonucleotide"
  source: /note="Antisense Oligonucleotide"
  source: /note="5' tri-ethylene glycol (TEG)"
agauggca

SEQ ID NO: 680 - RNA, 30 nt, Artificial Sequence; identical to SEQ ID NO: 284
  source: /note="Description of Artificial Sequence: Synthetic oligonucleotide"
  source: /note="Antisense Oligonucleotide"
  source: /note="5' tri-ethylene glycol (TEG)"

SEQ ID NO: 681 - RNA, 29 nt, Artificial Sequence
  source: /note="Description of Artificial Sequence: Synthetic oligonucleotide"
  source: /note="Antisense Oligonucleotide"
  source: /note="5' tri-ethylene glycol (TEG)"
cuccaacaucaaggaagauggcauuucua

SEQ ID NO: 682 - RNA, 28 nt, Artificial Sequence
  source: /note="Description of Artificial Sequence: Synthetic oligonucleotide"
  source: /note="Antisense Oligonucleotide"
  source: /note="5' tri-ethylene glycol (TEG)"
cuccaacaucaaggaagauggcauuucu

SEQ ID NO: 683 - RNA, 27 nt, Artificial Sequence
  source: /note="Description of Artificial Sequence: Synthetic oligonucleotide"
  source: /note="Antisense Oligonucleotide"
  source: /note="5' tri-ethylene glycol (TEG)"
cuccaacaucaaggaagauggcauuuc

SEQ ID NO: 684 - RNA, 26 nt, Artificial Sequence
  source: /note="Description of Artificial Sequence: Synthetic oligonucleotide"
  source: /note="Antisense Oligonucleotide"
  source: /note="5' tri-ethylene glycol (TEG)"
cuccaacaucaaggaagauggcauuu

SEQ ID NO: 685 - RNA, 25 nt, Artificial Sequence
  source: /note="Description of Artificial Sequence: Synthetic oligonucleotide"
  source: /note="Antisense Oligonucleotide"
  source: /note="5' tri-ethylene glycol (TEG)"
cuccaacaucaaggaagauggcauu

SEQ ID NO: 686 - RNA, 24 nt, Artificial Sequence
  source: /note="Description of Artificial Sequence: Synthetic oligonucleotide"
  source: /note="Antisense Oligonucleotide"
  source: /note="5' tri-ethylene glycol (TEG)"
cuccaacaucaaggaagauggcau

SEQ ID NO: 687 - RNA, 23 nt, Artificial Sequence
  source: /note="Description of Artificial Sequence: Synthetic oligonucleotide"
  source: /note="Antisense Oligonucleotide"
  source: /note="5' tri-ethylene glycol (TEG)"
cuccaacaucaaggaagauggca

SEQ ID NO: 688 - RNA, 22 nt, Artificial Sequence
  source: /note="Description of Artificial Sequence: Synthetic oligonucleotide"
  source: /note="Antisense Oligonucleotide"
  source: /note="5' tri-ethylene glycol (TEG)"
cuccaacaucaaggaagauggc

SEQ ID NO: 689 - RNA, 21 nt, Artificial Sequence
  source: /note="Description of Artificial Sequence: Synthetic oligonucleotide"
  source: /note="Antisense Oligonucleotide"
  source: /note="5' tri-ethylene glycol (TEG)"
cuccaacaucaaggaagaugg

SEQ ID NO: 690 - RNA, 20 nt, Artificial Sequence
  source: /note="Description of Artificial Sequence: Synthetic oligonucleotide"
  source: /note="Antisense Oligonucleotide"
  source: /note="5' tri-ethylene glycol (TEG)"
cuccaacaucaaggaagaug

SEQ ID NO: 691 - RNA, 19 nt, Artificial Sequence
  source: /note="Description of Artificial Sequence: Synthetic oligonucleotide"
  source: /note="Antisense Oligonucleotide"
  source: /note="5' tri-ethylene glycol (TEG)"
cuccaacaucaaggaagau

SEQ ID NO: 692 - RNA, 18 nt, Artificial Sequence
  source: /note="Description of Artificial Sequence: Synthetic oligonucleotide"
  source: /note="Antisense Oligonucleotide"
  source: /note="5' tri-ethylene glycol (TEG)"
cuccaacaucaaggaaga

SEQ ID NO: 693 - RNA, 17 nt, Artificial Sequence
  source: /note="Description of Artificial Sequence: Synthetic oligonucleotide"
  source: /note="Antisense Oligonucleotide"
  source: /note="5' tri-ethylene glycol (TEG)"
cuccaacaucaaggaag

SEQ ID NO: 694 - RNA, 29 nt, Artificial Sequence
  source: /note="Description of Artificial Sequence: Synthetic oligonucleotide"
  source: /note="Antisense Oligonucleotide"
  source: /note="5' tri-ethylene glycol (TEG)"
uccaacaucaaggaagauggcauuucuag

SEQ ID NO: 695 - RNA, 28 nt, Artificial Sequence
  source: /note="Description of Artificial Sequence: Synthetic oligonucleotide"
  source: /note="Antisense Oligonucleotide"
  source: /note="5' tri-ethylene glycol (TEG)"
uccaacaucaaggaagauggcauuucua

SEQ ID NO: 696 - RNA, 27 nt, Artificial Sequence
  source: /note="Description of Artificial Sequence: Synthetic oligonucleotide"
  source: /note="Antisense Oligonucleotide"
  source: /note="5' tri-ethylene glycol (TEG)"
uccaacaucaaggaagauggcauuucu

SEQ ID NO: 697 - RNA, 26 nt, Artificial Sequence
  source: /note="Description of Artificial Sequence: Synthetic oligonucleotide"
  source: /note="Antisense Oligonucleotide"
  source: /note="5' tri-ethylene glycol (TEG)"
uccaacaucaaggaagauggcauuuc

SEQ ID NO: 698 - RNA, 25 nt, Artificial Sequence
  source: /note="Description of Artificial Sequence: Synthetic oligonucleotide"
  source: /note="Antisense Oligonucleotide"
  source: /note="5' tri-ethylene glycol (TEG)"
uccaacaucaaggaagauggcauuu

SEQ ID NO: 699 - RNA, 24 nt, Artificial Sequence
  source: /note="Description of Artificial Sequence: Synthetic oligonucleotide"
  source: /note="Antisense Oligonucleotide"
  source: /note="5' tri-ethylene glycol (TEG)"
uccaacaucaaggaagauggcauu

SEQ ID NO: 700 - RNA, 23 nt, Artificial Sequence
  source: /note="Description of Artificial Sequence: Synthetic oligonucleotide"
  source: /note="Antisense Oligonucleotide"
  source: /note="5' tri-ethylene glycol (TEG)"
uccaacaucaaggaagauggcau

SEQ ID NO: 701 - RNA, 22 nt, Artificial Sequence
  source: /note="Description of Artificial Sequence: Synthetic oligonucleotide"
  source: /note="Antisense Oligonucleotide"
  source: /note="5' tri-ethylene glycol (TEG)"
uccaacaucaaggaagauggca

SEQ ID NO: 702 - RNA, 21 nt, Artificial Sequence
  source: /note="Description of Artificial Sequence: Synthetic oligonucleotide"
  source: /note="Antisense Oligonucleotide"
  source: /note="5' tri-ethylene glycol (TEG)"
uccaacaucaaggaagauggc

SEQ ID NO: 703 - RNA, 20 nt, Artificial Sequence
  source: /note="Description of Artificial Sequence: Synthetic oligonucleotide"
  source: /note="Antisense Oligonucleotide"
  source: /note="5' tri-ethylene glycol (TEG)"
uccaacaucaaggaagaugg

SEQ ID NO: 704 - RNA, 19 nt, Artificial Sequence
  source: /note="Description of Artificial Sequence: Synthetic oligonucleotide"
  source: /note="Antisense Oligonucleotide"
  source: /note="5' tri-ethylene glycol (TEG)"
uccaacaucaaggaagaug

SEQ ID NO: 705 - RNA, 18 nt, Artificial Sequence
  source: /note="Description of Artificial Sequence: Synthetic oligonucleotide"
  source: /note="Antisense Oligonucleotide"
  source: /note="5' tri-ethylene glycol (TEG)"
uccaacaucaaggaagau

SEQ ID NO: 706 - RNA, 17 nt, Artificial Sequence
  source: /note="Description of Artificial Sequence: Synthetic oligonucleotide"
  source: /note="Antisense Oligonucleotide"
  source: /note="5' tri-ethylene glycol (TEG)"
uccaacaucaaggaaga

SEQ ID NO: 707 - RNA, 16 nt, Artificial Sequence
  source: /note="Description of Artificial Sequence: Synthetic oligonucleotide"
  source: /note="Antisense Oligonucleotide"
  source: /note="5' tri-ethylene glycol (TEG)"
uccaacaucaaggaag

SEQ ID NO: 708 - RNA, 28 nt, Artificial Sequence
  source: /note="Description of Artificial Sequence: Synthetic oligonucleotide"
  source: /note="Antisense Oligonucleotide"
  source: /note="5' tri-ethylene glycol (TEG)"
ccaacaucaaggaagauggcauuucuag

SEQ ID NO: 709 - RNA, 27 nt, Artificial Sequence
  source: /note="Description of Artificial Sequence: Synthetic oligonucleotide"
  source: /note="Antisense Oligonucleotide"
  source: /note="5' tri-ethylene glycol (TEG)"
ccaacaucaaggaagauggcauuucua

SEQ ID NO: 710 - RNA, 26 nt, Artificial Sequence
  source: /note="Description of Artificial Sequence: Synthetic oligonucleotide"
  source: /note="Antisense Oligonucleotide"
  source: /note="5' tri-ethylene glycol (TEG)"
ccaacaucaaggaagauggcauuucu

SEQ ID NO: 711 - RNA, 25 nt, Artificial Sequence
  source: /note="Description of Artificial Sequence: Synthetic oligonucleotide"
  source: /note="Antisense Oligonucleotide"
  source: /note="5' tri-ethylene glycol (TEG)"
ccaacaucaaggaagauggcauuuc

SEQ ID NO: 712 - RNA, 24 nt, Artificial Sequence
  source: /note="Description of Artificial Sequence: Synthetic oligonucleotide"
  source: /note="Antisense Oligonucleotide"
  source: /note="5' tri-ethylene glycol (TEG)"
ccaacaucaaggaagauggcauuu

SEQ ID NO: 713 - RNA, 23 nt, Artificial Sequence
  source: /note="Description of Artificial Sequence: Synthetic oligonucleotide"
  source: /note="Antisense Oligonucleotide"
  source: /note="5' tri-ethylene glycol (TEG)"
ccaacaucaaggaagauggcauu

SEQ ID NO: 714 - RNA, 22 nt, Artificial Sequence
  source: /note="Description of Artificial Sequence: Synthetic oligonucleotide"
  source: /note="Antisense Oligonucleotide"
  source: /note="5' tri-ethylene glycol (TEG)"
ccaacaucaaggaagauggcau

SEQ ID NO: 715 - RNA, 21 nt, Artificial Sequence
  source: /note="Description of Artificial Sequence: Synthetic oligonucleotide"
  source: /note="Antisense Oligonucleotide"
  source: /note="5' tri-ethylene glycol (TEG)"
ccaacaucaaggaagauggca

SEQ ID NO: 716 - RNA, 20 nt, Artificial Sequence
  source: /note="Description of Artificial Sequence: Synthetic oligonucleotide"
  source: /note="Antisense Oligonucleotide"
  source: /note="5' tri-ethylene glycol (TEG)"
ccaacaucaaggaagauggc

SEQ ID NO: 717 - RNA, 19 nt, Artificial Sequence
  source: /note="Description of Artificial Sequence: Synthetic oligonucleotide"
  source: /note="Antisense Oligonucleotide"
  source: /note="5' tri-ethylene glycol (TEG)"
ccaacaucaaggaagaugg

SEQ ID NO: 718 - RNA, 18 nt, Artificial Sequence
  source: /note="Description of Artificial Sequence: Synthetic oligonucleotide"
  source: /note="Antisense Oligonucleotide"
  source: /note="5' tri-ethylene glycol (TEG)"
ccaacaucaaggaagaug

SEQ ID NO: 719 - RNA, 17 nt, Artificial Sequence
  source: /note="Description of Artificial Sequence: Synthetic oligonucleotide"
  source: /note="Antisense Oligonucleotide"
  source: /note="5' tri-ethylene glycol (TEG)"
ccaacaucaaggaagau

SEQ ID NO: 720 - RNA, 16 nt, Artificial Sequence
  source: /note="Description of Artificial Sequence: Synthetic oligonucleotide"
  source: /note="Antisense Oligonucleotide"
  source: /note="5' tri-ethylene glycol (TEG)"
ccaacaucaaggaaga

SEQ ID NO: 721 - RNA, 15 nt, Artificial Sequence
  source: /note="Description of Artificial Sequence: Synthetic oligonucleotide"
  source: /note="Antisense Oligonucleotide"
  source: /note="5' tri-ethylene glycol (TEG)"
ccaacaucaaggaag

SEQ ID NO: 722 - RNA, 27 nt, Artificial Sequence
  source: /note="Description of Artificial Sequence: Synthetic oligonucleotide"
  source: /note="Antisense Oligonucleotide"
  source: /note="5' tri-ethylene glycol (TEG)"
caacaucaaggaagauggcauuucuag

SEQ ID NO: 723 - RNA, 26 nt, Artificial Sequence
  source: /note="Description of Artificial Sequence: Synthetic oligonucleotide"
  source: /note="Antisense Oligonucleotide"
  source: /note="5' tri-ethylene glycol (TEG)"
caacaucaaggaagauggcauuucua

SEQ ID NO: 724 - RNA, 25 nt, Artificial Sequence
  source: /note="Description of Artificial Sequence: Synthetic oligonucleotide"
  source: /note="Antisense Oligonucleotide"
  source: /note="5' tri-ethylene glycol (TEG)"
caacaucaaggaagauggcauuucu

SEQ ID NO: 725 - RNA, 24 nt, Artificial Sequence
  source: /note="Description of Artificial Sequence: Synthetic oligonucleotide"
  source: /note="Antisense Oligonucleotide"
  source: /note="5' tri-ethylene glycol (TEG)"
caacaucaaggaagauggcauuuc

SEQ ID NO: 726 - RNA, 23 nt, Artificial Sequence
  source: /note="Description of Artificial Sequence: Synthetic oligonucleotide"
  source: /note="Antisense Oligonucleotide"
  source: /note="5' tri-ethylene glycol (TEG)"
caacaucaaggaagauggcauuu

SEQ ID NO: 727 - RNA, 22 nt, Artificial Sequence
  source: /note="Description of Artificial Sequence: Synthetic oligonucleotide"
  source: /note="Antisense Oligonucleotide"
  source: /note="5' tri-ethylene glycol (TEG)"
caacaucaaggaagauggcauu

SEQ ID NO: 728 - RNA, 21 nt, Artificial Sequence
  source: /note="Description of Artificial Sequence: Synthetic oligonucleotide"
  source: /note="Antisense Oligonucleotide"
  source: /note="5' tri-ethylene glycol (TEG)"
caacaucaaggaagauggcau

SEQ ID NO: 729 - RNA, 20 nt, Artificial Sequence
  source: /note="Description of Artificial Sequence: Synthetic oligonucleotide"
  source: /note="Antisense Oligonucleotide"
  source: /note="5' tri-ethylene glycol (TEG)"
caacaucaaggaagauggca

SEQ ID NO: 730 - RNA, 19 nt, Artificial Sequence
  source: /note="Description of Artificial Sequence: Synthetic oligonucleotide"
  source: /note="Antisense Oligonucleotide"
  source: /note="5' tri-ethylene glycol (TEG)"
caacaucaaggaagauggc

SEQ ID NO: 731 - RNA, 18 nt, Artificial Sequence
  source: /note="Description of Artificial Sequence: Synthetic oligonucleotide"
  source: /note="Antisense Oligonucleotide"
  source: /note="5' tri-ethylene glycol (TEG)"
caacaucaaggaagaugg

SEQ ID NO: 732 - RNA, 17 nt, Artificial Sequence
  source: /note="Description of Artificial Sequence: Synthetic oligonucleotide"
  source: /note="Antisense Oligonucleotide"
  source: /note="5' tri-ethylene glycol (TEG)"
caacaucaaggaagaug

SEQ ID NO: 733 - RNA, 16 nt, Artificial Sequence
  source: /note="Description of Artificial Sequence: Synthetic oligonucleotide"
  source: /note="Antisense Oligonucleotide"
  source: /note="5' tri-ethylene glycol (TEG)"
caacaucaaggaagau

SEQ ID NO: 734 - RNA, 15 nt, Artificial Sequence
  source: /note="Description of Artificial Sequence: Synthetic oligonucleotide"
  source: /note="Antisense Oligonucleotide"
  source: /note="5' tri-ethylene glycol (TEG)"
caacaucaaggaaga

SEQ ID NO: 735 - RNA, 14 nt, Artificial Sequence
  source: /note="Description of Artificial Sequence: Synthetic oligonucleotide"
  source: /note="Antisense Oligonucleotide"
  source: /note="5' tri-ethylene glycol (TEG)"
caacaucaaggaag

SEQ ID NO: 736 - RNA, 26 nt, Artificial Sequence
  source: /note="Description of Artificial Sequence: Synthetic oligonucleotide"
  source: /note="Antisense Oligonucleotide"
  source: /note="5' tri-ethylene glycol (TEG)"
aacaucaaggaagauggcauuucuag

SEQ ID NO: 737 - RNA, 25 nt, Artificial Sequence
  source: /note="Description of Artificial Sequence: Synthetic oligonucleotide"
  source: /note="Antisense Oligonucleotide"
  source: /note="5' tri-ethylene glycol (TEG)"
aacaucaaggaagauggcauuucua

SEQ ID NO: 738 - RNA, 24 nt, Artificial Sequence
  source: /note="Description of Artificial Sequence: Synthetic oligonucleotide"
  source: /note="Antisense Oligonucleotide"
  source: /note="5' tri-ethylene glycol (TEG)"
aacaucaaggaagauggcauuucu

SEQ ID NO: 739 - RNA, 23 nt, Artificial Sequence
  source: /note="Description of Artificial Sequence: Synthetic oligonucleotide"
  source: /note="Antisense Oligonucleotide"
  source: /note="5' tri-ethylene glycol (TEG)"
aacaucaaggaagauggcauuuc

SEQ ID NO: 740 - RNA, 22 nt, Artificial Sequence
  source: /note="Description of Artificial Sequence: Synthetic oligonucleotide"
  source: /note="Antisense Oligonucleotide"
  source: /note="5' tri-ethylene glycol (TEG)"
aacaucaaggaagauggcauuu

SEQ ID NO: 741 - RNA, 21 nt, Artificial Sequence
  source: /note="Description of Artificial Sequence: Synthetic oligonucleotide"
  source: /note="Antisense Oligonucleotide"
  source: /note="5' tri-ethylene glycol (TEG)"
aacaucaaggaagauggcauu

SEQ ID NO: 742 - RNA, 20 nt, Artificial Sequence
  source: /note="Description of Artificial Sequence: Synthetic oligonucleotide"
  source: /note="Antisense Oligonucleotide"
  source: /note="5' tri-ethylene glycol (TEG)"
aacaucaaggaagauggcau

SEQ ID NO: 743 - RNA, 19 nt, Artificial Sequence
  source: /note="Description of Artificial Sequence: Synthetic oligonucleotide"
  source: /note="Antisense Oligonucleotide"
  source: /note="5' tri-ethylene glycol (TEG)"
aacaucaaggaagauggca

SEQ ID NO: 744 - RNA, 18 nt, Artificial Sequence
  source: /note="Description of Artificial Sequence: Synthetic oligonucleotide"
  source: /note="Antisense Oligonucleotide"
  source: /note="5' tri-ethylene glycol (TEG)"
aacaucaaggaagauggc

SEQ ID NO: 745 - RNA, 17 nt, Artificial Sequence
  source: /note="Description of Artificial Sequence: Synthetic oligonucleotide"
  source: /note="Antisense Oligonucleotide"
  source: /note="5' tri-ethylene glycol (TEG)"
aacaucaaggaagaugg

SEQ ID NO: 746 - RNA, 16 nt, Artificial Sequence
  source: /note="Description of Artificial Sequence: Synthetic oligonucleotide"
  source: /note="Antisense Oligonucleotide"
  source: /note="5' tri-ethylene glycol (TEG)"
aacaucaaggaagaug

SEQ ID NO: 747 - RNA, 15 nt, Artificial Sequence
  source: /note="Description of Artificial Sequence: Synthetic oligonucleotide"
  source: /note="Antisense Oligonucleotide"
  source: /note="5' tri-ethylene glycol (TEG)"
aacaucaaggaagau

SEQ ID NO: 748 - RNA, 14 nt, Artificial Sequence
  source: /note="Description of Artificial Sequence: Synthetic oligonucleotide"
  source: /note="Antisense Oligonucleotide"
  source: /note="5' tri-ethylene glycol (TEG)"
aacaucaaggaaga

SEQ ID NO: 749 - RNA, 13 nt, Artificial Sequence
  source: /note="Description of Artificial Sequence: Synthetic oligonucleotide"
  source: /note="Antisense Oligonucleotide"
  source: /note="5' tri-ethylene glycol (TEG)"
aacaucaaggaag

SEQ ID NO: 750 - RNA, 25 nt, Artificial Sequence
  source: /note="Description of Artificial Sequence: Synthetic oligonucleotide"
  source: /note="Antisense Oligonucleotide"
  source: /note="5' tri-ethylene glycol (TEG)"
acaucaaggaagauggcauuucuag

SEQ ID NO: 751 - RNA, 24 nt, Artificial Sequence
  source: /note="Description of Artificial Sequence: Synthetic oligonucleotide"
  source: /note="Antisense Oligonucleotide"
  source: /note="5' tri-ethylene glycol (TEG)"
acaucaaggaagauggcauuucua

SEQ ID NO: 752 - RNA, 23 nt, Artificial Sequence
  source: /note="Description of Artificial Sequence: Synthetic oligonucleotide"
  source: /note="Antisense Oligonucleotide"
  source: /note="5' tri-ethylene glycol (TEG)"
acaucaaggaagauggcauuucu

SEQ ID NO: 753 - RNA, 22 nt, Artificial Sequence
  source: /note="Description of Artificial Sequence: Synthetic oligonucleotide"
  source: /note="Antisense Oligonucleotide"
  source: /note="5' tri-ethylene glycol (TEG)"
acaucaaggaagauggcauuuc

SEQ ID NO: 754 - RNA, 21 nt, Artificial Sequence
  source: /note="Description of Artificial Sequence: Synthetic oligonucleotide"
  source: /note="Antisense Oligonucleotide"
  source: /note="5' tri-ethylene glycol (TEG)"
acaucaaggaagauggcauuu

SEQ ID NO: 755 - RNA, 20 nt, Artificial Sequence
  source: /note="Description of Artificial Sequence: Synthetic oligonucleotide"
  source: /note="Antisense Oligonucleotide"
  source: /note="5' tri-ethylene glycol (TEG)"
acaucaaggaagauggcauu

SEQ ID NO: 756 - RNA, 19 nt, Artificial Sequence
  source: /note="Description of Artificial Sequence: Synthetic oligonucleotide"
  source: /note="Antisense Oligonucleotide"
  source: /note="5' tri-ethylene glycol (TEG)"
acaucaaggaagauggcau

SEQ ID NO: 757 - RNA, 18 nt, Artificial Sequence
  source: /note="Description of Artificial Sequence: Synthetic oligonucleotide"
  source: /note="Antisense Oligonucleotide"
  source: /note="5' tri-ethylene glycol (TEG)"
acaucaaggaagauggca

SEQ ID NO: 758 - RNA, 17 nt, Artificial Sequence
  source: /note="Description of Artificial Sequence: Synthetic oligonucleotide"
  source: /note="Antisense Oligonucleotide"
  source: /note="5' tri-ethylene glycol (TEG)"
acaucaaggaagauggc

SEQ ID NO: 759 - RNA, 16 nt, Artificial Sequence
  source: /note="Description of Artificial Sequence: Synthetic oligonucleotide"
  source: /note="Antisense Oligonucleotide"
  source: /note="5' tri-ethylene glycol (TEG)"
acaucaaggaagaugg

SEQ ID NO: 760 - RNA, 15 nt, Artificial Sequence
  source: /note="Description of Artificial Sequence: Synthetic oligonucleotide"
  source: /note="Antisense Oligonucleotide"
  source: /note="5' tri-ethylene glycol (TEG)"
acaucaaggaagaug

SEQ ID NO: 761 - RNA, 14 nt, Artificial Sequence
  source: /note="Description of Artificial Sequence: Synthetic oligonucleotide"
  source: /note="Antisense Oligonucleotide"
  source: /note="5' tri-ethylene glycol (TEG)"
acaucaaggaagau

SEQ ID NO: 762 - RNA, 13 nt, Artificial Sequence
  source: /note="Description of Artificial Sequence: Synthetic oligonucleotide"
  source: /note="Antisense Oligonucleotide"
  source: /note="5' tri-ethylene glycol (TEG)"
acaucaaggaaga

SEQ ID NO: 763 - RNA, 12 nt, Artificial Sequence
  source: /note="Description of Artificial Sequence: Synthetic oligonucleotide"
  source: /note="Antisense Oligonucleotide"
  source: /note="5' tri-ethylene glycol (TEG)"
acaucaaggaag

SEQ ID NO: 764 - RNA, 24 nt, Artificial Sequence
  source: /note="Description of Artificial Sequence: Synthetic oligonucleotide"
  source: /note="Antisense Oligonucleotide"
  source: /note="5' tri-ethylene glycol (TEG)"
caucaaggaagauggcauuucuag

SEQ ID NO: 765 - RNA, 23 nt, Artificial Sequence
  source: /note="Description of Artificial Sequence: Synthetic oligonucleotide"
  source: /note="Antisense Oligonucleotide"
  source: /note="5' tri-ethylene glycol (TEG)"
caucaaggaagauggcauuucua

SEQ ID NO: 766 - RNA, 22 nt, Artificial Sequence
  source: /note="Description of Artificial Sequence: Synthetic oligonucleotide"
  source: /note="Antisense Oligonucleotide"
  source: /note="5' tri-ethylene glycol (TEG)"
caucaaggaagauggcauuucu

SEQ ID NO: 767 - RNA, 21 nt, Artificial Sequence
  source: /note="Description of Artificial Sequence: Synthetic oligonucleotide"
  source: /note="Antisense Oligonucleotide"
  source: /note="5' tri-ethylene glycol (TEG)"
caucaaggaagauggcauuuc

SEQ ID NO: 768 - RNA, 20 nt, Artificial Sequence
  source: /note="Description of Artificial Sequence: Synthetic oligonucleotide"
  source: /note="Antisense Oligonucleotide"
  source: /note="5' tri-ethylene glycol (TEG)"
caucaaggaagauggcauuu

SEQ ID NO: 769 - RNA, 19 nt, Artificial Sequence
  source: /note="Description of Artificial Sequence: Synthetic oligonucleotide"
  source: /note="Antisense Oligonucleotide"
  source: /note="5' tri-ethylene glycol (TEG)"
caucaaggaagauggcauu

SEQ ID NO: 770 - RNA, 18 nt, Artificial Sequence
  source: /note="Description of Artificial Sequence: Synthetic oligonucleotide"
  source: /note="Antisense Oligonucleotide"
  source: /note="5' tri-ethylene glycol (TEG)"
caucaaggaagauggcau

SEQ ID NO: 771 - RNA, 17 nt, Artificial Sequence
  source: /note="Description of Artificial Sequence: Synthetic oligonucleotide"
  source: /note="Antisense Oligonucleotide"
  source: /note="5' tri-ethylene glycol (TEG)"
caucaaggaagauggca

SEQ ID NO: 772 - RNA, 16 nt, Artificial Sequence
  source: /note="Description of Artificial Sequence: Synthetic oligonucleotide"
  source: /note="Antisense Oligonucleotide"
  source: /note="5' tri-ethylene glycol (TEG)"
caucaaggaagauggc

SEQ ID NO: 773 - RNA, 15 nt, Artificial Sequence
  source: /note="Description of Artificial Sequence: Synthetic oligonucleotide"
  source: /note="Antisense Oligonucleotide"
  source: /note="5' tri-ethylene glycol (TEG)"
caucaaggaagaugg

SEQ ID NO: 774 - RNA, 14 nt, Artificial Sequence
  source: /note="Description of Artificial Sequence: Synthetic oligonucleotide"
  source: /note="Antisense Oligonucleotide"
  source: /note="5' tri-ethylene glycol (TEG)"
caucaaggaagaug

SEQ ID NO: 775 - RNA, 13 nt, Artificial Sequence
  source: /note="Description of Artificial Sequence: Synthetic oligonucleotide"
  source: /note="Antisense Oligonucleotide"
  source: /note="5' tri-ethylene glycol (TEG)"
caucaaggaagau

SEQ ID NO: 776 - RNA, 12 nt, Artificial Sequence
  source: /note="Description of Artificial Sequence: Synthetic oligonucleotide"
  source: /note="Antisense Oligonucleotide"
  source: /note="5' tri-ethylene glycol (TEG)"
caucaaggaaga

SEQ ID NO: 777 - RNA, 11 nt, Artificial Sequence
  source: /note="Description of Artificial Sequence: Synthetic oligonucleotide"
  source: /note="Antisense Oligonucleotide"
  source: /note="5' tri-ethylene glycol (TEG)"
caucaaggaag

SEQ ID NO: 778 - RNA, 23 nt, Artificial Sequence
  source: /note="Description of Artificial Sequence: Synthetic oligonucleotide"
  source: /note="Antisense Oligonucleotide"
  source: /note="5' tri-ethylene glycol (TEG)"
aucaaggaagauggcauuucuag

SEQ ID NO: 779 - RNA, 22 nt, Artificial Sequence
  source: /note="Description of Artificial Sequence: Synthetic oligonucleotide"
  source: /note="Antisense Oligonucleotide"
  source: /note="5' tri-ethylene glycol (TEG)"
aucaaggaagauggcauuucua

SEQ ID NO: 780 - RNA, 21 nt, Artificial Sequence
  source: /note="Description of Artificial Sequence: Synthetic oligonucleotide"
  source: /note="Antisense Oligonucleotide"
  source: /note="5' tri-ethylene glycol (TEG)"
aucaaggaagauggcauuucu

SEQ ID NO: 781 - RNA, 20 nt, Artificial Sequence
  source: /note="Description of Artificial Sequence: Synthetic oligonucleotide"
  source: /note="Antisense Oligonucleotide"
  source: /note="5' tri-ethylene glycol (TEG)"
aucaaggaagauggcauuuc

SEQ ID NO: 782 - RNA, 19 nt, Artificial Sequence
  source: /note="Description of Artificial Sequence: Synthetic oligonucleotide"
  source: /note="Antisense Oligonucleotide"
  source: /note="5' tri-ethylene glycol (TEG)"
aucaaggaagauggcauuu

SEQ ID NO: 783 - RNA, 18 nt, Artificial Sequence
  source: /note="Description of Artificial Sequence: Synthetic oligonucleotide"
  source: /note="Antisense Oligonucleotide"
  source: /note="5' tri-ethylene glycol (TEG)"
aucaaggaagauggcauu

SEQ ID NO: 784 - RNA, 17 nt, Artificial Sequence
  source: /note="Description of Artificial Sequence: Synthetic oligonucleotide"
  source: /note="Antisense Oligonucleotide"
  source: /note="5' tri-ethylene glycol (TEG)"
aucaaggaagauggcau

SEQ ID NO: 785 - RNA, 16 nt, Artificial Sequence
  source: /note="Description of Artificial Sequence: Synthetic oligonucleotide"
  source: /note="Antisense Oligonucleotide"
  source: /note="5' tri-ethylene glycol (TEG)"
aucaaggaagauggca

SEQ ID NO: 786 - RNA, 15 nt, Artificial Sequence
  source: /note="Description of Artificial Sequence: Synthetic oligonucleotide"
  source: /note="Antisense Oligonucleotide"
  source: /note="5' tri-ethylene glycol (TEG)"
aucaaggaagauggc

SEQ ID NO: 787 - RNA, 14 nt, Artificial Sequence
  source: /note="Description of Artificial Sequence: Synthetic oligonucleotide"
  source: /note="Antisense Oligonucleotide"
  source: /note="5' tri-ethylene glycol (TEG)"
aucaaggaagaugg

SEQ ID NO: 788 - RNA, 13 nt, Artificial Sequence
  source: /note="Description of Artificial Sequence: Synthetic oligonucleotide"
  source: /note="Antisense Oligonucleotide"
  source: /note="5' tri-ethylene glycol (TEG)"
aucaaggaagaug

SEQ ID NO: 789 - RNA, 12 nt, Artificial Sequence
  source: /note="Description of Artificial Sequence: Synthetic oligonucleotide"
  source: /note="Antisense Oligonucleotide"
  source: /note="5' tri-ethylene glycol (TEG)"
aucaaggaagau

SEQ ID NO: 790 - RNA, 11 nt, Artificial Sequence
  source: /note="Description of Artificial Sequence: Synthetic oligonucleotide"
  source: /note="Antisense Oligonucleotide"
  source: /note="5' tri-ethylene glycol (TEG)"
aucaaggaaga

SEQ ID NO: 791 - RNA, 10 nt, Artificial Sequence
  source: /note="Description of Artificial Sequence: Synthetic oligonucleotide"
  source: /note="Antisense Oligonucleotide"
  source: /note="5' tri-ethylene glycol (TEG)"
aucaaggaag

SEQ ID NO: 792 - RNA, 23 nt, Artificial Sequence
  source: /note="Description of Artificial Sequence: Synthetic oligonucleotide"
  source: /note="Antisense Oligonucleotide"
  source: /note="5' tri-ethylene glycol (TEG)"
ccagagcagguaccuccaacauc

SEQ ID NO: 793 - RNA, 18 nt, Artificial Sequence
  source: /note="Description of Artificial Sequence: Synthetic oligonucleotide"
  source: /note="Antisense Oligonucleotide"
  source: /note="5' tri-ethylene glycol (TEG)"
ccagagcagguaccucca

SEQ ID NO: 794 - RNA, 23 nt, Artificial Sequence
  source: /note="Description of Artificial Sequence: Synthetic oligonucleotide"
  source: /note="Antisense Oligonucleotide"
  source: /note="5' tri-ethylene glycol (TEG)"
ccucugugauuuuauaacuugau

SEQ ID NO: 795 - RNA, 17 nt, Artificial Sequence
  source: /note="Description of Artificial Sequence: Synthetic oligonucleotide"
  source: /note="Antisense Oligonucleotide"
  source: /note="5' tri-ethylene glycol (TEG)"
ucacccaccaucacccu

SEQ ID NO: 796 - RNA, 20 nt, Artificial Sequence
  source: /note="Description of Artificial Sequence: Synthetic oligonucleotide"
  source: /note="Antisense Oligonucleotide"
  source: /note="5' tri-ethylene glycol (TEG)"
ugauauccucaaggucaccc

SEQ ID NO: 797 - RNA, 22 nt, Artificial Sequence
  source: /note="Description of Artificial Sequence: Synthetic oligonucleotide"
  source: /note="Antisense Oligonucleotide"
  source: /note="5' tri-ethylene glycol (TEG)"
cugcuugaugaucaucucguug

SEQ ID NO: 798 - RNA, 18 nt, Artificial Sequence
  source: /note="Description of Artificial Sequence: Synthetic oligonucleotide"
  source: /note="Antisense Oligonucleotide"
  source: /note="5' tri-ethylene glycol (TEG)"
cugcuugaugaucaucuc

SEQ ID NO: 799 - RNA, 19 nt, Artificial Sequence
  source: /note="Description of Artificial Sequence: Synthetic oligonucleotide"
  source: /note="Antisense Oligonucleotide"
  source: /note="5' tri-ethylene glycol (TEG)"
guuuccuuaguaaccacag

SEQ ID NO: 800 - RNA, 17 nt, Artificial Sequence
  source: /note="Description of Artificial Sequence: Synthetic oligonucleotide"
  source: /note="Antisense Oligonucleotide"
  source: /note="5' tri-ethylene glycol (TEG)"
guuuccuuaguaaccac

SEQ ID NO: 801 - RNA, 20 nt, Artificial Sequence
  source: /note="Description of Artificial Sequence: Synthetic oligonucleotide"
  source: /note="Antisense Oligonucleotide"
  source: /note="3' tri-ethylene glycol (TEG)"
ucaaggaagauggcauuucu

SEQ ID NO: 802 - RNA, 22 nt, Artificial Sequence
  source: /note="Description of Artificial Sequence: Synthetic oligonucleotide"
  source: /note="Antisense Oligonucleotide"
  source: /note="3' tri-ethylene glycol (TEG)"
ucaaggaagauggcauuucuag

SEQ ID NO: 803 - RNA, 18 nt, Artificial Sequence
  source: /note="Description of Artificial Sequence: Synthetic oligonucleotide"
  source: /note="Antisense Oligonucleotide"
  source: /note="3' tri-ethylene glycol (TEG)"
gguaaguucuguccaagc

SEQ ID NO: 804 - RNA, 18 nt, Artificial Sequence
  source: /note="Description of Artificial Sequence: Synthetic oligonucleotide"
  source: /note="Antisense Oligonucleotide"
  source: /note="3' tri-ethylene glycol (TEG)"
guaaguucuguccaagcc

SEQ ID NO: 805 - RNA, 18 nt, Artificial Sequence
  source: /note="Description of Artificial Sequence: Synthetic oligonucleotide"
  source: /note="Antisense Oligonucleotide"
  source: /note="3' tri-ethylene glycol (TEG)"
agucgguaaguucugucc

SEQ ID NO: 806 - RNA, 18 nt, Artificial Sequence
  source: /note="Description of Artificial Sequence: Synthetic oligonucleotide"
  source: /note="Antisense Oligonucleotide"
  source: /note="3' tri-ethylene glycol (TEG)"
cuguccaagcccgguuga

SEQ ID NO: 807 - RNA, 15 nt, Artificial Sequence
  source: /note="Description of Artificial Sequence: Synthetic oligonucleotide"
  source: /note="Antisense Oligonucleotide"
  source: /note="3' tri-ethylene glycol (TEG)"
uaaguucuguccaag

SEQ ID NO: 808 - RNA, 20 nt, Artificial Sequence
  source: /note="Description of Artificial Sequence: Synthetic oligonucleotide"
  source: /note="Antisense Oligonucleotide"
  source: /note="3' tri-ethylene glycol (TEG)"
uucuguccaagcccgguuga

SEQ ID NO: 809 - RNA, 19 nt, Artificial Sequence
  source: /note="Description of Artificial Sequence: Synthetic oligonucleotide"
  source: /note="Antisense Oligonucleotide"
  source: /note="3' tri-ethylene glycol (TEG)"
uucuguccaagcccgguug

SEQ ID NO: 810 - RNA, 18 nt, Artificial Sequence
  source: /note="Description of Artificial Sequence: Synthetic oligonucleotide"
  source: /note="Antisense Oligonucleotide"
  source: /note="3' tri-ethylene glycol (TEG)"
uucuguccaagcccgguu

SEQ ID NO: 811 - RNA, 17 nt, Artificial Sequence
  source: /note="Description of Artificial Sequence: Synthetic oligonucleotide"
  source: /note="Antisense Oligonucleotide"
  source: /note="3' tri-ethylene glycol (TEG)"
uucuguccaagcccggu

SEQ ID NO: 812 - RNA, 16 nt, Artificial Sequence
  source: /note="Description of Artificial Sequence: Synthetic oligonucleotide"
  source: /note="Antisense Oligonucleotide"
  source: /note="3' tri-ethylene glycol (TEG)"
uucuguccaagcccgg

SEQ ID NO: 813 - RNA, 15 nt, Artificial Sequence
  source: /note="Description of Artificial Sequence: Synthetic oligonucleotide"
  source: /note="Antisense Oligonucleotide"
  source: /note="3' tri-ethylene glycol (TEG)"
uucuguccaagcccg

SEQ ID NO: 814 - RNA, 14 nt, Artificial Sequence
  source: /note="Description of Artificial Sequence: Synthetic oligonucleotide"
  source: /note="Antisense Oligonucleotide"
  source: /note="3' tri-ethylene glycol (TEG)"
uucuguccaagccc

SEQ ID NO: 815 - RNA, 13 nt, Artificial Sequence
  source: /note="Description of Artificial Sequence: Synthetic oligonucleotide"
  source: /note="Antisense Oligonucleotide"
  source: /note="3' tri-ethylene glycol (TEG)"
uucuguccaagcc

SEQ ID NO: 816 - RNA, 12 nt, Artificial Sequence
  source: /note="Description of Artificial Sequence: Synthetic oligonucleotide"
  source: /note="Antisense Oligonucleotide"
  source: /note="3' tri-ethylene glycol (TEG)"
uucuguccaagc

SEQ ID NO: 817 - RNA, 11 nt, Artificial Sequence
  source: /note="Description of Artificial Sequence: Synthetic oligonucleotide"
  source: /note="Antisense Oligonucleotide"
  source: /note="3' tri-ethylene glycol (TEG)"
uucuguccaag

SEQ ID NO: 818 - RNA, 10 nt, Artificial Sequence
  source: /note="Description of Artificial Sequence: Synthetic oligonucleotide"
  source: /note="Antisense Oligonucleotide"
  source: /note="3' tri-ethylene glycol (TEG)"
uucuguccaa

SEQ ID NO: 819 - RNA, 9 nt, Artificial Sequence
  source: /note="Description of Artificial Sequence: Synthetic oligonucleotide"
  source: /note="Antisense Oligonucleotide"
  source: /note="3' tri-ethylene glycol (TEG)"
uucugucca

SEQ ID NO: 820 - RNA, 8 nt, Artificial Sequence
  source: /note="Description of Artificial Sequence: Synthetic oligonucleotide"
  source: /note="Antisense Oligonucleotide"
  source: /note="3' tri-ethylene glycol (TEG)"
uucugucc

SEQ ID NO: 821 - RNA, 19 nt, Artificial Sequence
  source: /note="Description of Artificial Sequence: Synthetic oligonucleotide"
  source: /note="Antisense Oligonucleotide"
  source: /note="3' tri-ethylene glycol (TEG)"
ucuguccaagcccgguuga

SEQ ID NO: 822 - RNA, 18 nt, Artificial Sequence
  source: /note="Description of Artificial Sequence: Synthetic oligonucleotide"
  source: /note="Antisense Oligonucleotide"
  source: /note="3' tri-ethylene glycol (TEG)"
ucuguccaagcccgguug

SEQ ID NO: 823 - RNA, 17 nt, Artificial Sequence
  source: /note="Description of Artificial Sequence: Synthetic oligonucleotide"
  source: /note="Antisense Oligonucleotide"
  source: /note="3' tri-ethylene glycol (TEG)"
ucuguccaagcccgguu

SEQ ID NO: 824 - RNA, 16 nt, Artificial Sequence
  source: /note="Description of Artificial Sequence: Synthetic oligonucleotide"
  source: /note="Antisense Oligonucleotide"
  source: /note="3' tri-ethylene glycol (TEG)"
ucuguccaagcccggu

SEQ ID NO: 825 - RNA, 15 nt, Artificial Sequence
  source: /note="Description of Artificial Sequence: Synthetic oligonucleotide"
  source: /note="Antisense Oligonucleotide"
  source: /note="3' tri-ethylene glycol (TEG)"
ucuguccaagcccgg

SEQ ID NO: 826 - RNA, 14 nt, Artificial Sequence
  source: /note="Description of Artificial Sequence: Synthetic oligonucleotide"
  source: /note="Antisense Oligonucleotide"
  source: /note="3' tri-ethylene glycol (TEG)"
ucuguccaagcccg

SEQ ID NO: 827 - RNA, 13 nt, Artificial Sequence
  source: /note="Description of Artificial Sequence: Synthetic oligonucleotide"
  source: /note="Antisense Oligonucleotide"
  source: /note="3' tri-ethylene glycol (TEG)"
ucuguccaagccc

SEQ ID NO: 828 - RNA, 12 nt, Artificial Sequence
  source: /note="Description of Artificial Sequence: Synthetic oligonucleotide"
  source: /note="Antisense Oligonucleotide"
  source: /note="3' tri-ethylene glycol (TEG)"
ucuguccaagcc

SEQ ID NO: 829 - RNA, 11 nt, Artificial Sequence
  source: /note="Description of Artificial Sequence: Synthetic oligonucleotide"
  source: /note="Antisense Oligonucleotide"
  source: /note="3' tri-ethylene glycol (TEG)"
ucuguccaagc

SEQ ID NO: 830 - RNA, 10 nt, Artificial Sequence
  source: /note="Description of Artificial Sequence: Synthetic oligonucleotide"
  source: /note="Antisense Oligonucleotide"
  source: /note="3' tri-ethylene glycol (TEG)"
ucuguccaag

SEQ ID NO: 831 - RNA, 9 nt, Artificial Sequence
  source: /note="Description of Artificial Sequence: Synthetic oligonucleotide"
  source: /note="Antisense Oligonucleotide"
  source: /note="3' tri-ethylene glycol (TEG)"
ucuguccaa

SEQ ID NO: 832 - RNA, 8 nt, Artificial Sequence
  source: /note="Description of Artificial Sequence: Synthetic oligonucleotide"
  source: /note="Antisense Oligonucleotide"
  source: /note="3' tri-ethylene glycol (TEG)"
ucugucca

SEQ ID NO: 833 - RNA, 17 nt, Artificial Sequence
  source: /note="Description of Artificial Sequence: Synthetic oligonucleotide"
  source: /note="Antisense Oligonucleotide"
  source: /note="3' tri-ethylene glycol (TEG)"
cuguccaagcccgguug

SEQ ID NO: 834 - RNA, 16 nt, Artificial Sequence
  source: /note="Description of Artificial Sequence: Synthetic oligonucleotide"
  source: /note="Antisense Oligonucleotide"
  source: /note="3' tri-ethylene glycol (TEG)"
cuguccaagcccgguu

SEQ ID NO: 835 - RNA, 15 nt, Artificial Sequence
  source: /note="Description of Artificial Sequence: Synthetic oligonucleotide"
  source: /note="Antisense Oligonucleotide"
  source: /note="3' tri-ethylene glycol (TEG)"
cuguccaagcccggu

SEQ ID NO: 836 - RNA, 14 nt, Artificial Sequence
  source: /note="Description of Artificial Sequence: Synthetic oligonucleotide"
  source: /note="Antisense Oligonucleotide"
  source: /note="3' tri-ethylene glycol (TEG)"
cuguccaagcccgg

SEQ ID NO: 837 - RNA, 13 nt, Artificial Sequence
  source: /note="Description of Artificial Sequence: Synthetic oligonucleotide"
  source: /note="Antisense Oligonucleotide"
  source: /note="3' tri-ethylene glycol (TEG)"
cuguccaagcccg

SEQ ID NO: 838 - RNA, 12 nt, Artificial Sequence
  source: /note="Description of Artificial Sequence: Synthetic oligonucleotide"
  source: /note="Antisense Oligonucleotide"
  source: /note="3' tri-ethylene glycol (TEG)"
cuguccaagccc

SEQ ID NO: 839 - RNA, 11 nt, Artificial Sequence
  source: /note="Description of Artificial Sequence: Synthetic oligonucleotide"
  source: /note="Antisense Oligonucleotide"
  source: /note="3' tri-ethylene glycol (TEG)"
cuguccaagcc

SEQ ID NO: 840 - RNA, 10 nt, Artificial Sequence
  source: /note="Description of Artificial Sequence: Synthetic oligonucleotide"
  source: /note="Antisense Oligonucleotide"
  source: /note="3' tri-ethylene glycol (TEG)"
cuguccaagc

SEQ ID NO: 841 - RNA, 9 nt, Artificial Sequence
  source: /note="Description of Artificial Sequence: Synthetic oligonucleotide"
  source: /note="Antisense Oligonucleotide"
  source: /note="3' tri-ethylene glycol (TEG)"
cuguccaag

SEQ ID NO: 842 - RNA, 8 nt, Artificial Sequence
  source: /note="Description of Artificial Sequence: Synthetic oligonucleotide"
  source: /note="Antisense Oligonucleotide"
  source: /note="3' tri-ethylene glycol (TEG)"
cuguccaa

SEQ ID NO: 843 - RNA, 20 nt, Artificial Sequence
  source: /note="Description of Artificial Sequence: Synthetic oligonucleotide"
  source: /note="Antisense Oligonucleotide"
  source: /note="3' tri-ethylene glycol (TEG)"
guucuguccaagcccgguug

SEQ ID NO: 844 - RNA, 19 nt, Artificial Sequence
  source: /note="Description of Artificial Sequence: Synthetic oligonucleotide"
  source: /note="Antisense Oligonucleotide"
  source: /note="3' tri-ethylene glycol (TEG)"
guucuguccaagcccgguu

SEQ ID NO: 845 - RNA, 18 nt, Artificial Sequence
  source: /note="Description of Artificial Sequence: Synthetic oligonucleotide"
  source: /note="Antisense Oligonucleotide"
  source: /note="3' tri-ethylene glycol (TEG)"
guucuguccaagcccggu

SEQ ID NO: 846 - RNA, 17 nt, Artificial Sequence
  source: /note="Description of Artificial Sequence: Synthetic oligonucleotide"
  source: /note="Antisense Oligonucleotide"
  source: /note="3' tri-ethylene glycol (TEG)"
guucuguccaagcccgg

SEQ ID NO: 847 - RNA, 16 nt, Artificial Sequence
  source: /note="Description of Artificial Sequence: Synthetic oligonucleotide"
  source: /note="Antisense Oligonucleotide"
  source: /note="3' tri-ethylene glycol (TEG)"
guucuguccaagcccg

SEQ ID NO: 848 - RNA, 15 nt, Artificial Sequence
  source: /note="Description of Artificial Sequence: Synthetic oligonucleotide"
  source: /note="Antisense Oligonucleotide"
  source: /note="3' tri-ethylene glycol (TEG)"
guucuguccaagccc

SEQ ID NO: 849 - RNA, 14 nt, Artificial Sequence
  source: /note="Description of Artificial Sequence: Synthetic oligonucleotide"
  source: /note="Antisense Oligonucleotide"
  source: /note="3' tri-ethylene glycol (TEG)"
guucuguccaagcc

SEQ ID NO: 850 - RNA, 13 nt, Artificial Sequence
  source: /note="Description of Artificial Sequence: Synthetic oligonucleotide"
  source: /note="Antisense Oligonucleotide"
  source: /note="3' tri-ethylene glycol (TEG)"
guucuguccaagc

SEQ ID NO: 851 - RNA, 12 nt, Artificial Sequence
  source: /note="Description of Artificial Sequence: Synthetic oligonucleotide"
  source: /note="Antisense Oligonucleotide"
  source: /note="3' tri-ethylene glycol (TEG)"
guucuguccaag

SEQ ID NO: 852 - RNA, 11 nt, Artificial Sequence
  source: /note="Description of Artificial Sequence: Synthetic oligonucleotide"
  source: /note="Antisense Oligonucleotide"
  source: /note="3' tri-ethylene glycol (TEG)"
guucuguccaa

SEQ ID NO: 853 - RNA, 10 nt, Artificial Sequence
  source: /note="Description of Artificial Sequence: Synthetic oligonucleotide"
  source: /note="Antisense Oligonucleotide"
  source: /note="3' tri-ethylene glycol (TEG)"
guucugucca

SEQ ID NO: 854 - RNA, 9 nt, Artificial Sequence
  source: /note="Description of Artificial Sequence: Synthetic oligonucleotide"
  source: /note="Antisense Oligonucleotide"
  source: /note="3' tri-ethylene glycol (TEG)"
guucugucc

SEQ ID NO: 855 - RNA, 8 nt, Artificial Sequence
  source: /note="Description of Artificial Sequence: Synthetic oligonucleotide"
  source: /note="Antisense Oligonucleotide"
  source: /note="3' tri-ethylene glycol (TEG)"
guucuguc

SEQ ID NO: 856 - RNA, 20 nt, Artificial Sequence
  source: /note="Description of Artificial Sequence: Synthetic oligonucleotide"
  source: /note="Antisense Oligonucleotide"
  source: /note="3' tri-ethylene glycol (TEG)"
aguucuguccaagcccgguu

SEQ ID NO: 857 - RNA, 19 nt, Artificial Sequence
  source: /note="Description of Artificial Sequence: Synthetic oligonucleotide"
  source: /note="Antisense Oligonucleotide"
  source: /note="3' tri-ethylene glycol (TEG)"
aguucuguccaagcccggu

SEQ ID NO: 858 - RNA, 18 nt, Artificial Sequence
  source: /note="Description of Artificial Sequence: Synthetic oligonucleotide"
  source: /note="Antisense Oligonucleotide"
  source: /note="3' tri-ethylene glycol (TEG)"
aguucuguccaagcccgg

SEQ ID NO: 859 - RNA, 17 nt, Artificial Sequence
  source: /note="Description of Artificial Sequence: Synthetic oligonucleotide"
  source: /note="Antisense Oligonucleotide"
  source: /note="3' tri-ethylene glycol (TEG)"
aguucuguccaagcccg

SEQ ID NO: 860 - RNA, 16 nt, Artificial Sequence
  source: /note="Description of Artificial Sequence: Synthetic oligonucleotide"
  source: /note="Antisense Oligonucleotide"
  source: /note="3' tri-ethylene glycol (TEG)"
aguucuguccaagccc

SEQ ID NO: 861 - RNA, 15 nt, Artificial Sequence
  source: /note="Description of Artificial Sequence: Synthetic oligonucleotide"
  source: /note="Antisense Oligonucleotide"
  source: /note="3' tri-ethylene glycol (TEG)"
aguucuguccaagcc

SEQ ID NO: 862 - RNA, 14 nt, Artificial Sequence
  source: /note="Description of Artificial Sequence: Synthetic oligonucleotide"
  source: /note="Antisense Oligonucleotide"
  source: /note="3' tri-ethylene glycol (TEG)"
aguucuguccaagc

SEQ ID NO: 863 - RNA, 13 nt, Artificial Sequence
  source: /note="Description of Artificial Sequence: Synthetic oligonucleotide"
  source: /note="Antisense Oligonucleotide"
  source: /note="3' tri-ethylene glycol (TEG)"
aguucuguccaag

SEQ ID NO: 864 - RNA, 12 nt, Artificial Sequence
  source: /note="Description of Artificial Sequence: Synthetic oligonucleotide"
  source: /note="Antisense Oligonucleotide"
  source: /note="3' tri-ethylene glycol (TEG)"
aguucuguccaa

SEQ ID NO: 865 - RNA, 11 nt, Artificial Sequence
  source: /note="Description of Artificial Sequence: Synthetic oligonucleotide"
  source: /note="Antisense Oligonucleotide"
  source: /note="3' tri-ethylene glycol (TEG)"
aguucugucca

SEQ ID NO: 866 - RNA, 10 nt, Artificial Sequence
  source: /note="Description of Artificial Sequence: Synthetic oligonucleotide"
  source: /note="Antisense Oligonucleotide"
  source: /note="3' tri-ethylene glycol (TEG)"
aguucugucc

SEQ ID NO: 867 - RNA, 9 nt, Artificial Sequence
  source: /note="Description of Artificial Sequence: Synthetic oligonucleotide"
  source: /note="Antisense Oligonucleotide"
  source: /note="3' tri-ethylene glycol (TEG)"
aguucuguc

SEQ ID NO: 868 - RNA, 8 nt, Artificial Sequence
  source: /note="Description of Artificial Sequence: Synthetic oligonucleotide"
  source: /note="Antisense Oligonucleotide"
  source: /note="3' tri-ethylene glycol (TEG)"
aguucugu

SEQ ID NO: 869 - RNA, 20 nt, Artificial Sequence
  source: /note="Description of Artificial Sequence: Synthetic oligonucleotide"
  source: /note="Antisense Oligonucleotide"
  source: /note="3' tri-ethylene glycol (TEG)"
aaguucuguccaagcccggu

SEQ ID NO: 870 - RNA, 19 nt, Artificial Sequence
  source: /note="Description of Artificial Sequence: Synthetic oligonucleotide"
  source: /note="Antisense Oligonucleotide"
  source: /note="3' tri-ethylene glycol (TEG)"
aaguucuguccaagcccgg

SEQ ID NO: 871 - RNA, 18 nt, Artificial Sequence
  source: /note="Description of Artificial Sequence: Synthetic oligonucleotide"
  source: /note="Antisense Oligonucleotide"
  source: /note="3' tri-ethylene glycol (TEG)"
aaguucuguccaagcccg

SEQ ID NO: 872 - RNA, 17 nt, Artificial Sequence
  source: /note="Description of Artificial Sequence: Synthetic oligonucleotide"
  source: /note="Antisense Oligonucleotide"
  source: /note="3' tri-ethylene glycol (TEG)"
aaguucuguccaagccc

SEQ ID NO: 873 - RNA, 16 nt, Artificial Sequence
  source: /note="Description of Artificial Sequence: Synthetic oligonucleotide"
  source: /note="Antisense Oligonucleotide"
  source: /note="3' tri-ethylene glycol (TEG)"
aaguucuguccaagcc

SEQ ID NO: 874 - RNA, 15 nt, Artificial Sequence
  source: /note="Description of Artificial Sequence: Synthetic oligonucleotide"
  source: /note="Antisense Oligonucleotide"
  source: /note="3' tri-ethylene glycol (TEG)"
aaguucuguccaagc

SEQ ID NO: 875 - RNA, 14 nt, Artificial Sequence
  source: /note="Description of Artificial Sequence: Synthetic oligonucleotide"
  source: /note="Antisense Oligonucleotide"
  source: /note="3' tri-ethylene glycol (TEG)"
aaguucuguccaag

SEQ ID NO: 876 - RNA, 13 nt, Artificial Sequence
  source: /note="Description of Artificial Sequence: Synthetic oligonucleotide"
  source: /note="Antisense Oligonucleotide"
  source: /note="3' tri-ethylene glycol (TEG)"
aaguucuguccaa

SEQ ID NO: 877 - RNA, 12 nt, Artificial Sequence
  source: /note="Description of Artificial Sequence: Synthetic oligonucleotide"
  source: /note="Antisense Oligonucleotide"
  source: /note="3' tri-ethylene glycol (TEG)"
aaguucugucca

SEQ ID NO: 878 - RNA, 11 nt, Artificial Sequence
  source: /note="Description of Artificial Sequence: Synthetic oligonucleotide"
  source: /note="Antisense Oligonucleotide"
  source: /note="3' tri-ethylene glycol (TEG)"
aaguucugucc

SEQ ID NO: 879 - RNA, 10 nt, Artificial Sequence
  source: /note="Description of Artificial Sequence: Synthetic oligonucleotide"
  source: /note="Antisense Oligonucleotide"
  source: /note="3' tri-ethylene glycol (TEG)"
aaguucuguc

SEQ ID NO: 880 - RNA, 9 nt, Artificial Sequence
  source: /note="Description of Artificial Sequence: Synthetic oligonucleotide"
  source: /note="Antisense Oligonucleotide"
  source: /note="3' tri-ethylene glycol (TEG)"
aaguucugu

SEQ ID NO: 881 - RNA, 8 nt, Artificial Sequence
  source: /note="Description of Artificial Sequence: Synthetic oligonucleotide"
  source: /note="Antisense Oligonucleotide"
  source: /note="3' tri-ethylene glycol (TEG)"
aaguucug

SEQ ID NO: 882 - RNA, 20 nt, Artificial Sequence
  source: /note="Description of Artificial Sequence: Synthetic oligonucleotide"
  source: /note="Antisense Oligonucleotide"
  source: /note="3' tri-ethylene glycol (TEG)"
uaaguucuguccaagcccgg

SEQ ID NO: 883 - RNA, 19 nt, Artificial Sequence
  source: /note="Description of Artificial Sequence: Synthetic oligonucleotide"
  source: /note="Antisense Oligonucleotide"
  source: /note="3' tri-ethylene glycol (TEG)"
uaaguucuguccaagcccg

SEQ ID NO: 884 - RNA, 18 nt, Artificial Sequence
  source: /note="Description of Artificial Sequence: Synthetic oligonucleotide"
  source: /note="Antisense Oligonucleotide"
  source: /note="3' tri-ethylene glycol (TEG)"
uaaguucuguccaagccc

SEQ ID NO: 885 - RNA, 17 nt, Artificial Sequence
  source: /note="Description of Artificial Sequence: Synthetic oligonucleotide"
  source: /note="Antisense Oligonucleotide"
  source: /note="3' tri-ethylene glycol (TEG)"
uaaguucuguccaagcc

SEQ ID NO: 886 - RNA, 16 nt, Artificial Sequence
  source: /note="Description of Artificial Sequence: Synthetic oligonucleotide"
  source: /note="Antisense Oligonucleotide"
  source: /note="3' tri-ethylene glycol (TEG)"
uaaguucuguccaagc

SEQ ID NO: 887 - RNA, 14 nt, Artificial Sequence
  source: /note="Description of Artificial Sequence: Synthetic oligonucleotide"
  source: /note="Antisense Oligonucleotide"
  source: /note="3' tri-ethylene glycol (TEG)"
uaaguucuguccaa

SEQ ID NO: 888 - RNA, 13 nt, Artificial Sequence
  source: /note="Description of Artificial Sequence: Synthetic oligonucleotide"
  source: /note="Antisense Oligonucleotide"
  source: /note="3' tri-ethylene glycol (TEG)"
uaaguucugucca

SEQ ID NO: 889 - RNA, 12 nt, Artificial Sequence
  source: /note="Description of Artificial Sequence: Synthetic oligonucleotide"
  source: /note="Antisense Oligonucleotide"
  source: /note="3' tri-ethylene glycol (TEG)"
uaaguucugucc

SEQ ID NO: 890 - RNA, 11 nt, Artificial Sequence
  source: /note="Description of Artificial Sequence: Synthetic oligonucleotide"
  source: /note="Antisense Oligonucleotide"
  source: /note="3' tri-ethylene glycol (TEG)"
uaaguucuguc

SEQ ID NO: 891 - RNA, 10 nt, Artificial Sequence
  source: /note="Description of Artificial Sequence: Synthetic oligonucleotide"
  source: /note="Antisense Oligonucleotide"
  source: /note="3' tri-ethylene glycol (TEG)"
uaaguucugu

SEQ ID NO: 892 - RNA, 9 nt, Artificial Sequence
  source: /note="Description of Artificial Sequence: Synthetic oligonucleotide"
  source: /note="Antisense Oligonucleotide"
  source: /note="3' tri-ethylene glycol (TEG)"
uaaguucug

SEQ ID NO: 893 - RNA, 8 nt, Artificial Sequence
  source: /note="Description of Artificial Sequence: Synthetic oligonucleotide"
  source: /note="Antisense Oligonucleotide"
  source: /note="3' tri-ethylene glycol (TEG)"
uaaguucu

SEQ ID NO: 894 - RNA, 20 nt, Artificial Sequence
  source: /note="Description of Artificial Sequence: Synthetic oligonucleotide"
  source: /note="Antisense Oligonucleotide"
  source: /note="3' tri-ethylene glycol (TEG)"
guaaguucuguccaagcccg

SEQ ID NO: 895 - RNA, 19 nt, Artificial Sequence
  source: /note="Description of Artificial Sequence: Synthetic oligonucleotide"
  source: /note="Antisense Oligonucleotide"
  source: /note="3' tri-ethylene glycol (TEG)"
guaaguucuguccaagccc

SEQ ID NO: 896 - RNA, 17 nt, Artificial Sequence
  source: /note="Description of Artificial Sequence: Synthetic oligonucleotide"
  source: /note="Antisense Oligonucleotide"
  source: /note="3' tri-ethylene glycol (TEG)"
guaaguucuguccaagc

SEQ ID NO: 897 - RNA, 16 nt, Artificial Sequence
  source: /note="Description of Artificial Sequence: Synthetic oligonucleotide"
  source: /note="Antisense Oligonucleotide"
  source: /note="3' tri-ethylene glycol (TEG)"
guaaguucuguccaag

SEQ ID NO: 898 - RNA, 15 nt, Artificial Sequence
  source: /note="Description of Artificial Sequence: Synthetic oligonucleotide"
  source: /note="Antisense Oligonucleotide"
  source: /note="3' tri-ethylene glycol (TEG)"
guaaguucuguccaa

SEQ ID NO: 899 - RNA, 14 nt, Artificial Sequence
  source: /note="Description of Artificial Sequence: Synthetic oligonucleotide"
  source: /note="Antisense Oligonucleotide"
  source: /note="3' tri-ethylene glycol (TEG)"
guaaguucugucca

SEQ ID NO: 900 - RNA, 13 nt, Artificial Sequence
  source: /note="Description of Artificial Sequence: Synthetic oligonucleotide"
  source: /note="Antisense Oligonucleotide"
  source: /note="3' tri-ethylene glycol (TEG)"
guaaguucugucc

SEQ ID NO: 901 - RNA, 12 nt, Artificial Sequence
  source: /note="Description of Artificial Sequence: Synthetic oligonucleotide"
  source: /note="Antisense Oligonucleotide"
  source: /note="3' tri-ethylene glycol (TEG)"
guaaguucuguc

SEQ ID NO: 902 - RNA, 11 nt, Artificial Sequence
  source: /note="Description of Artificial Sequence: Synthetic oligonucleotide"
  source: /note="Antisense Oligonucleotide"
  source: /note="3' tri-ethylene glycol (TEG)"
guaaguucugu

SEQ ID NO: 903 - RNA, 10 nt, Artificial Sequence
  source: /note="Description of Artificial Sequence: Synthetic oligonucleotide"
  source: /note="Antisense Oligonucleotide"
  source: /note="3' tri-ethylene glycol (TEG)"
guaaguucug

SEQ ID NO: 904 - RNA, 9 nt, Artificial Sequence
  source: /note="Description of Artificial Sequence: Synthetic oligonucleotide"
  source: /note="Antisense Oligonucleotide"
  source: /note="3' tri-ethylene glycol (TEG)"
guaaguucu

SEQ ID NO: 905 - RNA, 8 nt, Artificial Sequence
  source: /note="Description of Artificial Sequence: Synthetic oligonucleotide"
  source: /note="Antisense Oligonucleotide"
  source: /note="3' tri-ethylene glycol (TEG)"
guaaguuc

SEQ ID NO: 906 - RNA, 20 nt, Artificial Sequence
  source: /note="Description of Artificial Sequence: Synthetic oligonucleotide"
  source: /note="Antisense Oligonucleotide"
  source: /note="3' tri-ethylene glycol (TEG)"
gguaaguucuguccaagccc

SEQ ID NO: 907 - RNA, 19 nt, Artificial Sequence
  source: /note="Description of Artificial Sequence: Synthetic oligonucleotide"
  source: /note="Antisense Oligonucleotide"
  source: /note="3' tri-ethylene glycol (TEG)"
gguaaguucuguccaagcc

SEQ ID NO: 908 - RNA, 17 nt, Artificial Sequence
  source: /note="Description of Artificial Sequence: Synthetic oligonucleotide"
  source: /note="Antisense Oligonucleotide"
  source: /note="3' tri-ethylene glycol (TEG)"
gguaaguucuguccaag

SEQ ID NO: 909 - RNA, 16 nt, Artificial Sequence
  source: /note="Description of Artificial Sequence: Synthetic oligonucleotide"
  source: /note="Antisense Oligonucleotide"
  source: /note="3' tri-ethylene glycol (TEG)"
gguaaguucuguccaa

SEQ ID NO: 910 - RNA, 15 nt, Artificial Sequence
  source: /note="Description of Artificial Sequence: Synthetic oligonucleotide"
  source: /note="Antisense Oligonucleotide"
  source: /note="3' tri-ethylene glycol (TEG)"
gguaaguucugucca

SEQ ID NO: 911 - RNA, 14 nt, Artificial Sequence
  source: /note="Description of Artificial Sequence: Synthetic oligonucleotide"
  source: /note="Antisense Oligonucleotide"
  source: /note="3' tri-ethylene glycol (TEG)"
gguaaguucugucc

SEQ ID NO: 912 - RNA, 13 nt, Artificial Sequence
  source: /note="Description of Artificial Sequence: Synthetic oligonucleotide"
  source: /note="Antisense Oligonucleotide"
  source: /note="3' tri-ethylene glycol (TEG)"
gguaaguucuguc

SEQ ID NO: 913 - RNA, 12 nt, Artificial Sequence
  source: /note="Description of Artificial Sequence: Synthetic oligonucleotide"
  source: /note="Antisense Oligonucleotide"
  source: /note="3' tri-ethylene glycol (TEG)"
gguaaguucugu

SEQ ID NO: 914 - RNA, 11 nt, Artificial Sequence
  source: /note="Description of Artificial Sequence: Synthetic oligonucleotide"
  source: /note="Antisense Oligonucleotide"
  source: /note="3' tri-ethylene glycol (TEG)"
gguaaguucug

SEQ ID NO: 915 - RNA, 10 nt, Artificial Sequence
  source: /note="Description of Artificial Sequence: Synthetic oligonucleotide"
  source: /note="Antisense Oligonucleotide"
  source: /note="3' tri-ethylene glycol (TEG)"
gguaaguucu

SEQ ID NO: 916 - RNA, 9 nt, Artificial Sequence
  source: /note="Description of Artificial Sequence: Synthetic oligonucleotide"
  source: /note="Antisense Oligonucleotide"
  source: /note="3' tri-ethylene glycol (TEG)"
gguaaguuc

SEQ ID NO: 917 - RNA, 8 nt, Artificial Sequence
  source: /note="Description of Artificial Sequence: Synthetic oligonucleotide"
  source: /note="Antisense Oligonucleotide"
  source: /note="3' tri-ethylene glycol (TEG)"
gguaaguu

SEQ ID NO: 918 - RNA, 20 nt, Artificial Sequence
  source: /note="Description of Artificial Sequence: Synthetic oligonucleotide"
  source: /note="Antisense Oligonucleotide"
  source: /note="3' tri-ethylene glycol (TEG)"
cgguaaguucuguccaagcc

SEQ ID NO: 919 - RNA, 19 nt, Artificial Sequence
  source: /note="Description of Artificial Sequence: Synthetic oligonucleotide"
  source: /note="Antisense Oligonucleotide"
  source: /note="3' tri-ethylene glycol (TEG)"
cgguaaguucuguccaagc

SEQ ID NO: 920 - RNA, 18 nt, Artificial Sequence
  source: /note="Description of Artificial Sequence: Synthetic oligonucleotide"
  source: /note="Antisense Oligonucleotide"
  source: /note="3' tri-ethylene glycol (TEG)"
cgguaaguucuguccaag

SEQ ID NO: 921 - RNA, 17 nt, Artificial Sequence
  source: /note="Description of Artificial Sequence: Synthetic oligonucleotide"
  source: /note="Antisense Oligonucleotide"
  source: /note="3' tri-ethylene glycol (TEG)"
cgguaaguucuguccaa

SEQ ID NO: 922 - RNA, 16 nt, Artificial Sequence
  source: /note="Description of Artificial Sequence: Synthetic oligonucleotide"
  source: /note="Antisense Oligonucleotide"
  source: /note="3' tri-ethylene glycol (TEG)"
cgguaaguucugucca

SEQ ID NO: 923 - RNA, 15 nt, Artificial Sequence
  source: /note="Description of Artificial Sequence: Synthetic oligonucleotide"
  source: /note="Antisense Oligonucleotide"
  source: /note="3' tri-ethylene glycol (TEG)"
cgguaaguucugucc

SEQ ID NO: 924 - RNA, 14 nt, Artificial Sequence
  source: /note="Description of Artificial Sequence: Synthetic oligonucleotide"
  source: /note="Antisense Oligonucleotide"
  source: /note="3' tri-ethylene glycol (TEG)"
cgguaaguucuguc

SEQ ID NO: 925 - RNA, 13 nt, Artificial Sequence
  source: /note="Description of Artificial Sequence: Synthetic oligonucleotide"
  source: /note="Antisense Oligonucleotide"
  source: /note="3' tri-ethylene glycol (TEG)"
cgguaaguucugu

SEQ ID NO: 926 - RNA, 12 nt, Artificial Sequence
  source: /note="Description of Artificial Sequence: Synthetic oligonucleotide"
  source: /note="Antisense Oligonucleotide"
  source: /note="3' tri-ethylene glycol (TEG)"
cgguaaguucug

SEQ ID NO: 927 - RNA, 11 nt, Artificial Sequence
  source: /note="Description of Artificial Sequence: Synthetic oligonucleotide"
  source: /note="Antisense Oligonucleotide"
  source: /note="3' tri-ethylene glycol (TEG)"
cgguaaguucu

SEQ ID NO: 928 - RNA, 10 nt, Artificial Sequence
  source: /note="Description of Artificial Sequence: Synthetic oligonucleotide"
  source: /note="Antisense Oligonucleotide"
  source: /note="3' tri-ethylene glycol (TEG)"
cgguaaguuc

SEQ ID NO: 929 - RNA, 9 nt, Artificial Sequence
  source: /note="Description of Artificial Sequence: Synthetic oligonucleotide"
  source: /note="Antisense Oligonucleotide"
  source: /note="3' tri-ethylene glycol (TEG)"
cgguaaguu

SEQ ID NO: 930 - RNA, 8 nt, Artificial Sequence
  source: /note="Description of Artificial Sequence: Synthetic oligonucleotide"
  source: /note="Antisense Oligonucleotide"
  source: /note="3' tri-ethylene glycol (TEG)"
cgguaagu

SEQ ID NO: 931 - RNA, 20 nt, Artificial Sequence
  source: /note="Description of Artificial Sequence: Synthetic oligonucleotide"
  source: /note="Antisense Oligonucleotide"
  source: /note="3' tri-ethylene glycol (TEG)"
ucgguaaguucuguccaagc

SEQ ID NO: 932 - RNA, 19 nt, Artificial Sequence
  source: /note="Description of Artificial Sequence: Synthetic oligonucleotide"
  source: /note="Antisense Oligonucleotide"
  source: /note="3' tri-ethylene glycol (TEG)"
ucgguaaguucuguccaag

SEQ ID NO: 933 - RNA, 18 nt, Artificial Sequence
  source: /note="Description of Artificial Sequence: Synthetic oligonucleotide"
  source: /note="Antisense Oligonucleotide"
  source: /note="3' tri-ethylene glycol (TEG)"
ucgguaaguucuguccaa

SEQ ID NO: 934 - RNA, 17 nt, Artificial Sequence
  source: /note="Description of Artificial Sequence: Synthetic oligonucleotide"
  source: /note="Antisense Oligonucleotide"
  source: /note="3' tri-ethylene glycol (TEG)"
ucgguaaguucugucca

SEQ ID NO: 935 - RNA, 16 nt, Artificial Sequence
  source: /note="Description of Artificial Sequence: Synthetic oligonucleotide"
  source: /note="Antisense Oligonucleotide"
  source: /note="3' tri-ethylene glycol (TEG)"
ucgguaaguucugucc

SEQ ID NO: 936 - RNA, 15 nt, Artificial Sequence
  source: /note="Description of Artificial Sequence: Synthetic oligonucleotide"
  source: /note="Antisense Oligonucleotide"
  source: /note="3' tri-ethylene glycol (TEG)"
ucgguaaguucuguc

SEQ ID NO: 937 - RNA, 14 nt, Artificial Sequence
  source: /note="Description of Artificial Sequence: Synthetic oligonucleotide"
  source: /note="Antisense Oligonucleotide"
  source: /note="3' tri-ethylene glycol (TEG)"
ucgguaaguucugu

SEQ ID NO: 938 - RNA, 13 nt, Artificial Sequence
  source: /note="Description of Artificial Sequence: Synthetic oligonucleotide"
  source: /note="Antisense Oligonucleotide"
  source: /note="3' tri-ethylene glycol (TEG)"
ucgguaaguucug

SEQ ID NO: 939 - RNA, 12 nt, Artificial Sequence
  source: /note="Description of Artificial Sequence: Synthetic oligonucleotide"
  source: /note="Antisense Oligonucleotide"
  source: /note="3' tri-ethylene glycol (TEG)"
ucgguaaguucu

SEQ ID NO: 940 - RNA, 11 nt, Artificial Sequence
  source: /note="Description of Artificial Sequence: Synthetic oligonucleotide"
  source: /note="Antisense Oligonucleotide"
  source: /note="3' tri-ethylene glycol (TEG)"
ucgguaaguuc

SEQ ID NO: 941 - RNA, 10 nt, Artificial Sequence
  source: /note="Description of Artificial Sequence: Synthetic oligonucleotide"
  source: /note="Antisense Oligonucleotide"
  source: /note="3' tri-ethylene glycol (TEG)"
ucgguaaguu

SEQ ID NO: 942 - RNA, 9 nt, Artificial Sequence
  source: /note="Description of Artificial Sequence: Synthetic oligonucleotide"
  source: /note="Antisense Oligonucleotide"
  source: /note="3' tri-ethylene glycol (TEG)"
ucgguaagu

SEQ ID NO: 943 - RNA, 20 nt, Artificial Sequence
  source: /note="Description of Artificial Sequence: Synthetic oligonucleotide"
  source: /note="Antisense Oligonucleotide"
  source: /note="3' tri-ethylene glycol (TEG)"
gucgguaaguucuguccaag

SEQ ID NO: 944 - RNA, 19 nt, Artificial Sequence
  source: /note="Description of Artificial Sequence: Synthetic oligonucleotide"
  source: /note="Antisense Oligonucleotide"
  source: /note="3' tri-ethylene glycol (TEG)"
gucgguaaguucuguccaa

SEQ ID NO: 945 - RNA, 18 nt, Artificial Sequence
  source: /note="Description of Artificial Sequence: Synthetic oligonucleotide"
  source: /note="Antisense Oligonucleotide"
  source: /note="3' tri-ethylene glycol (TEG)"
gucgguaaguucugucca

SEQ ID NO: 946 - RNA, 17 nt, Artificial Sequence
  source: /note="Description of Artificial Sequence: Synthetic oligonucleotide"
  source: /note="Antisense Oligonucleotide"
  source: /note="3' tri-ethylene glycol (TEG)"
gucgguaaguucugucc

SEQ ID NO: 947 - RNA, 16 nt, Artificial Sequence
  source: /note="Description of Artificial Sequence: Synthetic oligonucleotide"
  source: /note="Antisense Oligonucleotide"
  source: /note="3' tri-ethylene glycol (TEG)"
gucgguaaguucuguc

SEQ ID NO: 948 - RNA, 15 nt, Artificial Sequence
  source: /note="Description of Artificial Sequence: Synthetic oligonucleotide"
  source: /note="Antisense Oligonucleotide"
  source: /note="3' tri-ethylene glycol (TEG)"
gucgguaaguucugu

SEQ ID NO: 949 - RNA, 14 nt, Artificial Sequence
  source: /note="Description of Artificial Sequence: Synthetic oligonucleotide"
  source: /note="Antisense Oligonucleotide"
  source: /note="3' tri-ethylene glycol (TEG)"
gucgguaaguucug

SEQ ID NO: 950 - RNA, 13 nt, Artificial Sequence
  source: /note="Description of Artificial Sequence: Synthetic oligonucleotide"
  source: /note="Antisense Oligonucleotide"
  source: /note="3' tri-ethylene glycol (TEG)"
gucgguaaguucu

SEQ ID NO: 951 - RNA, 12 nt, Artificial Sequence
  source: /note="Description of Artificial Sequence: Synthetic oligonucleotide"
  source: /note="Antisense Oligonucleotide"
  source: /note="3' tri-ethylene glycol (TEG)"
gucgguaaguuc

SEQ ID NO: 952 - RNA, 11 nt, Artificial Sequence
  source: /note="Description of Artificial Sequence: Synthetic oligonucleotide"
  source: /note="Antisense Oligonucleotide"
  source: /note="3' tri-ethylene glycol (TEG)"
gucgguaaguu

SEQ ID NO: 953 - RNA, 10 nt, Artificial Sequence
  source: /note="Description of Artificial Sequence: Synthetic oligonucleotide"
  source: /note="Antisense Oligonucleotide"
  source: /note="3' tri-ethylene glycol (TEG)"
gucgguaagu

SEQ ID NO: 954 - RNA, 20 nt, Artificial Sequence
  source: /note="Description of Artificial Sequence: Synthetic oligonucleotide"
  source: /note="Antisense Oligonucleotide"
  source: /note="3' tri-ethylene glycol (TEG)"
agucgguaaguucuguccaa

SEQ ID NO: 955 - RNA, 19 nt, Artificial Sequence
  source: /note="Description of Artificial Sequence: Synthetic oligonucleotide"
  source: /note="Antisense Oligonucleotide"
  source: /note="3' tri-ethylene glycol (TEG)"
agucgguaaguucugucca

SEQ ID NO: 956 - RNA, 17 nt, Artificial Sequence
  source: /note="Description of Artificial Sequence: Synthetic oligonucleotide"
  source: /note="Antisense Oligonucleotide"
  source: /note="3' tri-ethylene glycol (TEG)"
agucgguaaguucuguc

SEQ ID NO: 957 - RNA, 16 nt, Artificial Sequence
  source: /note="Description of Artificial Sequence: Synthetic oligonucleotide"
  source: /note="Antisense Oligonucleotide"
  source: /note="3' tri-ethylene glycol (TEG)"
agucgguaaguucugu

SEQ ID NO: 958 - RNA, 15 nt, Artificial Sequence
  source: /note="Description of Artificial Sequence: Synthetic oligonucleotide"
  source: /note="Antisense Oligonucleotide"
  source: /note="3' tri-ethylene glycol (TEG)"
agucgguaaguucug

SEQ ID NO: 959 - RNA, 14 nt, Artificial Sequence
  source: /note="Description of Artificial Sequence: Synthetic oligonucleotide"
  source: /note="Antisense Oligonucleotide"
  source: /note="3' tri-ethylene glycol (TEG)"
agucgguaaguucu

SEQ ID NO: 960 - RNA, 13 nt, Artificial Sequence
  source: /note="Description of Artificial Sequence: Synthetic oligonucleotide"
  source: /note="Antisense Oligonucleotide"
  source: /note="3' tri-ethylene glycol (TEG)"
agucgguaaguuc

SEQ ID NO: 961 - RNA, 12 nt, Artificial Sequence
  source: /note="Description of Artificial Sequence: Synthetic oligonucleotide"
  source: /note="Antisense Oligonucleotide"
  source: /note="3' tri-ethylene glycol (TEG)"
agucgguaaguu

SEQ ID NO: 962 - RNA, 11 nt, Artificial Sequence
  source: /note="Description of Artificial Sequence: Synthetic oligonucleotide"
  source: /note="Antisense Oligonucleotide"
  source: /note="3' tri-ethylene glycol (TEG)"
agucgguaagu

SEQ ID NO: 963 - RNA, 20 nt, Artificial Sequence
  source: /note="Description of Artificial Sequence: Synthetic oligonucleotide"
  source: /note="Antisense Oligonucleotide"
  source: /note="3' tri-ethylene glycol (TEG)"
cagucgguaaguucugucca

SEQ ID NO: 964 - RNA, 19 nt, Artificial Sequence
  source: /note="Description of Artificial Sequence: Synthetic oligonucleotide"
  source: /note="Antisense Oligonucleotide"
  source: /note="3' tri-ethylene glycol (TEG)"
cagucgguaaguucugucc

SEQ ID NO: 965 - RNA, 18 nt, Artificial Sequence
  source: /note="Description of Artificial Sequence: Synthetic oligonucleotide"
  source: /note="Antisense Oligonucleotide"
  source: /note="3' tri-ethylene glycol (TEG)"
cagucgguaaguucuguc

SEQ ID NO: 966 - RNA, 17 nt, Artificial Sequence
  source: /note="Description of Artificial Sequence: Synthetic oligonucleotide"
  source: /note="Antisense Oligonucleotide"
  source: /note="3' tri-ethylene glycol (TEG)"
cagucgguaaguucugu

SEQ ID NO: 967 - RNA, 16 nt, Artificial Sequence
  source: /note="Description of Artificial Sequence: Synthetic oligonucleotide"
  source: /note="Antisense Oligonucleotide"
  source: /note="3' tri-ethylene glycol (TEG)"
cagucgguaaguucug

SEQ ID NO: 968 - RNA, 15 nt, Artificial Sequence
  source: /note="Description of Artificial Sequence: Synthetic oligonucleotide"
  source: /note="Antisense Oligonucleotide"
  source: /note="3' tri-ethylene glycol (TEG)"
cagucgguaaguucu

SEQ ID NO: 969 - RNA, 14 nt, Artificial Sequence
  source: /note="Description of Artificial Sequence: Synthetic oligonucleotide"
  source: /note="Antisense Oligonucleotide"
  source: /note="3' tri-ethylene glycol (TEG)"
cagucgguaaguuc

SEQ ID NO: 970 - RNA, 13 nt, Artificial Sequence
  source: /note="Description of Artificial Sequence: Synthetic oligonucleotide"
  source: /note="Antisense Oligonucleotide"
  source: /note="3' tri-ethylene glycol (TEG)"
cagucgguaaguu

SEQ ID NO: 971 - RNA, 12 nt, Artificial Sequence
  source: /note="Description of Artificial Sequence: Synthetic oligonucleotide"
  source: /note="Antisense Oligonucleotide"
  source: /note="3' tri-ethylene glycol (TEG)"
cagucgguaagu

SEQ ID NO: 972 - RNA, 20 nt, Artificial Sequence
  source: /note="Description of Artificial Sequence: Synthetic oligonucleotide"
  source: /note="Antisense Oligonucleotide"
  source: /note="3' tri-ethylene glycol (TEG)"
ccagucgguaaguucugucc

SEQ ID NO: 973 - RNA, 19 nt, Artificial Sequence
  source: /note="Description of Artificial Sequence: Synthetic oligonucleotide"
  source: /note="Antisense Oligonucleotide"
  source: /note="3' tri-ethylene glycol (TEG)"
ccagucgguaaguucuguc

SEQ ID NO: 974 - RNA, 18 nt, Artificial Sequence
  source: /note="Description of Artificial Sequence: Synthetic oligonucleotide"
  source: /note="Antisense Oligonucleotide"
  source: /note="3' tri-ethylene glycol (TEG)"
ccagucgguaaguucugu

SEQ ID NO: 975 - RNA, 17 nt, Artificial Sequence
  source: /note="Description of Artificial Sequence: Synthetic oligonucleotide"
  source: /note="Antisense Oligonucleotide"
  source: /note="3' tri-ethylene glycol (TEG)"
ccagucgguaaguucug

SEQ ID NO: 976 - RNA, 16 nt, Artificial Sequence
  source: /note="Description of Artificial Sequence: Synthetic oligonucleotide"
  source: /note="Antisense Oligonucleotide"
  source: /note="3' tri-ethylene glycol (TEG)"
ccagucgguaaguucu

SEQ ID NO: 977 - RNA, 15 nt, Artificial Sequence
  source: /note="Description of Artificial Sequence: Synthetic oligonucleotide"
  source: /note="Antisense Oligonucleotide"
  source: /note="3' tri-ethylene glycol (TEG)"
ccagucgguaaguuc

SEQ ID NO: 978 - RNA, 14 nt, Artificial Sequence
  source: /note="Description of Artificial Sequence: Synthetic oligonucleotide"
  source: /note="Antisense Oligonucleotide"
  source: /note="3' tri-ethylene glycol (TEG)"
ccagucgguaaguu

SEQ ID NO: 979 - RNA, 13 nt, Artificial Sequence
  source: /note="Description of Artificial Sequence: Synthetic oligonucleotide"
  source: /note="Antisense Oligonucleotide"
  source: /note="3' tri-ethylene glycol (TEG)"
ccagucgguaagu

SEQ ID NO: 980 - RNA, 20 nt, Artificial Sequence
  source: /note="Description of Artificial Sequence: Synthetic oligonucleotide"
  source: /note="Antisense Oligonucleotide"
  source: /note="3' tri-ethylene glycol (TEG)"
gccagucgguaaguucuguc

SEQ ID NO: 981 - RNA, 19 nt, Artificial Sequence
  source: /note="Description of Artificial Sequence: Synthetic oligonucleotide"
  source: /note="Antisense Oligonucleotide"
  source: /note="3' tri-ethylene glycol (TEG)"
gccagucgguaaguucugu

SEQ ID NO: 982 - RNA, 18 nt, Artificial Sequence
  source: /note="Description of Artificial Sequence: Synthetic oligonucleotide"
  source: /note="Antisense Oligonucleotide"
  source: /note="3' tri-ethylene glycol (TEG)"
gccagucgguaaguucug

SEQ ID NO: 983 - RNA, 17 nt, Artificial Sequence
  source: /note="Description of Artificial Sequence: Synthetic oligonucleotide"
  source: /note="Antisense Oligonucleotide"
  source: /note="3' tri-ethylene glycol (TEG)"
gccagucgguaaguucu

SEQ ID NO: 984 - RNA, 16 nt, Artificial Sequence
  source: /note="Description of Artificial Sequence: Synthetic oligonucleotide"
  source: /note="Antisense Oligonucleotide"
  source: /note="3' tri-ethylene glycol (TEG)"
gccagucgguaaguuc

SEQ ID NO: 985 - RNA, 15 nt, Artificial Sequence
  source: /note="Description of Artificial Sequence: Synthetic oligonucleotide"
  source: /note="Antisense Oligonucleotide"
  source: /note="3' tri-ethylene glycol (TEG)"
gccagucgguaaguu

SEQ ID NO: 986 - RNA, 14 nt, Artificial Sequence
  source: /note="Description of Artificial Sequence: Synthetic oligonucleotide"
  source: /note="Antisense Oligonucleotide"
  source: /note="3' tri-ethylene glycol (TEG)"
gccagucgguaagu

SEQ ID NO: 987 - RNA, 20 nt, Artificial Sequence
  source: /note="Description of Artificial Sequence: Synthetic oligonucleotide"
  source: /note="Antisense Oligonucleotide"
  source: /note="3' tri-ethylene glycol (TEG)"
ucaaggaagauggcauuucu

SEQ ID NO: 988 - RNA, 22 nt, Artificial Sequence
  source: /note="Description of Artificial Sequence: Synthetic oligonucleotide"
  source: /note="Antisense Oligonucleotide"
  source: /note="3' tri-ethylene glycol (TEG)"
ucaaggaagauggcauuucuag

SEQ ID NO: 989 - RNA, 16 nt, Artificial Sequence
  source: /note="Description of Artificial Sequence: Synthetic oligonucleotide"
  source: /note="Antisense Oligonucleotide"
  source: /note="3' tri-ethylene glycol (TEG)"
ucaaggaagauggcau

SEQ ID NO: 990 - RNA, 15 nt, Artificial Sequence
  source: /note="Description of Artificial Sequence: Synthetic oligonucleotide"
  source: /note="Antisense Oligonucleotide"
  source: /note="3' tri-ethylene glycol (TEG)"
gaagauggcauuucu

SEQ ID NO: 991 - RNA, 21 nt, Artificial Sequence
  source: /note="Description of Artificial Sequence: Synthetic oligonucleotide"
  source: /note="Antisense Oligonucleotide"
  source: /note="3' tri-ethylene glycol (TEG)"
ucaaggaagauggcauuucua

SEQ ID NO: 992 - RNA, 19 nt, Artificial Sequence
  source: /note="Description of Artificial Sequence: Synthetic oligonucleotide"
  source: /note="Antisense Oligonucleotide"
  source: /note="3' tri-ethylene glycol (TEG)"
ucaaggaagauggcauuuc

SEQ ID NO: 993 - RNA, 18 nt, Artificial Sequence
  source: /note="Description of Artificial Sequence: Synthetic oligonucleotide"
  source: /note="Antisense Oligonucleotide"
  source: /note="3' tri-ethylene glycol (TEG)"
ucaaggaagauggcauuu

SEQ ID NO: 994 - RNA, 17 nt, Artificial Sequence
  source: /note="Description of Artificial Sequence: Synthetic oligonucleotide"
  source: /note="Antisense Oligonucleotide"
  source: /note="3' tri-ethylene glycol (TEG)"
ucaaggaagauggcauu

SEQ ID NO: 995 - RNA, 15 nt, Artificial Sequence
  source: /note="Description of Artificial Sequence: Synthetic oligonucleotide"
  source: /note="Antisense Oligonucleotide"
  source: /note="3' tri-ethylene glycol (TEG)"
ucaaggaagauggca

SEQ ID NO: 996 - RNA, 14 nt, Artificial Sequence
  source: /note="Description of Artificial Sequence: Synthetic oligonucleotide"
  source: /note="Antisense Oligonucleotide"
  source: /note="3' tri-ethylene glycol (TEG)"
ucaaggaagauggc

SEQ ID NO: 997 - RNA, 13 nt, Artificial Sequence
  source: /note="Description of Artificial Sequence: Synthetic oligonucleotide"
  source: /note="Antisense Oligonucleotide"
  source: /note="3' tri-ethylene glycol (TEG)"
ucaaggaagaugg

SEQ ID NO: 998 - RNA, 12 nt, Artificial Sequence
  source: /note="Description of Artificial Sequence: Synthetic oligonucleotide"
  source: /note="Antisense Oligonucleotide"
  source: /note="3' tri-ethylene glycol (TEG)"
ucaaggaagaug

SEQ ID NO: 999 - RNA, 11 nt, Artificial Sequence
  source: /note="Description of Artificial Sequence: Synthetic oligonucleotide"
  source: /note="Antisense Oligonucleotide"
  source: /note="3' tri-ethylene glycol (TEG)"
ucaaggaagau

SEQ ID NO: 1000 - RNA, 10 nt, Artificial Sequence
  source: /note="Description of Artificial Sequence: Synthetic oligonucleotide"
  source: /note="Antisense Oligonucleotide"
  source: /note="3' tri-ethylene glycol (TEG)"
ucaaggaaga

SEQ ID NO: 1001 - RNA, 9 nt, Artificial Sequence
  source: /note="Description of Artificial Sequence: Synthetic oligonucleotide"
  source: /note="Antisense Oligonucleotide"
  source: /note="3' tri-ethylene glycol (TEG)"
ucaaggaag

SEQ ID NO: 1002 - RNA, 21 nt, Artificial Sequence
  source: /note="Description of Artificial Sequence: Synthetic oligonucleotide"
  source: /note="Antisense Oligonucleotide"
  source: /note="3' tri-ethylene glycol (TEG)"
caaggaagauggcauuucuag

SEQ ID NO: 1003 - RNA, 20 nt, Artificial Sequence
  source: /note="Description of Artificial Sequence: Synthetic oligonucleotide"
  source: /note="Antisense Oligonucleotide"
  source: /note="3' tri-ethylene glycol (TEG)"
caaggaagauggcauuucua

SEQ ID NO: 1004 - RNA, 19 nt, Artificial Sequence
  source: /note="Description of Artificial Sequence: Synthetic oligonucleotide"
  source: /note="Antisense Oligonucleotide"
  source: /note="3' tri-ethylene glycol (TEG)"
caaggaagauggcauuucu

SEQ ID NO: 1005 - RNA, 18 nt, Artificial Sequence
  source: /note="Description of Artificial Sequence: Synthetic oligonucleotide"
  source: /note="Antisense Oligonucleotide"
  source: /note="3' tri-ethylene glycol (TEG)"
caaggaagauggcauuuc

SEQ ID NO: 1006 - RNA, 17 nt, Artificial Sequence
  source: /note="Description of Artificial Sequence: Synthetic oligonucleotide"
  source: /note="Antisense Oligonucleotide"
  source: /note="3' tri-ethylene glycol (TEG)"
caaggaagauggcauuu

SEQ ID NO: 1007 - RNA, 16 nt, Artificial Sequence
  source: /note="Description of Artificial Sequence: Synthetic oligonucleotide"
  source: /note="Antisense Oligonucleotide"
  source: /note="3' tri-ethylene glycol (TEG)"
caaggaagauggcauu

SEQ ID NO: 1008 - RNA, 15 nt, Artificial Sequence
  source: /note="Description of Artificial Sequence: Synthetic oligonucleotide"
  source: /note="Antisense Oligonucleotide"
  source: /note="3' tri-ethylene glycol (TEG)"
caaggaagauggcau

SEQ ID NO: 1009 - RNA, 14 nt, Artificial Sequence
  source: /note="Description of Artificial Sequence: Synthetic oligonucleotide"
  source: /note="Antisense Oligonucleotide"
  source: /note="3' tri-ethylene glycol (TEG)"
caaggaagauggca

SEQ ID NO: 1010 - RNA, 13 nt, Artificial Sequence
  source: /note="Description of Artificial Sequence: Synthetic oligonucleotide"
  source: /note="Antisense Oligonucleotide"
  source: /note="3' tri-ethylene glycol (TEG)"
caaggaagauggc

SEQ ID NO: 1011 - RNA, 12 nt, Artificial Sequence
  source: /note="Description of Artificial Sequence: Synthetic oligonucleotide"
  source: /note="Antisense Oligonucleotide"
  source: /note="3' tri-ethylene glycol (TEG)"
caaggaagaugg

SEQ ID NO: 1012 - RNA, 11 nt, Artificial Sequence
  source: /note="Description of Artificial Sequence: Synthetic oligonucleotide"
  source: /note="Antisense Oligonucleotide"
  source: /note="3' tri-ethylene glycol (TEG)"
caaggaagaug

SEQ ID NO: 1013 - RNA, 10 nt, Artificial Sequence
  source: /note="Description of Artificial Sequence: Synthetic oligonucleotide"
  source: /note="Antisense Oligonucleotide"
  source: /note="3' tri-ethylene glycol (TEG)"
caaggaagau

SEQ ID NO: 1014 - RNA, 9 nt, Artificial Sequence
  source: /note="Description of Artificial Sequence: Synthetic oligonucleotide"
  source: /note="RNA/Antisense Oligonucleotide"
  source: /note="3' tri-ethylene glycol (TEG)"
caaggaaga

SEQ ID NO: 1015 - RNA, 8 nt, Artificial Sequence
  source: /note="Description of Artificial Sequence: Synthetic oligonucleotide"
  source: /note="RNA/Antisense Oligonucleotide"
  source: /note="3' tri-ethylene glycol (TEG)"
caaggaag

SEQ ID NO: 1016 - RNA, 20 nt, Artificial Sequence
  source: /note="Description of Artificial Sequence: Synthetic oligonucleotide"
  source: /note="Antisense Oligonucleotide"
  source: /note="3' tri-ethylene glycol (TEG)"
aaggaagauggcauuucuag

SEQ ID NO: 1017 - RNA, 19 nt, Artificial Sequence
  source: /note="Description of Artificial Sequence: Synthetic oligonucleotide"
  source: /note="Antisense Oligonucleotide"
  source: /note="3' tri-ethylene glycol (TEG)"
aaggaagauggcauuucua

SEQ ID NO: 1018 - RNA, 18 nt, Artificial Sequence
  source: /note="Description of Artificial Sequence: Synthetic oligonucleotide"
  source: /note="Antisense Oligonucleotide"
  source: /note="3' tri-ethylene glycol (TEG)"
aaggaagauggcauuucu

SEQ ID NO: 1019 - RNA, 17 nt, Artificial Sequence
  source: /note="Description of Artificial Sequence: Synthetic oligonucleotide"
  source: /note="Antisense Oligonucleotide"
  source: /note="3' tri-ethylene glycol (TEG)"
aaggaagauggcauuuc

SEQ ID NO: 1020 - RNA, 16 nt, Artificial Sequence
  source: /note="Description of Artificial Sequence: Synthetic oligonucleotide"
  source: /note="Antisense Oligonucleotide"
  source: /note="3' tri-ethylene glycol (TEG)"
aaggaagauggcauuu

SEQ ID NO: 1021 - RNA, 15 nt, Artificial Sequence
  source: /note="Description of Artificial Sequence: Synthetic oligonucleotide"
  source: /note="Antisense Oligonucleotide"
  source: /note="3' tri-ethylene glycol (TEG)"
aaggaagauggcauu

SEQ ID NO: 1022 - RNA, 14 nt, Artificial Sequence
  source: /note="Description of Artificial Sequence: Synthetic oligonucleotide"
  source: /note="Antisense Oligonucleotide"
  source: /note="3' tri-ethylene glycol (TEG)"
aaggaagauggcau

SEQ ID NO: 1023 - RNA, 13 nt, Artificial Sequence
  source: /note="Description of Artificial Sequence: Synthetic oligonucleotide"
  source: /note="Antisense Oligonucleotide"
  source: /note="3' tri-ethylene glycol (TEG)"
aaggaagauggca

SEQ ID NO: 1024 - RNA, 12 nt, Artificial Sequence
  source: /note="Description of Artificial Sequence: Synthetic oligonucleotide"
  source: /note="Antisense Oligonucleotide"
  source: /note="3' tri-ethylene glycol (TEG)"
aaggaagauggc

SEQ ID NO: 1025 - RNA, 11 nt, Artificial Sequence
  source: /note="Description of Artificial Sequence: Synthetic oligonucleotide"
  source: /note="Antisense Oligonucleotide"
  source: /note="3' tri-ethylene glycol (TEG)"
aaggaagaugg

SEQ ID NO: 1026 - RNA, 10 nt, Artificial Sequence
  source: /note="Description of Artificial Sequence: Synthetic oligonucleotide"
  source: /note="Antisense Oligonucleotide"
  source: /note="3' tri-ethylene glycol (TEG)"
aaggaagaug

SEQ ID NO: 1027 - RNA, 9 nt, Artificial Sequence
  source: /note="Description of Artificial Sequence: Synthetic oligonucleotide"
  source: /note="Antisense Oligonucleotide"
  source: /note="3' tri-ethylene glycol (TEG)"
aaggaagau

SEQ ID NO: 1028 - RNA, 8 nt, Artificial Sequence
  source: /note="Description of Artificial Sequence: Synthetic oligonucleotide"
  source: /note="RNA/Antisense Oligonucleotide"
  source: /note="3' tri-ethylene glycol (TEG)"
aaggaaga

SEQ ID NO: 1029 - RNA, 19 nt, Artificial Sequence
  source: /note="Description of Artificial Sequence: Synthetic oligonucleotide"
  source: /note="Antisense Oligonucleotide"
  source: /note="3' tri-ethylene glycol (TEG)"
aggaagauggcauuucuag

SEQ ID NO: 1030 - RNA, 18 nt, Artificial Sequence
  source: /note="Description of Artificial Sequence: Synthetic oligonucleotide"
  source: /note="Antisense Oligonucleotide"
  source: /note="3' tri-ethylene glycol (TEG)"
aggaagauggcauuucua

SEQ ID NO: 1031 - RNA, 17 nt, Artificial Sequence
  source: /note="Description of Artificial Sequence: Synthetic oligonucleotide"
  source: /note="Antisense Oligonucleotide"
  source: /note="3' tri-ethylene glycol (TEG)"
aggaagauggcauuucu

SEQ ID NO: 1032 - RNA, 16 nt, Artificial Sequence
  source: /note="Description of Artificial Sequence: Synthetic oligonucleotide"
  source: /note="Antisense Oligonucleotide"
  source: /note="3' tri-ethylene glycol (TEG)"
aggaagauggcauuuc

SEQ ID NO: 1033 - RNA, 15 nt, Artificial Sequence
  source: /note="Description of Artificial Sequence: Synthetic oligonucleotide"
  source: /note="Antisense Oligonucleotide"
  source: /note="3' tri-ethylene glycol (TEG)"
aggaagauggcauuu

SEQ ID NO: 1034 - RNA, 14 nt, Artificial Sequence
  source: /note="Description of Artificial Sequence: Synthetic oligonucleotide"
  source: /note="Antisense Oligonucleotide"
  source: /note="3' tri-ethylene glycol (TEG)"
aggaagauggcauu

SEQ ID NO: 1035 - RNA, 13 nt, Artificial Sequence
  source: /note="Description of Artificial Sequence: Synthetic oligonucleotide"
  source: /note="Antisense Oligonucleotide"
  source: /note="3' tri-ethylene glycol (TEG)"
aggaagauggcau

SEQ ID NO: 1036 - RNA, 12 nt, Artificial Sequence
  source: /note="Description of Artificial Sequence: Synthetic oligonucleotide"
  source: /note="Antisense Oligonucleotide"
  source: /note="3' tri-ethylene glycol (TEG)"
aggaagauggca

SEQ ID NO: 1037 - RNA, 10 nt, Artificial Sequence
  source: /note="Description of Artificial Sequence: Synthetic oligonucleotide"
  source: /note="Antisense Oligonucleotide"
  source: /note="3' tri-ethylene glycol (TEG)"
aggaagaugg

SEQ ID NO: 1038 - RNA, 9 nt, Artificial Sequence
  source: /note="Description of Artificial Sequence: Synthetic oligonucleotide"
  source: /note="Antisense Oligonucleotide"
  source: /note="3' tri-ethylene glycol (TEG)"
aggaagaug

SEQ ID NO: 1039 - RNA, 8 nt, Artificial Sequence
  source: /note="Description of Artificial Sequence: Synthetic oligonucleotide"
  source: /note="Antisense Oligonucleotide"
  source: /note="3' tri-ethylene glycol (TEG)"
aggaagau

SEQ ID NO: 1040 - RNA, 18 nt, Artificial Sequence
  source: /note="Description of Artificial Sequence: Synthetic oligonucleotide"
  source: /note="Antisense Oligonucleotide"
  source: /note="3' tri-ethylene glycol (TEG)"
ggaagauggcauuucuag

SEQ ID NO: 1041 - RNA, 17 nt, Artificial Sequence
  source: /note="Description of Artificial Sequence: Synthetic oligonucleotide"
  source: /note="Antisense Oligonucleotide"
  source: /note="3' tri-ethylene glycol (TEG)"
ggaagauggcauuucua

SEQ ID NO: 1042 - RNA, 16 nt, Artificial Sequence
  source: /note="Description of Artificial Sequence: Synthetic oligonucleotide"
  source: /note="Antisense Oligonucleotide"
  source: /note="3' tri-ethylene glycol (TEG)"
ggaagauggcauuucu

SEQ ID NO: 1043 - RNA, 15 nt, Artificial Sequence
  source: /note="Description of Artificial Sequence: Synthetic oligonucleotide"
  source: /note="Antisense Oligonucleotide"
  source: /note="3' tri-ethylene glycol (TEG)"
ggaagauggcauuuc

SEQ ID NO: 1044 - RNA, 14 nt, Artificial Sequence
  source: /note="Description of Artificial Sequence: Synthetic oligonucleotide"
  source: /note="Antisense Oligonucleotide"
  source: /note="3' tri-ethylene glycol (TEG)"
ggaagauggcauuu

SEQ ID NO: 1045 - RNA, 13 nt, Artificial Sequence
  source: /note="Description of Artificial Sequence: Synthetic oligonucleotide"
  source: /note="Antisense Oligonucleotide"
  source: /note="3' tri-ethylene glycol (TEG)"
ggaagauggcauu

SEQ ID NO: 1046 - RNA, 12 nt, Artificial Sequence
  source: /note="Description of Artificial Sequence: Synthetic oligonucleotide"
  source: /note="Antisense Oligonucleotide"
  source: /note="3' tri-ethylene glycol (TEG)"
ggaagauggcau

SEQ ID NO: 1047 - RNA, 11 nt, Artificial Sequence
  source: /note="Description of Artificial Sequence: Synthetic oligonucleotide"
  source: /note="Antisense Oligonucleotide"
  source: /note="3' tri-ethylene glycol (TEG)"
ggaagauggca

SEQ ID NO: 1048 - RNA, 10 nt, Artificial Sequence
  source: /note="Description of Artificial Sequence: Synthetic oligonucleotide"
  source: /note="Antisense Oligonucleotide"
  source: /note="3' tri-ethylene glycol (TEG)"
ggaagauggc

SEQ ID NO: 1049 - RNA, 8 nt, Artificial Sequence
  source: /note="Description of Artificial Sequence: Synthetic oligonucleotide"
  source: /note="Antisense Oligonucleotide"
  source: /note="3' tri-ethylene glycol (TEG)"
ggaagaug

SEQ ID NO: 1050 - RNA, 17 nt, Artificial Sequence
  source: /note="Description of Artificial Sequence: Synthetic oligonucleotide"
  source: /note="Antisense Oligonucleotide"
  source: /note="3' tri-ethylene glycol (TEG)"
gaagauggcauuucuag

SEQ ID NO: 1051 - RNA, 16 nt, Artificial Sequence
  source: /note="Description of Artificial Sequence: Synthetic oligonucleotide"
  source: /note="Antisense Oligonucleotide"
  source: /note="3' tri-ethylene glycol (TEG)"
gaagauggcauuucua

SEQ ID NO: 1052 - RNA, 14 nt, Artificial Sequence
  source: /note="Description of Artificial Sequence: Synthetic oligonucleotide"
  source: /note="Antisense Oligonucleotide"
  source: /note="3' tri-ethylene glycol (TEG)"
gaagauggcauuuc

SEQ ID NO: 1053 - RNA, 13 nt, Artificial Sequence
  source: /note="Description of Artificial Sequence: Synthetic oligonucleotide"
  source: /note="Antisense Oligonucleotide"
  source: /note="3' tri-ethylene glycol (TEG)"
gaagauggcauuu

SEQ ID NO: 1054 - RNA, 12 nt, Artificial Sequence
  source: /note="Description of Artificial Sequence: Synthetic oligonucleotide"
  source: /note="Antisense Oligonucleotide"
  source: /note="3' tri-ethylene glycol (TEG)"
gaagauggcauu

SEQ ID NO: 1055 - RNA, 11 nt, Artificial Sequence
  source: /note="Description of Artificial Sequence: Synthetic oligonucleotide"
  source: /note="Antisense Oligonucleotide"
  source: /note="3' tri-ethylene glycol (TEG)"
gaagauggcau

SEQ ID NO: 1056 - RNA, 10 nt, Artificial Sequence
  source: /note="Description of Artificial Sequence: Synthetic oligonucleotide"
  source: /note="Antisense Oligonucleotide"
  source: /note="3' tri-ethylene glycol (TEG)"
gaagauggca

SEQ ID NO: 1057 - RNA, 9 nt, Artificial Sequence
  source: /note="Description of Artificial Sequence: Synthetic oligonucleotide"
  source: /note="Antisense Oligonucleotide"
  source: /note="3' tri-ethylene glycol (TEG)"
gaagauggc

SEQ ID NO: 1058 - RNA, 8 nt, Artificial Sequence
  source: /note="Description of Artificial Sequence: Synthetic oligonucleotide"
  source: /note="Antisense Oligonucleotide"
  source: /note="3' tri-ethylene glycol (TEG)"
gaagaugg

SEQ ID NO: 1059 - RNA, 16 nt, Artificial Sequence
  source: /note="Description of Artificial Sequence: Synthetic oligonucleotide"
  source: /note="Antisense Oligonucleotide"
  source: /note="3' tri-ethylene glycol (TEG)"
aagauggcauuucuag

SEQ ID NO: 1060 - RNA, 15 nt, Artificial Sequence
  source: /note="Description of Artificial Sequence: Synthetic oligonucleotide"
  source: /note="Antisense Oligonucleotide"
  source: /note="3' tri-ethylene glycol (TEG)"
aagauggcauuucua

SEQ ID NO: 1061 - RNA, 14 nt, Artificial Sequence
  source: /note="Description of Artificial Sequence: Synthetic oligonucleotide"
  source: /note="Antisense Oligonucleotide"
  source: /note="3' tri-ethylene glycol (TEG)"
aagauggcauuucu

SEQ ID NO: 1062 - RNA, 13 nt, Artificial Sequence
  source: /note="Description of Artificial Sequence: Synthetic oligonucleotide"
  source: /note="Antisense Oligonucleotide"
  source: /note="3' tri-ethylene glycol (TEG)"
aagauggcauuuc

SEQ ID NO: 1063 - RNA, 12 nt, Artificial Sequence
  source: /note="Description of Artificial Sequence: Synthetic oligonucleotide"
  source: /note="Antisense Oligonucleotide"
  source: /note="3' tri-ethylene glycol (TEG)"
aagauggcauuu

SEQ ID NO: 1064 - RNA, 11 nt, Artificial Sequence
  source: /note="Description of Artificial Sequence: Synthetic oligonucleotide"
  source: /note="Antisense Oligonucleotide"
  source: /note="3' tri-ethylene glycol (TEG)"
aagauggcauu

SEQ ID NO: 1065 - RNA, 10 nt, Artificial Sequence
  source: /note="Description of Artificial Sequence: Synthetic oligonucleotide"
  source: /note="Antisense Oligonucleotide"
  source: /note="3' tri-ethylene glycol (TEG)"
aagauggcau

SEQ ID NO: 1066 - RNA, 9 nt, Artificial Sequence
  source: /note="Description of Artificial Sequence: Synthetic oligonucleotide"
  source: /note="Antisense Oligonucleotide"
  source: /note="3' tri-ethylene glycol (TEG)"
aagauggca

SEQ ID NO: 1067 - RNA, 8 nt, Artificial Sequence
  source: /note="Description of Artificial Sequence: Synthetic oligonucleotide"
  source: /note="Antisense Oligonucleotide"
  source: /note="3' tri-ethylene glycol (TEG)"
aagauggc

SEQ ID NO: 1068 - RNA, 15 nt, Artificial Sequence
  source: /note="Description of Artificial Sequence: Synthetic oligonucleotide"
  source: /note="Antisense Oligonucleotide"
  source: /note="3' tri-ethylene glycol (TEG)"
agauggcauuucuag

SEQ ID NO: 1069 - RNA, 14 nt, Artificial Sequence
  source: /note="Description of Artificial Sequence: Synthetic oligonucleotide"
  source: /note="Antisense Oligonucleotide"
  source: /note="3' tri-ethylene glycol (TEG)"
agauggcauuucua

SEQ ID NO: 1070 - RNA, 13 nt, Artificial Sequence
  source: /note="Description of Artificial Sequence: Synthetic oligonucleotide"
  source: /note="Antisense Oligonucleotide"
  source: /note="3' tri-ethylene glycol (TEG)"
agauggcauuucu

SEQ ID NO: 1071 - RNA, 12 nt, Artificial Sequence
  source: /note="Description of Artificial Sequence: Synthetic oligonucleotide"
  source: /note="Antisense Oligonucleotide"
  source: /note="3' tri-ethylene glycol (TEG)"
agauggcauuuc

SEQ ID NO: 1072 - RNA, 11 nt, Artificial Sequence
  source: /note="Description of Artificial Sequence: Synthetic oligonucleotide"
  source: /note="Antisense Oligonucleotide"
  source: /note="3' tri-ethylene glycol (TEG)"
agauggcauuu

SEQ ID NO: 1073 - RNA, 10 nt, Artificial Sequence
  source: /note="Description of Artificial Sequence: Synthetic oligonucleotide"
  source: /note="Antisense Oligonucleotide"
  source: /note="3' tri-ethylene glycol (TEG)"
agauggcauu

SEQ ID NO: 1074 - RNA, 9 nt, Artificial Sequence
  source: /note="Description of Artificial Sequence: Synthetic oligonucleotide"
  source: /note="Antisense Oligonucleotide"
  source: /note="3' tri-ethylene glycol (TEG)"
agauggcau

SEQ ID NO: 1075 - RNA, 8 nt, Artificial Sequence
  source: /note="Description of Artificial Sequence: Synthetic oligonucleotide"
  source: /note="Antisense Oligonucleotide"
  source: /note="3' tri-ethylene glycol (TEG)"
agauggca

SEQ ID NO: 1076 - RNA, 30 nt, Artificial Sequence; identical to SEQ ID NO: 284
  source: /note="Description of Artificial Sequence: Synthetic oligonucleotide"
  source: /note="Antisense Oligonucleotide"
  source: /note="3' tri-ethylene glycol (TEG)"

SEQ ID NO: 1077 - RNA, 29 nt, Artificial Sequence
  source: /note="Description of Artificial Sequence: Synthetic oligonucleotide"
  source: /note="Antisense Oligonucleotide"
  source: /note="3' tri-ethylene glycol (TEG)"
cuccaacaucaaggaagauggcauuucua

SEQ ID NO: 1078 - RNA, 28 nt, Artificial Sequence
  source: /note="Description of Artificial Sequence: Synthetic oligonucleotide"
  source: /note="Antisense Oligonucleotide"
  source: /note="3' tri-ethylene glycol (TEG)"
cuccaacaucaaggaagauggcauuucu

SEQ ID NO: 1079 - RNA, 27 nt, Artificial Sequence
  source: /note="Description of Artificial Sequence: Synthetic oligonucleotide"
  source: /note="Antisense Oligonucleotide"
  source: /note="3' tri-ethylene glycol (TEG)"
cuccaacaucaaggaagauggcauuuc

SEQ ID NO: 1080 - RNA, 26 nt, Artificial Sequence
  source: /note="Description of Artificial Sequence: Synthetic oligonucleotide"
  source: /note="Antisense Oligonucleotide"
  source: /note="3' tri-ethylene glycol (TEG)"
cuccaacaucaaggaagauggcauuu

SEQ ID NO: 1081 - RNA, 25 nt, Artificial Sequence
  source: /note="Description of Artificial Sequence: Synthetic oligonucleotide"
  source: /note="Antisense Oligonucleotide"
  source: /note="3' tri-ethylene glycol (TEG)"
cuccaacaucaaggaagauggcauu

SEQ ID NO: 1082 - RNA, 24 nt, Artificial Sequence
  source: /note="Description of Artificial Sequence: Synthetic oligonucleotide"
  source: /note="Antisense Oligonucleotide"
  source: /note="3' tri-ethylene glycol (TEG)"
cuccaacaucaaggaagauggcau

SEQ ID NO: 1083 - RNA, 23 nt, Artificial Sequence
  source: /note="Description of Artificial Sequence: Synthetic oligonucleotide"
  source: /note="Antisense Oligonucleotide"
  source: /note="3' tri-ethylene glycol (TEG)"
cuccaacaucaaggaagauggca

SEQ ID NO: 1084 - RNA, 22 nt, Artificial Sequence
  source: /note="Description of Artificial Sequence: Synthetic oligonucleotide"
  source: /note="Antisense Oligonucleotide"
  source: /note="3' tri-ethylene glycol (TEG)"
cuccaacaucaaggaagauggc

SEQ ID NO: 1085 - RNA, 21 nt, Artificial Sequence
  source: /note="Description of Artificial Sequence: Synthetic oligonucleotide"
  source: /note="Antisense Oligonucleotide"
  source: /note="3' tri-ethylene glycol (TEG)"
cuccaacaucaaggaagaugg

SEQ ID NO: 1086 - RNA, 20 nt, Artificial Sequence
  source: /note="Description of Artificial Sequence: Synthetic oligonucleotide"
  source: /note="Antisense Oligonucleotide"
  source: /note="3' tri-ethylene glycol (TEG)"
cuccaacaucaaggaagaug

SEQ ID NO: 1087 - RNA, 19 nt, Artificial Sequence
  source: /note="Description of Artificial Sequence: Synthetic oligonucleotide"
  source: /note="Antisense Oligonucleotide"
  source: /note="3' tri-ethylene glycol (TEG)"
cuccaacaucaaggaagau

SEQ ID NO: 1088 - RNA, 18 nt, Artificial Sequence
  source: /note="Description of Artificial Sequence: Synthetic oligonucleotide"
  source: /note="Antisense Oligonucleotide"
  source: /note="3' tri-ethylene glycol (TEG)"
cuccaacaucaaggaaga

SEQ ID NO: 1089 - RNA, 17 nt, Artificial Sequence
  source: /note="Description of Artificial Sequence: Synthetic oligonucleotide"
  source: /note="Antisense Oligonucleotide"
  source: /note="3' tri-ethylene glycol (TEG)"
cuccaacaucaaggaag

SEQ ID NO: 1090 - RNA, 29 nt, Artificial Sequence
  source: /note="Description of Artificial Sequence: Synthetic oligonucleotide"
  source: /note="Antisense Oligonucleotide"
  source: /note="3' tri-ethylene glycol (TEG)"
uccaacaucaaggaagauggcauuucuag

SEQ ID NO: 1091 - RNA, 28 nt, Artificial Sequence
  source: /note="Description of Artificial Sequence: Synthetic oligonucleotide"
  source: /note="Antisense Oligonucleotide"
  source: /note="3' tri-ethylene glycol (TEG)"
uccaacaucaaggaagauggcauuucua

SEQ ID NO: 1092 - RNA, 27 nt, Artificial Sequence
  source: /note="Description of Artificial Sequence: Synthetic oligonucleotide"
  source: /note="Antisense Oligonucleotide"
  source: /note="3' tri-ethylene glycol (TEG)"
uccaacaucaaggaagauggcauuucu

SEQ ID NO: 1093 - RNA, 26 nt, Artificial Sequence
  source: /note="Description of Artificial Sequence: Synthetic oligonucleotide"
  source: /note="Antisense Oligonucleotide"
  source: /note="3' tri-ethylene glycol (TEG)"
uccaacaucaaggaagauggcauuuc

SEQ ID NO: 1094 - RNA, 25 nt, Artificial Sequence
  source: /note="Description of Artificial Sequence: Synthetic oligonucleotide"
  source: /note="Antisense Oligonucleotide"
  source: /note="3' tri-ethylene glycol (TEG)"
uccaacaucaaggaagauggcauuu

SEQ ID NO: 1095 - RNA, 24 nt, Artificial Sequence
  source: /note="Description of Artificial Sequence: Synthetic oligonucleotide"
  source: /note="Antisense Oligonucleotide"
  source: /note="3' tri-ethylene glycol (TEG)"
uccaacaucaaggaagauggcauu

SEQ ID NO: 1096 - RNA, 23 nt, Artificial Sequence
  source: /note="Description of Artificial Sequence: Synthetic oligonucleotide"
  source: /note="Antisense Oligonucleotide"
  source: /note="3' tri-ethylene glycol (TEG)"
uccaacaucaaggaagauggcau

SEQ ID NO: 1097 - RNA, 22 nt, Artificial Sequence
  source: /note="Description of Artificial Sequence: Synthetic oligonucleotide"
  source: /note="Antisense Oligonucleotide"
  source: /note="3' tri-ethylene glycol (TEG)"
uccaacaucaaggaagauggca

SEQ ID NO: 1098 - RNA, 21 nt, Artificial Sequence
  source: /note="Description of Artificial Sequence: Synthetic oligonucleotide"
  source: /note="Antisense Oligonucleotide"
  source: /note="3' tri-ethylene glycol (TEG)"
uccaacaucaaggaagauggc

SEQ ID NO: 1099 - RNA, 20 nt, Artificial Sequence
  source: /note="Description of Artificial Sequence: Synthetic oligonucleotide"
  source: /note="Antisense Oligonucleotide"
  source: /note="3' tri-ethylene glycol (TEG)"
uccaacaucaaggaagaugg

SEQ ID NO: 1100 - RNA, 19 nt, Artificial Sequence
  source: /note="Description of Artificial Sequence: Synthetic oligonucleotide"
  source: /note="Antisense Oligonucleotide"
  source: /note="3' tri-ethylene glycol (TEG)"
uccaacaucaaggaagaug

SEQ ID NO: 1101 - RNA, 18 nt, Artificial Sequence
  source: /note="Description of Artificial Sequence: Synthetic oligonucleotide"
  source: /note="Antisense Oligonucleotide"
  source: /note="3' tri-ethylene glycol (TEG)"
uccaacaucaaggaagau

SEQ ID NO: 1102 - RNA, 17 nt, Artificial Sequence
  source: /note="Description of Artificial Sequence: Synthetic oligonucleotide"
  source: /note="Antisense Oligonucleotide"
  source: /note="3' tri-ethylene glycol (TEG)"
uccaacaucaaggaaga

SEQ ID NO: 1103 - RNA, 16 nt, Artificial Sequence
  source: /note="Description of Artificial Sequence: Synthetic oligonucleotide"
  source: /note="Antisense Oligonucleotide"
  source: /note="3' tri-ethylene glycol (TEG)"
uccaacaucaaggaag

SEQ ID NO: 1104 - RNA, 28 nt, Artificial Sequence
  source: /note="Description of Artificial Sequence: Synthetic oligonucleotide"
  source: /note="Antisense Oligonucleotide"
  source: /note="3' tri-ethylene glycol (TEG)"
ccaacaucaaggaagauggcauuucuag

SEQ ID NO: 1105 - RNA, 27 nt, Artificial Sequence
  source: /note="Description of Artificial Sequence: Synthetic oligonucleotide"
  source: /note="Antisense Oligonucleotide"
  source: /note="3' tri-ethylene glycol (TEG)"
ccaacaucaaggaagauggcauuucua

SEQ ID NO: 1106 - RNA, 26 nt, Artificial Sequence
  source: /note="Description of Artificial Sequence: Synthetic oligonucleotide"
  source: /note="Antisense Oligonucleotide"
  source: /note="3' tri-ethylene glycol (TEG)"
ccaacaucaaggaagauggcauuucu

SEQ ID NO: 1107 - RNA, 25 nt, Artificial Sequence
  source: /note="Description of Artificial Sequence: Synthetic oligonucleotide"
  source: /note="Antisense Oligonucleotide"
  source: /note="3' tri-ethylene glycol (TEG)"
ccaacaucaaggaagauggcauuuc

SEQ ID NO: 1108 - RNA, 24 nt, Artificial Sequence
  source: /note="Description of Artificial Sequence: Synthetic oligonucleotide"
  source: /note="Antisense Oligonucleotide"
  source: /note="3' tri-ethylene glycol (TEG)"
ccaacaucaaggaagauggcauuu

SEQ ID NO: 1109 - RNA, 23 nt, Artificial Sequence
  source: /note="Description of Artificial Sequence: Synthetic oligonucleotide"
  source: /note="Antisense Oligonucleotide"
  source: /note="3' tri-ethylene glycol (TEG)"
ccaacaucaaggaagauggcauu

SEQ ID NO: 1110 - RNA, 22 nt, Artificial Sequence
  source: /note="Description of Artificial Sequence: Synthetic oligonucleotide"
  source: /note="Antisense Oligonucleotide"
  source: /note="3' tri-ethylene glycol (TEG)"
ccaacaucaaggaagauggcau

SEQ ID NO: 1111 - RNA, 21 nt, Artificial Sequence
  source: /note="Description of Artificial Sequence: Synthetic oligonucleotide"
  source: /note="Antisense Oligonucleotide"
  source: /note="3' tri-ethylene glycol (TEG)"
ccaacaucaaggaagauggca

SEQ ID NO: 1112 - RNA, 20 nt, Artificial Sequence
  source: /note="Description of Artificial Sequence: Synthetic oligonucleotide"
  source: /note="Antisense Oligonucleotide"
  source: /note="3' tri-ethylene glycol (TEG)"
ccaacaucaaggaagauggc

SEQ ID NO: 1113 - RNA, 19 nt, Artificial Sequence
  source: /note="Description of Artificial Sequence: Synthetic oligonucleotide"
  source: /note="Antisense Oligonucleotide"
  source: /note="3' tri-ethylene glycol (TEG)"
ccaacaucaaggaagaugg

SEQ ID NO: 1114 - RNA, 18 nt, Artificial Sequence
  source: /note="Description of Artificial Sequence: Synthetic oligonucleotide"
  source: /note="Antisense Oligonucleotide"
  source: /note="3' tri-ethylene glycol (TEG)"
ccaacaucaaggaagaug

SEQ ID NO: 1115 - RNA, 17 nt, Artificial Sequence
  source: /note="Description of Artificial Sequence: Synthetic oligonucleotide"
  source: /note="Antisense Oligonucleotide"
  source: /note="3' tri-ethylene glycol (TEG)"
ccaacaucaaggaagau

SEQ ID NO: 1116 - RNA, 16 nt, Artificial Sequence
  source: /note="Description of Artificial Sequence: Synthetic oligonucleotide"
  source: /note="Antisense Oligonucleotide"
  source: /note="3' tri-ethylene glycol (TEG)"
ccaacaucaaggaaga

SEQ ID NO: 1117 - RNA, 15 nt, Artificial Sequence
  source: /note="Description of Artificial Sequence: Synthetic oligonucleotide"
  source: /note="Antisense Oligonucleotide"
  source: /note="3' tri-ethylene glycol (TEG)"
ccaacaucaaggaag

SEQ ID NO: 1118 - RNA, 27 nt, Artificial Sequence
  source: /note="Description of Artificial Sequence: Synthetic oligonucleotide"
  source: /note="Antisense Oligonucleotide"
  source: /note="3' tri-ethylene glycol (TEG)"
caacaucaaggaagauggcauuucuag

SEQ ID NO: 1119 - RNA, 26 nt, Artificial Sequence
  source: /note="Description of Artificial Sequence: Synthetic oligonucleotide"
  source: /note="Antisense Oligonucleotide"
  source: /note="3' tri-ethylene glycol (TEG)"
caacaucaaggaagauggcauuucua

SEQ ID NO: 1120 - RNA, 25 nt, Artificial Sequence
  source: /note="Description of Artificial Sequence: Synthetic oligonucleotide"
  source: /note="Antisense Oligonucleotide"
  source: /note="3' tri-ethylene glycol (TEG)"
caacaucaaggaagauggcauuucu

SEQ ID NO: 1121 - RNA, 24 nt, Artificial Sequence
  source: /note="Description of Artificial Sequence: Synthetic oligonucleotide"
  source: /note="Antisense Oligonucleotide"
  source: /note="3' tri-ethylene glycol (TEG)"
caacaucaaggaagauggcauuuc

SEQ ID NO: 1122 - RNA, 23 nt, Artificial Sequence
  source: /note="Description of Artificial Sequence: Synthetic oligonucleotide"
  source: /note="Antisense Oligonucleotide"
  source: /note="3' tri-ethylene glycol (TEG)"
caacaucaaggaagauggcauuu

SEQ ID NO: 1123 - RNA, 22 nt, Artificial Sequence
  source: /note="Description of Artificial Sequence: Synthetic oligonucleotide"
  source: /note="Antisense Oligonucleotide"
  source: /note="3' tri-ethylene glycol (TEG)"
caacaucaaggaagauggcauu

SEQ ID NO: 1124 - RNA, 21 nt, Artificial Sequence
  source: /note="Description of Artificial Sequence: Synthetic oligonucleotide"
  source: /note="Antisense Oligonucleotide"
  source: /note="3' tri-ethylene glycol (TEG)"
caacaucaaggaagauggcau

SEQ ID NO: 1125 - RNA, 20 nt, Artificial Sequence
  source: /note="Description of Artificial Sequence: Synthetic oligonucleotide"
  source: /note="Antisense Oligonucleotide"
  source: /note="3' tri-ethylene glycol (TEG)"
caacaucaaggaagauggca

SEQ ID NO: 1126 - RNA, 19 nt, Artificial Sequence
  source: /note="Description of Artificial Sequence: Synthetic oligonucleotide"
  source: /note="Antisense Oligonucleotide"
  source: /note="3' tri-ethylene glycol (TEG)"
caacaucaaggaagauggc

SEQ ID NO: 1127 - RNA, 18 nt, Artificial Sequence
  source: /note="Description of Artificial Sequence: Synthetic oligonucleotide"
  source: /note="Antisense Oligonucleotide"
  source: /note="3' tri-ethylene glycol (TEG)"
caacaucaaggaagaugg

SEQ ID NO: 1128 - RNA, 17 nt, Artificial Sequence
  source: /note="Description of Artificial Sequence: Synthetic oligonucleotide"
  source: /note="Antisense Oligonucleotide"
  source: /note="3' tri-ethylene glycol (TEG)"
caacaucaaggaagaug

SEQ ID NO: 1129 - RNA, 16 nt, Artificial Sequence
  source: /note="Description of Artificial Sequence: Synthetic oligonucleotide"
  source: /note="Antisense Oligonucleotide"
  source: /note="3' tri-ethylene glycol (TEG)"
caacaucaaggaagau

SEQ ID NO: 1130 - RNA, 15 nt, Artificial Sequence
  source: /note="Description of Artificial Sequence: Synthetic oligonucleotide"
  source: /note="Antisense Oligonucleotide"
  source: /note="3' tri-ethylene glycol (TEG)"
caacaucaaggaaga

SEQ ID NO: 1131 - RNA, 14 nt, Artificial Sequence
  source: /note="Description of Artificial Sequence: Synthetic oligonucleotide"
  source: /note="Antisense Oligonucleotide"
  source: /note="3' tri-ethylene glycol (TEG)"
caacaucaaggaag

SEQ ID NO: 1132 - RNA, 26 nt, Artificial Sequence
  source: /note="Description of Artificial Sequence: Synthetic oligonucleotide"
  source: /note="Antisense Oligonucleotide"
  source: /note="3' tri-ethylene glycol (TEG)"
aacaucaaggaagauggcauuucuag

SEQ ID NO: 1133 - RNA, 25 nt, Artificial Sequence
  source: /note="Description of Artificial Sequence: Synthetic oligonucleotide"
  source: /note="Antisense Oligonucleotide"
  source: /note="3' tri-ethylene glycol (TEG)"
aacaucaaggaagauggcauuucua

SEQ ID NO: 1134 - RNA, 24 nt, Artificial Sequence
  source: /note="Description of Artificial Sequence: Synthetic oligonucleotide"
  source: /note="Antisense Oligonucleotide"
  source: /note="3' tri-ethylene glycol (TEG)"
aacaucaaggaagauggcauuucu

SEQ ID NO: 1135 - RNA, 23 nt, Artificial Sequence
  source: /note="Description of Artificial Sequence: Synthetic oligonucleotide"
  source: /note="Antisense Oligonucleotide"
  source: /note="3' tri-ethylene glycol (TEG)"
aacaucaaggaagauggcauuuc

SEQ ID NO: 1136 - RNA, 22 nt, Artificial Sequence
  source: /note="Description of Artificial Sequence: Synthetic oligonucleotide"
  source: /note="Antisense Oligonucleotide"
  source: /note="3' tri-ethylene glycol (TEG)"
aacaucaaggaagauggcauuu

SEQ ID NO: 1137 - RNA, 21 nt, Artificial Sequence
  source: /note="Description of Artificial Sequence: Synthetic oligonucleotide"
  source: /note="Antisense Oligonucleotide"
  source: /note="3' tri-ethylene glycol (TEG)"
aacaucaaggaagauggcauu

SEQ ID NO: 1138 - RNA, 20 nt, Artificial Sequence
  source: /note="Description of Artificial Sequence: Synthetic oligonucleotide"
  source: /note="Antisense Oligonucleotide"
  source: /note="3' tri-ethylene glycol (TEG)"
aacaucaaggaagauggcau

SEQ ID NO: 1139 - RNA, 19 nt, Artificial Sequence
  source: /note="Description of Artificial Sequence: Synthetic oligonucleotide"
  source: /note="Antisense Oligonucleotide"
  source: /note="3' tri-ethylene glycol (TEG)"
aacaucaaggaagauggca

SEQ ID NO: 1140 - RNA, 18 nt, Artificial Sequence
  source: /note="Description of Artificial Sequence: Synthetic oligonucleotide"
  source: /note="Antisense Oligonucleotide"
  source: /note="3' tri-ethylene glycol (TEG)"
aacaucaaggaagauggc

SEQ ID NO: 1141 - RNA, 17 nt, Artificial Sequence
  source: /note="Description of Artificial Sequence: Synthetic oligonucleotide"
  source: /note="Antisense Oligonucleotide"
  source: /note="3' tri-ethylene glycol (TEG)"
aacaucaaggaagaugg

SEQ ID NO: 1142 - RNA, 16 nt, Artificial Sequence
  source: /note="Description of Artificial Sequence: Synthetic oligonucleotide"
  source: /note="Antisense Oligonucleotide"
  source: /note="3' tri-ethylene glycol (TEG)"
aacaucaaggaagaug

SEQ ID NO: 1143 - RNA, 15 nt, Artificial Sequence
  source: /note="Description of Artificial Sequence: Synthetic oligonucleotide"
  source: /note="Antisense Oligonucleotide"
  source: /note="3' tri-ethylene glycol (TEG)"
aacaucaaggaagau

SEQ ID NO: 1144 - RNA, 14 nt, Artificial Sequence
  source: /note="Description of Artificial Sequence: Synthetic oligonucleotide"
  source: /note="Antisense Oligonucleotide"
  source: /note="3' tri-ethylene glycol (TEG)"
aacaucaaggaaga

SEQ ID NO: 1145 - RNA, 13 nt, Artificial Sequence
  source: /note="Description of Artificial Sequence: Synthetic oligonucleotide"
  source: /note="Antisense Oligonucleotide"
  source: /note="3' tri-ethylene glycol (TEG)"
aacaucaaggaag

SEQ ID NO: 1146 - RNA, 25 nt, Artificial Sequence
  source: /note="Description of Artificial Sequence: Synthetic oligonucleotide"
  source: /note="Antisense Oligonucleotide"
  source: /note="3' tri-ethylene glycol (TEG)"
acaucaaggaagauggcauuucuag

SEQ ID NO: 1147 - RNA, 24 nt, Artificial Sequence
  source: /note="Description of Artificial Sequence: Synthetic oligonucleotide"
  source: /note="Antisense Oligonucleotide"
  source: /note="3' tri-ethylene glycol (TEG)"
acaucaaggaagauggcauuucua

SEQ ID NO: 1148 - RNA, 23 nt, Artificial Sequence
  source: /note="Description of Artificial Sequence: Synthetic oligonucleotide"
  source: /note="Antisense Oligonucleotide"
  source: /note="3' tri-ethylene glycol (TEG)"
acaucaaggaagauggcauuucu

SEQ ID NO: 1149 - RNA, 22 nt, Artificial Sequence
  source: /note="Description of Artificial Sequence: Synthetic oligonucleotide"
  source: /note="Antisense Oligonucleotide"
  source: /note="3' tri-ethylene glycol (TEG)"
acaucaaggaagauggcauuuc

SEQ ID NO: 1150 - RNA, 21 nt, Artificial Sequence
  source: /note="Description of Artificial Sequence: Synthetic oligonucleotide"
  source: /note="Antisense Oligonucleotide"
  source: /note="3' tri-ethylene glycol (TEG)"
acaucaaggaagauggcauuu

SEQ ID NO: 1151 - RNA, 20 nt, Artificial Sequence
  source: /note="Description of Artificial Sequence: Synthetic oligonucleotide"
  source: /note="Antisense Oligonucleotide"
  source: /note="3' tri-ethylene glycol (TEG)"
acaucaaggaagauggcauu

SEQ ID NO: 1152 - RNA, 19 nt, Artificial Sequence
  source: /note="Description of Artificial Sequence: Synthetic oligonucleotide"
  source: /note="Antisense Oligonucleotide"
  source: /note="3' tri-ethylene glycol (TEG)"
acaucaaggaagauggcau

SEQ ID NO: 1153 - RNA, 18 nt, Artificial Sequence
  source: /note="Description of Artificial Sequence: Synthetic oligonucleotide"
  source: /note="Antisense Oligonucleotide"
  source: /note="3' tri-ethylene glycol (TEG)"
acaucaaggaagauggca

SEQ ID NO: 1154 - RNA, 17 nt, Artificial Sequence
  source: /note="Description of Artificial Sequence: Synthetic oligonucleotide"
  source: /note="Antisense Oligonucleotide"
  source: /note="3' tri-ethylene glycol (TEG)"
acaucaaggaagauggc

SEQ ID NO: 1155 - RNA, 16 nt, Artificial Sequence
  source: /note="Description of Artificial Sequence: Synthetic oligonucleotide"
  source: /note="Antisense Oligonucleotide"
  source: /note="3' tri-ethylene glycol (TEG)"
acaucaaggaagaugg

SEQ ID NO: 1156 - RNA, 15 nt, Artificial Sequence
  source: /note="Description of Artificial Sequence: Synthetic oligonucleotide"
  source: /note="Antisense Oligonucleotide"
  source: /note="3' tri-ethylene glycol (TEG)"
acaucaaggaagaug

SEQ ID NO: 1157 - RNA, 14 nt, Artificial Sequence
  source: /note="Description of Artificial Sequence: Synthetic oligonucleotide"
  source: /note="Antisense Oligonucleotide"
  source: /note="3' tri-ethylene glycol (TEG)"
acaucaaggaagau

SEQ ID NO: 1158 - RNA, 13 nt, Artificial Sequence
  source: /note="Description of Artificial Sequence: Synthetic oligonucleotide"
  source: /note="Antisense Oligonucleotide"
  source: /note="3' tri-ethylene glycol (TEG)"
acaucaaggaaga

SEQ ID NO: 1159 - RNA, 12 nt, Artificial Sequence
  source: /note="Description of Artificial Sequence: Synthetic oligonucleotide"
  source: /note="Antisense Oligonucleotide"
  source: /note="3' tri-ethylene glycol (TEG)"
acaucaaggaag

SEQ ID NO: 1160 - RNA, 24 nt, Artificial Sequence
  source: /note="Description of Artificial Sequence: Synthetic oligonucleotide"
  source: /note="Antisense Oligonucleotide"
  source: /note="3' tri-ethylene glycol (TEG)"
caucaaggaagauggcauuucuag

SEQ ID NO: 1161 - RNA, 23 nt, Artificial Sequence
  source: /note="Description of Artificial Sequence: Synthetic oligonucleotide"
  source: /note="Antisense Oligonucleotide"
  source: /note="3' tri-ethylene glycol (TEG)"
caucaaggaagauggcauuucua

SEQ ID NO: 1162 - RNA, 22 nt, Artificial Sequence
  source: /note="Description of Artificial Sequence: Synthetic oligonucleotide"
  source: /note="Antisense Oligonucleotide"
  source: /note="3' tri-ethylene glycol (TEG)"
caucaaggaagauggcauuucu

SEQ ID NO: 1163 - RNA, 21 nt, Artificial Sequence
  source: /note="Description of Artificial Sequence: Synthetic oligonucleotide"
  source: /note="Antisense Oligonucleotide"
  source: /note="3' tri-ethylene glycol (TEG)"
caucaaggaagauggcauuuc

SEQ ID NO: 1164 - RNA, 20 nt, Artificial Sequence
  source: /note="Description of Artificial Sequence: Synthetic oligonucleotide"
  source: /note="Antisense Oligonucleotide"
  source: /note="3' tri-ethylene glycol (TEG)"
caucaaggaagauggcauuu

SEQ ID NO: 1165 - RNA, 19 nt, Artificial Sequence
  source: /note="Description of Artificial Sequence: Synthetic oligonucleotide"
  source: /note="Antisense Oligonucleotide"
  source: /note="3' tri-ethylene glycol (TEG)"
caucaaggaagauggcauu

SEQ ID NO: 1166 - RNA, 18 nt, Artificial Sequence
  source: /note="Description of Artificial Sequence: Synthetic oligonucleotide"
  source: /note="Antisense Oligonucleotide"
  source: /note="3' tri-ethylene glycol (TEG)"
caucaaggaagauggcau

SEQ ID NO: 1167 - RNA, 17 nt, Artificial Sequence
  source: /note="Description of Artificial Sequence: Synthetic oligonucleotide"
  source: /note="Antisense Oligonucleotide"
  source: /note="3' tri-ethylene glycol (TEG)"
caucaaggaagauggca

SEQ ID NO: 1168 - RNA, 16 nt, Artificial Sequence
  source: /note="Description of Artificial Sequence: Synthetic oligonucleotide"
  source: /note="Antisense Oligonucleotide"
  source: /note="3' tri-ethylene glycol (TEG)"
caucaaggaagauggc

SEQ ID NO: 1169 - RNA, 15 nt, Artificial Sequence
  source: /note="Description of Artificial Sequence: Synthetic oligonucleotide"
  source: /note="Antisense Oligonucleotide"
  source: /note="3' tri-ethylene glycol (TEG)"
caucaaggaagaugg

SEQ ID NO: 1170 - RNA, 14 nt, Artificial Sequence
  source: /note="Description of Artificial Sequence: Synthetic oligonucleotide"
  source: /note="Antisense Oligonucleotide"
  source: /note="3' tri-ethylene glycol (TEG)"
caucaaggaagaug

SEQ ID NO: 1171 - RNA, 13 nt, Artificial Sequence
  source: /note="Description of Artificial Sequence: Synthetic oligonucleotide"
  source: /note="Antisense Oligonucleotide"
  source: /note="3' tri-ethylene glycol (TEG)"
caucaaggaagau

SEQ ID NO: 1172 - RNA, 12 nt, Artificial Sequence
  source: /note="Description of Artificial Sequence: Synthetic oligonucleotide"
  source: /note="Antisense Oligonucleotide"
  source: /note="3' tri-ethylene glycol (TEG)"
caucaaggaaga

SEQ ID NO: 1173 - RNA, 11 nt, Artificial Sequence
  source: /note="Description of Artificial Sequence: Synthetic oligonucleotide"
  source: /note="Antisense Oligonucleotide"
  source: /note="3' tri-ethylene glycol (TEG)"
caucaaggaag

SEQ ID NO: 1174 - RNA, 23 nt, Artificial Sequence
  source: /note="Description of Artificial Sequence: Synthetic oligonucleotide"
  source: /note="Antisense Oligonucleotide"
  source: /note="3' tri-ethylene glycol (TEG)"
aucaaggaagauggcauuucuag

SEQ ID NO: 1175 - RNA, 22 nt, Artificial Sequence
  source: /note="Description of Artificial Sequence: Synthetic oligonucleotide"
  source: /note="Antisense Oligonucleotide"
  source: /note="3' tri-ethylene glycol (TEG)"
aucaaggaagauggcauuucua

SEQ ID NO: 1176 - RNA, 21 nt, Artificial Sequence
  source: /note="Description of Artificial Sequence: Synthetic oligonucleotide"
  source: /note="Antisense Oligonucleotide"
  source: /note="3' tri-ethylene glycol (TEG)"
aucaaggaagauggcauuucu

SEQ ID NO: 1177 - RNA, 20 nt, Artificial Sequence
  source: /note="Description of Artificial Sequence: Synthetic oligonucleotide"
  source: /note="Antisense Oligonucleotide"
  source: /note="3' tri-ethylene glycol (TEG)"
aucaaggaagauggcauuuc

SEQ ID NO: 1178 - RNA, 19 nt, Artificial Sequence
  source: /note="Description of Artificial Sequence: Synthetic oligonucleotide"
  source: /note="Antisense Oligonucleotide"
  source: /note="3' tri-ethylene glycol (TEG)"
aucaaggaagauggcauuu

SEQ ID NO: 1179 - RNA, 18 nt, Artificial Sequence
  source: /note="Description of Artificial Sequence: Synthetic oligonucleotide"
  source: /note="Antisense Oligonucleotide"
  source: /note="3' tri-ethylene glycol (TEG)"
aucaaggaagauggcauu

SEQ ID NO: 1180 - RNA, 17 nt, Artificial Sequence
  source: /note="Description of Artificial Sequence: Synthetic oligonucleotide"
  source: /note="Antisense Oligonucleotide"
  source: /note="3' tri-ethylene glycol (TEG)"
aucaaggaagauggcau

SEQ ID NO: 1181 - RNA, 16 nt, Artificial Sequence
  source: /note="Description of Artificial Sequence: Synthetic oligonucleotide"
  source: /note="Antisense Oligonucleotide"
  source: /note="3' tri-ethylene glycol (TEG)"
aucaaggaagauggca

SEQ ID NO: 1182 - RNA, 15 nt, Artificial Sequence
  source: /note="Description of Artificial Sequence: Synthetic oligonucleotide"
  source: /note="Antisense Oligonucleotide"
  source: /note="3' tri-ethylene glycol (TEG)"
aucaaggaagauggc

SEQ ID NO: 1183 - RNA, 14 nt, Artificial Sequence
  source: /note="Description of Artificial Sequence: Synthetic oligonucleotide"
  source: /note="Antisense Oligonucleotide"
  source: /note="3' tri-ethylene glycol (TEG)"
aucaaggaagaugg

SEQ ID NO: 1184 - RNA, 13 nt, Artificial Sequence
  source: /note="Description of Artificial Sequence: Synthetic oligonucleotide"
  source: /note="Antisense Oligonucleotide"
  source: /note="3' tri-ethylene glycol (TEG)"
aucaaggaagaug

SEQ ID NO: 1185 - RNA, 12 nt, Artificial Sequence
  source: /note="Description of Artificial Sequence: Synthetic oligonucleotide"
  source: /note="Antisense Oligonucleotide"
  source: /note="3' tri-ethylene glycol (TEG)"
aucaaggaagau

SEQ ID NO: 1186 - RNA, 11 nt, Artificial Sequence
  source: /note="Description of Artificial Sequence: Synthetic oligonucleotide"
  source: /note="Antisense Oligonucleotide"
  source: /note="3' tri-ethylene glycol (TEG)"
aucaaggaaga

SEQ ID NO: 1187 - RNA, 10 nt, Artificial Sequence
  source: /note="Description of Artificial Sequence: Synthetic oligonucleotide"
  source: /note="Antisense Oligonucleotide"
  source: /note="3' tri-ethylene glycol (TEG)"
aucaaggaag

SEQ ID NO: 1188 - RNA, 23 nt, Artificial Sequence
  source: /note="Description of Artificial Sequence: Synthetic oligonucleotide"
  source: /note="Antisense Oligonucleotide"
  source: /note="3' tri-ethylene glycol (TEG)"
ccagagcagguaccuccaacauc

SEQ ID NO: 1189 - RNA, 18 nt, Artificial Sequence
  source: /note="Description of Artificial Sequence: Synthetic oligonucleotide"
  source: /note="Antisense Oligonucleotide"
  source: /note="3' tri-ethylene glycol (TEG)"
ccagagcagguaccucca

SEQ ID NO: 1190 - RNA, 23 nt, Artificial Sequence
  source: /note="Description of Artificial Sequence: Synthetic oligonucleotide"
  source: /note="Antisense Oligonucleotide"
  source: /note="3' tri-ethylene glycol (TEG)"
ccucugugauuuuauaacuugau

SEQ ID NO: 1191 - RNA, 17 nt, Artificial Sequence
  source: /note="Description of Artificial Sequence: Synthetic oligonucleotide"
  source: /note="Antisense Oligonucleotide"
  source: /note="3' tri-ethylene glycol (TEG)"
ucacccaccaucacccu

SEQ ID NO: 1192 - RNA, 20 nt, Artificial Sequence
  source: /note="Description of Artificial Sequence: Synthetic oligonucleotide"
  source: /note="Antisense Oligonucleotide"
  source: /note="3' tri-ethylene glycol (TEG)"
ugauauccucaaggucaccc

SEQ ID NO: 1193 - RNA, 22 nt, Artificial Sequence
  source: /note="Description of Artificial Sequence: Synthetic oligonucleotide"
  source: /note="Antisense Oligonucleotide"
  source: /note="3' tri-ethylene glycol (TEG)"
cugcuugaugaucaucucguug

SEQ ID NO: 1194 - RNA, 18 nt, Artificial Sequence
  source: /note="Description of Artificial Sequence: Synthetic oligonucleotide"
  source: /note="Antisense Oligonucleotide"
  source: /note="3' tri-ethylene glycol (TEG)"
cugcuugaugaucaucuc

SEQ ID NO: 1195 - RNA, 19 nt, Artificial Sequence
  source: /note="Description of Artificial Sequence: Synthetic oligonucleotide"
  source: /note="Antisense Oligonucleotide"
  source: /note="3' tri-ethylene glycol (TEG)"
guuuccuuaguaaccacag

SEQ ID NO: 1196 - RNA, 17 nt, Artificial Sequence
  source: /note="Description of Artificial Sequence: Synthetic oligonucleotide"
  source: /note="Antisense Oligonucleotide"
  source: /note="3' tri-ethylene glycol (TEG)"
guuuccuuaguaaccac

SEQ ID NO: 1197 - RNA, 20 nt, Artificial Sequence
  source: /note="Description of Artificial Sequence: Synthetic oligonucleotide"
  source: /note="Antisense Oligonucleotide"
  source: /note="5' tri-ethylene glycol (TEG)"
  source: /note="3' tri-ethylene glycol (TEG)"
ucaaggaagauggcauuucu

SEQ ID NO: 1198 - RNA, 22 nt, Artificial Sequence
  source: /note="Description of Artificial Sequence: Synthetic oligonucleotide"
  source: /note="Antisense Oligonucleotide"
  source: /note="5' tri-ethylene glycol (TEG)"
  source: /note="3' tri-ethylene glycol (TEG)"
ucaaggaagauggcauuucuag

SEQ ID NO: 1199 - RNA, 18 nt, Artificial Sequence
  source: /note="Description of Artificial Sequence: Synthetic oligonucleotide"
  source: /note="Antisense Oligonucleotide"
  source: /note="5' tri-ethylene glycol (TEG)"
  source: /note="3' tri-ethylene glycol (TEG)"
gguaaguucuguccaagc

SEQ ID NO: 1200 - RNA, 18 nt, Artificial Sequence
  source: /note="Description of Artificial Sequence: Synthetic oligonucleotide"
  source: /note="Antisense Oligonucleotide"
  source: /note="5' tri-ethylene glycol (TEG)"
  source: /note="3' tri-ethylene glycol (TEG)"
guaaguucuguccaagcc

SEQ ID NO: 1201 - RNA, 18 nt, Artificial Sequence
  source: /note="Description of Artificial Sequence: Synthetic oligonucleotide"
  source: /note="Antisense Oligonucleotide"
  source: /note="5' tri-ethylene glycol (TEG)"
  source: /note="3' tri-ethylene glycol (TEG)"
agucgguaaguucugucc

SEQ ID NO: 1202 - RNA, 18 nt, Artificial Sequence
  source: /note="Description of Artificial Sequence: Synthetic oligonucleotide"
  source: /note="Antisense Oligonucleotide"
  source: /note="5' tri-ethylene glycol (TEG)"
  source: /note="3' tri-ethylene glycol (TEG)"
cuguccaagcccgguuga

SEQ ID NO: 1203 - RNA, 15 nt, Artificial Sequence
  source: /note="Description of Artificial Sequence: Synthetic oligonucleotide"
  source: /note="Antisense Oligonucleotide"
  source: /note="5' tri-ethylene glycol (TEG)"
  source: /note="3' tri-ethylene glycol (TEG)"
uaaguucuguccaag

SEQ ID NO: 1204 - RNA, 20 nt, Artificial Sequence
  source: /note="Description of Artificial Sequence: Synthetic oligonucleotide"
  source: /note="Antisense Oligonucleotide"
  source: /note="5' tri-ethylene glycol (TEG)"
  source: /note="3' tri-ethylene glycol (TEG)"
uucuguccaagcccgguuga

SEQ ID NO: 1205 - RNA, 19 nt, Artificial Sequence
  source: /note="Description of Artificial Sequence: Synthetic oligonucleotide"
  source: /note="Antisense Oligonucleotide"
  source: /note="5' tri-ethylene glycol (TEG)"
  source: /note="3' tri-ethylene glycol (TEG)"
uucuguccaagcccgguug

SEQ ID NO: 1206 - RNA, 18 nt, Artificial Sequence
  source: /note="Description of Artificial Sequence: Synthetic oligonucleotide"
  source: /note="Antisense Oligonucleotide"
  source: /note="5' tri-ethylene glycol (TEG)"
  source: /note="3' tri-ethylene glycol (TEG)"
uucuguccaagcccgguu

SEQ ID NO: 1207 - RNA, 17 nt, Artificial Sequence
  source: /note="Description of Artificial Sequence: Synthetic oligonucleotide"
  source: /note="Antisense Oligonucleotide"
  source: /note="5' tri-ethylene glycol (TEG)"
  source: /note="3' tri-ethylene glycol (TEG)"
uucuguccaagcccggu

SEQ ID NO: 1208 - RNA, 16 nt, Artificial Sequence
  source: /note="Description of Artificial Sequence: Synthetic oligonucleotide"
  source: /note="Antisense Oligonucleotide"
  source: /note="5' tri-ethylene glycol (TEG)"
  source: /note="3' tri-ethylene glycol (TEG)"
uucuguccaagcccgg

SEQ ID NO: 1209 - RNA, 15 nt, Artificial Sequence
  source: /note="Description of Artificial Sequence: Synthetic oligonucleotide"
  source: /note="Antisense Oligonucleotide"
  source: /note="5' tri-ethylene glycol (TEG)"
  source: /note="3' tri-ethylene glycol (TEG)"
uucuguccaagcccg

SEQ ID NO: 1210 - RNA, 14 nt, Artificial Sequence
  source: /note="Description of Artificial Sequence: Synthetic oligonucleotide"
  source: /note="Antisense Oligonucleotide"
  source: /note="5' tri-ethylene glycol (TEG)"
  source: /note="3' tri-ethylene glycol (TEG)"
uucuguccaagccc

SEQ ID NO: 1211 - RNA, 13 nt, Artificial Sequence
  source: /note="Description of Artificial Sequence: Synthetic oligonucleotide"
  source: /note="Antisense Oligonucleotide"
  source: /note="5' tri-ethylene glycol (TEG)"
  source: /note="3' tri-ethylene glycol (TEG)"
uucuguccaagcc

SEQ ID NO: 1212 - RNA, 12 nt, Artificial Sequence
  source: /note="Description of Artificial Sequence: Synthetic oligonucleotide"
  source: /note="Antisense Oligonucleotide"
  source: /note="5' tri-ethylene glycol (TEG)"
  source: /note="3' tri-ethylene glycol (TEG)"
uucuguccaagc

SEQ ID NO: 1213 - RNA, 11 nt, Artificial Sequence
  source: /note="Description of Artificial Sequence: Synthetic oligonucleotide"
  source: /note="Antisense Oligonucleotide"
  source: /note="5' tri-ethylene glycol (TEG)"
  source: /note="3' tri-ethylene glycol (TEG)"
uucuguccaag

SEQ ID NO: 1214 - RNA, 10 nt, Artificial Sequence
  source: /note="Description of Artificial Sequence: Synthetic oligonucleotide"
  source: /note="Antisense Oligonucleotide"
  source: /note="5' tri-ethylene glycol (TEG)"
  source: /note="3' tri-ethylene glycol (TEG)"
uucuguccaa

SEQ ID NO: 1215 - RNA, 9 nt, Artificial Sequence
  source: /note="Description of Artificial Sequence: Synthetic oligonucleotide"
  source: /note="Antisense Oligonucleotide"
  source: /note="5' tri-ethylene glycol (TEG)"
  source: /note="3' tri-ethylene glycol (TEG)"
uucugucca

SEQ ID NO: 1216 - RNA, 8 nt, Artificial Sequence
  source: /note="Description of Artificial Sequence: Synthetic oligonucleotide"
  source: /note="Antisense Oligonucleotide"
  source: /note="5' tri-ethylene glycol (TEG)"
  source: /note="3' tri-ethylene glycol (TEG)"
uucugucc

SEQ ID NO: 1217 - RNA, 19 nt, Artificial Sequence
  source: /note="Description of Artificial Sequence: Synthetic oligonucleotide"
  source: /note="Antisense Oligonucleotide"
  source: /note="5' tri-ethylene glycol (TEG)"
  source: /note="3' tri-ethylene glycol (TEG)"
ucuguccaagcccgguuga

SEQ ID NO: 1218 - RNA, 18 nt, Artificial Sequence
  source: /note="Description of Artificial Sequence: Synthetic oligonucleotide"
  source: /note="Antisense Oligonucleotide"
  source: /note="5' tri-ethylene glycol (TEG)"
  source: /note="3' tri-ethylene glycol (TEG)"
ucuguccaagcccgguug

SEQ ID NO: 1219 - RNA, 17 nt, Artificial Sequence
  source: /note="Description of Artificial Sequence: Synthetic oligonucleotide"
  source: /note="Antisense Oligonucleotide"
  source: /note="5' tri-ethylene glycol (TEG)"
  source: /note="3' tri-ethylene glycol (TEG)"
ucuguccaagcccgguu

SEQ ID NO: 1220 - RNA, 16 nt, Artificial Sequence
  source: /note="Description of Artificial Sequence: Synthetic oligonucleotide"
  source: /note="Antisense Oligonucleotide"
  source: /note="5' tri-ethylene glycol (TEG)"
  source: /note="3' tri-ethylene glycol (TEG)"
ucuguccaagcccggu

SEQ ID NO: 1221 - RNA, 15 nt, Artificial Sequence
  source: /note="Description of Artificial Sequence: Synthetic oligonucleotide"
  source: /note="Antisense Oligonucleotide"
  source: /note="5' tri-ethylene glycol (TEG)"
  source: /note="3' tri-ethylene glycol (TEG)"
ucuguccaagcccgg

SEQ ID NO: 1222 - RNA, 14 nt, Artificial Sequence
  source: /note="Description of Artificial Sequence: Synthetic oligonucleotide"
  source: /note="Antisense Oligonucleotide"
  source: /note="5' tri-ethylene glycol (TEG)"
  source: /note="3' tri-ethylene glycol (TEG)"
ucuguccaagcccg

SEQ ID NO: 1223 - RNA, 13 nt, Artificial Sequence
  source: /note="Description of Artificial Sequence: Synthetic oligonucleotide"
  source: /note="Antisense Oligonucleotide"
  source: /note="5' tri-ethylene glycol (TEG)"
  source: /note="3' tri-ethylene glycol (TEG)"
ucuguccaagccc

SEQ ID NO: 1224 - RNA, 12 nt, Artificial Sequence
  source: /note="Description of Artificial Sequence: Synthetic oligonucleotide"
  source: /note="Antisense Oligonucleotide"
  source: /note="5' tri-ethylene glycol (TEG)"
  source: /note="3' tri-ethylene glycol (TEG)"
ucuguccaagcc

SEQ ID NO: 1225 - RNA, 11 nt, Artificial Sequence
  source: /note="Description of Artificial Sequence: Synthetic oligonucleotide"
  source: /note="Antisense Oligonucleotide"
  source: /note="5' tri-ethylene glycol (TEG)"
  source: /note="3' tri-ethylene glycol (TEG)"
ucuguccaagc

SEQ ID NO: 1226 - RNA, 10 nt, Artificial Sequence
  source: /note="Description of Artificial Sequence: Synthetic oligonucleotide"
  source: /note="Antisense Oligonucleotide"
  source: /note="5' tri-ethylene glycol (TEG)"
  source: /note="3' tri-ethylene glycol (TEG)"
ucuguccaag

SEQ ID NO: 1227 - RNA, 9 nt, Artificial Sequence
  source: /note="Description of Artificial Sequence: Synthetic oligonucleotide"
  source: /note="Antisense Oligonucleotide"
  source: /note="5' tri-ethylene glycol (TEG)"
  source: /note="3' tri-ethylene glycol (TEG)"
ucuguccaa

SEQ ID NO: 1228 - RNA, 8 nt, Artificial Sequence
  source: /note="Description of Artificial Sequence: Synthetic oligonucleotide"
  source: /note="Antisense Oligonucleotide"
  source: /note="5' tri-ethylene glycol (TEG)"
  source: /note="3' tri-ethylene glycol (TEG)"
ucugucca

SEQ ID NO: 1229 - RNA, 17 nt, Artificial Sequence
  source: /note="Description of Artificial Sequence: Synthetic oligonucleotide"
  source: /note="Antisense Oligonucleotide"
  source: /note="5' tri-ethylene glycol (TEG)"
  source: /note="3' tri-ethylene glycol (TEG)"
cuguccaagcccgguug

SEQ ID NO: 1230 - RNA, 16 nt, Artificial Sequence
  source: /note="Description of Artificial Sequence: Synthetic oligonucleotide"
  source: /note="Antisense Oligonucleotide"
  source: /note="5' tri-ethylene glycol (TEG)"
  source: /note="3' tri-ethylene glycol (TEG)"
cuguccaagcccgguu

SEQ ID NO: 1231 - RNA, 15 nt, Artificial Sequence
  source: /note="Description of Artificial Sequence: Synthetic oligonucleotide"
  source: /note="Antisense Oligonucleotide"
  source: /note="5' tri-ethylene glycol (TEG)"
  source: /note="3' tri-ethylene glycol (TEG)"
cuguccaagcccggu

SEQ ID NO: 1232 - RNA, 14 nt, Artificial Sequence
  source: /note="Description of Artificial Sequence: Synthetic oligonucleotide"
  source: /note="Antisense Oligonucleotide"
  source: /note="5' tri-ethylene glycol (TEG)"
  source: /note="3' tri-ethylene glycol (TEG)"
cuguccaagcccgg

SEQ ID NO: 1233 - RNA, 13 nt, Artificial Sequence
  source: /note="Description of Artificial Sequence: Synthetic oligonucleotide"
  source: /note="Antisense Oligonucleotide"
  source: /note="5' tri-ethylene glycol (TEG)"
  source: /note="3' tri-ethylene glycol (TEG)"
cuguccaagcccg

SEQ ID NO: 1234 - RNA, 12 nt, Artificial Sequence
  source: /note="Description of Artificial Sequence: Synthetic oligonucleotide"
  source: /note="Antisense Oligonucleotide"
  source: /note="5' tri-ethylene glycol (TEG)"
  source: /note="3' tri-ethylene glycol (TEG)"
cuguccaagccc

SEQ ID NO: 1235 - RNA, 11 nt, Artificial Sequence
  source: /note="Description of Artificial Sequence: Synthetic oligonucleotide"
  source: /note="Antisense Oligonucleotide"
  source: /note="5' tri-ethylene glycol (TEG)"
  source: /note="3' tri-ethylene glycol (TEG)"
cuguccaagcc

SEQ ID NO: 1236 - RNA, 10 nt, Artificial Sequence
  source: /note="Description of Artificial Sequence: Synthetic oligonucleotide"
  source: /note="Antisense Oligonucleotide"
  source: /note="5' tri-ethylene glycol (TEG)"
  source: /note="3' tri-ethylene glycol (TEG)"
cuguccaagc

SEQ ID NO: 1237 - RNA, 9 nt, Artificial Sequence
  source: /note="Description of Artificial Sequence: Synthetic oligonucleotide"
  source: /note="Antisense Oligonucleotide"
  source: /note="5' tri-ethylene glycol (TEG)"
  source: /note="3' tri-ethylene glycol (TEG)"
cuguccaag

SEQ ID NO: 1238 - RNA, 8 nt, Artificial Sequence
  source: /note="Description of Artificial Sequence: Synthetic oligonucleotide"
  source: /note="Antisense Oligonucleotide"
  source: /note="5' tri-ethylene glycol (TEG)"
  source: /note="3' tri-ethylene glycol (TEG)"
cuguccaa

SEQ ID NO: 1239 - RNA, 20 nt, Artificial Sequence
  source: /note="Description of Artificial Sequence: Synthetic oligonucleotide"
  source: /note="Antisense Oligonucleotide"
  source: /note="5' tri-ethylene glycol (TEG)"
  source: /note="3' tri-ethylene glycol (TEG)"
guucuguccaagcccgguug

SEQ ID NO: 1240 - RNA, 19 nt, Artificial Sequence
  source: /note="Description of Artificial Sequence: Synthetic oligonucleotide"
  source: /note="Antisense Oligonucleotide"
  source: /note="5' tri-ethylene glycol (TEG)"
  source: /note="3' tri-ethylene glycol (TEG)"
guucuguccaagcccgguu

SEQ ID NO: 1241 - RNA, 18 nt, Artificial Sequence
  source: /note="Description of Artificial Sequence: Synthetic oligonucleotide"
  source: /note="Antisense Oligonucleotide"
  source: /note="5' tri-ethylene glycol (TEG)"
  source: /note="3' tri-ethylene glycol (TEG)"
guucuguccaagcccggu

SEQ ID NO: 1242 - RNA, 17 nt, Artificial Sequence
  source: /note="Description of Artificial Sequence: Synthetic oligonucleotide"
  source: /note="Antisense Oligonucleotide"
  source: /note="5' tri-ethylene glycol (TEG)"
  source: /note="3' tri-ethylene glycol (TEG)"
guucuguccaagcccgg

SEQ ID NO: 1243 - RNA, 16 nt, Artificial Sequence
  source: /note="Description of Artificial Sequence: Synthetic oligonucleotide"
  source: /note="Antisense Oligonucleotide"
  source: /note="5' tri-ethylene glycol (TEG)"
  source: /note="3' tri-ethylene glycol (TEG)"
guucuguccaagcccg

SEQ ID NO: 1244 - RNA, 15 nt, Artificial Sequence
  source: /note="Description of Artificial Sequence: Synthetic oligonucleotide"
  source: /note="Antisense Oligonucleotide"
  source: /note="5' tri-ethylene glycol (TEG)"
  source: /note="3' tri-ethylene glycol (TEG)"
guucuguccaagccc

SEQ ID NO: 1245 - RNA, 14 nt, Artificial Sequence
  source: /note="Description of Artificial Sequence: Synthetic oligonucleotide"
  source: /note="Antisense Oligonucleotide"
  source: /note="5' tri-ethylene glycol (TEG)"
  source: /note="3' tri-ethylene glycol (TEG)"
guucuguccaagcc

SEQ ID NO: 1246 - RNA, 13 nt, Artificial Sequence
  source: /note="Description of Artificial Sequence: Synthetic oligonucleotide"
  source: /note="Antisense Oligonucleotide"
  source: /note="5' tri-ethylene glycol (TEG)"
  source: /note="3' tri-ethylene glycol (TEG)"
guucuguccaagc

SEQ ID NO: 1247 - RNA, 12 nt, Artificial Sequence
  source: /note="Description of Artificial Sequence: Synthetic oligonucleotide"
  source: /note="Antisense Oligonucleotide"
  source: /note="5' tri-ethylene glycol (TEG)"
  source: /note="3' tri-ethylene glycol (TEG)"
guucuguccaag

SEQ ID NO: 1248 - RNA, 11 nt, Artificial Sequence
  source: /note="Description of Artificial Sequence: Synthetic oligonucleotide"
  source: /note="Antisense Oligonucleotide"
  source: /note="5' tri-ethylene glycol (TEG)"
  source: /note="3' tri-ethylene glycol (TEG)"
guucuguccaa

SEQ ID NO: 1249 - RNA, 10 nt, Artificial Sequence
  source: /note="Description of Artificial Sequence: Synthetic oligonucleotide"
  source: /note="Antisense Oligonucleotide"
  source: /note="5' tri-ethylene glycol (TEG)"
  source: /note="3' tri-ethylene glycol (TEG)"
guucugucca

SEQ ID NO: 1250 - RNA, 9 nt, Artificial Sequence
  source: /note="Description of Artificial Sequence: Synthetic oligonucleotide"
  source: /note="Antisense Oligonucleotide"
  source: /note="5' tri-ethylene glycol (TEG)"
  source: /note="3' tri-ethylene glycol (TEG)"
guucugucc

SEQ ID NO: 1251 - RNA, 8 nt, Artificial Sequence
  source: /note="Description of Artificial Sequence: Synthetic oligonucleotide"
  source: /note="Antisense Oligonucleotide"
  source: /note="5' tri-ethylene glycol (TEG)"
  source: /note="3' tri-ethylene glycol (TEG)"
guucuguc

SEQ ID NO: 1252 - RNA, 20 nt, Artificial Sequence
  source: /note="Description of Artificial Sequence: Synthetic oligonucleotide"
  source: /note="Antisense Oligonucleotide"
  source: /note="5' tri-ethylene glycol (TEG)"
  source: /note="3' tri-ethylene glycol (TEG)"
aguucuguccaagcccgguu

SEQ ID NO: 1253 - RNA, 19 nt, Artificial Sequence
  source: /note="Description of Artificial Sequence: Synthetic oligonucleotide"
  source: /note="Antisense Oligonucleotide"
  source: /note="5' tri-ethylene glycol (TEG)"
  source: /note="3' tri-ethylene glycol (TEG)"
aguucuguccaagcccggu

SEQ ID NO: 1254 - RNA, 18 nt, Artificial Sequence
  source: /note="Description of Artificial Sequence: Synthetic oligonucleotide"
  source: /note="Antisense Oligonucleotide"
  source: /note="5' tri-ethylene glycol (TEG)"
  source: /note="3' tri-ethylene glycol (TEG)"
aguucuguccaagcccgg

SEQ ID NO: 1255 - RNA, 17 nt, Artificial Sequence
  source: /note="Description of Artificial Sequence: Synthetic oligonucleotide"
  source: /note="Antisense Oligonucleotide"
  source: /note="5' tri-ethylene glycol (TEG)"
  source: /note="3' tri-ethylene glycol (TEG)"
aguucuguccaagcccg

SEQ ID NO: 1256 - RNA, 16 nt, Artificial Sequence
  source: /note="Description of Artificial Sequence: Synthetic oligonucleotide"
  source: /note="Antisense Oligonucleotide"
  source: /note="5' tri-ethylene glycol (TEG)"
  source: /note="3' tri-ethylene glycol (TEG)"
aguucuguccaagccc

SEQ ID NO: 1257 - RNA, 15 nt, Artificial Sequence
  source: /note="Description of Artificial Sequence: Synthetic oligonucleotide"
  source: /note="Antisense Oligonucleotide"
  source: /note="5' tri-ethylene glycol (TEG)"
  source: /note="3' tri-ethylene glycol (TEG)"
aguucuguccaagcc

SEQ ID NO: 1258 - RNA, 14 nt, Artificial Sequence
  source: /note="Description of Artificial Sequence: Synthetic oligonucleotide"
  source: /note="Antisense Oligonucleotide"
  source: /note="5' tri-ethylene glycol (TEG)"
  source: /note="3' tri-ethylene glycol (TEG)"
aguucuguccaagc

SEQ ID NO: 1259 - RNA, 13 nt, Artificial Sequence
  source: /note="Description of Artificial Sequence: Synthetic oligonucleotide"
  source: /note="Antisense Oligonucleotide"
  source: /note="5' tri-ethylene glycol (TEG)"
  source: /note="3' tri-ethylene glycol (TEG)"
aguucuguccaag

SEQ ID NO: 1260 - RNA, 12 nt, Artificial Sequence
  source: /note="Description of Artificial Sequence: Synthetic oligonucleotide"
  source: /note="Antisense Oligonucleotide"
  source: /note="5' tri-ethylene glycol (TEG)"
  source: /note="3' tri-ethylene glycol (TEG)"
aguucuguccaa

SEQ ID NO: 1261 - RNA, 11 nt, Artificial Sequence
  source: /note="Description of Artificial Sequence: Synthetic oligonucleotide"
  source: /note="Antisense Oligonucleotide"
  source: /note="5' tri-ethylene glycol (TEG)"
  source: /note="3' tri-ethylene glycol (TEG)"
aguucugucca

SEQ ID NO: 1262 - RNA, 10 nt, Artificial Sequence
  source: /note="Description of Artificial Sequence: Synthetic oligonucleotide"
  source: /note="Antisense Oligonucleotide"
  source: /note="5' tri-ethylene glycol (TEG)"
  source: /note="3' tri-ethylene glycol (TEG)"
aguucugucc

SEQ ID NO: 1263 - RNA, 9 nt, Artificial Sequence
  source: /note="Description of Artificial Sequence: Synthetic oligonucleotide"
  source: /note="Antisense Oligonucleotide"
  source: /note="5' tri-ethylene glycol (TEG)"
  source: /note="3' tri-ethylene glycol (TEG)"
aguucuguc

SEQ ID NO: 1264 - RNA, 8 nt, Artificial Sequence
  source: /note="Description of Artificial Sequence: Synthetic oligonucleotide"
  source: /note="Antisense Oligonucleotide"
  source: /note="5' tri-ethylene glycol (TEG)"
  source: /note="3' tri-ethylene glycol (TEG)"
aguucugu

SEQ ID NO: 1265 - RNA, 20 nt, Artificial Sequence
  source: /note="Description of Artificial Sequence: Synthetic oligonucleotide"
  source: /note="Antisense Oligonucleotide"
  source: /note="5' tri-ethylene glycol (TEG)"
  source: /note="3' tri-ethylene glycol (TEG)"
aaguucuguccaagcccggu

SEQ ID NO: 1266 - RNA, 19 nt, Artificial Sequence
  source: /note="Description of Artificial Sequence: Synthetic oligonucleotide"
  source: /note="Antisense Oligonucleotide"
  source: /note="5' tri-ethylene glycol (TEG)"
  source: /note="3' tri-ethylene glycol (TEG)"
aaguucuguccaagcccgg

SEQ ID NO: 1267 - RNA, 18 nt, Artificial Sequence
  source: /note="Description of Artificial Sequence: Synthetic oligonucleotide"
  source: /note="Antisense Oligonucleotide"
  source: /note="5' tri-ethylene glycol (TEG)"
  source: /note="3' tri-ethylene glycol (TEG)"
aaguucuguccaagcccg

SEQ ID NO: 1268 - RNA, 17 nt, Artificial Sequence
  source: /note="Description of Artificial Sequence: Synthetic oligonucleotide"
  source: /note="Antisense Oligonucleotide"
  source: /note="5' tri-ethylene glycol (TEG)"
  source: /note="3' tri-ethylene glycol (TEG)"
aaguucuguccaagccc

SEQ ID NO: 1269 - RNA, 16 nt, Artificial Sequence
  source: /note="Description of Artificial Sequence: Synthetic oligonucleotide"
  source: /note="Antisense Oligonucleotide"
  source: /note="5' tri-ethylene glycol (TEG)"
  source: /note="3' tri-ethylene glycol (TEG)"
aaguucuguccaagcc

SEQ ID NO: 1270 - RNA, 15 nt, Artificial Sequence
  source: /note="Description of Artificial Sequence: Synthetic oligonucleotide"
  source: /note="Antisense Oligonucleotide"
  source: /note="5' tri-ethylene glycol (TEG)"
  source: /note="3' tri-ethylene glycol (TEG)"
aaguucuguccaagc

SEQ ID NO: 1271 - RNA, 14 nt, Artificial Sequence
  source: /note="Description of Artificial Sequence: Synthetic oligonucleotide"
  source: /note="Antisense Oligonucleotide"
  source: /note="5' tri-ethylene glycol (TEG)"
  source: /note="3' tri-ethylene glycol (TEG)"
aaguucuguccaag

SEQ ID NO: 1272 - RNA, 13 nt, Artificial Sequence
  source: /note="Description of Artificial Sequence: Synthetic oligonucleotide"
  source: /note="Antisense Oligonucleotide"
  source: /note="5' tri-ethylene glycol (TEG)"
  source: /note="3' tri-ethylene glycol (TEG)"
aaguucuguccaa

SEQ ID NO: 1273 - RNA, 12 nt, Artificial Sequence
  source: /note="Description of Artificial Sequence: Synthetic oligonucleotide"
  source: /note="Antisense Oligonucleotide"
  source: /note="5' tri-ethylene glycol (TEG)"
  source: /note="3' tri-ethylene glycol (TEG)"
aaguucugucca

SEQ ID NO: 1274 - RNA, 11 nt, Artificial Sequence
  source: /note="Description of Artificial Sequence: Synthetic oligonucleotide"
  source: /note="Antisense Oligonucleotide"
  source: /note="5' tri-ethylene glycol (TEG)"
  source: /note="3' tri-ethylene glycol (TEG)"
aaguucugucc

SEQ ID NO: 1275 - RNA, 10 nt, Artificial Sequence
  source: /note="Description of Artificial Sequence: Synthetic oligonucleotide"
  source: /note="Antisense Oligonucleotide"
  source: /note="5' tri-ethylene glycol (TEG)"
  source: /note="3' tri-ethylene glycol (TEG)"
aaguucuguc

SEQ ID NO: 1276 - RNA, 9 nt, Artificial Sequence
  source: /note="Description of Artificial Sequence: Synthetic oligonucleotide"
  source: /note="Antisense Oligonucleotide"
  source: /note="5' tri-ethylene glycol (TEG)"
  source: /note="3' tri-ethylene glycol (TEG)"
aaguucugu

SEQ ID NO: 1277 - RNA, 8 nt, Artificial Sequence
  source: /note="Description of Artificial Sequence: Synthetic oligonucleotide"
  source: /note="Antisense Oligonucleotide"
  source: /note="5' tri-ethylene glycol (TEG)"
  source: /note="3' tri-ethylene glycol (TEG)"
aaguucug

SEQ ID NO: 1278 - RNA, 20 nt, Artificial Sequence
  source: /note="Description of Artificial Sequence: Synthetic oligonucleotide"
  source: /note="Antisense Oligonucleotide"
  source: /note="5' tri-ethylene glycol (TEG)"
  source: /note="3' tri-ethylene glycol (TEG)"
uaaguucuguccaagcccgg

SEQ ID NO: 1279 - RNA, 19 nt, Artificial Sequence
  source: /note="Description of Artificial Sequence: Synthetic oligonucleotide"
  source: /note="Antisense Oligonucleotide"
  source: /note="5' tri-ethylene glycol (TEG)"
  source: /note="3' tri-ethylene glycol (TEG)"
uaaguucuguccaagcccg

SEQ ID NO: 1280 - RNA, 18 nt, Artificial Sequence
  source: /note="Description of Artificial Sequence: Synthetic oligonucleotide"
  source: /note="Antisense Oligonucleotide"
  source: /note="5' tri-ethylene glycol (TEG)"
  source: /note="3' tri-ethylene glycol (TEG)"
uaaguucuguccaagccc

SEQ ID NO: 1281 - RNA, 17 nt, Artificial Sequence
  source: /note="Description of Artificial Sequence: Synthetic oligonucleotide"
  source: /note="Antisense Oligonucleotide"
  source: /note="5' tri-ethylene glycol (TEG)"
  source: /note="3' tri-ethylene glycol (TEG)"
uaaguucuguccaagcc

SEQ ID NO: 1282 - RNA, 16 nt, Artificial Sequence
  source: /note="Description of Artificial Sequence: Synthetic oligonucleotide"
  source: /note="Antisense Oligonucleotide"
  source: /note="5' tri-ethylene glycol (TEG)"
  source: /note="3' tri-ethylene glycol (TEG)"
uaaguucuguccaagc

SEQ ID NO: 1283 - RNA, 14 nt, Artificial Sequence
  source: /note="Description of Artificial Sequence: Synthetic oligonucleotide"
  source: /note="Antisense Oligonucleotide"
  source: /note="5' tri-ethylene glycol (TEG)"
  source: /note="3' tri-ethylene glycol (TEG)"
uaaguucuguccaa

SEQ ID NO: 1284 - RNA, 13 nt, Artificial Sequence
  source: /note="Description of Artificial Sequence: Synthetic oligonucleotide"
  source: /note="Antisense Oligonucleotide"
  source: /note="5' tri-ethylene glycol (TEG)"
  source: /note="3' tri-ethylene glycol (TEG)"
uaaguucugucca

SEQ ID NO: 1285 - RNA, 12 nt, Artificial Sequence
  source: /note="Description of Artificial Sequence: Synthetic oligonucleotide"
  source: /note="Antisense Oligonucleotide"
  source: /note="5' tri-ethylene glycol (TEG)"
  source: /note="3' tri-ethylene glycol (TEG)"
uaaguucugucc

SEQ ID NO: 1286 - RNA, 11 nt, Artificial Sequence
  source: /note="Description of Artificial Sequence: Synthetic oligonucleotide"
  source: /note="Antisense Oligonucleotide"
  source: /note="5' tri-ethylene glycol (TEG)"
  source: /note="3' tri-ethylene glycol (TEG)"
uaaguucuguc

SEQ ID NO: 1287 - RNA, 10 nt, Artificial Sequence
  source: /note="Description of Artificial Sequence: Synthetic oligonucleotide"
  source: /note="Antisense Oligonucleotide"
  source: /note="5' tri-ethylene glycol (TEG)"
  source: /note="3' tri-ethylene glycol (TEG)"
uaaguucugu

SEQ ID NO: 1288 - RNA, 9 nt, Artificial Sequence
  source: /note="Description of Artificial Sequence: Synthetic oligonucleotide"
  source: /note="Antisense Oligonucleotide"
  source: /note="5' tri-ethylene glycol (TEG)"
  source: /note="3' tri-ethylene glycol (TEG)"
uaaguucug

SEQ ID NO: 1289 - RNA, 8 nt, Artificial Sequence
  source: /note="Description of Artificial Sequence: Synthetic oligonucleotide"
  source: /note="Antisense Oligonucleotide"
  source: /note="5' tri-ethylene glycol (TEG)"
  source: /note="3' tri-ethylene glycol (TEG)"
uaaguucu

SEQ ID NO: 1290 - RNA, 20 nt, Artificial Sequence
  source: /note="Description of Artificial Sequence: Synthetic oligonucleotide"
  source: /note="Antisense Oligonucleotide"
  source: /note="5' tri-ethylene glycol (TEG)"
  source: /note="3' tri-ethylene glycol (TEG)"
guaaguucuguccaagcccg

SEQ ID NO: 1291 - RNA, 19 nt, Artificial Sequence
  source: /note="Description of Artificial Sequence: Synthetic oligonucleotide"
  source: /note="Antisense Oligonucleotide"
  source: /note="5' tri-ethylene glycol (TEG)"
  source: /note="3' tri-ethylene glycol (TEG)"
guaaguucuguccaagccc

SEQ ID NO: 1292 - RNA, 17 nt, Artificial Sequence
  source: /note="Description of Artificial Sequence: Synthetic oligonucleotide"
  source: /note="Antisense Oligonucleotide"
  source: /note="5' tri-ethylene glycol (TEG)"
  source: /note="3' tri-ethylene glycol (TEG)"
guaaguucuguccaagc

SEQ ID NO: 1293 - RNA, 16 nt, Artificial Sequence
  source: /note="Description of Artificial Sequence: Synthetic oligonucleotide"
  source: /note="Antisense Oligonucleotide"
  source: /note="5' tri-ethylene glycol (TEG)"
  source: /note="3' tri-ethylene glycol (TEG)"
guaaguucuguccaag

SEQ ID NO: 1294 - RNA, 15 nt, Artificial Sequence
  source: /note="Description of Artificial Sequence: Synthetic oligonucleotide"
  source: /note="Antisense Oligonucleotide"
  source: /note="5' tri-ethylene glycol (TEG)"
  source: /note="3' tri-ethylene glycol (TEG)"
guaaguucuguccaa

SEQ ID NO: 1295 - RNA, 14 nt, Artificial Sequence
  source: /note="Description of Artificial Sequence: Synthetic oligonucleotide"
  source: /note="Antisense Oligonucleotide"
  source: /note="5' tri-ethylene glycol (TEG)"
  source: /note="3' tri-ethylene glycol (TEG)"
guaaguucugucca

SEQ ID NO: 1296 - RNA, 13 nt, Artificial Sequence
  source: /note="Description of Artificial Sequence: Synthetic oligonucleotide"
  source: /note="Antisense Oligonucleotide"
  source: /note="5' tri-ethylene glycol (TEG)"
  source: /note="3' tri-ethylene glycol (TEG)"
guaaguucugucc

SEQ ID NO: 1297 - RNA, 12 nt, Artificial Sequence
  source: /note="Description of Artificial Sequence: Synthetic oligonucleotide"
  source: /note="Antisense Oligonucleotide"
  source: /note="5' tri-ethylene glycol (TEG)"
  source: /note="3' tri-ethylene glycol (TEG)"
guaaguucuguc

SEQ ID NO: 1298 - RNA, 11 nt, Artificial Sequence
  source: /note="Description of Artificial Sequence: Synthetic oligonucleotide"
  source: /note="Antisense Oligonucleotide"
  source: /note="5' tri-ethylene glycol (TEG)"
  source: /note="3' tri-ethylene glycol (TEG)"
guaaguucugu

SEQ ID NO: 1299 - RNA, 10 nt, Artificial Sequence
  source: /note="Description of Artificial Sequence: Synthetic oligonucleotide"
  source: /note="Antisense Oligonucleotide"
  source: /note="5' tri-ethylene glycol (TEG)"
  source: /note="3' tri-ethylene glycol (TEG)"
guaaguucug

SEQ ID NO: 1300 - RNA, 9 nt, Artificial Sequence
  source: /note="Description of Artificial Sequence: Synthetic oligonucleotide"
  source: /note="Antisense Oligonucleotide"
  source: /note="5' tri-ethylene glycol (TEG)"
  source: /note="3' tri-ethylene glycol (TEG)"
guaaguucu

SEQ ID NO: 1301 - RNA, 8 nt, Artificial Sequence
  source: /note="Description of Artificial Sequence: Synthetic oligonucleotide"
  source: /note="Antisense Oligonucleotide"
  source: /note="5' tri-ethylene glycol (TEG)"
  source: /note="3' tri-ethylene glycol (TEG)"
guaaguuc

SEQ ID NO: 1302 - RNA, 20 nt, Artificial Sequence
  source: /note="Description of Artificial Sequence: Synthetic oligonucleotide"
  source: /note="Antisense Oligonucleotide"
  source: /note="5' tri-ethylene glycol (TEG)"
  source: /note="3' tri-ethylene glycol (TEG)"
gguaaguucuguccaagccc

SEQ ID NO: 1303 - RNA, 19 nt, Artificial Sequence
  source: /note="Description of Artificial Sequence: Synthetic oligonucleotide"
  source: /note="Antisense Oligonucleotide"
  source: /note="5' tri-ethylene glycol (TEG)"
  source: /note="3' tri-ethylene glycol (TEG)"
gguaaguucuguccaagcc

SEQ ID NO: 1304 - RNA, 17 nt, Artificial Sequence
  source: /note="Description of Artificial Sequence: Synthetic oligonucleotide"
  source: /note="Antisense Oligonucleotide"
  source: /note="5' tri-ethylene glycol (TEG)"
  source: /note="3' tri-ethylene glycol (TEG)"
gguaaguucuguccaag

SEQ ID NO: 1305 - RNA, 16 nt, Artificial Sequence
  source: /note="Description of Artificial Sequence: Synthetic oligonucleotide"
  source: /note="Antisense Oligonucleotide"
  source: /note="5' tri-ethylene glycol (TEG)"
  source: /note="3' tri-ethylene glycol (TEG)"
gguaaguucuguccaa

SEQ ID NO: 1306 - RNA, 15 nt, Artificial Sequence
  source: /note="Description of Artificial Sequence: Synthetic oligonucleotide"
  source: /note="Antisense Oligonucleotide"
  source: /note="5' tri-ethylene glycol (TEG)"
  source: /note="3' tri-ethylene glycol (TEG)"
gguaaguucugucca

SEQ ID NO: 1307 - RNA, 14 nt, Artificial Sequence
  source: /note="Description of Artificial Sequence: Synthetic oligonucleotide"
  source: /note="Antisense Oligonucleotide"
  source: /note="5' tri-ethylene glycol (TEG)"
  source: /note="3' tri-ethylene glycol (TEG)"
gguaaguucugucc

SEQ ID NO: 1308 - RNA, 13 nt, Artificial Sequence
  source: /note="Description of Artificial Sequence: Synthetic oligonucleotide"
  source: /note="Antisense Oligonucleotide"
  source: /note="5' tri-ethylene glycol (TEG)"
  source: /note="3' tri-ethylene glycol (TEG)"
gguaaguucuguc

SEQ ID NO: 1309 - RNA, 12 nt, Artificial Sequence
  source: /note="Description of Artificial Sequence: Synthetic oligonucleotide"
  source: /note="Antisense Oligonucleotide"
  source: /note="5' tri-ethylene glycol (TEG)"
  source: /note="3' tri-ethylene glycol (TEG)"
gguaaguucugu

SEQ ID NO: 1310 - RNA, 11 nt, Artificial Sequence
  source: /note="Description of Artificial Sequence: Synthetic oligonucleotide"
  source: /note="Antisense Oligonucleotide"
  source: /note="5' tri-ethylene glycol (TEG)"
  source: /note="3' tri-ethylene glycol (TEG)"
gguaaguucug

SEQ ID NO: 1311 - RNA, 10 nt, Artificial Sequence
  source: /note="Description of Artificial Sequence: Synthetic oligonucleotide"
  source: /note="Antisense Oligonucleotide"
  source: /note="5' tri-ethylene glycol (TEG)"
  source: /note="3' tri-ethylene glycol (TEG)"
gguaaguucu

SEQ ID NO: 1312 - RNA, 9 nt, Artificial Sequence
  source: /note="Description of Artificial Sequence: Synthetic oligonucleotide"
  source: /note="Antisense Oligonucleotide"
  source: /note="5' tri-ethylene glycol (TEG)"
  source: /note="3' tri-ethylene glycol (TEG)"
gguaaguuc

SEQ ID NO: 1313 - RNA, 8 nt, Artificial Sequence
  source: /note="Description of Artificial Sequence: Synthetic oligonucleotide"
  source: /note="Antisense Oligonucleotide"
  source: /note="5' tri-ethylene glycol (TEG)"
  source: /note="3' tri-ethylene glycol (TEG)"
gguaaguu

SEQ ID NO: 1314 - RNA, 20 nt, Artificial Sequence
  source: /note="Description of Artificial Sequence: Synthetic oligonucleotide"
  source: /note="Antisense Oligonucleotide"
  source: /note="5' tri-ethylene glycol (TEG)"
  source: /note="3' tri-ethylene glycol (TEG)"
cgguaaguucuguccaagcc

SEQ ID NO: 1315 - RNA, 19 nt, Artificial Sequence
  source: /note="Description of Artificial Sequence: Synthetic oligonucleotide"
  source: /note="Antisense Oligonucleotide"
  source: /note="5' tri-ethylene glycol (TEG)"
  source: /note="3' tri-ethylene glycol (TEG)"
cgguaaguucuguccaagc

SEQ ID NO: 1316 - RNA, 18 nt, Artificial Sequence
  source: /note="Description of Artificial Sequence: Synthetic oligonucleotide"
  source: /note="Antisense Oligonucleotide"
  source: /note="5' tri-ethylene glycol (TEG)"
  source: /note="3' tri-ethylene glycol (TEG)"
cgguaaguucuguccaag

SEQ ID NO: 1317 - RNA, 17 nt, Artificial Sequence
  source: /note="Description of Artificial Sequence: Synthetic oligonucleotide"
  source: /note="Antisense Oligonucleotide"
  source: /note="5' tri-ethylene glycol (TEG)"
  source: /note="3' tri-ethylene glycol (TEG)"
cgguaaguucuguccaa

SEQ ID NO: 1318 - RNA, 16 nt, Artificial Sequence
  source: /note="Description of Artificial Sequence: Synthetic oligonucleotide"
  source: /note="Antisense Oligonucleotide"
  source: /note="5' tri-ethylene glycol (TEG)"
  source: /note="3' tri-ethylene glycol (TEG)"
cgguaaguucugucca

SEQ ID NO: 1319 - RNA, 15 nt, Artificial Sequence
  source: /note="Description of Artificial Sequence: Synthetic oligonucleotide"
  source: /note="Antisense Oligonucleotide"
  source: /note="5' tri-ethylene glycol (TEG)"
  source: /note="3' tri-ethylene glycol (TEG)"
cgguaaguucugucc

SEQ ID NO: 1320 - RNA, 14 nt, Artificial Sequence
  source: /note="Description of Artificial Sequence: Synthetic oligonucleotide"
  source: /note="Antisense Oligonucleotide"
  source: /note="5' tri-ethylene glycol (TEG)"
  source: /note="3' tri-ethylene glycol (TEG)"
cgguaaguucuguc

SEQ ID NO: 1321 - RNA, 13 nt, Artificial Sequence
  source: /note="Description of Artificial Sequence: Synthetic oligonucleotide"
  source: /note="Antisense Oligonucleotide"
  source: /note="5' tri-ethylene glycol (TEG)"
  source: /note="3' tri-ethylene glycol (TEG)"
cgguaaguucugu

SEQ ID NO: 1322 - RNA, 12 nt, Artificial Sequence
  source: /note="Description of Artificial Sequence: Synthetic oligonucleotide"
  source: /note="Antisense Oligonucleotide"
  source: /note="5' tri-ethylene glycol (TEG)"
  source: /note="3' tri-ethylene glycol (TEG)"
cgguaaguucug

SEQ ID NO: 1323 - RNA, 11 nt, Artificial Sequence
  source: /note="Description of Artificial Sequence: Synthetic oligonucleotide"
  source: /note="Antisense Oligonucleotide"
  source: /note="5' tri-ethylene glycol (TEG)"
  source: /note="3' tri-ethylene glycol (TEG)"
cgguaaguucu

SEQ ID NO: 1324 - RNA, 10 nt, Artificial Sequence
  source: /note="Description of Artificial Sequence: Synthetic oligonucleotide"
  source: /note="Antisense Oligonucleotide"
  source: /note="5' tri-ethylene glycol (TEG)"
  source: /note="3' tri-ethylene glycol (TEG)"
cgguaaguuc

SEQ ID NO: 1325 - RNA, 9 nt, Artificial Sequence
  source: /note="Description of Artificial Sequence: Synthetic oligonucleotide"
  source: /note="Antisense Oligonucleotide"
  source: /note="5' tri-ethylene glycol (TEG)"
  source: /note="3' tri-ethylene glycol (TEG)"
cgguaaguu

SEQ ID NO: 1326 - RNA, 8 nt, Artificial Sequence
  source: /note="Description of Artificial Sequence: Synthetic oligonucleotide"
  source: /note="Antisense Oligonucleotide"
  source: /note="5' tri-ethylene glycol (TEG)"
  source: /note="3' tri-ethylene glycol (TEG)"
cgguaagu

SEQ ID NO: 1327 - RNA, 20 nt, Artificial Sequence
  source: /note="Description of Artificial Sequence: Synthetic oligonucleotide"
  source: /note="Antisense Oligonucleotide"
  source: /note="5' tri-ethylene glycol (TEG)"
  source: /note="3' tri-ethylene glycol (TEG)"
ucgguaaguucuguccaagc

SEQ ID NO: 1328 - RNA, 19 nt, Artificial Sequence
  source: /note="Description of Artificial Sequence: Synthetic oligonucleotide"
  source: /note="Antisense Oligonucleotide"
  source: /note="5' tri-ethylene glycol (TEG)"
  source: /note="3' tri-ethylene glycol (TEG)"
ucgguaaguucuguccaag

SEQ ID NO: 1329 - RNA, 18 nt, Artificial Sequence
  source: /note="Description of Artificial Sequence: Synthetic oligonucleotide"
  source: /note="Antisense Oligonucleotide"
  source: /note="5' tri-ethylene glycol (TEG)"
  source: /note="3' tri-ethylene glycol (TEG)"
ucgguaaguucuguccaa

SEQ ID NO: 1330 - RNA, 17 nt, Artificial Sequence
  source: /note="Description of Artificial Sequence: Synthetic oligonucleotide"
  source: /note="Antisense Oligonucleotide"
  source: /note="5' tri-ethylene glycol (TEG)"
  source: /note="3' tri-ethylene glycol (TEG)"
ucgguaaguucugucca

SEQ ID NO: 1331 - RNA, 16 nt, Artificial Sequence
  source: /note="Description of Artificial Sequence: Synthetic oligonucleotide"
  source: /note="Antisense Oligonucleotide"
  source: /note="5' tri-ethylene glycol (TEG)"
  source: /note="3' tri-ethylene glycol (TEG)"
ucgguaaguucugucc

SEQ ID NO: 1332 - RNA, 15 nt, Artificial Sequence
  source: /note="Description of Artificial Sequence: Synthetic oligonucleotide"
  source: /note="Antisense Oligonucleotide"
  source: /note="5' tri-ethylene glycol (TEG)"
  source: /note="3' tri-ethylene glycol (TEG)"
ucgguaaguucuguc

SEQ ID NO: 1333 - RNA, 14 nt, Artificial Sequence
  source: /note="Description of Artificial Sequence: Synthetic oligonucleotide"
  source: /note="Antisense Oligonucleotide"
  source: /note="5' tri-ethylene glycol (TEG)"
  source: /note="3' tri-ethylene glycol (TEG)"
ucgguaaguucugu

SEQ ID NO: 1334 - RNA, 13 nt, Artificial Sequence
  source: /note="Description of Artificial Sequence: Synthetic oligonucleotide"
  source: /note="Antisense Oligonucleotide"
  source: /note="5' tri-ethylene glycol (TEG)"
  source: /note="3' tri-ethylene glycol (TEG)"
ucgguaaguucug

SEQ ID NO: 1335 - RNA, 12 nt, Artificial Sequence
  source: /note="Description of Artificial Sequence: Synthetic oligonucleotide"
  source: /note="Antisense Oligonucleotide"
  source: /note="5' tri-ethylene glycol (TEG)"
  source: /note="3' tri-ethylene glycol (TEG)"
ucgguaaguucu

SEQ ID NO: 1336 - RNA, 11 nt, Artificial Sequence
  source: /note="Description of Artificial Sequence: Synthetic oligonucleotide"
  source: /note="Antisense Oligonucleotide"
  source: /note="5' tri-ethylene glycol (TEG)"
  source: /note="3' tri-ethylene glycol (TEG)"
ucgguaaguuc

SEQ ID NO: 1337 - RNA, 10 nt, Artificial Sequence
  source: /note="Description of Artificial Sequence: Synthetic oligonucleotide"
  source: /note="Antisense Oligonucleotide"
  source: /note="5' tri-ethylene glycol (TEG)"
  source: /note="3' tri-ethylene glycol (TEG)"
ucgguaaguu

SEQ ID NO: 1338 - RNA, 9 nt, Artificial Sequence
  source: /note="Description of Artificial Sequence: Synthetic oligonucleotide"
  source: /note="Antisense Oligonucleotide"
  source: /note="5' tri-ethylene glycol (TEG)"
  source: /note="3' tri-ethylene glycol (TEG)"
ucgguaagu

SEQ ID NO: 1339 - RNA, 20 nt, Artificial Sequence
  source: /note="Description of Artificial Sequence: Synthetic oligonucleotide"
  source: /note="Antisense Oligonucleotide"
  source: /note="5' tri-ethylene glycol (TEG)"
  source: /note="3' tri-ethylene glycol (TEG)"
gucgguaaguucuguccaag

SEQ ID NO: 1340 - RNA, 19 nt, Artificial Sequence
  source: /note="Description of Artificial Sequence: Synthetic oligonucleotide"
  source: /note="Antisense Oligonucleotide"
  source: /note="5' tri-ethylene glycol (TEG)"
  source: /note="3' tri-ethylene glycol (TEG)"
gucgguaaguucuguccaa

SEQ ID NO: 1341 - RNA, 18 nt, Artificial Sequence
  source: /note="Description of Artificial Sequence: Synthetic oligonucleotide"
  source: /note="Antisense Oligonucleotide"
  source: /note="5' tri-ethylene glycol (TEG)"
  source: /note="3' tri-ethylene glycol (TEG)"
gucgguaaguucugucca

SEQ ID NO: 1342 - RNA, 17 nt, Artificial Sequence
  source: /note="Description of Artificial Sequence: Synthetic oligonucleotide"
  source: /note="Antisense Oligonucleotide"
  source: /note="5' tri-ethylene glycol (TEG)"
  source: /note="3' tri-ethylene glycol (TEG)"
gucgguaaguucugucc

SEQ ID NO: 1343 - RNA, 16 nt, Artificial Sequence
  source: /note="Description of Artificial Sequence: Synthetic oligonucleotide"
  source: /note="Antisense Oligonucleotide"
  source: /note="5' tri-ethylene glycol (TEG)"
  source: /note="3' tri-ethylene glycol (TEG)"
gucgguaaguucuguc

SEQ ID NO: 1344 - RNA, 15 nt, Artificial Sequence
  source: /note="Description of Artificial Sequence: Synthetic oligonucleotide"
  source: /note="Antisense Oligonucleotide"
  source: /note="5' tri-ethylene glycol (TEG)"
  source: /note="3' tri-ethylene glycol (TEG)"
gucgguaaguucugu

SEQ ID NO: 1345 - RNA, 14 nt, Artificial Sequence
  source: /note="Description of Artificial Sequence: Synthetic oligonucleotide"
  source: /note="Antisense Oligonucleotide"
  source: /note="5' tri-ethylene glycol (TEG)"
  source: /note="3' tri-ethylene glycol (TEG)"
gucgguaaguucug

SEQ ID NO: 1346 - RNA, 13 nt, Artificial Sequence
  source: /note="Description of Artificial Sequence: Synthetic oligonucleotide"
  source: /note="Antisense Oligonucleotide"
  source: /note="5' tri-ethylene glycol (TEG)"
  source: /note="3' tri-ethylene glycol (TEG)"
gucgguaaguucu

SEQ ID NO: 1347 - RNA, 12 nt, Artificial Sequence
  source: /note="Description of Artificial Sequence: Synthetic oligonucleotide"
  source: /note="Antisense Oligonucleotide"
  source: /note="5' tri-ethylene glycol (TEG)"
  source: /note="3' tri-ethylene glycol (TEG)"
gucgguaaguuc

SEQ ID NO: 1348 - RNA, 11 nt, Artificial Sequence
  source: /note="Description of Artificial Sequence: Synthetic oligonucleotide"
  source: /note="Antisense Oligonucleotide"
  source: /note="5' tri-ethylene glycol (TEG)"
  source: /note="3' tri-ethylene glycol (TEG)"
gucgguaaguu

SEQ ID NO: 1349 - RNA, 10 nt, Artificial Sequence
  source: /note="Description of Artificial Sequence: Synthetic oligonucleotide"
  source: /note="Antisense Oligonucleotide"
  source: /note="5' tri-ethylene glycol (TEG)"
  source: /note="3' tri-ethylene glycol (TEG)"
gucgguaagu

SEQ ID NO: 1350 - RNA, 20 nt, Artificial Sequence
  source: /note="Description of Artificial Sequence: Synthetic oligonucleotide"
  source: /note="Antisense Oligonucleotide"
  source: /note="5' tri-ethylene glycol (TEG)"
  source: /note="3' tri-ethylene glycol (TEG)"
agucgguaaguucuguccaa

SEQ ID NO: 1351 - RNA, 19 nt, Artificial Sequence
  source: /note="Description of Artificial Sequence: Synthetic oligonucleotide"
  source: /note="Antisense Oligonucleotide"
  source: /note="5' tri-ethylene glycol (TEG)"
  source: /note="3' tri-ethylene glycol (TEG)"
agucgguaaguucugucca

SEQ ID NO: 1352 - RNA, 17 nt, Artificial Sequence
  source: /note="Description of Artificial Sequence: Synthetic oligonucleotide"
  source: /note="Antisense Oligonucleotide"
  source: /note="5' tri-ethylene glycol (TEG)"
  source: /note="3' tri-ethylene glycol (TEG)"
agucgguaaguucuguc

SEQ ID NO: 1353 - RNA, 16 nt, Artificial Sequence
  source: /note="Description of Artificial Sequence: Synthetic oligonucleotide"
  source: /note="Antisense Oligonucleotide"
  source: /note="5' tri-ethylene glycol (TEG)"
  source: /note="3' tri-ethylene glycol (TEG)"
agucgguaaguucugu

SEQ ID NO: 1354 - RNA, 15 nt, Artificial Sequence
  source: /note="Description of Artificial Sequence: Synthetic oligonucleotide"
  source: /note="Antisense Oligonucleotide"
  source: /note="5' tri-ethylene glycol (TEG)"
  source: /note="3' tri-ethylene glycol (TEG)"
agucgguaaguucug

SEQ ID NO: 1355 - RNA, 14 nt, Artificial Sequence
  source: /note="Description of Artificial Sequence: Synthetic oligonucleotide"
  source: /note="Antisense Oligonucleotide"
  source: /note="5' tri-ethylene glycol (TEG)"
  source: /note="3' tri-ethylene glycol (TEG)"
agucgguaaguucu

SEQ ID NO: 1356 - RNA, 13 nt, Artificial Sequence
  source: /note="Description of Artificial Sequence: Synthetic oligonucleotide"
  source: /note="Antisense Oligonucleotide"
  source: /note="5' tri-ethylene glycol (TEG)"
  source: /note="3' tri-ethylene glycol (TEG)"
agucgguaaguuc

SEQ ID NO: 1357 - RNA, 12 nt, Artificial Sequence
  source: /note="Description of Artificial Sequence: Synthetic oligonucleotide"
  source: /note="Antisense Oligonucleotide"
  source: /note="5' tri-ethylene glycol (TEG)"
  source: /note="3' tri-ethylene glycol (TEG)"
agucgguaaguu

SEQ ID NO: 1358 - RNA, 11 nt, Artificial Sequence
  source: /note="Description of Artificial Sequence: Synthetic oligonucleotide"
  source: /note="Antisense Oligonucleotide"
  source: /note="5' tri-ethylene glycol (TEG)"
  source: /note="3' tri-ethylene glycol (TEG)"
agucgguaagu

SEQ ID NO: 1359 - RNA, 20 nt, Artificial Sequence
  source: /note="Description of Artificial Sequence: Synthetic oligonucleotide"
  source: /note="Antisense Oligonucleotide"
  source: /note="5' tri-ethylene glycol (TEG)"
  source: /note="3' tri-ethylene glycol (TEG)"
cagucgguaaguucugucca

SEQ ID NO: 1360 - RNA, 19 nt, Artificial Sequence
  source: /note="Description of Artificial Sequence: Synthetic oligonucleotide"
  source: /note="Antisense Oligonucleotide"
  source: /note="5' tri-ethylene glycol (TEG)"
  source: /note="3' tri-ethylene glycol (TEG)"
cagucgguaaguucugucc

SEQ ID NO: 1361 - RNA, 18 nt, Artificial Sequence
  source: /note="Description of Artificial Sequence: Synthetic oligonucleotide"
  source: /note="Antisense Oligonucleotide"
  source: /note="5' tri-ethylene glycol (TEG)"
  source: /note="3' tri-ethylene glycol (TEG)"
cagucgguaaguucuguc

SEQ ID NO: 1362 - RNA, 17 nt, Artificial Sequence
  source: /note="Description of Artificial Sequence: Synthetic oligonucleotide"
  source: /note="Antisense Oligonucleotide"
  source: /note="5' tri-ethylene glycol (TEG)"
  source: /note="3' tri-ethylene glycol (TEG)"
cagucgguaaguucugu

SEQ ID NO: 1363 - RNA, 16 nt, Artificial Sequence
  source: /note="Description of Artificial Sequence: Synthetic oligonucleotide"
  source: /note="Antisense Oligonucleotide"
  source: /note="5' tri-ethylene glycol (TEG)"
  source: /note="3' tri-ethylene glycol (TEG)"
cagucgguaaguucug

SEQ ID NO: 1364 - RNA, 15 nt, Artificial Sequence
  source: /note="Description of Artificial Sequence: Synthetic oligonucleotide"
  source: /note="Antisense Oligonucleotide"
  source: /note="5' tri-ethylene glycol (TEG)"
  source: /note="3' tri-ethylene glycol (TEG)"
cagucgguaaguucu

SEQ ID NO: 1365 - RNA, 14 nt, Artificial Sequence
  source: /note="Description of Artificial Sequence: Synthetic oligonucleotide"
  source: /note="Antisense Oligonucleotide"
  source: /note="5' tri-ethylene glycol (TEG)"
  source: /note="3' tri-ethylene glycol (TEG)"
cagucgguaaguuc

SEQ ID NO: 1366 - RNA, 13 nt, Artificial Sequence
  source: /note="Description of Artificial Sequence: Synthetic oligonucleotide"
  source: /note="Antisense Oligonucleotide"
  source: /note="5' tri-ethylene glycol (TEG)"
  source: /note="3' tri-ethylene glycol (TEG)"
cagucgguaaguu

SEQ ID NO: 1367 - RNA, 12 nt, Artificial Sequence
  source: /note="Description of Artificial Sequence: Synthetic oligonucleotide"
  source: /note="Antisense Oligonucleotide"
  source: /note="5' tri-ethylene glycol (TEG)"
  source: /note="3' tri-ethylene glycol (TEG)"
cagucgguaagu

SEQ ID NO: 1368 - RNA, 20 nt, Artificial Sequence
  source: /note="Description of Artificial Sequence: Synthetic oligonucleotide"
  source: /note="Antisense Oligonucleotide"
  source: /note="5' tri-ethylene glycol (TEG)"
  source: /note="3' tri-ethylene glycol (TEG)"
ccagucgguaaguucugucc

SEQ ID NO: 1369 - RNA, 19 nt, Artificial Sequence
  source: /note="Description of Artificial Sequence: Synthetic oligonucleotide"
  source: /note="Antisense Oligonucleotide"
  source: /note="5' tri-ethylene glycol (TEG)"
  source: /note="3' tri-ethylene glycol (TEG)"
ccagucgguaaguucuguc

SEQ ID NO: 1370 - RNA, 18 nt, Artificial Sequence
  source: /note="Description of Artificial Sequence: Synthetic oligonucleotide"
  source: /note="Antisense Oligonucleotide"
  source: /note="5' tri-ethylene glycol (TEG)"
  source: /note="3' tri-ethylene glycol (TEG)"
ccagucgguaaguucugu

SEQ ID NO: 1371 - RNA, 17 nt, Artificial Sequence
  source: /note="Description of Artificial Sequence: Synthetic oligonucleotide"
  source: /note="Antisense Oligonucleotide"
  source: /note="5' tri-ethylene glycol (TEG)"
  source: /note="3' tri-ethylene glycol (TEG)"
ccagucgguaaguucug

SEQ ID NO: 1372 - RNA, 16 nt, Artificial Sequence
  source: /note="Description of Artificial Sequence: Synthetic oligonucleotide"
  source: /note="Antisense Oligonucleotide"
  source: /note="5' tri-ethylene glycol (TEG)"
  source: /note="3' tri-ethylene glycol (TEG)"
ccagucgguaaguucu

SEQ ID NO: 1373 - RNA, 15 nt, Artificial Sequence
  source: /note="Description of Artificial Sequence: Synthetic oligonucleotide"
  source: /note="Antisense Oligonucleotide"
  source: /note="5' tri-ethylene glycol (TEG)"
  source: /note="3' tri-ethylene glycol (TEG)"
ccagucgguaaguuc

SEQ ID NO: 1374 - RNA, 14 nt, Artificial Sequence
  source: /note="Description of Artificial Sequence: Synthetic oligonucleotide"
  source: /note="Antisense Oligonucleotide"
  source: /note="5' tri-ethylene glycol (TEG)"
  source: /note="3' tri-ethylene glycol (TEG)"
ccagucgguaaguu

SEQ ID NO: 1375 - RNA, 13 nt, Artificial Sequence
  source: /note="Description of Artificial Sequence: Synthetic oligonucleotide"
  source: /note="Antisense Oligonucleotide"
  source: /note="5' tri-ethylene glycol (TEG)"
  source: /note="3' tri-ethylene glycol (TEG)"
ccagucgguaagu

SEQ ID NO: 1376 - RNA, 20 nt, Artificial Sequence
  source: /note="Description of Artificial Sequence: Synthetic oligonucleotide"
  source: /note="Antisense Oligonucleotide"
  source: /note="5' tri-ethylene glycol (TEG)"
  source: /note="3' tri-ethylene glycol (TEG)"
gccagucgguaaguucuguc

SEQ ID NO: 1377 - RNA, 19 nt, Artificial Sequence
  source: /note="Description of Artificial Sequence: Synthetic oligonucleotide"
  source: /note="Antisense Oligonucleotide"
  source: /note="5' tri-ethylene glycol (TEG)"
  source: /note="3' tri-ethylene glycol (TEG)"
gccagucgguaaguucugu

SEQ ID NO: 1378 - RNA, 18 nt, Artificial Sequence
  source: /note="Description of Artificial Sequence: Synthetic oligonucleotide"
  source: /note="Antisense Oligonucleotide"
  source: /note="5' tri-ethylene glycol (TEG)"
  source: /note="3' tri-ethylene glycol (TEG)"
gccagucgguaaguucug

SEQ ID NO: 1379 - RNA, 17 nt, Artificial Sequence
  source: /note="Description of Artificial Sequence: Synthetic oligonucleotide"
  source: /note="Antisense Oligonucleotide"
  source: /note="5' tri-ethylene glycol (TEG)"
  source: /note="3' tri-ethylene glycol (TEG)"
gccagucgguaaguucu

SEQ ID NO: 1380 - RNA, 16 nt, Artificial Sequence
  source: /note="Description of Artificial Sequence: Synthetic oligonucleotide"
  source: /note="Antisense Oligonucleotide"
  source: /note="5' tri-ethylene glycol (TEG)"
  source: /note="3' tri-ethylene glycol (TEG)"
gccagucgguaaguuc

SEQ ID NO: 1381 - RNA, 15 nt, Artificial Sequence
  source: /note="Description of Artificial Sequence: Synthetic oligonucleotide"
  source: /note="Antisense Oligonucleotide"
  source: /note="5' tri-ethylene glycol (TEG)"
  source: /note="3' tri-ethylene glycol (TEG)"
gccagucgguaaguu

SEQ ID NO: 1382 - RNA, 14 nt, Artificial Sequence
  source: /note="Description of Artificial Sequence: Synthetic oligonucleotide"
  source: /note="Antisense Oligonucleotide"
  source: /note="5' tri-ethylene glycol (TEG)"
  source: /note="3' tri-ethylene glycol (TEG)"
gccagucgguaagu

SEQ ID NO: 1383 - RNA, 20 nt, Artificial Sequence
  source: /note="Description of Artificial Sequence: Synthetic oligonucleotide"
  source: /note="Antisense Oligonucleotide"
  source: /note="5' tri-ethylene glycol (TEG)"
  source: /note="3' tri-ethylene glycol (TEG)"
ucaaggaagauggcauuucu

SEQ ID NO: 1384 - RNA, 22 nt, Artificial Sequence
  source: /note="Description of Artificial Sequence: Synthetic oligonucleotide"
  source: /note="Antisense Oligonucleotide"
  source: /note="5' tri-ethylene glycol (TEG)"
  source: /note="3' tri-ethylene glycol (TEG)"
ucaaggaagauggcauuucuag

SEQ ID NO: 1385 - RNA, 16 nt, Artificial Sequence
  source: /note="Description of Artificial Sequence: Synthetic oligonucleotide"
  source: /note="Antisense Oligonucleotide"
  source: /note="5' tri-ethylene glycol (TEG)"
  source: /note="3' tri-ethylene glycol (TEG)"
ucaaggaagauggcau

SEQ ID NO: 1386 - RNA, 15 nt, Artificial Sequence
  source: /note="Description of Artificial Sequence: Synthetic oligonucleotide"
  source: /note="Antisense Oligonucleotide"
  source: /note="5' tri-ethylene glycol (TEG)"
  source: /note="3' tri-ethylene glycol (TEG)"
gaagauggcauuucu

SEQ ID NO: 1387 - RNA, 21 nt, Artificial Sequence
  source: /note="Description of Artificial Sequence: Synthetic oligonucleotide"
  source: /note="Antisense Oligonucleotide"
  source: /note="5' tri-ethylene glycol (TEG)"
  source: /note="3' tri-ethylene glycol (TEG)"
ucaaggaagauggcauuucua

SEQ ID NO: 1388 - RNA, 19 nt, Artificial Sequence
  source: /note="Description of Artificial Sequence: Synthetic oligonucleotide"
  source: /note="Antisense Oligonucleotide"
  source: /note="5' tri-ethylene glycol (TEG)"
  source: /note="3' tri-ethylene glycol (TEG)"
ucaaggaagauggcauuuc

SEQ ID NO: 1389 - RNA, 18 nt, Artificial Sequence
  source: /note="Description of Artificial Sequence: Synthetic oligonucleotide"
  source: /note="Antisense Oligonucleotide"
  source: /note="5' tri-ethylene glycol (TEG)"
  source: /note="3' tri-ethylene glycol (TEG)"
ucaaggaagauggcauuu

SEQ ID NO: 1390 - RNA, 17 nt, Artificial Sequence
  source: /note="Description of Artificial Sequence: Synthetic oligonucleotide"
  source: /note="Antisense Oligonucleotide"
  source: /note="5' tri-ethylene glycol (TEG)"
  source: /note="3' tri-ethylene glycol (TEG)"
ucaaggaagauggcauu

SEQ ID NO: 1391 - RNA, 15 nt, Artificial Sequence
  source: /note="Description of Artificial Sequence: Synthetic oligonucleotide"
  source: /note="Antisense Oligonucleotide"
  source: /note="5' tri-ethylene glycol (TEG)"
  source: /note="3' tri-ethylene glycol (TEG)"
ucaaggaagauggca

SEQ ID NO: 1392 - RNA, 14 nt, Artificial Sequence
  source: /note="Description of Artificial Sequence: Synthetic oligonucleotide"
  source: /note="Antisense Oligonucleotide"
  source: /note="5' tri-ethylene glycol (TEG)"
  source: /note="3' tri-ethylene glycol (TEG)"
ucaaggaagauggc

SEQ ID NO: 1393 - RNA, 13 nt, Artificial Sequence
  source: /note="Description of Artificial Sequence: Synthetic oligonucleotide"
  source: /note="Antisense Oligonucleotide"
  source: /note="5' tri-ethylene glycol (TEG)"
  source: /note="3' tri-ethylene glycol (TEG)"
ucaaggaagaugg

SEQ ID NO: 1394 - RNA, 12 nt, Artificial Sequence
  source: /note="Description of Artificial Sequence: Synthetic oligonucleotide"
  source: /note="Antisense Oligonucleotide"
  source: /note="5' tri-ethylene glycol (TEG)"
  source: /note="3' tri-ethylene glycol (TEG)"
ucaaggaagaug

SEQ ID NO: 1395 - RNA, 11 nt, Artificial Sequence
  source: /note="Description of Artificial Sequence: Synthetic oligonucleotide"
  source: /note="Antisense Oligonucleotide"
  source: /note="5' tri-ethylene glycol (TEG)"
  source: /note="3' tri-ethylene glycol (TEG)"
ucaaggaagau

SEQ ID NO: 1396 - RNA, 10 nt, Artificial Sequence
  source: /note="Description of Artificial Sequence: Synthetic oligonucleotide"
  source: /note="Antisense Oligonucleotide"
  source: /note="5' tri-ethylene glycol (TEG)"
  source: /note="3' tri-ethylene glycol (TEG)"
ucaaggaaga

SEQ ID NO: 1397 - RNA, 9 nt, Artificial Sequence
  source: /note="Description of Artificial Sequence: Synthetic oligonucleotide"
  source: /note="Antisense Oligonucleotide"
  source: /note="5' tri-ethylene glycol (TEG)"
  source: /note="3' tri-ethylene glycol (TEG)"
ucaaggaag

SEQ ID NO: 1398 - RNA, 21 nt, Artificial Sequence
  source: /note="Description of Artificial Sequence: Synthetic oligonucleotide"
  source: /note="Antisense Oligonucleotide"
  source: /note="5' tri-ethylene glycol (TEG)"
  source: /note="3' tri-ethylene glycol (TEG)"
caaggaagauggcauuucuag

SEQ ID NO: 1399 - RNA, 20 nt, Artificial Sequence
  source: /note="Description of Artificial Sequence: Synthetic oligonucleotide"
  source: /note="Antisense Oligonucleotide"
  source: /note="5' tri-ethylene glycol (TEG)"
  source: /note="3' tri-ethylene glycol (TEG)"
caaggaagauggcauuucua

SEQ ID NO: 1400 - RNA, 19 nt, Artificial Sequence
  source: /note="Description of Artificial Sequence: Synthetic oligonucleotide"
  source: /note="Antisense Oligonucleotide"
  source: /note="5' tri-ethylene glycol (TEG)"
  source: /note="3' tri-ethylene glycol (TEG)"
caaggaagauggcauuucu

SEQ ID NO: 1401 - RNA, 18 nt, Artificial Sequence
  source: /note="Description of Artificial Sequence: Synthetic oligonucleotide"
  source: /note="Antisense Oligonucleotide"
  source: /note="5' tri-ethylene glycol (TEG)"
  source: /note="3' tri-ethylene glycol (TEG)"
caaggaagauggcauuuc

SEQ ID NO: 1402 - RNA, 17 nt, Artificial Sequence
  source: /note="Description of Artificial Sequence: Synthetic oligonucleotide"
  source: /note="Antisense Oligonucleotide"
  source: /note="5' tri-ethylene glycol (TEG)"
  source: /note="3' tri-ethylene glycol (TEG)"
caaggaagauggcauuu

SEQ ID NO: 1403 - RNA, 16 nt, Artificial Sequence
  source: /note="Description of Artificial Sequence: Synthetic oligonucleotide"
  source: /note="Antisense Oligonucleotide"
  source: /note="5' tri-ethylene glycol (TEG)"
  source: /note="3' tri-ethylene glycol (TEG)"
caaggaagauggcauu

SEQ ID NO: 1404 - RNA, 15 nt, Artificial Sequence
  source: /note="Description of Artificial Sequence: Synthetic oligonucleotide"
  source: /note="Antisense Oligonucleotide"
  source: /note="5' tri-ethylene glycol (TEG)"
  source: /note="3' tri-ethylene glycol (TEG)"
caaggaagauggcau

SEQ ID NO: 1405 - RNA, 14 nt, Artificial Sequence
  source: /note="Description of Artificial Sequence: Synthetic oligonucleotide"
  source: /note="Antisense Oligonucleotide"
  source: /note="5' tri-ethylene glycol (TEG)"
  source: /note="3' tri-ethylene glycol (TEG)"
caaggaagauggca

SEQ ID NO: 1406 - RNA, 13 nt, Artificial Sequence
  source: /note="Description of Artificial Sequence: Synthetic oligonucleotide"
  source: /note="Antisense Oligonucleotide"
  source: /note="5' tri-ethylene glycol (TEG)"
  source: /note="3' tri-ethylene glycol (TEG)"
caaggaagauggc

SEQ ID NO: 1407 - RNA, 12 nt, Artificial Sequence
  source: /note="Description of Artificial Sequence: Synthetic oligonucleotide"
  source: /note="Antisense Oligonucleotide"
  source: /note="5' tri-ethylene glycol (TEG)"
  source: /note="3' tri-ethylene glycol (TEG)"
caaggaagaugg

SEQ ID NO: 1408 - RNA, 11 nt, Artificial Sequence
  source: /note="Description of Artificial Sequence: Synthetic oligonucleotide"
  source: /note="Antisense Oligonucleotide"
  source: /note="5' tri-ethylene glycol (TEG)"
  source: /note="3' tri-ethylene glycol (TEG)"
caaggaagaug

SEQ ID NO: 1409 - RNA, 10 nt, Artificial Sequence
  source: /note="Description of Artificial Sequence: Synthetic oligonucleotide"
  source: /note="Antisense Oligonucleotide"
  source: /note="5' tri-ethylene glycol (TEG)"
  source: /note="3' tri-ethylene glycol (TEG)"
caaggaagau

SEQ ID NO: 1410 - RNA, 9 nt, Artificial Sequence
  source: /note="Description of Artificial Sequence: Synthetic oligonucleotide"
  source: /note="RNA/Antisense Oligonucleotide"
  source: /note="5' tri-ethylene glycol (TEG)"
  source: /note="3' tri-ethylene glycol (TEG)"
caaggaaga

SEQ ID NO: 1411 - RNA, 8 nt, Artificial Sequence
  source: /note="Description of Artificial Sequence: Synthetic oligonucleotide"
  source: /note="RNA/Antisense Oligonucleotide"
  source: /note="5' tri-ethylene glycol (TEG)"
  source: /note="3' tri-ethylene glycol (TEG)"
caaggaag

SEQ ID NO: 1412 - RNA, 20 nt, Artificial Sequence
  source: /note="Description of Artificial Sequence: Synthetic oligonucleotide"
  source: /note="Antisense Oligonucleotide"
  source: /note="5' tri-ethylene glycol (TEG)"
  source: /note="3' tri-ethylene glycol (TEG)"
aaggaagauggcauuucuag

SEQ ID NO: 1413 - RNA, 19 nt, Artificial Sequence
  source: /note="Description of Artificial Sequence: Synthetic oligonucleotide"
  source: /note="Antisense Oligonucleotide"
  source: /note="5' tri-ethylene glycol (TEG)"
  source: /note="3' tri-ethylene glycol (TEG)"
aaggaagauggcauuucua

SEQ ID NO: 1414 - RNA, 18 nt, Artificial Sequence
  source: /note="Description of Artificial Sequence: Synthetic oligonucleotide"
  source: /note="Antisense Oligonucleotide"
  source: /note="5' tri-ethylene glycol (TEG)"
  source: /note="3' tri-ethylene glycol (TEG)"
aaggaagauggcauuucu

SEQ ID NO: 1415 - RNA, 17 nt, Artificial Sequence
  source: /note="Description of Artificial Sequence: Synthetic oligonucleotide"
  source: /note="Antisense Oligonucleotide"
  source: /note="5' tri-ethylene glycol (TEG)"
  source: /note="3' tri-ethylene glycol (TEG)"
aaggaagauggcauuuc

SEQ ID NO: 1416 - RNA, 16 nt, Artificial Sequence
  source: /note="Description of Artificial Sequence: Synthetic oligonucleotide"
  source: /note="Antisense Oligonucleotide"
  source: /note="5' tri-ethylene glycol (TEG)"
  source: /note="3' tri-ethylene glycol (TEG)"
aaggaagauggcauuu

SEQ ID NO: 1417 - RNA, 15 nt, Artificial Sequence
  source: /note="Description of Artificial Sequence: Synthetic oligonucleotide"
  source: /note="Antisense Oligonucleotide"
  source: /note="5' tri-ethylene glycol (TEG)"
  source: /note="3' tri-ethylene glycol (TEG)"
aaggaagauggcauu

SEQ ID NO: 1418 - RNA, 14 nt, Artificial Sequence
  source: /note="Description of Artificial Sequence: Synthetic oligonucleotide"
  source: /note="Antisense Oligonucleotide"
  source: /note="5' tri-ethylene glycol (TEG)"
  source: /note="3' tri-ethylene glycol (TEG)"
aaggaagauggcau

SEQ ID NO: 1419 - RNA, 13 nt, Artificial Sequence
  source: /note="Description of Artificial Sequence: Synthetic oligonucleotide"
  source: /note="Antisense Oligonucleotide"
  source: /note="5' tri-ethylene glycol (TEG)"
  source: /note="3' tri-ethylene glycol (TEG)"
aaggaagauggca

SEQ ID NO: 1420 - RNA, 12 nt, Artificial Sequence
  source: /note="Description of Artificial Sequence: Synthetic oligonucleotide"
  source: /note="Antisense Oligonucleotide"
  source: /note="5' tri-ethylene glycol (TEG)"
  source: /note="3' tri-ethylene glycol (TEG)"
aaggaagauggc

SEQ ID NO: 1421 - RNA, 11 nt, Artificial Sequence
  source: /note="Description of Artificial Sequence: Synthetic oligonucleotide"
  source: /note="Antisense Oligonucleotide"
  source: /note="5' tri-ethylene glycol (TEG)"
  source: /note="3' tri-ethylene glycol (TEG)"
aaggaagaugg

SEQ ID NO: 1422 - RNA, 10 nt, Artificial Sequence
  source: /note="Description of Artificial Sequence: Synthetic oligonucleotide"
  source: /note="Antisense Oligonucleotide"
  source: /note="5' tri-ethylene glycol (TEG)"
  source: /note="3' tri-ethylene glycol (TEG)"
aaggaagaug

SEQ ID NO: 1423 - RNA, 9 nt, Artificial Sequence
  source: /note="Description of Artificial Sequence: Synthetic oligonucleotide"
  source: /note="Antisense Oligonucleotide"
  source: /note="5' tri-ethylene glycol (TEG)"
  source: /note="3' tri-ethylene glycol (TEG)"
aaggaagau

SEQ ID NO: 1424 - RNA, 8 nt, Artificial Sequence
  source: /note="Description of Artificial Sequence: Synthetic oligonucleotide"
  source: /note="RNA/Antisense Oligonucleotide"
  source: /note="5' tri-ethylene glycol (TEG)"
  source: /note="3' tri-ethylene glycol (TEG)"
aaggaaga

SEQ ID NO: 1425 - RNA, 19 nt, Artificial Sequence
  source: /note="Description of Artificial Sequence: Synthetic oligonucleotide"
  source: /note="Antisense Oligonucleotide"
  source: /note="5' tri-ethylene glycol (TEG)"
  source: /note="3' tri-ethylene glycol (TEG)"
aggaagauggcauuucuag

SEQ ID NO: 1426 - RNA, 18 nt, Artificial Sequence
  source: /note="Description of Artificial Sequence: Synthetic oligonucleotide"
  source: /note="Antisense Oligonucleotide"
  source: /note="5' tri-ethylene glycol (TEG)"
  source: /note="3' tri-ethylene glycol (TEG)"
aggaagauggcauuucua

SEQ ID NO: 1427 - RNA, 17 nt, Artificial Sequence
  source: /note="Description of Artificial Sequence: Synthetic oligonucleotide"
  source: /note="Antisense Oligonucleotide"
  source: /note="5' tri-ethylene glycol (TEG)"
  source: /note="3' tri-ethylene glycol (TEG)"
aggaagauggcauuucu

SEQ ID NO: 1428 - RNA, 16 nt, Artificial Sequence
  source: /note="Description of Artificial Sequence: Synthetic oligonucleotide"
  source: /note="Antisense Oligonucleotide"
  source: /note="5' tri-ethylene glycol (TEG)"
  source: /note="3' tri-ethylene glycol (TEG)"
aggaagauggcauuuc

SEQ ID NO: 1429 - RNA, 15 nt, Artificial Sequence
  source: /note="Description of Artificial Sequence: Synthetic oligonucleotide"
  source: /note="Antisense Oligonucleotide"
  source: /note="5' tri-ethylene glycol (TEG)"
  source: /note="3' tri-ethylene glycol (TEG)"
aggaagauggcauuu

SEQ ID NO: 1430 - RNA, 14 nt, Artificial Sequence
  source: /note="Description of Artificial Sequence: Synthetic oligonucleotide"
  source: /note="Antisense Oligonucleotide"
  source: /note="5' tri-ethylene glycol (TEG)"
  source: /note="3' tri-ethylene glycol (TEG)"
aggaagauggcauu

SEQ ID NO: 1431 - RNA, 13 nt, Artificial Sequence
  source: /note="Description of Artificial Sequence: Synthetic oligonucleotide"
  source: /note="Antisense Oligonucleotide"
  source: /note="5' tri-ethylene glycol (TEG)"
  source: /note="3' tri-ethylene glycol (TEG)"
aggaagauggcau

SEQ ID NO: 1432 - RNA, 12 nt, Artificial Sequence
  source: /note="Description of Artificial Sequence: Synthetic oligonucleotide"
  source: /note="Antisense Oligonucleotide"
  source: /note="5' tri-ethylene glycol (TEG)"
  source: /note="3' tri-ethylene glycol (TEG)"
aggaagauggca

SEQ ID NO: 1433 - RNA, 10 nt, Artificial Sequence
  source: /note="Description of Artificial Sequence: Synthetic oligonucleotide"
  source: /note="Antisense Oligonucleotide"
  source: /note="5' tri-ethylene glycol (TEG)"
  source: /note="3' tri-ethylene glycol (TEG)"
aggaagaugg

SEQ ID NO: 1434 - RNA, 9 nt, Artificial Sequence
  source: /note="Description of Artificial Sequence: Synthetic oligonucleotide"
  source: /note="Antisense Oligonucleotide"
  source: /note="5' tri-ethylene glycol (TEG)"
  source: /note="3' tri-ethylene glycol (TEG)"
aggaagaug

SEQ ID NO: 1435 - RNA, 8 nt, Artificial Sequence
  source: /note="Description of Artificial Sequence: Synthetic oligonucleotide"
  source: /note="Antisense Oligonucleotide"
  source: /note="5' tri-ethylene glycol (TEG)"
  source: /note="3' tri-ethylene glycol (TEG)"
aggaagau

SEQ ID NO: 1436 - RNA, 18 nt, Artificial Sequence
  source: /note="Description of Artificial Sequence: Synthetic oligonucleotide"
  source: /note="Antisense Oligonucleotide"
  source: /note="5' tri-ethylene glycol (TEG)"
  source: /note="3' tri-ethylene glycol (TEG)"
ggaagauggcauuucuag

SEQ ID NO: 1437 - RNA, 17 nt, Artificial Sequence
  source: /note="Description of Artificial Sequence: Synthetic oligonucleotide"
  source: /note="Antisense Oligonucleotide"
  source: /note="5' tri-ethylene glycol (TEG)"
  source: /note="3' tri-ethylene glycol (TEG)"
ggaagauggcauuucua

SEQ ID NO: 1438 - RNA, 16 nt, Artificial Sequence
  source: /note="Description of Artificial Sequence: Synthetic oligonucleotide"
  source: /note="Antisense Oligonucleotide"
  source: /note="5' tri-ethylene glycol (TEG)"
  source: /note="3' tri-ethylene glycol (TEG)"
ggaagauggcauuucu

SEQ ID NO: 1439 - RNA, 15 nt, Artificial Sequence
  source: /note="Description of Artificial Sequence: Synthetic oligonucleotide"
  source: /note="Antisense Oligonucleotide"
  source: /note="5' tri-ethylene glycol (TEG)"
  source: /note="3' tri-ethylene glycol (TEG)"
ggaagauggcauuuc

SEQ ID NO: 1440 - RNA, 14 nt, Artificial Sequence
  source: /note="Description of Artificial Sequence: Synthetic oligonucleotide"
  source: /note="Antisense Oligonucleotide"
  source: /note="5' tri-ethylene glycol (TEG)"
  source: /note="3' tri-ethylene glycol (TEG)"
ggaagauggcauuu

SEQ ID NO: 1441 - RNA, 13 nt, Artificial Sequence
  source: /note="Description of Artificial Sequence: Synthetic oligonucleotide"
  source: /note="Antisense Oligonucleotide"
  source: /note="5' tri-ethylene glycol (TEG)"
  source: /note="3' tri-ethylene glycol (TEG)"
ggaagauggcauu

SEQ ID NO: 1442 - RNA, 12 nt, Artificial Sequence
  source: /note="Description of Artificial Sequence: Synthetic oligonucleotide"
  source: /note="Antisense Oligonucleotide"
  source: /note="5' tri-ethylene glycol (TEG)"
  source: /note="3' tri-ethylene glycol (TEG)"
ggaagauggcau

SEQ ID NO: 1443 - RNA, 11 nt, Artificial Sequence
  source: /note="Description of Artificial Sequence: Synthetic oligonucleotide"
  source: /note="Antisense Oligonucleotide"
  source: /note="5' tri-ethylene glycol (TEG)"
  source: /note="3' tri-ethylene glycol (TEG)"
ggaagauggca

SEQ ID NO: 1444 - RNA, 10 nt, Artificial Sequence
  source: /note="Description of Artificial Sequence: Synthetic oligonucleotide"
  source: /note="Antisense Oligonucleotide"
  source: /note="5' tri-ethylene glycol (TEG)"
  source: /note="3' tri-ethylene glycol (TEG)"
ggaagauggc

SEQ ID NO: 1445 - RNA, 8 nt, Artificial Sequence
  source: /note="Description of Artificial Sequence: Synthetic oligonucleotide"
  source: /note="Antisense Oligonucleotide"
  source: /note="5' tri-ethylene glycol (TEG)"
  source: /note="3' tri-ethylene glycol (TEG)"
ggaagaug

SEQ ID NO: 1446 - RNA, 17 nt, Artificial Sequence
  source: /note="Description of Artificial Sequence: Synthetic oligonucleotide"
  source: /note="Antisense Oligonucleotide"
  source: /note="5' tri-ethylene glycol (TEG)"
  source: /note="3' tri-ethylene glycol (TEG)"
gaagauggcauuucuag

SEQ ID NO: 1447 - RNA, 16 nt, Artificial Sequence
  source: /note="Description of Artificial Sequence: Synthetic oligonucleotide"
  source: /note="Antisense Oligonucleotide"
  source: /note="5' tri-ethylene glycol (TEG)"
  source: /note="3' tri-ethylene glycol (TEG)"
gaagauggcauuucua

SEQ ID NO: 1448 - RNA, 14 nt, Artificial Sequence
  source: /note="Description of Artificial Sequence: Synthetic oligonucleotide"
  source: /note="Antisense Oligonucleotide"
  source: /note="5' tri-ethylene glycol (TEG)"
  source: /note="3' tri-ethylene glycol (TEG)"
gaagauggcauuuc

SEQ ID NO: 1449 - RNA, 13 nt, Artificial Sequence
  source: /note="Description of Artificial Sequence: Synthetic oligonucleotide"
  source: /note="Antisense Oligonucleotide"
  source: /note="5' tri-ethylene glycol (TEG)"
  source: /note="3' tri-ethylene glycol (TEG)"
gaagauggcauuu

SEQ ID NO: 1450 - RNA, 12 nt, Artificial Sequence
  source: /note="Description of Artificial Sequence: Synthetic oligonucleotide"
  source: /note="Antisense Oligonucleotide"
  source: /note="5' tri-ethylene glycol (TEG)"
  source: /note="3' tri-ethylene glycol (TEG)"
gaagauggcauu

SEQ ID NO: 1451 - RNA, 11 nt, Artificial Sequence
  source: /note="Description of Artificial Sequence: Synthetic oligonucleotide"
  source: /note="Antisense Oligonucleotide"
  source: /note="5' tri-ethylene glycol (TEG)"
  source: /note="3' tri-ethylene glycol (TEG)"
gaagauggcau

SEQ ID NO: 1452 - RNA, 10 nt, Artificial Sequence
  source: /note="Description of Artificial Sequence: Synthetic oligonucleotide"
  source: /note="Antisense Oligonucleotide"
  source: /note="5' tri-ethylene glycol (TEG)"
  source: /note="3' tri-ethylene glycol (TEG)"
gaagauggca

SEQ ID NO: 1453 - RNA, 9 nt, Artificial Sequence
  source: /note="Description of Artificial Sequence: Synthetic oligonucleotide"
  source: /note="Antisense Oligonucleotide"
  source: /note="5' tri-ethylene glycol (TEG)"
  source: /note="3' tri-ethylene glycol (TEG)"
gaagauggc

SEQ ID NO: 1454 - RNA, 8 nt, Artificial Sequence
  source: /note="Description of Artificial Sequence: Synthetic oligonucleotide"
  source: /note="Antisense Oligonucleotide"
  source: /note="5' tri-ethylene glycol (TEG)"
  source: /note="3' tri-ethylene glycol (TEG)"
gaagaugg

SEQ ID NO: 1455 - RNA, 16 nt, Artificial Sequence
  source: /note="Description of Artificial Sequence: Synthetic oligonucleotide"
  source: /note="Antisense Oligonucleotide"
  source: /note="5' tri-ethylene glycol (TEG)"
  source: /note="3' tri-ethylene glycol (TEG)"
aagauggcauuucuag

SEQ ID NO: 1456 - RNA, 15 nt, Artificial Sequence
  source: /note="Description of Artificial Sequence: Synthetic oligonucleotide"
  source: /note="Antisense Oligonucleotide"
  source: /note="5' tri-ethylene glycol (TEG)"
  source: /note="3' tri-ethylene glycol (TEG)"
aagauggcauuucua

SEQ ID NO: 1457 - RNA, 14 nt, Artificial Sequence
  source: /note="Description of Artificial Sequence: Synthetic oligonucleotide"
  source: /note="Antisense Oligonucleotide"
  source: /note="5' tri-ethylene glycol (TEG)"
  source: /note="3' tri-ethylene glycol (TEG)"
aagauggcauuucu

SEQ ID NO: 1458 - RNA, 13 nt, Artificial Sequence
  source: /note="Description of Artificial Sequence: Synthetic oligonucleotide"
  source: /note="Antisense Oligonucleotide"
  source: /note="5' tri-ethylene glycol (TEG)"
  source: /note="3' tri-ethylene glycol (TEG)"
aagauggcauuuc

SEQ ID NO: 1459 - RNA, 12 nt, Artificial Sequence
  source: /note="Description of Artificial Sequence: Synthetic oligonucleotide"
  source: /note="Antisense Oligonucleotide"
  source: /note="5' tri-ethylene glycol (TEG)"
  source: /note="3' tri-ethylene glycol (TEG)"
aagauggcauuu

SEQ ID NO: 1460 - RNA, 11 nt, Artificial Sequence
  source: /note="Description of Artificial Sequence: Synthetic oligonucleotide"
  source: /note="Antisense Oligonucleotide"
  source: /note="5' tri-ethylene glycol (TEG)"
  source: /note="3' tri-ethylene glycol (TEG)"
aagauggcauu

SEQ ID NO: 1461 - RNA, 10 nt, Artificial Sequence
  source: /note="Description of Artificial Sequence: Synthetic oligonucleotide"
  source: /note="Antisense Oligonucleotide"
  source: /note="5' tri-ethylene glycol (TEG)"
  source: /note="3' tri-ethylene glycol (TEG)"
aagauggcau

SEQ ID NO: 1462 - RNA, 9 nt, Artificial Sequence
  source: /note="Description of Artificial Sequence: Synthetic oligonucleotide"
  source: /note="Antisense Oligonucleotide"
  source: /note="5' tri-ethylene glycol (TEG)"
  source: /note="3' tri-ethylene glycol (TEG)"
aagauggca

SEQ ID NO: 1463 - RNA, 8 nt, Artificial Sequence
  source: /note="Description of Artificial Sequence: Synthetic oligonucleotide"
  source: /note="Antisense Oligonucleotide"
  source: /note="5' tri-ethylene glycol (TEG)"
  source: /note="3' tri-ethylene glycol (TEG)"
aagauggc

SEQ ID NO: 1464 - RNA, 15 nt, Artificial Sequence
  source: /note="Description of Artificial Sequence: Synthetic oligonucleotide"
  source: /note="Antisense Oligonucleotide"
  source: /note="5' tri-ethylene glycol (TEG)"
  source: /note="3' tri-ethylene glycol (TEG)"
agauggcauuucuag

SEQ ID NO: 1465 - RNA, 14 nt, Artificial Sequence
  source: /note="Description of Artificial Sequence: Synthetic oligonucleotide"
  source: /note="Antisense Oligonucleotide"
  source: /note="5' tri-ethylene glycol (TEG)"
  source: /note="3' tri-ethylene glycol (TEG)"
agauggcauuucua

SEQ ID NO: 1466 - RNA, 13 nt, Artificial Sequence
  source: /note="Description of Artificial Sequence: Synthetic oligonucleotide"
  source: /note="Antisense Oligonucleotide"
  source: /note="5' tri-ethylene glycol (TEG)"
  source: /note="3' tri-ethylene glycol (TEG)"
agauggcauuucu

SEQ ID NO: 1467 - RNA, 12 nt, Artificial Sequence
  source: /note="Description of Artificial Sequence: Synthetic oligonucleotide"
  source: /note="Antisense Oligonucleotide"
  source: /note="5' tri-ethylene glycol (TEG)"
  source: /note="3' tri-ethylene glycol (TEG)"
agauggcauuuc

SEQ ID NO: 1468 - RNA, 11 nt, Artificial Sequence
  source: /note="Description of Artificial Sequence: Synthetic oligonucleotide"
  source: /note="Antisense Oligonucleotide"
  source: /note="5' tri-ethylene glycol (TEG)"
  source: /note="3' tri-ethylene glycol (TEG)"
agauggcauuu

SEQ ID NO: 1469 - RNA, 10 nt, Artificial Sequence
  source: /note="Description of Artificial Sequence: Synthetic oligonucleotide"
  source: /note="Antisense Oligonucleotide"
  source: /note="5' tri-ethylene glycol (TEG)"
  source: /note="3' tri-ethylene glycol (TEG)"
agauggcauu

SEQ ID NO: 1470 - RNA, 9 nt, Artificial Sequence
  source: /note="Description of Artificial Sequence: Synthetic oligonucleotide"
  source: /note="Antisense Oligonucleotide"
  source: /note="5' tri-ethylene glycol (TEG)"
  source: /note="3' tri-ethylene glycol (TEG)"
agauggcau

SEQ ID NO: 1471 - RNA, 8 nt, Artificial Sequence
  source: /note="Description of Artificial Sequence: Synthetic oligonucleotide"
  source: /note="Antisense Oligonucleotide"
  source: /note="5' tri-ethylene glycol (TEG)"
  source: /note="3' tri-ethylene glycol (TEG)"
agauggca

SEQ ID NO: 1472 - RNA, 30 nt, Artificial Sequence; identical to SEQ ID NO: 284
  source: /note="Description of Artificial Sequence: Synthetic oligonucleotide"
  source: /note="Antisense Oligonucleotide"
  source: /note="5' tri-ethylene glycol (TEG)"
  source: /note="3' tri-ethylene glycol (TEG)"

SEQ ID NO: 1473 - RNA, 29 nt, Artificial Sequence
  source: /note="Description of Artificial Sequence: Synthetic oligonucleotide"
  source: /note="Antisense Oligonucleotide"
  source: /note="5' tri-ethylene glycol (TEG)"
  source: /note="3' tri-ethylene glycol (TEG)"
cuccaacaucaaggaagauggcauuucua

SEQ ID NO: 1474 - RNA, 28 nt, Artificial Sequence
  source: /note="Description of Artificial Sequence: Synthetic oligonucleotide"
  source: /note="Antisense Oligonucleotide"
  source: /note="5' tri-ethylene glycol (TEG)"
  source: /note="3' tri-ethylene glycol (TEG)"
cuccaacaucaaggaagauggcauuucu

SEQ ID NO: 1475 - RNA, 27 nt, Artificial Sequence
  source: /note="Description of Artificial Sequence: Synthetic oligonucleotide"
  source: /note="Antisense Oligonucleotide"
  source: /note="5' tri-ethylene glycol (TEG)"
  source: /note="3' tri-ethylene glycol (TEG)"
cuccaacaucaaggaagauggcauuuc

SEQ ID NO: 1476 - RNA, 26 nt, Artificial Sequence
  source: /note="Description of Artificial Sequence: Synthetic oligonucleotide"
  source: /note="Antisense Oligonucleotide"
  source: /note="5' tri-ethylene glycol (TEG)"
  source: /note="3' tri-ethylene glycol (TEG)"
cuccaacaucaaggaagauggcauuu

SEQ ID NO: 1477 - RNA, 25 nt, Artificial Sequence
  source: /note="Description of Artificial Sequence: Synthetic oligonucleotide"
  source: /note="Antisense Oligonucleotide"
  source: /note="5' tri-ethylene glycol (TEG)"
  source: /note="3' tri-ethylene glycol (TEG)"
cuccaacaucaaggaagauggcauu

SEQ ID NO: 1478 - RNA, 24 nt, Artificial Sequence
  source: /note="Description of Artificial Sequence: Synthetic oligonucleotide"
  source: /note="Antisense Oligonucleotide"
  source: /note="5' tri-ethylene glycol (TEG)"
  source: /note="3' tri-ethylene glycol (TEG)"
cuccaacaucaaggaagauggcau

SEQ ID NO: 1479 - RNA, 23 nt, Artificial Sequence
  source: /note="Description of Artificial Sequence: Synthetic oligonucleotide"
  source: /note="Antisense Oligonucleotide"
  source: /note="5' tri-ethylene glycol (TEG)"
  source: /note="3' tri-ethylene glycol (TEG)"
cuccaacaucaaggaagauggca

SEQ ID NO: 1480 - RNA, 22 nt, Artificial Sequence
  source: /note="Description of Artificial Sequence: Synthetic oligonucleotide"
  source: /note="Antisense Oligonucleotide"
  source: /note="5' tri-ethylene glycol (TEG)"
  source: /note="3' tri-ethylene glycol (TEG)"
cuccaacaucaaggaagauggc

SEQ ID NO: 1481 - RNA, 21 nt, Artificial Sequence
  source: /note="Description of Artificial Sequence: Synthetic oligonucleotide"
  source: /note="Antisense Oligonucleotide"
  source: /note="5' tri-ethylene glycol (TEG)"
  source: /note="3' tri-ethylene glycol (TEG)"
cuccaacaucaaggaagaugg

SEQ ID NO: 1482 - RNA, 20 nt, Artificial Sequence
  source: /note="Description of Artificial Sequence: Synthetic oligonucleotide"
  source: /note="Antisense Oligonucleotide"
  source: /note="5' tri-ethylene glycol (TEG)"
  source: /note="3' tri-ethylene glycol (TEG)"
cuccaacaucaaggaagaug

SEQ ID NO: 1483 - RNA, 19 nt, Artificial Sequence
  source: /note="Description of Artificial Sequence: Synthetic oligonucleotide"
  source: /note="Antisense Oligonucleotide"
  source: /note="5' tri-ethylene glycol (TEG)"
  source: /note="3' tri-ethylene glycol (TEG)"
cuccaacaucaaggaagau

SEQ ID NO: 1484 - RNA, 18 nt, Artificial Sequence
  source: /note="Description of Artificial Sequence: Synthetic oligonucleotide"
  source: /note="Antisense Oligonucleotide"
  source: /note="5' tri-ethylene glycol (TEG)"
  source: /note="3' tri-ethylene glycol (TEG)"
cuccaacaucaaggaaga

SEQ ID NO: 1485 - RNA, 17 nt, Artificial Sequence
  source: /note="Description of Artificial Sequence: Synthetic oligonucleotide"
  source: /note="Antisense Oligonucleotide"
  source: /note="5' tri-ethylene glycol (TEG)"
  source: /note="3' tri-ethylene glycol (TEG)"
cuccaacaucaaggaag

SEQ ID NO: 1486 - RNA, 29 nt, Artificial Sequence
  source: /note="Description of Artificial Sequence: Synthetic oligonucleotide"
  source: /note="Antisense Oligonucleotide"
  source: /note="5' tri-ethylene glycol (TEG)"
  source: /note="3' tri-ethylene glycol (TEG)"
uccaacaucaaggaagauggcauuucuag

SEQ ID NO: 1487 - RNA, 28 nt, Artificial Sequence
  source: /note="Description of Artificial Sequence: Synthetic oligonucleotide"
  source: /note="Antisense Oligonucleotide"
  source: /note="5' tri-ethylene glycol (TEG)"
  source: /note="3' tri-ethylene glycol (TEG)"
uccaacaucaaggaagauggcauuucua

SEQ ID NO: 1488 - RNA, 27 nt, Artificial Sequence
  source: /note="Description of Artificial Sequence: Synthetic oligonucleotide"
  source: /note="Antisense Oligonucleotide"
  source: /note="5' tri-ethylene glycol (TEG)"
  source: /note="3' tri-ethylene glycol (TEG)"
uccaacaucaaggaagauggcauuucu

SEQ ID NO: 1489 - RNA, 26 nt, Artificial Sequence
  source: /note="Description of Artificial Sequence: Synthetic oligonucleotide"
  source: /note="Antisense Oligonucleotide"
  source: /note="5' tri-ethylene glycol (TEG)"
  source: /note="3' tri-ethylene glycol (TEG)"
uccaacaucaaggaagauggcauuuc

SEQ ID NO: 1490 - RNA, 25 nt, Artificial Sequence
  source: /note="Description of Artificial Sequence: Synthetic oligonucleotide"
  source: /note="Antisense Oligonucleotide"
  source: /note="5' tri-ethylene glycol (TEG)"
  source: /note="3' tri-ethylene glycol (TEG)"
uccaacaucaaggaagauggcauuu

SEQ ID NO: 1491 - RNA, 24 nt, Artificial Sequence
  source: /note="Description of Artificial Sequence: Synthetic oligonucleotide"
  source: /note="Antisense Oligonucleotide"
  source: /note="5' tri-ethylene glycol (TEG)"
  source: /note="3' tri-ethylene glycol (TEG)"
uccaacaucaaggaagauggcauu

SEQ ID NO: 1492 - RNA, 23 nt, Artificial Sequence
  source: /note="Description of Artificial Sequence: Synthetic oligonucleotide"
  source: /note="Antisense Oligonucleotide"
  source: /note="5' tri-ethylene glycol (TEG)"
  source: /note="3' tri-ethylene glycol (TEG)"
uccaacaucaaggaagauggcau

SEQ ID NO: 1493 - RNA, 22 nt, Artificial Sequence
  source: /note="Description of Artificial Sequence: Synthetic oligonucleotide"
  source: /note="Antisense Oligonucleotide"
  source: /note="5' tri-ethylene glycol (TEG)"
  source: /note="3' tri-ethylene glycol (TEG)"
uccaacaucaaggaagauggca

SEQ ID NO: 1494 - RNA, 21 nt, Artificial Sequence
  source: /note="Description of Artificial Sequence: Synthetic oligonucleotide"
  source: /note="Antisense Oligonucleotide"
  source: /note="5' tri-ethylene glycol (TEG)"
  source: /note="3' tri-ethylene glycol (TEG)"
uccaacaucaaggaagauggc

SEQ ID NO: 1495 - RNA, 20 nt, Artificial Sequence
  source: /note="Description of Artificial Sequence: Synthetic oligonucleotide"
  source: /note="Antisense Oligonucleotide"
  source: /note="5' tri-ethylene glycol (TEG)"
  source: /note="3' tri-ethylene glycol (TEG)"
uccaacaucaaggaagaugg

SEQ ID NO: 1496 - RNA, 19 nt, Artificial Sequence
  source: /note="Description of Artificial Sequence: Synthetic oligonucleotide"
  source: /note="Antisense Oligonucleotide"
  source: /note="5' tri-ethylene glycol (TEG)"
  source: /note="3' tri-ethylene glycol (TEG)"
uccaacaucaaggaagaug

SEQ ID NO: 1497 - RNA, 18 nt, Artificial Sequence
  source: /note="Description of Artificial Sequence: Synthetic oligonucleotide"
  source: /note="Antisense Oligonucleotide"
  source: /note="5' tri-ethylene glycol (TEG)"
  source: /note="3' tri-ethylene glycol (TEG)"
uccaacaucaaggaagau

SEQ ID NO: 1498 - RNA, 17 nt, Artificial Sequence
  source: /note="Description of Artificial Sequence: Synthetic oligonucleotide"
  source: /note="Antisense Oligonucleotide"
  source: /note="5' tri-ethylene glycol (TEG)"
  source: /note="3' tri-ethylene glycol (TEG)"
uccaacaucaaggaaga

SEQ ID NO: 1499 - RNA, 16 nt, Artificial Sequence
  source: /note="Description of Artificial Sequence: Synthetic oligonucleotide"
  source: /note="Antisense Oligonucleotide"
  source: /note="5' tri-ethylene glycol (TEG)"
  source: /note="3' tri-ethylene glycol (TEG)"
uccaacaucaaggaag

SEQ ID NO: 1500 - RNA, 28 nt, Artificial Sequence
  source: /note="Description of Artificial Sequence: Synthetic oligonucleotide"
  source: /note="Antisense Oligonucleotide"
  source: /note="5' tri-ethylene glycol (TEG)"
  source: /note="3' tri-ethylene glycol (TEG)"
ccaacaucaaggaagauggcauuucuag

SEQ ID NO: 1501 - RNA, 27 nt, Artificial Sequence
  source: /note="Description of Artificial Sequence: Synthetic oligonucleotide"
  source: /note="Antisense Oligonucleotide"
  source: /note="5' tri-ethylene glycol (TEG)"
  source: /note="3' tri-ethylene glycol (TEG)"
ccaacaucaaggaagauggcauuucua

SEQ ID NO: 1502 - RNA, 26 nt, Artificial Sequence
  source: /note="Description of Artificial Sequence: Synthetic oligonucleotide"
  source: /note="Antisense Oligonucleotide"
  source: /note="5' tri-ethylene glycol (TEG)"
  source: /note="3' tri-ethylene glycol (TEG)"
ccaacaucaaggaagauggcauuucu

SEQ ID NO: 1503 - RNA, 25 nt, Artificial Sequence
  source: /note="Description of Artificial Sequence: Synthetic oligonucleotide"
  source: /note="Antisense Oligonucleotide"
  source: /note="5' tri-ethylene glycol (TEG)"
  source: /note="3' tri-ethylene glycol (TEG)"
ccaacaucaaggaagauggcauuuc

SEQ ID NO: 1504 - RNA, 24 nt, Artificial Sequence
  source: /note="Description of Artificial Sequence: Synthetic oligonucleotide"
  source: /note="Antisense Oligonucleotide"
  source: /note="5' tri-ethylene glycol (TEG)"
  source: /note="3' tri-ethylene glycol (TEG)"
ccaacaucaaggaagauggcauuu

SEQ ID NO: 1505 - RNA, 23 nt, Artificial Sequence
  source: /note="Description of Artificial Sequence: Synthetic oligonucleotide"
  source: /note="Antisense Oligonucleotide"
  source: /note="5' tri-ethylene glycol (TEG)"
  source: /note="3' tri-ethylene glycol (TEG)"
ccaacaucaaggaagauggcauu

SEQ ID NO: 1506 - RNA, 22 nt, Artificial Sequence
  source: /note="Description of Artificial Sequence: Synthetic oligonucleotide"
  source: /note="Antisense Oligonucleotide"
  source: /note="5' tri-ethylene glycol (TEG)"
  source: /note="3' tri-ethylene glycol (TEG)"
ccaacaucaaggaagauggcau

SEQ ID NO: 1507 - RNA, 21 nt, Artificial Sequence
  source: /note="Description of Artificial Sequence: Synthetic oligonucleotide"
  source: /note="Antisense Oligonucleotide"
  source: /note="5' tri-ethylene glycol (TEG)"
  source: /note="3' tri-ethylene glycol (TEG)"
ccaacaucaaggaagauggca

SEQ ID NO: 1508 - RNA, 20 nt, Artificial Sequence
  source: /note="Description of Artificial Sequence: Synthetic oligonucleotide"
  source: /note="Antisense Oligonucleotide"
  source: /note="5' tri-ethylene glycol (TEG)"
  source: /note="3' tri-ethylene glycol (TEG)"
ccaacaucaaggaagauggc

SEQ ID NO: 1509 - RNA, 19 nt, Artificial Sequence
  source: /note="Description of Artificial Sequence: Synthetic oligonucleotide"
  source: /note="Antisense Oligonucleotide"
  source: /note="5' tri-ethylene glycol (TEG)"
  source: /note="3' tri-ethylene glycol (TEG)"
ccaacaucaaggaagaugg

SEQ ID NO: 1510 - RNA, 18 nt, Artificial Sequence
  source: /note="Description of Artificial Sequence: Synthetic oligonucleotide"
  source: /note="Antisense Oligonucleotide"
  source: /note="5' tri-ethylene glycol (TEG)"
  source: /note="3' tri-ethylene glycol (TEG)"
ccaacaucaaggaagaug

SEQ ID NO: 1511 - RNA, 17 nt, Artificial Sequence
  source: /note="Description of Artificial Sequence: Synthetic oligonucleotide"
  source: /note="Antisense Oligonucleotide"
  source: /note="5' tri-ethylene glycol (TEG)"
  source: /note="3' tri-ethylene glycol (TEG)"
ccaacaucaaggaagau

SEQ ID NO: 1512 - RNA, 16 nt, Artificial Sequence
  source: /note="Description of Artificial Sequence: Synthetic oligonucleotide"
  source: /note="Antisense Oligonucleotide"
  source: /note="5' tri-ethylene glycol (TEG)"
  source: /note="3' tri-ethylene glycol (TEG)"
ccaacaucaaggaaga

SEQ ID NO: 1513 - RNA, 15 nt, Artificial Sequence
  source: /note="Description of Artificial Sequence: Synthetic oligonucleotide"
  source: /note="Antisense Oligonucleotide"
  source: /note="5' tri-ethylene glycol (TEG)"
  source: /note="3' tri-ethylene glycol (TEG)"
ccaacaucaaggaag

SEQ ID NO: 1514 - RNA, 27 nt, Artificial Sequence
  source: /note="Description of Artificial Sequence: Synthetic oligonucleotide"
  source: /note="Antisense Oligonucleotide"
  source: /note="5' tri-ethylene glycol (TEG)"
  source: /note="3' tri-ethylene glycol (TEG)"
caacaucaaggaagauggcauuucuag

SEQ ID NO: 1515 - RNA, 26 nt, Artificial Sequence
  source: /note="Description of Artificial Sequence: Synthetic oligonucleotide"
  source: /note="Antisense Oligonucleotide"
  source: /note="5' tri-ethylene glycol (TEG)"
  source: /note="3' tri-ethylene glycol (TEG)"
caacaucaaggaagauggcauuucua

SEQ ID NO: 1516 - RNA, 25 nt, Artificial Sequence
  source: /note="Description of Artificial Sequence: Synthetic oligonucleotide"
  source: /note="Antisense Oligonucleotide"
  source: /note="5' tri-ethylene glycol (TEG)"
  source: /note="3' tri-ethylene glycol (TEG)"
caacaucaaggaagauggcauuucu

SEQ ID NO: 1517 - RNA, 24 nt, Artificial Sequence
  source: /note="Description of Artificial Sequence: Synthetic oligonucleotide"
  source: /note="Antisense Oligonucleotide"
  source: /note="5' tri-ethylene glycol (TEG)"
  source: /note="3' tri-ethylene glycol (TEG)"
caacaucaaggaagauggcauuuc

SEQ ID NO: 1518 - RNA, 23 nt, Artificial Sequence
  source: /note="Description of Artificial Sequence: Synthetic oligonucleotide"
  source: /note="Antisense Oligonucleotide"
  source: /note="5' tri-ethylene glycol (TEG)"
  source: /note="3' tri-ethylene glycol (TEG)"
caacaucaaggaagauggcauuu

SEQ ID NO: 1519 - RNA, 22 nt, Artificial Sequence
  source: /note="Description of Artificial Sequence: Synthetic oligonucleotide"
  source: /note="Antisense Oligonucleotide"
  source: /note="5' tri-ethylene glycol (TEG)"
  source: /note="3' tri-ethylene glycol (TEG)"
caacaucaaggaagauggcauu

SEQ ID NO: 1520 - RNA, 21 nt, Artificial Sequence
  source: /note="Description of Artificial Sequence: Synthetic oligonucleotide"
  source: /note="Antisense Oligonucleotide"
  source: /note="5' tri-ethylene glycol (TEG)"
  source: /note="3' tri-ethylene glycol (TEG)"
caacaucaaggaagauggcau

SEQ ID NO: 1521 - RNA, 20 nt, Artificial Sequence
  source: /note="Description of Artificial Sequence: Synthetic oligonucleotide"
  source: /note="Antisense Oligonucleotide"
  source: /note="5' tri-ethylene glycol (TEG)"
  source: /note="3' tri-ethylene glycol (TEG)"
caacaucaaggaagauggca

SEQ ID NO: 1522 - RNA, 19 nt, Artificial Sequence
  source: /note="Description of Artificial Sequence: Synthetic oligonucleotide"
  source: /note="Antisense Oligonucleotide"
  source: /note="5' tri-ethylene glycol (TEG)"
  source: /note="3' tri-ethylene glycol (TEG)"
caacaucaaggaagauggc

SEQ ID NO: 1523 - RNA, 18 nt, Artificial Sequence
  source: /note="Description of Artificial Sequence: Synthetic oligonucleotide"
  source: /note="Antisense Oligonucleotide"
  source: /note="5' tri-ethylene glycol (TEG)"
  source: /note="3' tri-ethylene glycol (TEG)"
caacaucaaggaagaugg

SEQ ID NO: 1524 - RNA, 17 nt, Artificial Sequence
  source: /note="Description of Artificial Sequence: Synthetic oligonucleotide"
  source: /note="Antisense Oligonucleotide"
  source: /note="5' tri-ethylene glycol (TEG)"
  source: /note="3' tri-ethylene glycol (TEG)"
caacaucaaggaagaug

SEQ ID NO: 1525 - RNA, 16 nt, Artificial Sequence
  source: /note="Description of Artificial Sequence: Synthetic oligonucleotide"
  source: /note="Antisense Oligonucleotide"
  source: /note="5' tri-ethylene glycol (TEG)"
  source: /note="3' tri-ethylene glycol (TEG)"
caacaucaaggaagau

SEQ ID NO: 1526 - RNA, 15 nt, Artificial Sequence
  source: /note="Description of Artificial Sequence: Synthetic oligonucleotide"
  source: /note="Antisense Oligonucleotide"
  source: /note="5' tri-ethylene glycol (TEG)"
  source: /note="3' tri-ethylene glycol (TEG)"
caacaucaaggaaga

SEQ ID NO: 1527 - RNA, 14 nt, Artificial Sequence
  source: /note="Description of Artificial Sequence: Synthetic oligonucleotide"
  source: /note="Antisense Oligonucleotide"
  source: /note="5' tri-ethylene glycol (TEG)"
  source: /note="3' tri-ethylene glycol (TEG)"
caacaucaaggaag

SEQ ID NO: 1528 - RNA, 26 nt, Artificial Sequence
  source: /note="Description of Artificial Sequence: Synthetic oligonucleotide"
  source: /note="Antisense Oligonucleotide"
  source: /note="5' tri-ethylene glycol (TEG)"
  source: /note="3' tri-ethylene glycol (TEG)"
aacaucaaggaagauggcauuucuag

SEQ ID NO: 1529 - RNA, 25 nt, Artificial Sequence
  source: /note="Description of Artificial Sequence: Synthetic oligonucleotide"
  source: /note="Antisense Oligonucleotide"
  source: /note="5' tri-ethylene glycol (TEG)"
  source: /note="3' tri-ethylene glycol (TEG)"
aacaucaaggaagauggcauuucua

SEQ ID NO: 1530 - RNA, 24 nt, Artificial Sequence
  source: /note="Description of Artificial Sequence: Synthetic oligonucleotide"
  source: /note="Antisense Oligonucleotide"
  source: /note="5' tri-ethylene glycol (TEG)"
  source: /note="3' tri-ethylene glycol (TEG)"
aacaucaaggaagauggcauuucu

SEQ ID NO: 1531 - RNA, 23 nt, Artificial Sequence
  source: /note="Description of Artificial Sequence: Synthetic oligonucleotide"
  source: /note="Antisense Oligonucleotide"
  source: /note="5' tri-ethylene glycol (TEG)"
  source: /note="3' tri-ethylene glycol (TEG)"
aacaucaaggaagauggcauuuc

SEQ ID NO: 1532 - RNA, 22 nt, Artificial Sequence
  source: /note="Description of Artificial Sequence: Synthetic oligonucleotide"
  source: /note="Antisense Oligonucleotide"
  source: /note="5' tri-ethylene glycol (TEG)"
  source: /note="3' tri-ethylene glycol (TEG)"
aacaucaaggaagauggcauuu

SEQ ID NO: 1533 - RNA, 21 nt, Artificial Sequence
  source: /note="Description of Artificial Sequence: Synthetic oligonucleotide"
  source: /note="Antisense Oligonucleotide"
  source: /note="5' tri-ethylene glycol (TEG)"
  source: /note="3' tri-ethylene glycol (TEG)"
aacaucaaggaagauggcauu

SEQ ID NO: 1534 - RNA, 20 nt, Artificial Sequence
  source: /note="Description of Artificial Sequence: Synthetic oligonucleotide"
  source: /note="Antisense Oligonucleotide"
  source: /note="5' tri-ethylene glycol (TEG)"
  source: /note="3' tri-ethylene glycol (TEG)"
aacaucaaggaagauggcau

SEQ ID NO: 1535 - RNA, 19 nt, Artificial Sequence
  source: /note="Description of Artificial Sequence: Synthetic oligonucleotide"
  source: /note="Antisense Oligonucleotide"
  source: /note="5' tri-ethylene glycol (TEG)"
  source: /note="3' tri-ethylene glycol (TEG)"
aacaucaaggaagauggca

SEQ ID NO: 1536 - RNA, 18 nt, Artificial Sequence
  source: /note="Description of Artificial Sequence: Synthetic oligonucleotide"
  source: /note="Antisense Oligonucleotide"
  source: /note="5' tri-ethylene glycol (TEG)"
  source: /note="3' tri-ethylene glycol (TEG)"
aacaucaaggaagauggc

SEQ ID NO: 1537 - RNA, 17 nt, Artificial Sequence
  source: /note="Description of Artificial Sequence: Synthetic oligonucleotide"
  source: /note="Antisense Oligonucleotide"
  source: /note="5' tri-ethylene glycol (TEG)"
  source: /note="3' tri-ethylene glycol (TEG)"
aacaucaaggaagaugg

SEQ ID NO: 1538 - RNA, 16 nt, Artificial Sequence
  source: /note="Description of Artificial Sequence: Synthetic oligonucleotide"
  source: /note="Antisense Oligonucleotide"
  source: /note="5' tri-ethylene glycol (TEG)"
  source: /note="3' tri-ethylene glycol (TEG)"
aacaucaaggaagaug

SEQ ID NO: 1539 - RNA, 15 nt, Artificial Sequence
  source: /note="Description of Artificial Sequence: Synthetic oligonucleotide"
  source: /note="Antisense Oligonucleotide"
  source: /note="5' tri-ethylene glycol (TEG)"
  source: /note="3' tri-ethylene glycol (TEG)"
aacaucaaggaagau

SEQ ID NO: 1540 - RNA, 14 nt, Artificial Sequence
  source: /note="Description of Artificial Sequence: Synthetic oligonucleotide"
  source: /note="Antisense Oligonucleotide"
  source: /note="5' tri-ethylene glycol (TEG)"
  source: /note="3' tri-ethylene glycol (TEG)"
aacaucaaggaaga

SEQ ID NO: 1541 - RNA, 13 nt, Artificial Sequence
  source: /note="Description of Artificial Sequence: Synthetic oligonucleotide"
  source: /note="Antisense Oligonucleotide"
  source: /note="5' tri-ethylene glycol (TEG)"
  source: /note="3' tri-ethylene glycol (TEG)"
aacaucaaggaag

SEQ ID NO: 1542 - RNA, 25 nt, Artificial Sequence
  source: /note="Description of Artificial Sequence: Synthetic oligonucleotide"
  source: /note="Antisense Oligonucleotide"
  source: /note="5' tri-ethylene glycol (TEG)"
  source: /note="3' tri-ethylene glycol (TEG)"
acaucaaggaagauggcauuucuag

SEQ ID NO: 1543 - RNA, 24 nt, Artificial Sequence
  source: /note="Description of Artificial Sequence: Synthetic oligonucleotide"
  source: /note="Antisense Oligonucleotide"
  source: /note="5' tri-ethylene glycol (TEG)"
  source: /note="3' tri-ethylene glycol (TEG)"
acaucaaggaagauggcauuucua

SEQ ID NO: 1544 - RNA, 23 nt, Artificial Sequence
  source: /note="Description of Artificial Sequence: Synthetic oligonucleotide"
  source: /note="Antisense Oligonucleotide"
  source: /note="5' tri-ethylene glycol (TEG)"
  source: /note="3' tri-ethylene glycol (TEG)"
acaucaaggaagauggcauuucu

SEQ ID NO: 1545 - RNA, 22 nt, Artificial Sequence
  source: /note="Description of Artificial Sequence: Synthetic oligonucleotide"
  source: /note="Antisense Oligonucleotide"
  source: /note="5' tri-ethylene glycol (TEG)"
  source: /note="3' tri-ethylene glycol (TEG)"
acaucaaggaagauggcauuuc

SEQ ID NO: 1546 - RNA, 21 nt, Artificial Sequence
  source: /note="Description of Artificial Sequence: Synthetic oligonucleotide"
  source: /note="Antisense Oligonucleotide"
  source: /note="5' tri-ethylene glycol (TEG)"
  source: /note="3' tri-ethylene glycol (TEG)"
acaucaaggaagauggcauuu

SEQ ID NO: 1547 - RNA, 20 nt, Artificial Sequence
  source: /note="Description of Artificial Sequence: Synthetic oligonucleotide"
  source: /note="Antisense Oligonucleotide"
  source: /note="5' tri-ethylene glycol (TEG)"
  source: /note="3' tri-ethylene glycol (TEG)"
acaucaaggaagauggcauu

SEQ ID NO: 1548 - RNA, 19 nt, Artificial Sequence
  source: /note="Description of Artificial Sequence: Synthetic oligonucleotide"
  source: /note="Antisense Oligonucleotide"
  source: /note="5' tri-ethylene glycol (TEG)"
  source: /note="3' tri-ethylene glycol (TEG)"
acaucaaggaagauggcau

SEQ ID NO: 1549 - RNA, 18 nt, Artificial Sequence
  source: /note="Description of Artificial Sequence: Synthetic oligonucleotide"
  source: /note="Antisense Oligonucleotide"
  source: /note="5' tri-ethylene glycol (TEG)"
  source: /note="3' tri-ethylene glycol (TEG)"
acaucaaggaagauggca

SEQ ID NO: 1550 - RNA, 17 nt, Artificial Sequence
  source: /note="Description of Artificial Sequence: Synthetic oligonucleotide"
  source: /note="Antisense Oligonucleotide"
  source: /note="5' tri-ethylene glycol (TEG)"
  source: /note="3' tri-ethylene glycol (TEG)"
acaucaaggaagauggc

SEQ ID NO: 1551 - RNA, 16 nt, Artificial Sequence
  source: /note="Description of Artificial Sequence: Synthetic oligonucleotide"
  source: /note="Antisense Oligonucleotide"
  source: /note="5' tri-ethylene glycol (TEG)"
  source: /note="3' tri-ethylene glycol (TEG)"
acaucaaggaagaugg

SEQ ID NO: 1552 - RNA, 15 nt, Artificial Sequence
  source: /note="Description of Artificial Sequence: Synthetic oligonucleotide"
  source: /note="Antisense Oligonucleotide"
  source: /note="5' tri-ethylene glycol (TEG)"
  source: /note="3' tri-ethylene glycol (TEG)"
acaucaaggaagaug

SEQ ID NO: 1553 - RNA, 14 nt, Artificial Sequence
  source: /note="Description of Artificial Sequence: Synthetic oligonucleotide"
  source: /note="Antisense Oligonucleotide"
  source: /note="5' tri-ethylene glycol (TEG)"
  source: /note="3' tri-ethylene glycol (TEG)"
acaucaaggaagau

SEQ ID NO: 1554 - RNA, 13 nt, Artificial Sequence
  source: /note="Description of Artificial Sequence: Synthetic oligonucleotide"
  source: /note="Antisense Oligonucleotide"
  source: /note="5' tri-ethylene glycol (TEG)"
  source: /note="3' tri-ethylene glycol (TEG)"
acaucaaggaaga

SEQ ID NO: 1555 - RNA, 12 nt, Artificial Sequence
  source: /note="Description of Artificial Sequence: Synthetic oligonucleotide"
  source: /note="Antisense Oligonucleotide"
  source: /note="5' tri-ethylene glycol (TEG)"
  source: /note="3' tri-ethylene glycol (TEG)"
acaucaaggaag

SEQ ID NO: 1556 - RNA, 24 nt, Artificial Sequence
  source: /note="Description of Artificial Sequence: Synthetic oligonucleotide"
  source: /note="Antisense Oligonucleotide"
  source: /note="5' tri-ethylene glycol (TEG)"
  source: /note="3' tri-ethylene glycol (TEG)"
caucaaggaagauggcauuucuag

SEQ ID NO: 1557 - RNA, 23 nt, Artificial Sequence
  source: /note="Description of Artificial Sequence: Synthetic oligonucleotide"
  source: /note="Antisense Oligonucleotide"
  source: /note="5' tri-ethylene glycol (TEG)"
  source: /note="3' tri-ethylene glycol (TEG)"
caucaaggaagauggcauuucua

SEQ ID NO: 1558 - RNA, 22 nt, Artificial Sequence
  source: /note="Description of Artificial Sequence: Synthetic oligonucleotide"
  source: /note="Antisense Oligonucleotide"
  source: /note="5' tri-ethylene glycol (TEG)"
  source: /note="3' tri-ethylene glycol (TEG)"
caucaaggaagauggcauuucu

SEQ ID NO: 1559 - RNA, 21 nt, Artificial Sequence
  source: /note="Description of Artificial Sequence: Synthetic oligonucleotide"
  source: /note="Antisense Oligonucleotide"
  source: /note="5' tri-ethylene glycol (TEG)"
  source: /note="3' tri-ethylene glycol (TEG)"
caucaaggaagauggcauuuc

SEQ ID NO: 1560 - RNA, 20 nt, Artificial Sequence
  source: /note="Description of Artificial Sequence: Synthetic oligonucleotide"
  source: /note="Antisense Oligonucleotide"
  source: /note="5' tri-ethylene glycol (TEG)"
  source: /note="3' tri-ethylene glycol (TEG)"
caucaaggaagauggcauuu

SEQ ID NO: 1561 - RNA, 19 nt, Artificial Sequence
  source: /note="Description of Artificial Sequence: Synthetic oligonucleotide"
  source: /note="Antisense Oligonucleotide"
  source: /note="5' tri-ethylene glycol (TEG)"
  source: /note="3' tri-ethylene glycol (TEG)"
caucaaggaagauggcauu

SEQ ID NO: 1562 - RNA, 18 nt, Artificial Sequence
  source: /note="Description of Artificial Sequence: Synthetic oligonucleotide"
  source: /note="Antisense Oligonucleotide"
  source: /note="5' tri-ethylene glycol (TEG)"
  source: /note="3' tri-ethylene glycol (TEG)"
caucaaggaagauggcau

SEQ ID NO: 1563 - RNA, 17 nt, Artificial Sequence
  source: /note="Description of Artificial Sequence: Synthetic oligonucleotide"
  source: /note="Antisense Oligonucleotide"
  source: /note="5' tri-ethylene glycol (TEG)"
  source: /note="3' tri-ethylene glycol (TEG)"
caucaaggaagauggca

SEQ ID NO: 1564 - RNA, 16 nt, Artificial Sequence
  source: /note="Description of Artificial Sequence: Synthetic oligonucleotide"
  source: /note="Antisense Oligonucleotide"
  source: /note="5' tri-ethylene glycol (TEG)"
  source: /note="3' tri-ethylene glycol (TEG)"
caucaaggaagauggc

SEQ ID NO: 1565 - RNA, 15 nt, Artificial Sequence
  source: /note="Description of Artificial Sequence: Synthetic oligonucleotide"
  source: /note="Antisense Oligonucleotide"
  source: /note="5' tri-ethylene glycol (TEG)"
  source: /note="3' tri-ethylene glycol (TEG)"
caucaaggaagaugg

SEQ ID NO: 1566 - RNA, 14 nt, Artificial Sequence
  source: /note="Description of Artificial Sequence: Synthetic oligonucleotide"
  source: /note="Antisense Oligonucleotide"
  source: /note="5' tri-ethylene glycol (TEG)"
  source: /note="3' tri-ethylene glycol (TEG)"
caucaaggaagaug

SEQ ID NO: 1567 - RNA, 13 nt, Artificial Sequence
  source: /note="Description of Artificial Sequence: Synthetic oligonucleotide"
  source: /note="Antisense Oligonucleotide"
  source: /note="5' tri-ethylene glycol (TEG)"
  source: /note="3' tri-ethylene glycol (TEG)"
caucaaggaagau

SEQ ID NO: 1568 - RNA, 12 nt, Artificial Sequence
  source: /note="Description of Artificial Sequence: Synthetic oligonucleotide"
  source: /note="Antisense Oligonucleotide"
  source: /note="5' tri-ethylene glycol (TEG)"
  source: /note="3' tri-ethylene glycol (TEG)"
caucaaggaaga

SEQ ID NO: 1569 - RNA, 11 nt, Artificial Sequence
  source: /note="Description of Artificial Sequence: Synthetic oligonucleotide"
  source: /note="Antisense Oligonucleotide"
  source: /note="5' tri-ethylene glycol (TEG)"
  source: /note="3' tri-ethylene glycol (TEG)"
caucaaggaag

SEQ ID NO: 1570 - RNA, 23 nt, Artificial Sequence
  source: /note="Description of Artificial Sequence: Synthetic oligonucleotide"
  source: /note="Antisense Oligonucleotide"
  source: /note="5' tri-ethylene glycol (TEG)"
  source: /note="3' tri-ethylene glycol (TEG)"
aucaaggaagauggcauuucuag

SEQ ID NO: 1571 - RNA, 22 nt, Artificial Sequence
  source: /note="Description of Artificial Sequence: Synthetic oligonucleotide"
  source: /note="Antisense Oligonucleotide"
  source: /note="5' tri-ethylene glycol (TEG)"
  source: /note="3' tri-ethylene glycol (TEG)"
aucaaggaagauggcauuucua

SEQ ID NO: 1572 - RNA, 21 nt, Artificial Sequence
  source: /note="Description of Artificial Sequence: Synthetic oligonucleotide"
  source: /note="Antisense Oligonucleotide"
  source: /note="5' tri-ethylene glycol (TEG)"
  source: /note="3' tri-ethylene glycol (TEG)"
aucaaggaagauggcauuucu

SEQ ID NO: 1573 - RNA, 20 nt, Artificial Sequence
  source: /note="Description of Artificial Sequence: Synthetic oligonucleotide"
  source: /note="Antisense Oligonucleotide"
  source: /note="5' tri-ethylene glycol (TEG)"
  source: /note="3' tri-ethylene glycol (TEG)"
aucaaggaagauggcauuuc

SEQ ID NO: 1574 - RNA, 19 nt, Artificial Sequence
  source: /note="Description of Artificial Sequence: Synthetic oligonucleotide"
  source: /note="Antisense Oligonucleotide"
  source: /note="5' tri-ethylene glycol (TEG)"
  source: /note="3' tri-ethylene glycol (TEG)"
aucaaggaagauggcauuu

SEQ ID NO: 1575 - RNA, 18 nt, Artificial Sequence
  source: /note="Description of Artificial Sequence: Synthetic oligonucleotide"
  source: /note="Antisense Oligonucleotide"
  source: /note="5' tri-ethylene glycol (TEG)"
  source: /note="3' tri-ethylene glycol (TEG)"
aucaaggaagauggcauu

SEQ ID NO: 1576 - RNA, 17 nt, Artificial Sequence
  source: /note="Description of Artificial Sequence: Synthetic oligonucleotide"
  source: /note="Antisense Oligonucleotide"
  source: /note="5' tri-ethylene glycol (TEG)"
  source: /note="3' tri-ethylene glycol (TEG)"
aucaaggaagauggcau

SEQ ID NO: 1577 - RNA, 16 nt, Artificial Sequence
  source: /note="Description of Artificial Sequence: Synthetic oligonucleotide"
  source: /note="Antisense Oligonucleotide"
  source: /note="5' tri-ethylene glycol (TEG)"
  source: /note="3' tri-ethylene glycol (TEG)"
aucaaggaagauggca

SEQ ID NO: 1578 - RNA, 15 nt, Artificial Sequence
  source: /note="Description of Artificial Sequence: Synthetic oligonucleotide"
  source: /note="Antisense Oligonucleotide"
  source: /note="5' tri-ethylene glycol (TEG)"
  source: /note="3' tri-ethylene glycol (TEG)"
aucaaggaagauggc

SEQ ID NO: 1579 - RNA, 14 nt, Artificial Sequence
  source: /note="Description of Artificial Sequence: Synthetic oligonucleotide"
  source: /note="Antisense Oligonucleotide"
  source: /note="5' tri-ethylene glycol (TEG)"
  source: /note="3' tri-ethylene glycol (TEG)"
aucaaggaagaugg

SEQ ID NO: 1580 - RNA, 13 nt, Artificial Sequence
  source: /note="Description of Artificial Sequence: Synthetic oligonucleotide"
  source: /note="Antisense Oligonucleotide"
  source: /note="5' tri-ethylene glycol (TEG)"
  source: /note="3' tri-ethylene glycol (TEG)"
aucaaggaagaug

SEQ ID NO: 1581 - RNA, 12 nt, Artificial Sequence
  source: /note="Description of Artificial Sequence: Synthetic oligonucleotide"
  source: /note="Antisense Oligonucleotide"
  source: /note="5' tri-ethylene glycol (TEG)"
  source: /note="3' tri-ethylene glycol (TEG)"
aucaaggaagau

SEQ ID NO: 1582 - RNA, 11 nt, Artificial Sequence
  source: /note="Description of Artificial Sequence: Synthetic oligonucleotide"
  source: /note="Antisense Oligonucleotide"
  source: /note="5' tri-ethylene glycol (TEG)"
  source: /note="3' tri-ethylene glycol (TEG)"
aucaaggaaga

SEQ ID NO: 1583 - RNA, 10 nt, Artificial Sequence
  source: /note="Description of Artificial Sequence: Synthetic oligonucleotide"
  source: /note="Antisense Oligonucleotide"
  source: /note="5' tri-ethylene glycol (TEG)"
  source: /note="3' tri-ethylene glycol (TEG)"
aucaaggaag

SEQ ID NO: 1584 - RNA, 23 nt, Artificial Sequence
  source: /note="Description of Artificial Sequence: Synthetic oligonucleotide"
  source: /note="Antisense Oligonucleotide"
  source: /note="5' tri-ethylene glycol (TEG)"
  source: /note="3' tri-ethylene glycol (TEG)"
ccagagcagguaccuccaacauc

SEQ ID NO: 1585 - RNA, 18 nt, Artificial Sequence
  source: /note="Description of Artificial Sequence: Synthetic oligonucleotide"
  source: /note="Antisense Oligonucleotide"
  source: /note="5' tri-ethylene glycol (TEG)"
  source: /note="3' tri-ethylene glycol (TEG)"
ccagagcagguaccucca

SEQ ID NO: 1586 - RNA, 23 nt, Artificial Sequence
  source: /note="Description of Artificial Sequence: Synthetic oligonucleotide"
  source: /note="Antisense Oligonucleotide"
  source: /note="5' tri-ethylene glycol (TEG)"
  source: /note="3' tri-ethylene glycol (TEG)"
ccucugugauuuuauaacuugau

SEQ ID NO: 1587 - RNA, 17 nt, Artificial Sequence
  source: /note="Description of Artificial Sequence: Synthetic oligonucleotide"
  source: /note="Antisense Oligonucleotide"
  source: /note="5' tri-ethylene glycol (TEG)"
  source: /note="3' tri-ethylene glycol (TEG)"
ucacccaccaucacccu

SEQ ID NO: 1588 - RNA, 20 nt, Artificial Sequence
  source: /note="Description of Artificial Sequence: Synthetic oligonucleotide"
  source: /note="Antisense Oligonucleotide"
  source: /note="5' tri-ethylene glycol (TEG)"
  source: /note="3' tri-ethylene glycol (TEG)"
ugauauccucaaggucaccc

SEQ ID NO: 1589 - RNA, 22 nt, Artificial Sequence
  source: /note="Description of Artificial Sequence: Synthetic oligonucleotide"
  source: /note="Antisense Oligonucleotide"
  source: /note="5' tri-ethylene glycol (TEG)"
  source: /note="3' tri-ethylene glycol (TEG)"
cugcuugaugaucaucucguug

SEQ ID NO: 1590 - RNA, 18 nt, Artificial Sequence
  source: /note="Description of Artificial Sequence: Synthetic oligonucleotide"
  source: /note="Antisense Oligonucleotide"
  source: /note="5' tri-ethylene glycol (TEG)"
  source: /note="3' tri-ethylene glycol (TEG)"
cugcuugaugaucaucuc

SEQ ID NO: 1591 - RNA, 19 nt, Artificial Sequence
  source: /note="Description of Artificial Sequence: Synthetic oligonucleotide"
  source: /note="Antisense Oligonucleotide"
  source: /note="5' tri-ethylene glycol (TEG)"
  source: /note="3' tri-ethylene glycol (TEG)"
guuuccuuaguaaccacag

SEQ ID NO: 1592 - RNA, 17 nt, Artificial Sequence
  source: /note="Description of Artificial Sequence: Synthetic oligonucleotide"
  source: /note="Antisense Oligonucleotide"
  source: /note="5' tri-ethylene glycol (TEG)"
  source: /note="3' tri-ethylene glycol (TEG)"
guuuccuuaguaaccac

SEQ ID NO: 1593 - RNA, 20 nt, Artificial Sequence
  source: /note="Description of Artificial Sequence: Synthetic oligonucleotide"
  source: /note="Antisense Oligonucleotide"
  modified_base (2)..(2): 5-methyl modified nucleotide
  modified_base (14)..(14): 5-methyl modified nucleotide
  modified_base (19)..(19): 5-methyl modified nucleotide
ucaaggaagauggcauuucu

SEQ ID NO: 1594 - RNA, 22 nt, Artificial Sequence
  source: /note="Description of Artificial Sequence: Synthetic oligonucleotide"
  source: /note="Antisense Oligonucleotide"
  modified_base (2)..(2): 5-methyl modified nucleotide
  modified_base (14)..(14): 5-methyl modified nucleotide
  modified_base (19)..(19): 5-methyl modified nucleotide
ucaaggaagauggcauuucuag

SEQ ID NO: 1595 - RNA, 18 nt, Artificial Sequence
  source: /note="Description of Artificial Sequence: Synthetic oligonucleotide"
  source: /note="Antisense Oligonucleotide"
  modified_base (9)..(9): 5-methyl modified nucleotide
  modified_base (13)..(13): 5-methyl modified nucleotide
  modified_base (14)..(14): 5-methyl modified nucleotide
  modified_base (18)..(18): 5-methyl modified nucleotide
gguaaguucuguccaagc

SEQ ID NO: 1596 - RNA, 18 nt, Artificial Sequence
  source: /note="Description of Artificial Sequence: Synthetic oligonucleotide"
  source: /note="Antisense Oligonucleotide"
  modified_base (8)..(8): 5-methyl modified nucleotide
  modified_base (12)..(12): 5-methyl modified nucleotide
  modified_base (13)..(13): 5-methyl modified nucleotide
  modified_base (17)..(17): 5-methyl modified nucleotide
  modified_base (18)..(18): 5-methyl modified nucleotide
guaaguucuguccaagcc

SEQ ID NO: 1597 - RNA, 18 nt, Artificial Sequence
  source: /note="Description of Artificial Sequence: Synthetic oligonucleotide"
  source: /note="Antisense Oligonucleotide"
  modified_base (4)..(4): 5-methyl modified nucleotide
  modified_base (13)..(13): 5-methyl modified nucleotide
  modified_base (17)..(17): 5-methyl modified nucleotide
  modified_base (18)..(18): 5-methyl modified nucleotide
agucgguaaguucugucc

SEQ ID NO: 1598 - RNA, 18 nt, Artificial Sequence
  source: /note="Description of Artificial Sequence: Synthetic oligonucleotide"
  source: /note="Antisense Oligonucleotide"
  modified_base (1)..(1): 5-methyl modified nucleotide
  modified_base (5)..(5): 5-methyl modified nucleotide
  modified_base (6)..(6): 5-methyl modified nucleotide
  modified_base (10)..(10): 5-methyl modified nucleotide
  modified_base (11)..(11): 5-methyl modified nucleotide
  modified_base (12)..(12): 5-methyl modified nucleotide
cuguccaagcccgguuga

SEQ ID NO: 1599 - RNA, 15 nt, Artificial Sequence
  source: /note="Description of Artificial Sequence: Synthetic oligonucleotide"
  source: /note="Antisense Oligonucleotide"
  modified_base (7)..(7): 5-methyl modified nucleotide
  modified_base (11)..(11): 5-methyl modified nucleotide
  modified_base (12)..(12): 5-methyl modified nucleotide
uaaguucuguccaag

SEQ ID NO: 1600 - RNA, 20 nt, Artificial Sequence
  source: /note="Description of Artificial Sequence: Synthetic oligonucleotide"
  source: /note="Antisense Oligonucleotide"
  modified_base (3)..(3): 5-methyl modified nucleotide
  modified_base (7)..(7): 5-methyl modified nucleotide
  modified_base (8)..(8): 5-methyl modified nucleotide
  modified_base (12)..(12): 5-methyl modified nucleotide
  modified_base (13)..(13): 5-methyl modified nucleotide
  modified_base (14)..(14): 5-methyl modified nucleotide
uucuguccaagcccgguuga

SEQ ID NO: 1601 - RNA, 19 nt, Artificial Sequence
  source: /note="Description of Artificial Sequence: Synthetic oligonucleotide"
  source: /note="Antisense Oligonucleotide"
  modified_base (3)..(3): 5-methyl modified nucleotide
  modified_base (7)..(7): 5-methyl modified nucleotide
  modified_base (8)..(8): 5-methyl modified nucleotide
  modified_base (12)..(12): 5-methyl modified nucleotide
  modified_base (13)..(13): 5-methyl modified nucleotide
  modified_base (14)..(14): 5-methyl modified nucleotide
uucuguccaagcccgguug

SEQ ID NO: 1602 - RNA, 18 nt, Artificial Sequence
  source: /note="Description of Artificial Sequence: Synthetic oligonucleotide"
  source: /note="Antisense Oligonucleotide"
  modified_base (3)..(3): 5-methyl modified nucleotide
  modified_base (7)..(7): 5-methyl modified nucleotide
  modified_base (8)..(8): 5-methyl modified nucleotide
  modified_base (12)..(12): 5-methyl modified nucleotide
  modified_base (13)..(13): 5-methyl modified nucleotide
  modified_base (14)..(14): 5-methyl modified nucleotide
uucuguccaagcccgguu

SEQ ID NO: 1603 - RNA, 17 nt, Artificial Sequence
  source: /note="Description of Artificial Sequence: Synthetic oligonucleotide"
  source: /note="Antisense Oligonucleotide"
  modified_base (3)..(3): 5-methyl modified nucleotide
  modified_base (7)..(7): 5-methyl modified nucleotide
  modified_base (8)..(8): 5-methyl modified nucleotide
  modified_base (12)..(12): 5-methyl modified nucleotide
  modified_base (13)..(13): 5-methyl modified nucleotide
  modified_base (14)..(14): 5-methyl modified nucleotide
uucuguccaagcccggu

SEQ ID NO: 1604 - RNA, 16 nt, Artificial Sequence
  source: /note="Description of Artificial Sequence: Synthetic oligonucleotide"
  source: /note="Antisense Oligonucleotide"
  modified_base (3)..(3): 5-methyl modified nucleotide
  modified_base (7)..(7): 5-methyl modified nucleotide
  modified_base (8)..(8): 5-methyl modified nucleotide
  modified_base (12)..(12): 5-methyl modified nucleotide
  modified_base (13)..(13): 5-methyl modified nucleotide
  modified_base (14)..(14): 5-methyl modified nucleotide
uucuguccaagcccgg

SEQ ID NO: 1605 - RNA, 15 nt, Artificial Sequence
  source: /note="Description of Artificial Sequence: Synthetic oligonucleotide"
  source: /note="Antisense Oligonucleotide"
  modified_base (3)..(3): 5-methyl modified nucleotide
  modified_base (7)..(7): 5-methyl modified nucleotide
  modified_base (8)..(8): 5-methyl modified nucleotide
  modified_base (12)..(12): 5-methyl modified nucleotide
  modified_base (13)..(13): 5-methyl modified nucleotide
  modified_base (14)..(14): 5-methyl modified nucleotide
uucuguccaagcccg

SEQ ID NO: 1606 - RNA, 14 nt, Artificial Sequence
  source: /note="Description of Artificial Sequence: Synthetic oligonucleotide"
  source: /note="Antisense Oligonucleotide"
  modified_base (3)..(3): 5-methyl modified nucleotide
  modified_base (7)..(7): 5-methyl modified nucleotide
  modified_base (8)..(8): 5-methyl modified nucleotide
  modified_base (12)..(12): 5-methyl modified nucleotide
  modified_base (13)..(13): 5-methyl modified nucleotide
  modified_base (14)..(14): 5-methyl modified nucleotide
uucuguccaagccc

SEQ ID NO: 1607 - RNA, 13 nt, Artificial Sequence
  source: /note="Description of Artificial Sequence: Synthetic oligonucleotide"
  source: /note="Antisense Oligonucleotide"
  modified_base (3)..(3): 5-methyl modified nucleotide
  modified_base (7)..(7): 5-methyl modified nucleotide
  modified_base (8)..(8): 5-methyl modified nucleotide
  modified_base (12)..(12): 5-methyl modified nucleotide
  modified_base (13)..(13): 5-methyl modified nucleotide
uucuguccaagcc

SEQ ID NO: 1608 - RNA, 12 nt, Artificial Sequence
  source: /note="Description of Artificial Sequence: Synthetic oligonucleotide"
  source: /note="Antisense Oligonucleotide"
  modified_base (3)..(3): 5-methyl modified nucleotide
  modified_base (7)..(7): 5-methyl modified nucleotide
  modified_base (8)..(8): 5-methyl modified nucleotide
  modified_base (12)..(12): 5-methyl modified nucleotide
uucuguccaagc

SEQ ID NO: 1609 - RNA, 11 nt, Artificial Sequence
  source: /note="Description of Artificial Sequence: Synthetic oligonucleotide"
  source: /note="Antisense Oligonucleotide"
  modified_base (3)..(3): 5-methyl modified nucleotide
  modified_base (7)..(7): 5-methyl modified nucleotide
  modified_base (8)..(8): 5-methyl modified nucleotide
uucuguccaag

SEQ ID NO: 1610 - RNA, 10 nt, Artificial Sequence
  source: /note="Description of Artificial Sequence: Synthetic oligonucleotide"
  source: /note="Antisense Oligonucleotide"
  modified_base (3)..(3): 5-methyl modified nucleotide
  modified_base (7)..(7): 5-methyl modified nucleotide
  modified_base (8)..(8): 5-methyl modified nucleotide
uucuguccaa

SEQ ID NO: 1611 - RNA, 9 nt, Artificial Sequence
  source: /note="Description of Artificial Sequence: Synthetic oligonucleotide"
  source: /note="Antisense Oligonucleotide"
  modified_base (3)..(3): 5-methyl modified nucleotide
  modified_base (7)..(7): 5-methyl modified nucleotide
  modified_base (8)..(8): 5-methyl modified nucleotide
uucugucca

SEQ ID NO: 1612 - RNA, 8 nt, Artificial Sequence
  source: /note="Description of Artificial Sequence: Synthetic oligonucleotide"
  source: /note="Antisense Oligonucleotide"
  modified_base (3)..(3): 5-methyl modified nucleotide
  modified_base (7)..(7): 5-methyl modified nucleotide
  modified_base (8)..(8): 5-methyl modified nucleotide
uucugucc

SEQ ID NO: 1613 - RNA, 19 nt, Artificial Sequence
  source: /note="Description of Artificial Sequence: Synthetic oligonucleotide"
  source: /note="Antisense Oligonucleotide"
  modified_base (2)..(2): 5-methyl modified nucleotide
  modified_base (6)..(6): 5-methyl modified nucleotide
  modified_base (7)..(7): 5-methyl modified nucleotide
  modified_base (11)..(11): 5-methyl modified nucleotide
  modified_base (12)..(12): 5-methyl modified nucleotide
  modified_base (13)..(13): 5-methyl modified nucleotide
ucuguccaagcccgguuga

SEQ ID NO: 1614 - RNA, 18 nt, Artificial Sequence
  source: /note="Description of Artificial Sequence: Synthetic oligonucleotide"
  source: /note="Antisense Oligonucleotide"
  modified_base (2)..(2): 5-methyl modified nucleotide
  modified_base (6)..(6): 5-methyl modified nucleotide
  modified_base (7)..(7): 5-methyl modified nucleotide
  modified_base (11)..(11): 5-methyl modified nucleotide
  modified_base (12)..(12): 5-methyl modified nucleotide
  modified_base (13)..(13): 5-methyl modified nucleotide
ucuguccaagcccgguug

SEQ ID NO: 1615 - RNA, 17 nt, Artificial Sequence
  source: /note="Description of Artificial Sequence: Synthetic oligonucleotide"
  source: /note="Antisense Oligonucleotide"
  modified_base (2)..(2): 5-methyl modified nucleotide
  modified_base (6)..(6): 5-methyl modified nucleotide
  modified_base (7)..(7): 5-methyl modified nucleotide
  modified_base (11)..(11): 5-methyl modified nucleotide
  modified_base (12)..(12): 5-methyl modified nucleotide
  modified_base (13)..(13): 5-methyl modified nucleotide
ucuguccaagcccgguu

SEQ ID NO: 1616 - RNA, 16 nt, Artificial Sequence
  source: /note="Description of Artificial Sequence: Synthetic oligonucleotide"
  source: /note="Antisense Oligonucleotide"
  modified_base (2)..(2): 5-methyl modified nucleotide
  modified_base (6)..(6): 5-methyl modified nucleotide
  modified_base (7)..(7): 5-methyl modified nucleotide
  modified_base (11)..(11): 5-methyl modified nucleotide
  modified_base (12)..(12): 5-methyl modified nucleotide
  modified_base (13)..(13): 5-methyl modified nucleotide
ucuguccaagcccggu

SEQ ID NO: 1617 - RNA, 15 nt, Artificial Sequence
  source: /note="Description of Artificial Sequence: Synthetic oligonucleotide"
  source: /note="Antisense Oligonucleotide"
  modified_base (2)..(2): 5-methyl modified nucleotide
  modified_base (6)..(6): 5-methyl modified nucleotide
  modified_base (7)..(7): 5-methyl modified nucleotide
  modified_base (11)..(11): 5-methyl modified nucleotide
  modified_base (12)..(12): 5-methyl modified nucleotide
  modified_base (13)..(13): 5-methyl modified nucleotide
ucuguccaagcccgg

SEQ ID NO: 1618 - RNA, 14 nt, Artificial Sequence
  source: /note="Description of Artificial Sequence: Synthetic oligonucleotide"
  source: /note="Antisense Oligonucleotide"
  modified_base (2)..(2): 5-methyl modified nucleotide
  modified_base (6)..(6): 5-methyl modified nucleotide
  modified_base (7)..(7): 5-methyl modified nucleotide
  modified_base (11)..(11): 5-methyl modified nucleotide
  modified_base (12)..(12): 5-methyl modified nucleotide
  modified_base (13)..(13): 5-methyl modified nucleotide
ucuguccaagcccg

SEQ ID NO: 1619 - RNA, 13 nt, Artificial Sequence
  source: /note="Description of Artificial Sequence: Synthetic oligonucleotide"
  source: /note="Antisense Oligonucleotide"
  modified_base (2)..(2): 5-methyl modified nucleotide
  modified_base (6)..(6): 5-methyl modified nucleotide
  modified_base (7)..(7): 5-methyl modified nucleotide
  modified_base (11)..(11): 5-methyl modified nucleotide
  modified_base (12)..(12): 5-methyl modified nucleotide
  modified_base (13)..(13): 5-methyl modified nucleotide
ucuguccaagccc

SEQ ID NO: 1620 - RNA, 12 nt, Artificial Sequence
  source: /note="Description of Artificial Sequence: Synthetic oligonucleotide"
  source: /note="Antisense Oligonucleotide"
  modified_base (2)..(2): 5-methyl modified nucleotide
  modified_base (6)..(6): 5-methyl modified nucleotide
  modified_base (7)..(7): 5-methyl modified nucleotide
  modified_base (11)..(11): 5-methyl modified nucleotide
  modified_base (12)..(12): 5-methyl modified nucleotide
ucuguccaagcc

SEQ ID NO: 1621 - RNA, 11 nt, Artificial Sequence
  source: /note="Description of Artificial Sequence: Synthetic oligonucleotide"
  source: /note="Antisense Oligonucleotide"
  modified_base (2)..(2): 5-methyl modified nucleotide
  modified_base (6)..(6): 5-methyl modified nucleotide
  modified_base (7)..(7): 5-methyl modified nucleotide
  modified_base (11)..(11): 5-methyl modified nucleotide
ucuguccaagc

SEQ ID NO: 1622 - RNA, 10 nt, Artificial Sequence
  source: /note="Description of Artificial Sequence: Synthetic oligonucleotide"
  source: /note="Antisense Oligonucleotide"
  modified_base (2)..(2): 5-methyl modified nucleotide
  modified_base (6)..(6): 5-methyl modified nucleotide
  modified_base (7)..(7): 5-methyl modified nucleotide
ucuguccaag

SEQ ID NO: 1623 - RNA, 9 nt, Artificial Sequence
  source: /note="Description of Artificial Sequence: Synthetic oligonucleotide"
  source: /note="Antisense Oligonucleotide"
  modified_base (2)..(2): 5-methyl modified nucleotide
  modified_base (6)..(6): 5-methyl modified nucleotide
  modified_base (7)..(7): 5-methyl modified nucleotide
ucuguccaa

SEQ ID NO: 1624 - RNA, 8 nt, Artificial Sequence
  source: /note="Description of Artificial Sequence: Synthetic oligonucleotide"
  source: /note="Antisense Oligonucleotide"
  modified_base (2)..(2): 5-methyl modified nucleotide
  modified_base (6)..(6): 5-methyl modified nucleotide
  modified_base (7)..(7): 5-methyl modified nucleotide
ucugucca

SEQ ID NO: 1625 - RNA, 17 nt, Artificial Sequence
  source: /note="Description of Artificial Sequence: Synthetic oligonucleotide"
  source: /note="Antisense Oligonucleotide"
  modified_base (1)..(1): 5-methyl modified nucleotide
  modified_base (5)..(5): 5-methyl modified nucleotide
  modified_base (6)..(6): 5-methyl modified nucleotide
  modified_base (10)..(10): 5-methyl modified nucleotide
  modified_base (11)..(11): 5-methyl modified nucleotide
  modified_base (12)..(12): 5-methyl modified nucleotide
cuguccaagcccgguug

SEQ ID NO: 1626 - RNA, 16 nt, Artificial Sequence
  source: /note="Description of Artificial Sequence: Synthetic oligonucleotide"
  source: /note="Antisense Oligonucleotide"
  modified_base (1)..(1): 5-methyl modified nucleotide
  modified_base (5)..(5): 5-methyl modified nucleotide
  modified_base (6)..(6): 5-methyl modified nucleotide
  modified_base (10)..(10): 5-methyl modified nucleotide
  modified_base (11)..(11): 5-methyl modified nucleotide
  modified_base (12)..(12): 5-methyl modified nucleotide
cuguccaagcccgguu

SEQ ID NO: 1627 - RNA, 15 nt, Artificial Sequence
  source: /note="Description of Artificial Sequence: Synthetic oligonucleotide"
  source: /note="Antisense Oligonucleotide"
  modified_base (1)..(1): 5-methyl modified nucleotide
  modified_base (5)..(5): 5-methyl modified nucleotide
  modified_base (6)..(6): 5-methyl modified nucleotide
  modified_base (10)..(10): 5-methyl modified nucleotide
  modified_base (11)..(11): 5-methyl modified nucleotide
  modified_base (12)..(12): 5-methyl modified nucleotide
cuguccaagcccggu

SEQ ID NO: 1628 - RNA, 14 nt, Artificial Sequence
  source: /note="Description of Artificial Sequence: Synthetic oligonucleotide"
  source: /note="Antisense Oligonucleotide"
  modified_base (1)..(1): 5-methyl modified nucleotide
  modified_base (5)..(5): 5-methyl modified nucleotide
  modified_base (6)..(6): 5-methyl modified nucleotide
  modified_base (10)..(10): 5-methyl modified nucleotide
  modified_base (11)..(11): 5-methyl modified nucleotide
  modified_base (12)..(12): 5-methyl modified nucleotide
cuguccaagcccgg

SEQ ID NO: 1629 - RNA, 13 nt, Artificial Sequence
  source: /note="Description of Artificial Sequence: Synthetic oligonucleotide"
  source: /note="Antisense Oligonucleotide"
  modified_base (1)..(1): 5-methyl modified nucleotide
  modified_base (5)..(5): 5-methyl modified nucleotide
  modified_base (6)..(6): 5-methyl modified nucleotide
  modified_base (10)..(10): 5-methyl modified nucleotide
  modified_base (11)..(11): 5-methyl modified nucleotide
  modified_base (12)..(12): 5-methyl modified nucleotide
cuguccaagcccg

SEQ ID NO: 1630 - RNA, 12 nt, Artificial Sequence
  source: /note="Description of Artificial Sequence: Synthetic oligonucleotide"
  source: /note="Antisense Oligonucleotide"
  modified_base (1)..(1): 5-methyl modified nucleotide
  modified_base (5)..(5): 5-methyl modified nucleotide
  modified_base (6)..(6): 5-methyl modified nucleotide
  modified_base (10)..(10): 5-methyl modified nucleotide
  modified_base (11)..(11): 5-methyl modified nucleotide
  modified_base (12)..(12): 5-methyl modified nucleotide
cuguccaagccc

SEQ ID NO: 1631 - RNA, 11 nt, Artificial Sequence
  source: /note="Description of Artificial Sequence: Synthetic oligonucleotide"
  source: /note="Antisense Oligonucleotide"
  modified_base (1)..(1): 5-methyl modified nucleotide
  modified_base (5)..(5): 5-methyl modified nucleotide
  modified_base (6)..(6): 5-methyl modified nucleotide
  modified_base (10)..(10): 5-methyl modified nucleotide
  modified_base (11)..(11): 5-methyl modified nucleotide
cuguccaagcc

SEQ ID NO: 1632 - RNA, 10 nt, Artificial Sequence
  source: /note="Description of Artificial Sequence: Synthetic oligonucleotide"
  source: /note="Antisense Oligonucleotide"
  modified_base (1)..(1): 5-methyl modified nucleotide
  modified_base (5)..(5): 5-methyl modified nucleotide
  modified_base (6)..(6): 5-methyl modified nucleotide
  modified_base (10)..(10): 5-methyl modified nucleotide
cuguccaagc

SEQ ID NO: 1633 - RNA, 9 nt, Artificial Sequence
  source: /note="Description of Artificial Sequence: Synthetic oligonucleotide"
  source: /note="Antisense Oligonucleotide"
  modified_base (1)..(1): 5-methyl modified nucleotide
  modified_base (5)..(5): 5-methyl modified nucleotide
  modified_base (6)..(6): 5-methyl modified nucleotide
cuguccaag

SEQ ID NO: 1634 - RNA, 8 nt, Artificial Sequence
  source: /note="Description of Artificial Sequence: Synthetic oligonucleotide"
  source: /note="Antisense Oligonucleotide"
  modified_base (1)..(1): 5-methyl modified nucleotide
  modified_base (5)..(5): 5-methyl modified nucleotide
  modified_base (6)..(6): 5-methyl modified nucleotide
cuguccaa

SEQ ID NO: 1635 - RNA, 20 nt, Artificial Sequence
  source: /note="Description of Artificial Sequence: Synthetic oligonucleotide"
  source: /note="Antisense Oligonucleotide"
  modified_base (4)..(4): 5-methyl modified nucleotide
  modified_base (8)..(8): 5-methyl modified nucleotide
  modified_base (9)..(9): 5-methyl modified nucleotide
  modified_base (13)..(13): 5-methyl modified nucleotide
  modified_base (14)..(14): 5-methyl modified nucleotide
  modified_base (15)..(15): 5-methyl modified nucleotide
guucuguccaagcccgguug

SEQ ID NO: 1636 - RNA, 19 nt, Artificial Sequence
  source: /note="Description of Artificial Sequence: Synthetic oligonucleotide"
  source: /note="Antisense Oligonucleotide"
  modified_base (4)..(4): 5-methyl modified nucleotide
  modified_base (8)..(8): 5-methyl modified nucleotide
  modified_base (9)..(9): 5-methyl modified nucleotide
  modified_base (13)..(13): 5-methyl modified nucleotide
  modified_base (14)..(14): 5-methyl modified nucleotide
  modified_base (15)..(15): 5-methyl modified nucleotide
guucuguccaagcccgguu

SEQ ID NO: 1637 - RNA, 18 nt, Artificial Sequence
  source: /note="Description of Artificial Sequence: Synthetic oligonucleotide"
  source: /note="Antisense Oligonucleotide"
  modified_base (4)..(4): 5-methyl modified nucleotide
  modified_base (8)..(8): 5-methyl modified nucleotide
  modified_base (9)..(9): 5-methyl modified nucleotide
  modified_base (13)..(13): 5-methyl modified nucleotide
  modified_base (14)..(14): 5-methyl modified nucleotide
  modified_base (15)..(15): 5-methyl modified nucleotide
guucuguccaagcccggu

SEQ ID NO: 1638 - RNA, 17 nt, Artificial Sequence
  source: /note="Description of Artificial Sequence: Synthetic oligonucleotide"
  source: /note="Antisense Oligonucleotide"
  modified_base (4)..(4): 5-methyl modified nucleotide
  modified_base (8)..(8): 5-methyl modified nucleotide
  modified_base (9)..(9): 5-methyl modified nucleotide
  modified_base (13)..(13): 5-methyl modified nucleotide
  modified_base (14)..(14): 5-methyl modified nucleotide
  modified_base (15)..(15): 5-methyl modified nucleotide
guucuguccaagcccgg

SEQ ID NO: 1639 - RNA, 16 nt, Artificial Sequence
  source: /note="Description of Artificial Sequence: Synthetic oligonucleotide"
  source: /note="Antisense Oligonucleotide"
  modified_base (4)..(4): 5-methyl modified nucleotide
  modified_base (8)..(8): 5-methyl modified nucleotide
  modified_base (9)..(9): 5-methyl modified nucleotide
  modified_base (13)..(13): 5-methyl modified nucleotide
  modified_base (14)..(14): 5-methyl modified nucleotide
  modified_base (15)..(15): 5-methyl modified nucleotide
guucuguccaagcccg

SEQ ID NO: 1640 - RNA, 15 nt, Artificial Sequence
  source: /note="Description of Artificial Sequence: Synthetic oligonucleotide"
  source: /note="Antisense Oligonucleotide"
  modified_base (4)..(4): 5-methyl modified nucleotide
  modified_base (8)..(8): 5-methyl modified nucleotide
  modified_base (9)..(9): 5-methyl modified nucleotide
  modified_base (13)..(13): 5-methyl modified nucleotide
  modified_base (14)..(14): 5-methyl modified nucleotide
  modified_base (15)..(15): 5-methyl modified nucleotide
guucuguccaagccc

SEQ ID NO: 1641 - RNA, 14 nt, Artificial Sequence
  source: /note="Description of Artificial Sequence: Synthetic oligonucleotide"
  source: /note="Antisense Oligonucleotide"
  modified_base (4)..(4): 5-methyl modified nucleotide
  modified_base (8)..(8): 5-methyl modified nucleotide
  modified_base (9)..(9): 5-methyl modified nucleotide
  modified_base (13)..(13): 5-methyl modified nucleotide
  modified_base (14)..(14): 5-methyl modified nucleotide
guucuguccaagcc

SEQ ID NO: 1642 - RNA, 13 nt, Artificial Sequence
  source: /note="Description of Artificial Sequence: Synthetic oligonucleotide"
  source: /note="Antisense Oligonucleotide"
  modified_base (4)..(4): 5-methyl modified nucleotide
  modified_base (8)..(8): 5-methyl modified nucleotide
  modified_base (9)..(9): 5-methyl modified nucleotide
  modified_base (13)..(13): 5-methyl modified nucleotide
guucuguccaagc

SEQ ID NO: 1643 - RNA, 12 nt, Artificial Sequence
  source: /note="Description of Artificial Sequence: Synthetic oligonucleotide"
  source: /note="Antisense Oligonucleotide"
  modified_base (4)..(4): 5-methyl modified nucleotide
  modified_base (8)..(8): 5-methyl modified nucleotide
  modified_base (9)..(9): 5-methyl modified nucleotide
guucuguccaag

SEQ ID NO: 1644 - RNA, 11 nt, Artificial Sequence
  source: /note="Description of Artificial Sequence: Synthetic oligonucleotide"
  source: /note="Antisense Oligonucleotide"
  modified_base (4)..(4): 5-methyl modified nucleotide
  modified_base (8)..(8): 5-methyl modified nucleotide
  modified_base (9)..(9): 5-methyl modified nucleotide
guucuguccaa

SEQ ID NO: 1645 - RNA, 10 nt, Artificial Sequence
  source: /note="Description of Artificial Sequence: Synthetic oligonucleotide"
  source: /note="Antisense Oligonucleotide"
  modified_base (4)..(4): 5-methyl modified nucleotide
  modified_base (8)..(8): 5-methyl modified nucleotide
  modified_base (9)..(9): 5-methyl modified nucleotide
guucugucca

SEQ ID NO: 1646 - RNA, 9 nt, Artificial Sequence
  source: /note="Description of Artificial Sequence: Synthetic oligonucleotide"
  source: /note="Antisense Oligonucleotide"
  modified_base (4)..(4): 5-methyl modified nucleotide
  modified_base (8)..(8): 5-methyl modified nucleotide
  modified_base (9)..(9): 5-methyl modified nucleotide
guucugucc

SEQ ID NO: 1647 - RNA, 8 nt, Artificial Sequence
  source: /note="Description of Artificial Sequence: Synthetic oligonucleotide"
  source: /note="Antisense Oligonucleotide"
  modified_base (4)..(4): 5-methyl modified nucleotide
  modified_base (8)..(8): 5-methyl modified nucleotide
guucuguc

SEQ ID NO: 1648 - RNA, 20 nt, Artificial Sequence
  source: /note="Description of Artificial Sequence: Synthetic oligonucleotide"
  source: /note="Antisense Oligonucleotide"
  modified_base (5)..(5): 5-methyl modified nucleotide
  modified_base (9)..(9): 5-methyl modified nucleotide
  modified_base (10)..(10): 5-methyl modified nucleotide
  modified_base (14)..(14): 5-methyl modified nucleotide
  modified_base (15)..(15): 5-methyl modified nucleotide
  modified_base (16)..(16): 5-methyl modified nucleotide
aguucuguccaagcccgguu

SEQ ID NO: 1649 - RNA, 19 nt, Artificial Sequence
  source: /note="Description of Artificial Sequence: Synthetic oligonucleotide"
  source: /note="Antisense Oligonucleotide"
  modified_base (5)..(5): 5-methyl modified nucleotide
  modified_base (9)..(9): 5-methyl modified nucleotide
  modified_base (10)..(10): 5-methyl modified nucleotide
  modified_base (14)..(14): 5-methyl modified nucleotide
  modified_base (15)..(15): 5-methyl modified nucleotide
  modified_base (16)..(16): 5-methyl modified nucleotide
aguucuguccaagcccggu

SEQ ID NO: 1650 - RNA, 18 nt, Artificial Sequence
  source: /note="Description of Artificial Sequence: Synthetic oligonucleotide"
  source: /note="Antisense Oligonucleotide"
  modified_base (5)..(5): 5-methyl modified nucleotide
  modified_base (9)..(9): 5-methyl modified nucleotide
  modified_base (10)..(10): 5-methyl modified nucleotide
  modified_base (14)..(14): 5-methyl modified nucleotide
  modified_base (15)..(15): 5-methyl modified nucleotide
  modified_base (16)..(16): 5-methyl modified nucleotide
aguucuguccaagcccgg

SEQ ID NO: 1651 - RNA, 17 nt, Artificial Sequence
  source: /note="Description of Artificial Sequence: Synthetic oligonucleotide"
  source: /note="Antisense Oligonucleotide"
  modified_base (5)..(5): 5-methyl modified nucleotide
  modified_base (9)..(9): 5-methyl modified nucleotide
  modified_base (10)..(10): 5-methyl modified nucleotide
  modified_base (14)..(14): 5-methyl modified nucleotide
  modified_base (15)..(15): 5-methyl modified nucleotide
  modified_base (16)..(16): 5-methyl modified nucleotide
aguucuguccaagcccg

SEQ ID NO: 1652 - RNA, 16 nt, Artificial Sequence
  source: /note="Description of Artificial Sequence: Synthetic oligonucleotide"
  source: /note="Antisense Oligonucleotide"
  modified_base (5)..(5): 5-methyl modified nucleotide
  modified_base (9)..(9): 5-methyl modified nucleotide
  modified_base (10)..(10): 5-methyl modified nucleotide
  modified_base (14)..(14): 5-methyl modified nucleotide
  modified_base (15)..(15): 5-methyl modified nucleotide
  modified_base (16)..(16): 5-methyl modified nucleotide
aguucuguccaagccc

SEQ ID NO: 1653 - RNA, 15 nt, Artificial Sequence
  source: /note="Description of Artificial Sequence: Synthetic oligonucleotide"
  source: /note="Antisense Oligonucleotide"
  modified_base (5)..(5): 5-methyl modified nucleotide
  modified_base (9)..(9): 5-methyl modified nucleotide
  modified_base (10)..(10): 5-methyl modified nucleotide
  modified_base (14)..(14): 5-methyl modified nucleotide
  modified_base (15)..(15): 5-methyl modified nucleotide
aguucuguccaagcc

SEQ ID NO: 1654 - RNA, 14 nt, Artificial Sequence
  source: /note="Description of Artificial Sequence: Synthetic oligonucleotide"
  source: /note="Antisense Oligonucleotide"
  modified_base (5)..(5): 5-methyl modified nucleotide
  modified_base (9)..(9): 5-methyl modified nucleotide
  modified_base (10)..(10): 5-methyl modified nucleotide
  modified_base (14)..(14): 5-methyl modified nucleotide
aguucuguccaagc

SEQ ID NO: 1655 - RNA, 13 nt, Artificial Sequence
  source: /note="Description of Artificial Sequence: Synthetic oligonucleotide"
  source: /note="Antisense Oligonucleotide"
  modified_base (5)..(5): 5-methyl modified nucleotide
  modified_base (9)..(9): 5-methyl modified nucleotide
  modified_base (10)..(10): 5-methyl modified nucleotide
aguucuguccaag

SEQ ID NO: 1656 - RNA, 12 nt, Artificial Sequence
  source: /note="Description of Artificial Sequence: Synthetic oligonucleotide"
  source: /note="Antisense Oligonucleotide"
  modified_base (5)..(5): 5-methyl modified nucleotide
  modified_base (9)..(9): 5-methyl modified nucleotide
  modified_base (10)..(10): 5-methyl modified nucleotide
aguucuguccaa

SEQ ID NO: 1657 - RNA, 11 nt, Artificial Sequence
  source: /note="Description of Artificial Sequence: Synthetic oligonucleotide"
  source: /note="Antisense Oligonucleotide"
  modified_base (5)..(5): 5-methyl modified nucleotide
  modified_base (9)..(9): 5-methyl modified nucleotide
  modified_base (10)..(10): 5-methyl modified nucleotide
aguucugucca

SEQ ID NO: 1658 - RNA, 10 nt, Artificial Sequence
  source: /note="Description of Artificial Sequence: Synthetic oligonucleotide"
  source: /note="Antisense Oligonucleotide"
  modified_base (5)..(5): 5-methyl modified nucleotide
  modified_base (9)..(9): 5-methyl modified nucleotide
  modified_base (10)..(10): 5-methyl modified nucleotide
aguucugucc

SEQ ID NO: 1659 - RNA, 9 nt, Artificial Sequence
  source: /note="Description of Artificial Sequence: Synthetic oligonucleotide"
  source: /note="Antisense Oligonucleotide"
  modified_base (5)..(5): 5-methyl modified nucleotide
  modified_base (9)..(9): 5-methyl modified nucleotide
aguucuguc

SEQ ID NO: 1660 - RNA, 8 nt, Artificial Sequence
  source: /note="Description of Artificial Sequence: Synthetic oligonucleotide"
  source: /note="Antisense Oligonucleotide"
  modified_base (5)..(5): 5-methyl modified nucleotide
aguucugu

SEQ ID NO: 1661 - RNA, 20 nt, Artificial Sequence
  source: /note="Description of Artificial Sequence: Synthetic oligonucleotide"
  source: /note="Antisense Oligonucleotide"
  modified_base (6)..(6): 5-methyl modified nucleotide
  modified_base (10)..(10): 5-methyl modified nucleotide
  modified_base (11)..(11): 5-methyl modified nucleotide
  modified_base (15)..(15): 5-methyl modified nucleotide
  modified_base (16)..(16): 5-methyl modified nucleotide
  modified_base (17)..(17): 5-methyl modified nucleotide
aaguucuguccaagcccggu

SEQ ID NO: 1662 - RNA, 19 nt, Artificial Sequence
  source: /note="Description of Artificial Sequence: Synthetic oligonucleotide"
  source: /note="Antisense Oligonucleotide"
  modified_base (6)..(6): 5-methyl modified nucleotide
  modified_base (10)..(10): 5-methyl modified nucleotide
  modified_base (11)..(11): 5-methyl modified nucleotide
  modified_base (15)..(15): 5-methyl modified nucleotide
  modified_base (16)..(16): 5-methyl modified nucleotide
  modified_base (17)..(17): 5-methyl modified nucleotide
aaguucuguccaagcccgg

SEQ ID NO: 1663 - RNA, 18 nt, Artificial Sequence
  source: /note="Description of Artificial Sequence: Synthetic oligonucleotide"
  source: /note="Antisense Oligonucleotide"
  modified_base (6)..(6): 5-methyl modified nucleotide
  modified_base (10)..(10): 5-methyl modified nucleotide
  modified_base (11)..(11): 5-methyl modified nucleotide
  modified_base (15)..(15): 5-methyl modified nucleotide
  modified_base (16)..(16): 5-methyl modified nucleotide
  modified_base (17)..(17): 5-methyl modified nucleotide
aaguucuguccaagcccg

SEQ ID NO: 1664 - RNA, 17 nt, Artificial Sequence
  source: /note="Description of Artificial Sequence: Synthetic oligonucleotide"
  source: /note="Antisense Oligonucleotide"
  modified_base (6)..(6): 5-methyl modified nucleotide
  modified_base (10)..(10): 5-methyl modified nucleotide
  modified_base (11)..(11): 5-methyl modified nucleotide
  modified_base (15)..(15): 5-methyl modified nucleotide
  modified_base (16)..(16): 5-methyl modified nucleotide
  modified_base (17)..(17): 5-methyl modified nucleotide
aaguucuguccaagccc

SEQ ID NO: 1665 - RNA, 16 nt, Artificial Sequence
  source: /note="Description of Artificial Sequence: Synthetic oligonucleotide"
  source: /note="Antisense Oligonucleotide"
  modified_base (6)..(6): 5-methyl modified nucleotide
  modified_base (10)..(10): 5-methyl modified nucleotide
  modified_base (11)..(11): 5-methyl modified nucleotide
  modified_base (15)..(15): 5-methyl modified nucleotide
  modified_base (16)..(16): 5-methyl modified nucleotide
aaguucuguccaagcc

SEQ ID NO: 1666 - RNA, 15 nt, Artificial Sequence
  source: /note="Description of Artificial Sequence: Synthetic oligonucleotide"
  source: /note="Antisense Oligonucleotide"
  modified_base (6)..(6): 5-methyl modified nucleotide
  modified_base (10)..(10): 5-methyl modified nucleotide
  modified_base (11)..(11): 5-methyl modified nucleotide
  modified_base (15)..(15): 5-methyl modified nucleotide
aaguucuguccaagc

SEQ ID NO: 1667 - RNA, 14 nt, Artificial Sequence
  source: /note="Description of Artificial Sequence: Synthetic oligonucleotide"
  source: /note="Antisense Oligonucleotide"
  modified_base (6)..(6): 5-methyl modified nucleotide
  modified_base (10)..(10): 5-methyl modified nucleotide
  modified_base (11)..(11): 5-methyl modified nucleotide
aaguucuguccaag

SEQ ID NO: 1668 - RNA, 13 nt, Artificial Sequence
  source: /note="Description of Artificial Sequence: Synthetic oligonucleotide"
  source: /note="Antisense Oligonucleotide"
  modified_base (6)..(6): 5-methyl modified nucleotide
  modified_base (10)..(10): 5-methyl modified nucleotide
  modified_base (11)..(11): 5-methyl modified nucleotide
aaguucuguccaa

SEQ ID NO: 1669 - RNA, 12 nt, Artificial Sequence
  source: /note="Description of Artificial Sequence: Synthetic oligonucleotide"
  source: /note="Antisense Oligonucleotide"
  modified_base (6)..(6): 5-methyl modified nucleotide
  modified_base (10)..(10): 5-methyl modified nucleotide
  modified_base (11)..(11): 5-methyl modified nucleotide
aaguucugucca

SEQ ID NO: 1670 - RNA, 11 nt, Artificial Sequence
  source: /note="Description of Artificial Sequence: Synthetic oligonucleotide"
  source: /note="Antisense Oligonucleotide"
  modified_base (6)..(6): 5-methyl modified nucleotide
  modified_base (10)..(10): 5-methyl modified nucleotide
  modified_base (11)..(11): 5-methyl modified nucleotide
aaguucugucc

SEQ ID NO: 1671 - RNA, 10 nt, Artificial Sequence
  source: /note="Description of Artificial Sequence: Synthetic oligonucleotide"
  source: /note="Antisense Oligonucleotide"
  modified_base (6)..(6): 5-methyl modified nucleotide
  modified_base (10)..(10): 5-methyl modified nucleotide
aaguucuguc

SEQ ID NO: 1672 - RNA, 9 nt, Artificial Sequence
  source: /note="Description of Artificial Sequence: Synthetic oligonucleotide"
  source: /note="Antisense Oligonucleotide"
  modified_base (6)..(6): 5-methyl modified nucleotide
aaguucugu

SEQ ID NO: 1673 - RNA, 8 nt, Artificial Sequence
  source: /note="Description of Artificial Sequence: Synthetic oligonucleotide"
  source: /note="Antisense Oligonucleotide"
  modified_base (6)..(6): 5-methyl modified nucleotide
aaguucug

SEQ ID NO: 1674 - RNA, 20 nt, Artificial Sequence
  source: /note="Description of Artificial Sequence: Synthetic oligonucleotide"
  source: /note="Antisense Oligonucleotide"
  modified_base (7)..(7): 5-methyl modified nucleotide
  modified_base (11)..(11): 5-methyl modified nucleotide
  modified_base (12)..(12): 5-methyl modified nucleotide
  modified_base (16)..(16): 5-methyl modified nucleotide
  modified_base (17)..(17): 5-methyl modified nucleotide
  modified_base (18)..(18): 5-methyl modified nucleotide
uaaguucuguccaagcccgg

SEQ ID NO: 1675 - RNA, 19 nt, Artificial Sequence
  source: /note="Description of Artificial Sequence: Synthetic oligonucleotide"
  source: /note="Antisense Oligonucleotide"
  modified_base (7)..(7): 5-methyl modified nucleotide
  modified_base (11)..(11): 5-methyl modified nucleotide
  modified_base (12)..(12): 5-methyl modified nucleotide
  modified_base (16)..(16): 5-methyl modified nucleotide
  modified_base (17)..(17): 5-methyl modified nucleotide
  modified_base (18)..(18): 5-methyl modified nucleotide
uaaguucuguccaagcccg

SEQ ID NO: 1676 - RNA, 18 nt, Artificial Sequence
  source: /note="Description of Artificial Sequence: Synthetic oligonucleotide"
  source: /note="Antisense Oligonucleotide"
  modified_base (7)..(7): 5-methyl modified nucleotide
  modified_base (11)..(11): 5-methyl modified nucleotide
  modified_base (12)..(12): 5-methyl modified nucleotide
  modified_base (16)..(16): 5-methyl modified nucleotide
  modified_base (17)..(17): 5-methyl modified nucleotide
  modified_base (18)..(18): 5-methyl modified nucleotide
uaaguucuguccaagccc

SEQ ID NO: 1677 - RNA, 17 nt, Artificial Sequence
  source: /note="Description of Artificial Sequence: Synthetic oligonucleotide"
  source: /note="Antisense Oligonucleotide"
  modified_base (7)..(7): 5-methyl modified nucleotide
  modified_base (11)..(11): 5-methyl modified nucleotide
  modified_base (12)..(12): 5-methyl modified nucleotide
  modified_base (16)..(16): 5-methyl modified nucleotide
  modified_base (17)..(17): 5-methyl modified nucleotide
uaaguucuguccaagcc

SEQ ID NO: 1678 - RNA, 16 nt, Artificial Sequence
  source: /note="Description of Artificial Sequence: Synthetic oligonucleotide"
  source: /note="Antisense Oligonucleotide"
  modified_base (7)..(7): 5-methyl modified nucleotide
  modified_base (11)..(11): 5-methyl modified nucleotide
  modified_base (12)..(12): 5-methyl modified nucleotide
  modified_base (16)..(16): 5-methyl modified nucleotide
uaaguucuguccaagc

SEQ ID NO: 1679 - RNA, 14 nt, Artificial Sequence
  source: /note="Description of Artificial Sequence: Synthetic oligonucleotide"
  source: /note="Antisense Oligonucleotide"
  modified_base (7)..(7): 5-methyl modified nucleotide
  modified_base (11)..(11): 5-methyl modified nucleotide
  modified_base (12)..(12): 5-methyl modified nucleotide
uaaguucuguccaa

SEQ ID NO: 1680 - RNA, 13 nt, Artificial Sequence
  source: /note="Description of Artificial Sequence: Synthetic oligonucleotide"
  source: /note="Antisense Oligonucleotide"
  modified_base (7)..(7): 5-methyl modified nucleotide
  modified_base (11)..(11): 5-methyl modified nucleotide
  modified_base (12)..(12): 5-methyl modified nucleotide
uaaguucugucca

SEQ ID NO: 1681 - RNA, 12 nt, Artificial Sequence
  source: /note="Description of Artificial Sequence: Synthetic oligonucleotide"
  source: /note="Antisense Oligonucleotide"
  modified_base (7)..(7): 5-methyl modified nucleotide
  modified_base (11)..(11): 5-methyl modified nucleotide
  modified_base (12)..(12): 5-methyl modified nucleotide
uaaguucugucc

SEQ ID NO: 1682 - RNA, 11 nt, Artificial Sequence
  source: /note="Description of Artificial Sequence: Synthetic oligonucleotide"
  source: /note="Antisense Oligonucleotide"
  modified_base (7)..(7): 5-methyl modified nucleotide
  modified_base (11)..(11): 5-methyl modified nucleotide
uaaguucuguc

SEQ ID NO: 1683 - RNA, 10 nt, Artificial Sequence
  source: /note="Description of Artificial Sequence: Synthetic oligonucleotide"
  source: /note="Antisense Oligonucleotide"
  modified_base (7)..(7): 5-methyl modified nucleotide
uaaguucugu

SEQ ID NO: 1684 - RNA, 9 nt, Artificial Sequence
  source: /note="Description of Artificial Sequence: Synthetic oligonucleotide"
  source: /note="Antisense Oligonucleotide"
  modified_base (7)..(7): 5-methyl modified nucleotide
uaaguucug

SEQ ID NO: 1685 - RNA, 8 nt, Artificial Sequence
  source: /note="Description of Artificial Sequence: Synthetic oligonucleotide"
  source: /note="Antisense Oligonucleotide"
  modified_base (7)..(7): 5-methyl modified nucleotide
uaaguucu

SEQ ID NO: 1686 - RNA, 20 nt, Artificial Sequence
  source: /note="Description of Artificial Sequence: Synthetic oligonucleotide"
  source: /note="Antisense Oligonucleotide"
  modified_base (8)..(8): 5-methyl modified nucleotide
  modified_base (12)..(12): 5-methyl modified nucleotide
  modified_base (13)..(13): 5-methyl modified nucleotide
  modified_base (17)..(17): 5-methyl modified nucleotide
  modified_base (18)..(18): 5-methyl modified nucleotide
  modified_base (19)..(19): 5-methyl modified nucleotide
guaaguucuguccaagcccg

SEQ ID NO: 1687 - RNA, 19 nt, Artificial Sequence
  source: /note="Description of Artificial Sequence: Synthetic oligonucleotide"
  source: /note="Antisense Oligonucleotide"
  modified_base (8)..(8): 5-methyl modified nucleotide
  modified_base (12)..(12): 5-methyl modified nucleotide
  modified_base (13)..(13): 5-methyl modified nucleotide
  modified_base (17)..(17): 5-methyl modified nucleotide
  modified_base (18)..(18): 5-methyl modified nucleotide
  modified_base (19)..(19): 5-methyl modified nucleotide
guaaguucuguccaagccc

SEQ ID NO: 1688 - RNA, 17 nt, Artificial Sequence
  source: /note="Description of Artificial Sequence: Synthetic oligonucleotide"
  source: /note="Antisense Oligonucleotide"
  modified_base (8)..(8): 5-methyl modified nucleotide
  modified_base (12)..(12): 5-methyl modified nucleotide
  modified_base (13)..(13): 5-methyl modified nucleotide
  modified_base (17)..(17): 5-methyl modified nucleotide
guaaguucuguccaagc

SEQ ID NO: 1689 - RNA, 16 nt, Artificial Sequence
  source: /note="Description of Artificial Sequence: Synthetic oligonucleotide"
  source: /note="Antisense Oligonucleotide"
  modified_base (8)..(8): 5-methyl modified nucleotide
  modified_base (12)..(12): 5-methyl modified nucleotide
  modified_base (13)..(13): 5-methyl modified nucleotide
guaaguucuguccaag

SEQ ID NO: 1690 - RNA, 15 nt, Artificial Sequence
  source: /note="Description of Artificial Sequence: Synthetic oligonucleotide"
  source: /note="Antisense Oligonucleotide"
  modified_base (8)..(8): 5-methyl modified nucleotide
  modified_base (12)..(12): 5-methyl modified nucleotide
  modified_base (13)..(13): 5-methyl modified nucleotide
guaaguucuguccaa

SEQ ID NO: 1691 - RNA, 14 nt, Artificial Sequence
  source: /note="Description of Artificial Sequence: Synthetic oligonucleotide"
  source: /note="Antisense Oligonucleotide"
  modified_base (8)..(8): 5-methyl modified nucleotide
  modified_base (12)..(12): 5-methyl modified nucleotide
  modified_base (13)..(13): 5-methyl modified nucleotide
guaaguucugucca

SEQ ID NO: 1692 - RNA, 13 nt, Artificial Sequence
  source: /note="Description of Artificial Sequence: Synthetic oligonucleotide"
  source: /note="Antisense Oligonucleotide"
  modified_base (8)..(8): 5-methyl modified nucleotide
  modified_base (12)..(12): 5-methyl modified nucleotide
  modified_base (13)..(13): 5-methyl modified nucleotide
guaaguucugucc

SEQ ID NO: 1693 - RNA, 12 nt, Artificial Sequence
  source: /note="Description of Artificial Sequence: Synthetic oligonucleotide"
  source: /note="RNA"
  modified_base (8)..(8): 5-methyl modified nucleotide
  modified_base (12)..(12): 5-methyl modified nucleotide
guaaguucuguc

SEQ ID NO: 1694 - RNA, 11 nt, Artificial Sequence
  source: /note="Description of Artificial Sequence: Synthetic oligonucleotide"
  source: /note="RNA"
  modified_base (8)..(8): 5-methyl modified nucleotide
guaaguucugu

SEQ ID NO: 1695 - RNA, 10 nt, Artificial Sequence
  source: /note="Description of Artificial Sequence: Synthetic oligonucleotide"
  source: /note="RNA"
  modified_base (8)..(8): 5-methyl modified nucleotide
guaaguucug

SEQ ID NO: 1696 - RNA, 9 nt, Artificial Sequence
  source: /note="Description of Artificial Sequence: Synthetic oligonucleotide"
  source: /note="RNA"
  modified_base (8)..(8): 5-methyl modified nucleotide
guaaguucu

SEQ ID NO: 1697 - RNA, 8 nt, Artificial Sequence
  source: /note="Description of Artificial Sequence: Synthetic oligonucleotide"
  source: /note="RNA"
  modified_base (8)..(8): 5-methyl modified nucleotide
guaaguuc

SEQ ID NO: 1698 - RNA, 20 nt, Artificial Sequence
  source: /note="Description of Artificial Sequence: Synthetic oligonucleotide"
  source: /note="RNA"
  modified_base (9)..(9): 5-methyl modified nucleotide
  modified_base (13)..(13): 5-methyl modified nucleotide
  modified_base (14)..(14): 5-methyl modified nucleotide
  modified_base (18)..(18): 5-methyl modified nucleotide
  modified_base (19)..(19): 5-methyl modified nucleotide
  modified_base (20)..(20): 5-methyl modified nucleotide
gguaaguucuguccaagccc

SEQ ID NO: 1699 - RNA, 19 nt, Artificial Sequence
  source: /note="Description of Artificial Sequence: Synthetic oligonucleotide"
  source: /note="RNA"
  modified_base (9)..(9): 5-methyl modified nucleotide
  modified_base (13)..(13): 5-methyl modified nucleotide
  modified_base (14)..(14): 5-methyl modified nucleotide
  modified_base (18)..(18): 5-methyl modified nucleotide
  modified_base (19)..(19): 5-methyl modified nucleotide
gguaaguucuguccaagcc

SEQ ID NO: 1700 - RNA, 17 nt, Artificial Sequence
  source: /note="Description of Artificial Sequence: Synthetic oligonucleotide"
  source: /note="RNA"
  modified_base (9)..(9): 5-methyl modified nucleotide
  modified_base (13)..(13): 5-methyl modified nucleotide
  modified_base (14)..(14): 5-methyl modified nucleotide
gguaaguucuguccaag

SEQ ID NO: 1701 - RNA, 16 nt, Artificial Sequence
  source: /note="Description of Artificial Sequence: Synthetic oligonucleotide"
  source: /note="RNA"
  modified_base (9)..(9): 5-methyl modified nucleotide
  modified_base (13)..(13): 5-methyl modified nucleotide
  modified_base (14)..(14): 5-methyl modified nucleotide
gguaaguucuguccaa

SEQ ID NO: 1702 - RNA, 15 nt, Artificial Sequence
  source: /note="Description of Artificial Sequence: Synthetic oligonucleotide"
  source: /note="RNA"
  modified_base (9)..(9): 5-methyl modified nucleotide
  modified_base (13)..(13): 5-methyl modified nucleotide
  modified_base (14)..(14): 5-methyl modified nucleotide
gguaaguucugucca

SEQ ID NO: 1703 - RNA, 14 nt, Artificial Sequence
  source: /note="Description of Artificial Sequence: Synthetic oligonucleotide"
  source: /note="RNA"
  modified_base (9)..(9): 5-methyl modified nucleotide
  modified_base (13)..(13): 5-methyl modified nucleotide
  modified_base (14)..(14): 5-methyl modified nucleotide
gguaaguucugucc

SEQ ID NO: 1704 - RNA, 13 nt, Artificial Sequence
  source: /note="Description of Artificial Sequence: Synthetic oligonucleotide"
  source: /note="RNA"
  modified_base (9)..(9): 5-methyl modified nucleotide
  modified_base (13)..(13): 5-methyl modified nucleotide
gguaaguucuguc

SEQ ID NO: 1705 - RNA, 12 nt, Artificial Sequence
  source: /note="Description of Artificial Sequence: Synthetic oligonucleotide"
  source: /note="RNA"
  modified_base (9)..(9): 5-methyl modified nucleotide
gguaaguucugu

SEQ ID NO: 1706 - RNA, 11 nt, Artificial Sequence
  source: /note="Description of Artificial Sequence: Synthetic oligonucleotide"
  source: /note="RNA"
  modified_base (9)..(9): 5-methyl modified nucleotide
gguaaguucug

SEQ ID NO: 1707 - RNA, 10 nt, Artificial Sequence
  source: /note="Description of Artificial Sequence: Synthetic oligonucleotide"
  source: /note="RNA"
  modified_base (9)..(9): 5-methyl modified nucleotide
gguaaguucu

SEQ ID NO: 1708 - RNA, 9 nt, Artificial Sequence
  source: /note="Description of Artificial Sequence: Synthetic oligonucleotide"
  source: /note="RNA"
  modified_base (9)..(9): 5-methyl modified nucleotide
gguaaguuc

SEQ ID NO: 1709 - RNA, 8 nt, Artificial Sequence
  source: /note="Description of Artificial Sequence: Synthetic oligonucleotide"
  source: /note="RNA"
gguaaguu

SEQ ID NO: 1710 - RNA, 20 nt, Artificial Sequence
  source: /note="Description of Artificial Sequence: Synthetic oligonucleotide"
  source: /note="RNA"
  modified_base (1)..(1): 5-methyl modified nucleotide
  modified_base (10)..(10): 5-methyl modified nucleotide
  modified_base (14)..(14): 5-methyl modified nucleotide
  modified_base (15)..(15): 5-methyl modified nucleotide
  modified_base (19)..(19): 5-methyl modified nucleotide
  modified_base (20)..(20): 5-methyl modified nucleotide
cgguaaguucuguccaagcc

SEQ ID NO: 1711 - RNA, 19 nt, Artificial Sequence
  source: /note="Description of Artificial Sequence: Synthetic oligonucleotide"
  source: /note="RNA"
  modified_base (1)..(1): 5-methyl modified nucleotide
  modified_base (10)..(10): 5-methyl modified nucleotide
  modified_base (14)..(14): 5-methyl modified nucleotide
  modified_base (15)..(15): 5-methyl modified nucleotide
  modified_base (19)..(19): 5-methyl modified nucleotide
cgguaaguucuguccaagc

SEQ ID NO: 1712 - RNA, 18 nt, Artificial Sequence
  source: /note="Description of Artificial Sequence: Synthetic oligonucleotide"
  source: /note="RNA"
  modified_base (1)..(1): 5-methyl modified nucleotide
  modified_base (10)..(10): 5-methyl modified nucleotide
  modified_base (14)..(14): 5-methyl modified nucleotide
  modified_base (15)..(15): 5-methyl modified nucleotide
cgguaaguucuguccaag

SEQ ID NO: 1713 - RNA, 17 nt, Artificial Sequence
  source: /note="Description of Artificial Sequence: Synthetic oligonucleotide"
  source: /note="RNA"
  modified_base (1)..(1): 5-methyl modified nucleotide
  modified_base (10)..(10): 5-methyl modified nucleotide
  modified_base (14)..(14): 5-methyl modified nucleotide
  modified_base (15)..(15): 5-methyl modified nucleotide
cgguaaguucuguccaa

SEQ ID NO: 1714 - RNA, 16 nt, Artificial Sequence
  source: /note="Description of Artificial Sequence: Synthetic oligonucleotide"
  source: /note="RNA"
  modified_base (1)..(1): 5-methyl modified nucleotide
  modified_base (10)..(10): 5-methyl modified nucleotide
  modified_base (14)..(14): 5-methyl modified nucleotide
  modified_base (15)..(15): 5-methyl modified nucleotide
cgguaaguucugucca

SEQ ID NO: 1715 - RNA, 15 nt, Artificial Sequence
  source: /note="Description of Artificial Sequence: Synthetic oligonucleotide"
  source: /note="RNA"
  modified_base (1)..(1): 5-methyl modified nucleotide
  modified_base (10)..(10): 5-methyl modified nucleotide
  modified_base (14)..(14): 5-methyl modified nucleotide
  modified_base (15)..(15): 5-methyl modified nucleotide
cgguaaguucugucc

SEQ ID NO: 1716 - RNA, 14 nt, Artificial Sequence
  source: /note="Description of Artificial Sequence: Synthetic oligonucleotide"
  source: /note="RNA"
  modified_base (1)..(1): 5-methyl modified nucleotide
  modified_base (10)..(10): 5-methyl modified nucleotide
  modified_base (14)..(14): 5-methyl modified nucleotide
cgguaaguucuguc

SEQ ID NO: 1717 - RNA, 13 nt, Artificial Sequence
  source: /note="Description of Artificial Sequence: Synthetic oligonucleotide"
  source: /note="RNA"
  modified_base (1)..(1): 5-methyl modified nucleotide
  modified_base (10)..(10): 5-methyl modified nucleotide
cgguaaguucugu

SEQ ID NO: 1718 - RNA, 12 nt, Artificial Sequence
  source: /note="Description of Artificial Sequence: Synthetic oligonucleotide"
  source: /note="RNA"
  modified_base (1)..(1): 5-methyl modified nucleotide
  modified_base (10)..(10): 5-methyl modified nucleotide
cgguaaguucug

SEQ ID NO: 1719 - RNA, 11 nt, Artificial Sequence
  source: /note="Description of Artificial Sequence: Synthetic oligonucleotide"
  source: /note="RNA"
  modified_base (1)..(1): 5-methyl modified nucleotide
  modified_base (10)..(10): 5-methyl modified nucleotide
cgguaaguucu

SEQ ID NO: 1720 - RNA, 10 nt, Artificial Sequence
  source: /note="Description of Artificial Sequence: Synthetic oligonucleotide"
  source: /note="RNA"
  modified_base (1)..(1): 5-methyl modified nucleotide
  modified_base (10)..(10): 5-methyl modified nucleotide
cgguaaguuc

SEQ ID NO: 1721 - RNA, 9 nt, Artificial Sequence
  source: /note="Description of Artificial Sequence: Synthetic oligonucleotide"
  source: /note="RNA"
  modified_base (1)..(1): 5-methyl modified nucleotide
cgguaaguu

SEQ ID NO: 1722 - RNA, 8 nt, Artificial Sequence
  source: /note="Description of Artificial Sequence: Synthetic oligonucleotide"
  source: /note="RNA"
  modified_base (1)..(1): 5-methyl modified nucleotide
cgguaagu

SEQ ID NO: 1723 - RNA, 20 nt, Artificial Sequence
  source: /note="Description of Artificial Sequence: Synthetic oligonucleotide"
  source: /note="RNA"
  modified_base (2)..(2): 5-methyl modified nucleotide
  modified_base (11)..(11): 5-methyl modified nucleotide
  modified_base (15)..(15): 5-methyl modified nucleotide
  modified_base (16)..(16): 5-methyl modified nucleotide
  modified_base (20)..(20): 5-methyl modified nucleotide
ucgguaaguucuguccaagc

SEQ ID NO: 1724 - RNA, 19 nt, Artificial Sequence
  source: /note="Description of Artificial Sequence: Synthetic oligonucleotide"
  source: /note="RNA"
  modified_base (2)..(2): 5-methyl modified nucleotide
  modified_base (11)..(11): 5-methyl modified nucleotide
  modified_base (15)..(15): 5-methyl modified nucleotide
  modified_base (16)..(16): 5-methyl modified nucleotide
ucgguaaguucuguccaag

SEQ ID NO: 1725 - RNA, 18 nt, Artificial Sequence
  source: /note="Description of Artificial Sequence: Synthetic oligonucleotide"
  source: /note="RNA"
  modified_base (2)..(2): 5-methyl modified nucleotide
  modified_base (11)..(11): 5-methyl modified nucleotide
  modified_base (15)..(15): 5-methyl modified nucleotide
  modified_base (16)..(16): 5-methyl modified nucleotide
ucgguaaguucuguccaa

SEQ ID NO: 1726 - RNA, 17 nt, Artificial Sequence
  source: /note="Description of Artificial Sequence: Synthetic oligonucleotide"
  source: /note="RNA"
  modified_base (2)..(2): 5-methyl modified nucleotide
  modified_base (11)..(11): 5-methyl modified nucleotide
  modified_base (15)..(15): 5-methyl modified nucleotide
  modified_base (16)..(16): 5-methyl modified nucleotide
ucgguaaguucugucca

SEQ ID NO: 1727 - RNA, 16 nt, Artificial Sequence
  source: /note="Description of Artificial Sequence: Synthetic oligonucleotide"
  source: /note="RNA"
  modified_base (2)..(2): 5-methyl modified nucleotide
  modified_base (11)..(11): 5-methyl modified nucleotide
  modified_base (15)..(15): 5-methyl modified nucleotide
  modified_base (16)..(16): 5-methyl modified nucleotide
ucgguaaguucugucc

SEQ ID NO: 1728 - RNA, 15 nt, Artificial Sequence
  source: /note="Description of Artificial Sequence: Synthetic oligonucleotide"
  source: /note="RNA"
  modified_base (2)..(2): 5-methyl modified nucleotide
  modified_base (11)..(11): 5-methyl modified nucleotide
  modified_base (15)..(15): 5-methyl modified nucleotide
ucgguaaguucuguc

SEQ ID NO: 1729 - RNA, 14 nt, Artificial Sequence
  source: /note="Description of Artificial Sequence: Synthetic oligonucleotide"
  source: /note="RNA"
  modified_base (2)..(2): 5-methyl modified nucleotide
  modified_base (11)..(11): 5-methyl modified nucleotide
ucgguaaguucugu

SEQ ID NO: 1730 - RNA, 13 nt, Artificial Sequence
  source: /note="Description of Artificial Sequence: Synthetic oligonucleotide"
  source: /note="RNA"
  modified_base (2)..(2): 5-methyl modified nucleotide
  modified_base (11)..(11): 5-methyl modified nucleotide
ucgguaaguucug

SEQ ID NO: 1731 - RNA, 12 nt, Artificial Sequence
  source: /note="Description of Artificial Sequence: Synthetic oligonucleotide"
  source: /note="RNA"
  modified_base (2)..(2): 5-methyl modified nucleotide
  modified_base (11)..(11): 5-methyl modified nucleotide
ucgguaaguucu

SEQ ID NO: 1732 - RNA, 11 nt, Artificial Sequence
  source: /note="Description of Artificial Sequence: Synthetic oligonucleotide"
  source: /note="RNA"
  modified_base (2)..(2): 5-methyl modified nucleotide
  modified_base (11)..(11): 5-methyl modified nucleotide
ucgguaaguuc

SEQ ID NO: 1733 - RNA, 10 nt, Artificial Sequence
  source: /note="Description of Artificial Sequence: Synthetic oligonucleotide"
  source: /note="RNA"
  modified_base (2)..(2): 5-methyl modified nucleotide
ucgguaaguu

SEQ ID NO: 1734 - RNA, 9 nt, Artificial Sequence
  source: /note="Description of Artificial Sequence: Synthetic oligonucleotide"
  source: /note="RNA"
  modified_base (2)..(2): 5-methyl modified nucleotide
ucgguaagu

SEQ ID NO: 1735 - RNA, 20 nt, Artificial Sequence
  source: /note="Description of Artificial Sequence: Synthetic oligonucleotide"
  source: /note="RNA"
  modified_base (3)..(3): 5-methyl modified nucleotide
  modified_base (12)..(12): 5-methyl modified nucleotide
  modified_base (16)..(16): 5-methyl modified nucleotide
  modified_base (17)..(17): 5-methyl modified nucleotide
gucgguaaguucuguccaag

SEQ ID NO: 1736 - RNA, 19 nt, Artificial Sequence
  source: /note="Description of Artificial Sequence: Synthetic oligonucleotide"
  source: /note="RNA"
  modified_base (3)..(3): 5-methyl modified nucleotide
  modified_base (12)..(12): 5-methyl modified nucleotide
  modified_base (16)..(16): 5-methyl modified nucleotide
  modified_base (17)..(17): 5-methyl modified nucleotide
gucgguaaguucuguccaa

SEQ ID NO: 1737 - RNA, 18 nt, Artificial Sequence
  source: /note="Description of Artificial Sequence: Synthetic oligonucleotide"
  source: /note="RNA"
  modified_base (3)..(3): 5-methyl modified nucleotide
  modified_base (12)..(12): 5-methyl modified nucleotide
  modified_base (16)..(16): 5-methyl modified nucleotide
  modified_base (17)..(17): 5-methyl modified nucleotide
gucgguaaguucugucca

SEQ ID NO: 1738 - RNA, 17 nt, Artificial Sequence
  source: /note="Description of Artificial Sequence: Synthetic oligonucleotide"
  source: /note="RNA"
  modified_base (3)..(3): 5-methyl modified nucleotide
  modified_base (12)..(12): 5-methyl modified nucleotide
  modified_base (16)..(16): 5-methyl modified nucleotide
  modified_base (17)..(17): 5-methyl modified nucleotide
gucgguaaguucugucc

SEQ ID NO: 1739 - RNA, 16 nt, Artificial Sequence
  source: /note="Description of Artificial Sequence: Synthetic oligonucleotide"
  source: /note="RNA"
  modified_base (3)..(3): 5-methyl modified nucleotide
  modified_base (12)..(12): 5-methyl modified nucleotide
  modified_base (16)..(16): 5-methyl modified nucleotide
gucgguaaguucuguc

SEQ ID NO: 1740 - RNA, 15 nt, Artificial Sequence
  source: /note="Description of Artificial Sequence: Synthetic oligonucleotide"
  source: /note="RNA"
  modified_base (3)..(3): 5-methyl modified nucleotide
  modified_base (12)..(12): 5-methyl modified nucleotide
gucgguaaguucugu

SEQ ID NO: 1741 - RNA, 14 nt, Artificial Sequence
  source: /note="Description of Artificial Sequence: Synthetic oligonucleotide"
  source: /note="RNA"
  modified_base (3)..(3): 5-methyl modified nucleotide
  modified_base (12)..(12): 5-methyl modified nucleotide
gucgguaaguucug

SEQ ID NO: 1742 - RNA, 13 nt, Artificial Sequence
  source: /note="Description of Artificial Sequence: Synthetic oligonucleotide"
  source: /note="RNA"
  modified_base (3)..(3): 5-methyl modified nucleotide
  modified_base (12)..(12): 5-methyl modified nucleotide
gucgguaaguucu

SEQ ID NO: 1743 - RNA, 12 nt, Artificial Sequence
  source: /note="Description of Artificial Sequence: Synthetic oligonucleotide"
  source: /note="RNA"
  modified_base (3)..(3): 5-methyl modified nucleotide
  modified_base (12)..(12): 5-methyl modified nucleotide
gucgguaaguuc

SEQ ID NO: 1744 - RNA, 11 nt, Artificial Sequence
  source: /note="Description of Artificial Sequence: Synthetic oligonucleotide"
  source: /note="RNA"
  modified_base (3)..(3): 5-methyl modified nucleotide
gucgguaaguu

SEQ ID NO: 1745 - RNA, 10 nt, Artificial Sequence
  source: /note="Description of Artificial Sequence: Synthetic oligonucleotide"
  source: /note="RNA"
  modified_base (3)..(3): 5-methyl modified nucleotide
gucgguaagu

SEQ ID NO: 1746 - RNA, 20 nt, Artificial Sequence
  source: /note="Description of Artificial Sequence: Synthetic oligonucleotide"
  source: /note="RNA"
  modified_base (4)..(4): 5-methyl modified nucleotide
  modified_base (13)..(13): 5-methyl modified nucleotide
  modified_base (17)..(17): 5-methyl modified nucleotide
  modified_base (18)..(18): 5-methyl modified nucleotide
agucgguaaguucuguccaa

SEQ ID NO: 1747 - RNA, 19 nt, Artificial Sequence
  source: /note="Description of Artificial Sequence: Synthetic oligonucleotide"
  source: /note="RNA"
  modified_base (4)..(4): 5-methyl modified nucleotide
  modified_base (13)..(13): 5-methyl modified nucleotide
  modified_base (17)..(17): 5-methyl modified nucleotide
  modified_base (18)..(18): 5-methyl modified nucleotide
agucgguaaguucugucca

SEQ ID NO: 1748 - RNA, 17 nt, Artificial Sequence
  source: /note="Description of Artificial Sequence: Synthetic oligonucleotide"
  source: /note="RNA"
  modified_base (4)..(4): 5-methyl modified nucleotide
  modified_base (13)..(13): 5-methyl modified nucleotide
  modified_base (17)..(17): 5-methyl modified nucleotide
agucgguaaguucuguc

SEQ ID NO: 1749 - RNA, 16 nt, Artificial Sequence
  source: /note="Description of Artificial Sequence: Synthetic oligonucleotide"
  source: /note="RNA"
  modified_base (4)..(4): 5-methyl modified nucleotide
  modified_base (13)..(13): 5-methyl modified nucleotide
agucgguaaguucugu

SEQ ID NO: 1750 - RNA, 15 nt, Artificial Sequence
  source: /note="Description of Artificial Sequence: Synthetic oligonucleotide"
  source: /note="RNA"
  modified_base (4)..(4): 5-methyl modified nucleotide
  modified_base (13)..(13): 5-methyl modified nucleotide
agucgguaaguucug

SEQ ID NO: 1751 - RNA, 14 nt, Artificial Sequence
  source: /note="Description of Artificial Sequence: Synthetic oligonucleotide"
  source: /note="RNA"
  modified_base (4)..(4): 5-methyl modified nucleotide
  modified_base (13)..(13): 5-methyl modified nucleotide
agucgguaaguucu

SEQ ID NO: 1752 - RNA, 13 nt, Artificial Sequence
  source: /note="Description of Artificial Sequence: Synthetic oligonucleotide"
  source: /note="RNA"
  modified_base (4)..(4): 5-methyl modified nucleotide
  modified_base (13)..(13): 5-methyl modified nucleotide
agucgguaaguuc

SEQ ID NO: 1753 - RNA, 12 nt, Artificial Sequence
  source: /note="Description of Artificial Sequence: Synthetic oligonucleotide"
  source: /note="RNA"
  modified_base (4)..(4): 5-methyl modified nucleotide
agucgguaaguu

SEQ ID NO: 1754 - RNA, 11 nt, Artificial Sequence
  source: /note="Description of Artificial Sequence: Synthetic oligonucleotide"
  source: /note="RNA"
  modified_base (4)..(4): 5-methyl modified nucleotide
agucgguaagu

SEQ ID NO: 1755 - RNA, 20 nt, Artificial Sequence
  source: /note="Description of Artificial Sequence: Synthetic oligonucleotide"
  source: /note="RNA"
  modified_base (1)..(1): 5-methyl modified nucleotide
  modified_base (5)..(5): 5-methyl modified nucleotide
  modified_base (14)..(14): 5-methyl modified nucleotide
  modified_base (18)..(18): 5-methyl modified nucleotide
  modified_base (19)..(19): 5-methyl modified nucleotide
cagucgguaaguucugucca

SEQ ID NO: 1756 - RNA, 19 nt, Artificial Sequence
  source: /note="Description of Artificial Sequence: Synthetic oligonucleotide"
  source: /note="RNA"
  modified_base (1)..(1): 5-methyl modified nucleotide
  modified_base (5)..(5): 5-methyl modified nucleotide
  modified_base (14)..(14): 5-methyl modified nucleotide
  modified_base (18)..(18): 5-methyl modified nucleotide
  modified_base (19)..(19): 5-methyl modified nucleotide
cagucgguaaguucugucc

SEQ ID NO: 1757 - RNA, 18 nt, Artificial Sequence
  source: /note="Description of Artificial Sequence: Synthetic oligonucleotide"
  source: /note="RNA"
  modified_base (1)..(1): 5-methyl modified nucleotide
  modified_base (5)..(5): 5-methyl modified nucleotide
  modified_base (14)..(14): 5-methyl modified nucleotide
  modified_base (18)..(18): 5-methyl modified nucleotide
cagucgguaaguucuguc

SEQ ID NO: 1758 - RNA, 17 nt, Artificial Sequence
  source: /note="Description of Artificial Sequence: Synthetic oligonucleotide"
  source: /note="RNA"
  modified_base (1)..(1): 5-methyl modified nucleotide
  modified_base (5)..(5): 5-methyl modified nucleotide
  modified_base (14)..(14): 5-methyl modified nucleotide
cagucgguaaguucugu

SEQ ID NO: 1759 - RNA, 16 nt, Artificial Sequence
  source: /note="Description of Artificial Sequence: Synthetic oligonucleotide"
  source: /note="RNA"
  modified_base (1)..(1): 5-methyl modified nucleotide
  modified_base (5)..(5): 5-methyl modified nucleotide
  modified_base (14)..(14): 5-methyl modified nucleotide
cagucgguaaguucug

SEQ ID NO: 1760 - RNA, 15 nt, Artificial Sequence
  source: /note="Description of Artificial Sequence: Synthetic oligonucleotide"
  source: /note="RNA"
  modified_base (1)..(1): 5-methyl modified nucleotide
  modified_base (5)..(5): 5-methyl modified nucleotide
  modified_base (14)..(14): 5-methyl modified nucleotide
cagucgguaaguucu

SEQ ID NO: 1761 - RNA, 14 nt, Artificial Sequence
  source: /note="Description of Artificial Sequence: Synthetic oligonucleotide"
  source: /note="RNA"
  modified_base (1)..(1): 5-methyl modified nucleotide
  modified_base (5)..(5): 5-methyl modified nucleotide
  modified_base (14)..(14): 5-methyl modified nucleotide
cagucgguaaguuc

SEQ ID NO: 1762 - RNA, 13 nt, Artificial Sequence
  source: /note="Description of Artificial Sequence: Synthetic oligonucleotide"
  source: /note="RNA"
  modified_base (1)..(1): 5-methyl modified nucleotide
  modified_base (5)..(5): 5-methyl modified nucleotide
cagucgguaaguu

SEQ ID NO: 1763 - RNA, 12 nt, Artificial Sequence
  source: /note="Description of Artificial Sequence: Synthetic oligonucleotide"
  source: /note="RNA"
  modified_base (1)..(1): 5-methyl modified nucleotide
  modified_base (5)..(5): 5-methyl modified nucleotide
cagucgguaagu

SEQ ID NO: 1764 - RNA, 20 nt, Artificial Sequence
  source: /note="Description of Artificial Sequence: Synthetic oligonucleotide"
  source: /note="RNA"
  modified_base (1)..(1): 5-methyl modified nucleotide
  modified_base (2)..(2): 5-methyl modified nucleotide
  modified_base (6)..(6): 5-methyl modified nucleotide
  modified_base (15)..(15): 5-methyl modified nucleotide
  modified_base (19)..(19): 5-methyl modified nucleotide
  modified_base (20)..(20): 5-methyl modified nucleotide
ccagucgguaaguucugucc

SEQ ID NO: 1765 - RNA, 19 nt, Artificial Sequence
  source: /note="Description of Artificial Sequence: Synthetic oligonucleotide"
  source: /note="RNA"
  modified_base (1)..(1): 5-methyl modified nucleotide
  modified_base (2)..(2): 5-methyl modified nucleotide
  modified_base (6)..(6): 5-methyl modified nucleotide
  modified_base (15)..(15): 5-methyl modified nucleotide
  modified_base (19)..(19): 5-methyl modified nucleotide
ccagucgguaaguucuguc

SEQ ID NO: 1766 - RNA, 18 nt, Artificial Sequence
  source: /note="Description of Artificial Sequence: Synthetic oligonucleotide"
  source: /note="RNA"
  modified_base (1)..(1): 5-methyl modified nucleotide
  modified_base (2)..(2): 5-methyl modified nucleotide
  modified_base (6)..(6): 5-methyl modified nucleotide
  modified_base (15)..(15): 5-methyl modified nucleotide
ccagucgguaaguucugu

SEQ ID NO: 1767 - RNA, 17 nt, Artificial Sequence
  source: /note="Description of Artificial Sequence: Synthetic oligonucleotide"
  source: /note="RNA"
  modified_base (1)..(1): 5-methyl modified nucleotide
  modified_base (2)..(2): 5-methyl modified nucleotide
  modified_base (6)..(6): 5-methyl modified nucleotide
  modified_base (15)..(15): 5-methyl modified nucleotide
ccagucgguaaguucug

SEQ ID NO: 1768 - RNA, 16 nt, Artificial Sequence
  source: /note="Description of Artificial Sequence: Synthetic oligonucleotide"
  source: /note="RNA"
  modified_base (1)..(1): 5-methyl modified nucleotide
  modified_base (2)..(2): 5-methyl modified nucleotide
  modified_base (6)..(6): 5-methyl modified nucleotide
  modified_base (15)..(15): 5-methyl modified nucleotide
ccagucgguaaguucu

SEQ ID NO: 1769 - RNA, 15 nt, Artificial Sequence
  source: /note="Description of Artificial Sequence: Synthetic oligonucleotide"
  source: /note="RNA"
  modified_base (1)..(1): 5-methyl modified nucleotide
  modified_base (2)..(2): 5-methyl modified nucleotide
  modified_base (6)..(6): 5-methyl modified nucleotide
  modified_base (15)..(15): 5-methyl modified nucleotide
ccagucgguaaguuc

SEQ ID NO: 1770 - RNA, 14 nt, Artificial Sequence
  source: /note="Description of Artificial Sequence: Synthetic oligonucleotide"
  source: /note="RNA"
  modified_base (1)..(1): 5-methyl modified nucleotide
  modified_base (2)..(2): 5-methyl modified nucleotide
  modified_base (6)..(6): 5-methyl modified nucleotide
ccagucgguaaguu

SEQ ID NO: 1771 - RNA, 13 nt, Artificial Sequence
  source: /note="Description of Artificial Sequence: Synthetic oligonucleotide"
  source: /note="RNA"
  modified_base (1)..(1): 5-methyl modified nucleotide
  modified_base (2)..(2): 5-methyl modified nucleotide
  modified_base (6)..(6): 5-methyl modified nucleotide
ccagucgguaagu

SEQ ID NO: 1772 - RNA, 20 nt, Artificial Sequence
  source: /note="Description of Artificial Sequence: Synthetic oligonucleotide"
  source: /note="RNA"
  modified_base (2)..(2): 5-methyl modified nucleotide
  modified_base (3)..(3): 5-methyl modified nucleotide
  modified_base (7)..(7): 5-methyl modified nucleotide
  modified_base (16)..(16): 5-methyl modified nucleotide
  modified_base (20)..(20): 5-methyl modified nucleotide
gccagucgguaaguucuguc

SEQ ID NO: 1773 - RNA, 19 nt, Artificial Sequence
  source: /note="Description of Artificial Sequence: Synthetic oligonucleotide"
  source: /note="RNA"
  modified_base (2)..(2): 5-methyl modified nucleotide
  modified_base (3)..(3): 5-methyl modified nucleotide
  modified_base (7)..(7): 5-methyl modified nucleotide
  modified_base (16)..(16): 5-methyl modified nucleotide
gccagucgguaaguucugu

SEQ ID NO: 1774 - RNA, 18 nt, Artificial Sequence
  source: /note="Description of Artificial Sequence: Synthetic oligonucleotide"
  source: /note="RNA"
  modified_base (2)..(2): 5-methyl modified nucleotide
  modified_base (3)..(3): 5-methyl modified nucleotide
  modified_base (7)..(7): 5-methyl modified nucleotide
  modified_base (16)..(16): 5-methyl modified nucleotide
gccagucgguaaguucug

SEQ ID NO: 1775 - RNA, 17 nt, Artificial Sequence
  source: /note="Description of Artificial Sequence: Synthetic oligonucleotide"
  source: /note="RNA"
  modified_base (2)..(2): 5-methyl modified nucleotide
  modified_base (3)..(3): 5-methyl modified nucleotide
  modified_base (7)..(7): 5-methyl modified nucleotide
  modified_base (16)..(16): 5-methyl modified nucleotide
gccagucgguaaguucu

SEQ ID NO: 1776 - RNA, 16 nt, Artificial Sequence
  source: /note="Description of Artificial Sequence: Synthetic oligonucleotide"
  source: /note="RNA"
  modified_base (2)..(2): 5-methyl modified nucleotide
  modified_base (3)..(3): 5-methyl modified nucleotide
  modified_base (7)..(7): 5-methyl modified nucleotide
  modified_base (16)..(16): 5-methyl modified nucleotide
gccagucgguaaguuc

SEQ ID NO: 1777 - RNA, 15 nt, Artificial Sequence
  source: /note="Description of Artificial Sequence: Synthetic oligonucleotide"
  source: /note="RNA"
  modified_base (2)..(2): 5-methyl modified nucleotide
  modified_base (3)..(3): 5-methyl modified nucleotide
  modified_base (7)..(7): 5-methyl modified nucleotide
gccagucgguaaguu

SEQ ID NO: 1778 - RNA, 14 nt, Artificial Sequence
  source: /note="Description of Artificial Sequence: Synthetic oligonucleotide"
  source: /note="RNA"
  modified_base (2)..(2): 5-methyl modified nucleotide
  modified_base (3)..(3): 5-methyl modified nucleotide
  modified_base (7)..(7): 5-methyl modified nucleotide
gccagucgguaagu

SEQ ID NO: 1779 - RNA, 20 nt, Artificial Sequence
  source: /note="Description of Artificial Sequence: Synthetic oligonucleotide"
  source: /note="RNA"
  modified_base (2)..(2): 5-methyl modified nucleotide
  modified_base (14)..(14): 5-methyl modified nucleotide
  modified_base (19)..(19): 5-methyl modified nucleotide
ucaaggaagauggcauuucu

SEQ ID NO: 1780 - RNA, 22 nt, Artificial Sequence
  source: /note="Description of Artificial Sequence: Synthetic oligonucleotide"
  source: /note="RNA"
  modified_base (2)..(2): 5-methyl modified nucleotide
  modified_base (14)..(14): 5-methyl modified nucleotide
  modified_base (19)..(19): 5-methyl modified nucleotide
ucaaggaagauggcauuucuag

SEQ ID NO: 1781 - RNA, 16 nt, Artificial Sequence
  source: /note="Description of Artificial Sequence: Synthetic oligonucleotide"
  source: /note="RNA"
  modified_base (2)..(2): 5-methyl modified nucleotide
  modified_base (14)..(14): 5-methyl modified nucleotide
ucaaggaagauggcau

SEQ ID NO: 1782 - RNA, 15 nt, Artificial Sequence
  source: /note="Description of Artificial Sequence: Synthetic oligonucleotide"
  source: /note="RNA"
  modified_base (9)..(9): 5-methyl modified nucleotide
  modified_base (14)..(14): 5-methyl modified nucleotide
gaagauggcauuucu

SEQ ID NO: 1783 - RNA, 21 nt, Artificial Sequence
  source: /note="Description of Artificial Sequence: Synthetic oligonucleotide"
  source: /note="RNA"
  modified_base (2)..(2): 5-methyl modified nucleotide
  modified_base (14)..(14): 5-methyl modified nucleotide
  modified_base (19)..(19): 5-methyl modified nucleotide
ucaaggaagauggcauuucua

SEQ ID NO: 1784 - RNA, 19 nt, Artificial Sequence
  source: /note="Description of Artificial Sequence: Synthetic oligonucleotide"
  source: /note="RNA"
  modified_base (2)..(2): 5-methyl modified nucleotide
  modified_base (14)..(14): 5-methyl modified nucleotide
  modified_base (19)..(19): 5-methyl modified nucleotide
ucaaggaagauggcauuuc

SEQ ID NO: 1785 - RNA, 18 nt, Artificial Sequence
  source: /note="Description of Artificial Sequence: Synthetic oligonucleotide"
  source: /note="RNA"
  modified_base (2)..(2): 5-methyl modified nucleotide
  modified_base (14)..(14): 5-methyl modified nucleotide
ucaaggaagauggcauuu

SEQ ID NO: 1786 - RNA, 17 nt, Artificial Sequence
  source: /note="Description of Artificial Sequence: Synthetic oligonucleotide"
  source: /note="RNA"
  modified_base (2)..(2): 5-methyl modified nucleotide
  modified_base (14)..(14): 5-methyl modified nucleotide
ucaaggaagauggcauu

SEQ ID NO: 1787 - RNA, 15 nt, Artificial Sequence
  source: /note="Description of Artificial Sequence: Synthetic oligonucleotide"
  source: /note="RNA"
  modified_base (2)..(2): 5-methyl modified nucleotide
  modified_base (14)..(14): 5-methyl modified nucleotide
ucaaggaagauggca

SEQ ID NO: 1788 - RNA, 14 nt, Artificial Sequence
  source: /note="Description of Artificial Sequence: Synthetic oligonucleotide"
  source: /note="RNA"
  modified_base (2)..(2): 5-methyl modified nucleotide
  modified_base (14)..(14): 5-methyl modified nucleotide
ucaaggaagauggc

SEQ ID NO: 1789 - RNA, 13 nt, Artificial Sequence
  source: /note="Description of Artificial Sequence: Synthetic oligonucleotide"
  source: /note="RNA"
  modified_base (2)..(2): 5-methyl modified nucleotide
ucaaggaagaugg

SEQ ID NO: 1790 - RNA, 12 nt, Artificial Sequence
  source: /note="Description of Artificial Sequence: Synthetic oligonucleotide"
  source: /note="RNA"
  modified_base (2)..(2): 5-methyl modified nucleotide
ucaaggaagaug

SEQ ID NO: 1791 - RNA, 11 nt, Artificial Sequence
  source: /note="Description of Artificial Sequence: Synthetic oligonucleotide"
  source: /note="RNA"
  modified_base (2)..(2): 5-methyl modified nucleotide
ucaaggaagau

SEQ ID NO: 1792 - RNA, 10 nt, Artificial Sequence
  source: /note="Description of Artificial Sequence: Synthetic oligonucleotide"
  source: /note="RNA"
  modified_base (2)..(2): 5-methyl modified nucleotide
ucaaggaaga

SEQ ID NO: 1793 - RNA, 9 nt, Artificial Sequence
  source: /note="Description of Artificial Sequence: Synthetic oligonucleotide"
  source: /note="RNA"
  modified_base (2)..(2): 5-methyl modified nucleotide
ucaaggaag

SEQ ID NO: 1794 - RNA, 21 nt, Artificial Sequence
  source: /note="Description of Artificial Sequence: Synthetic oligonucleotide"
  source: /note="RNA"
  modified_base (1)..(1): 5-methyl modified nucleotide
  modified_base (13)..(13): 5-methyl modified nucleotide
  modified_base (18)..(18): 5-methyl modified nucleotide
caaggaagauggcauuucuag

SEQ ID NO: 1795 - RNA, 20 nt, Artificial Sequence
  source: /note="Description of Artificial Sequence: Synthetic oligonucleotide"
  source: /note="RNA"
  modified_base (1)..(1): 5-methyl modified nucleotide
  modified_base (13)..(13): 5-methyl modified nucleotide
  modified_base (18)..(18): 5-methyl modified nucleotide
caaggaagauggcauuucua

SEQ ID NO: 1796 - RNA, 19 nt, Artificial Sequence
  source: /note="Description of Artificial Sequence: Synthetic oligonucleotide"
  source: /note="RNA"
  modified_base (1)..(1): 5-methyl modified nucleotide
  modified_base (13)..(13): 5-methyl modified nucleotide
  modified_base (18)..(18): 5-methyl modified nucleotide
caaggaagauggcauuucu

SEQ ID NO: 1797 - RNA, 18 nt, Artificial Sequence
  source: /note="Description of Artificial Sequence: Synthetic oligonucleotide"
  source: /note="RNA"
  modified_base (1)..(1): 5-methyl modified nucleotide
  modified_base (13)..(13): 5-methyl modified nucleotide
  modified_base (18)..(18): 5-methyl modified nucleotide
caaggaagauggcauuuc

SEQ ID NO: 1798 - RNA, 17 nt, Artificial Sequence
  source: /note="Description of Artificial Sequence: Synthetic oligonucleotide"
  source: /note="RNA"
  modified_base (1)..(1): 5-methyl modified nucleotide
  modified_base (13)..(13): 5-methyl modified nucleotide
caaggaagauggcauuu

SEQ ID NO: 1799 - RNA, 16 nt, Artificial Sequence
  source: /note="Description of Artificial Sequence: Synthetic oligonucleotide"
  source: /note="RNA"
  modified_base (1)..(1): 5-methyl modified nucleotide
  modified_base (13)..(13): 5-methyl modified nucleotide
caaggaagauggcauu

SEQ ID NO: 1800 - RNA, 15 nt, Artificial Sequence
  source: /note="Description of Artificial Sequence: Synthetic oligonucleotide"
  source: /note="RNA"
  modified_base (1)..(1): 5-methyl modified nucleotide
  modified_base (13)..(13): 5-methyl modified nucleotide
caaggaagauggcau

SEQ ID NO: 1801 - RNA, 14 nt, Artificial Sequence
  source: /note="Description of Artificial Sequence: Synthetic oligonucleotide"
  source: /note="RNA"
  modified_base (1)..(1): 5-methyl modified nucleotide
  modified_base (13)..(13): 5-methyl modified nucleotide
caaggaagauggca

SEQ ID NO: 1802 - RNA, 13 nt, Artificial Sequence
  source: /note="Description of Artificial Sequence: Synthetic oligonucleotide"
  source: /note="RNA"
  modified_base (1)..(1): 5-methyl modified nucleotide
  modified_base (13)..(13): 5-methyl modified nucleotide
caaggaagauggc

SEQ ID NO: 1803 - RNA, 12 nt, Artificial Sequence
  source: /note="Description of Artificial Sequence: Synthetic oligonucleotide"
  source: /note="RNA"
  modified_base (1)..(1): 5-methyl modified nucleotide
caaggaagaugg

SEQ ID NO: 1804 - RNA, 11 nt, Artificial Sequence
  source: /note="Description of Artificial Sequence: Synthetic oligonucleotide"
  source: /note="RNA"
  modified_base (1)..(1): 5-methyl modified nucleotide
caaggaagaug

SEQ ID NO: 1805 - RNA, 10 nt, Artificial Sequence
  source: /note="Description of Artificial Sequence: Synthetic oligonucleotide"
  source: /note="RNA"
  modified_base (1)..(1): 5-methyl modified nucleotide
caaggaagau

SEQ ID NO: 1806 - RNA, 9 nt, Artificial Sequence
  source: /note="Description of Artificial Sequence: Synthetic oligonucleotide"
  source: /note="RNA/Antisense Oligonucleotide"
  modified_base (1)..(1): 5-methyl modified nucleotide
caaggaaga

SEQ ID NO: 1807 - RNA, 8 nt, Artificial Sequence
  source: /note="Description of Artificial Sequence: Synthetic oligonucleotide"
  source: /note="RNA/Antisense Oligonucleotide"
  modified_base (1)..(1): 5-methyl modified nucleotide
caaggaag

SEQ ID NO: 1808 - RNA, 20 nt, Artificial Sequence
  source: /note="Description of Artificial Sequence: Synthetic oligonucleotide"
  source: /note="RNA"
  modified_base (12)..(12): 5-methyl modified nucleotide
  modified_base (17)..(17): 5-methyl modified nucleotide
aaggaagauggcauuucuag

SEQ ID NO: 1809 - RNA, 19 nt, Artificial Sequence
  source: /note="Description of Artificial Sequence: Synthetic oligonucleotide"
  source: /note="Antisense Oligonucleotide"
  modified_base (12)..(12): 5-methyl modified nucleotide
  modified_base (17)..(17): 5-methyl modified nucleotide
aaggaagauggcauuucua

SEQ ID NO: 1810 - RNA, 18 nt, Artificial Sequence
  source: /note="Description of Artificial Sequence: Synthetic oligonucleotide"
  source: /note="RNA"
  modified_base (12)..(12): 5-methyl modified nucleotide
  modified_base (17)..(17): 5-methyl modified nucleotide
aaggaagauggcauuucu

SEQ ID NO: 1811 - RNA, 17 nt, Artificial Sequence
  source: /note="Description of Artificial Sequence: Synthetic oligonucleotide"
  source: /note="RNA"
  modified_base (12)..(12): 5-methyl modified nucleotide
  modified_base (17)..(17): 5-methyl modified nucleotide
aaggaagauggcauuuc

SEQ ID NO: 1812 - RNA, 16 nt, Artificial Sequence
  source: /note="Description of Artificial Sequence: Synthetic oligonucleotide"
  source: /note="RNA"
  modified_base (12)..(12): 5-methyl modified nucleotide
aaggaagauggcauuu

SEQ ID NO: 1813 - RNA, 15 nt, Artificial Sequence
  source: /note="Description of Artificial Sequence: Synthetic oligonucleotide"
  source: /note="RNA"
  modified_base (12)..(12): 5-methyl modified nucleotide
aaggaagauggcauu

SEQ ID NO: 1814 - RNA, 14 nt, Artificial Sequence
  source: /note="Description of Artificial Sequence: Synthetic oligonucleotide"
  source: /note="RNA"
  modified_base (12)..(12): 5-methyl modified nucleotide
aaggaagauggcau

SEQ ID NO: 1815 - RNA, 13 nt, Artificial Sequence
  source: /note="Description of Artificial Sequence: Synthetic oligonucleotide"
  source: /note="RNA"
  modified_base (12)..(12): 5-methyl modified nucleotide
aaggaagauggca

SEQ ID NO: 1816 - RNA, 12 nt, Artificial Sequence
  source: /note="Description of Artificial Sequence: Synthetic oligonucleotide"
  source: /note="RNA"
  modified_base (12)..(12): 5-methyl modified nucleotide
aaggaagauggc

SEQ ID NO: 1817 - RNA, 11 nt, Artificial Sequence
  source: /note="Description of Artificial Sequence: Synthetic oligonucleotide"
  source: /note="RNA"
aaggaagaugg

SEQ ID NO: 1818 - RNA, 10 nt, Artificial Sequence
  source: /note="Description of Artificial Sequence: Synthetic oligonucleotide"
  source: /note="RNA"
aaggaagaug

SEQ ID NO: 1819 - RNA, 9 nt, Artificial Sequence
  source: /note="Description of Artificial Sequence: Synthetic oligonucleotide"
  source: /note="RNA"
aaggaagau

SEQ ID NO: 1820 - RNA, 8 nt, Artificial Sequence
  source: /note="Description of Artificial Sequence: Synthetic oligonucleotide"
  source: /note="RNA/Antisense Oligonucleotide"
aaggaaga

SEQ ID NO: 1821 - RNA, 19 nt, Artificial Sequence
  source: /note="Description of Artificial Sequence: Synthetic oligonucleotide"
  source: /note="RNA"
  modified_base (11)..(11): 5-methyl modified nucleotide
  modified_base (16)..(16): 5-methyl modified nucleotide
aggaagauggcauuucuag

SEQ ID NO: 1822 - RNA, 18 nt, Artificial Sequence
  source: /note="Description of Artificial Sequence: Synthetic oligonucleotide"
  source: /note="RNA"
  modified_base (11)..(11): 5-methyl modified nucleotide
  modified_base (16)..(16): 5-methyl modified nucleotide
aggaagauggcauuucua

SEQ ID NO: 1823 - RNA, 17 nt, Artificial Sequence
  source: /note="Description of Artificial Sequence: Synthetic oligonucleotide"
  source: /note="RNA"
  modified_base (11)..(11): 5-methyl modified nucleotide
  modified_base (16)..(16): 5-methyl modified nucleotide
aggaagauggcauuucu

SEQ ID NO: 1824 - RNA, 16 nt, Artificial Sequence
  source: /note="Description of Artificial Sequence: Synthetic oligonucleotide"
  source: /note="RNA"
  modified_base (11)..(11): 5-methyl modified nucleotide
  modified_base (16)..(16): 5-methyl modified nucleotide
aggaagauggcauuuc

SEQ ID NO: 1825 - RNA, 15 nt, Artificial Sequence
  source: /note="Description of Artificial Sequence: Synthetic oligonucleotide"
  source: /note="RNA"
  modified_base (11)..(11): 5-methyl modified nucleotide
aggaagauggcauuu

SEQ ID NO: 1826 - RNA, 14 nt, Artificial Sequence
  source: /note="Description of Artificial Sequence: Synthetic oligonucleotide"
  source: /note="RNA"
  modified_base (11)..(11): 5-methyl modified nucleotide
aggaagauggcauu

SEQ ID NO: 1827 - RNA, 13 nt, Artificial Sequence
  source: /note="Description of Artificial Sequence: Synthetic oligonucleotide"
  source: /note="RNA"
  modified_base (11)..(11): 5-methyl modified nucleotide
aggaagauggcau

SEQ ID NO: 1828 - RNA, 12 nt, Artificial Sequence
  source: /note="Description of Artificial Sequence: Synthetic oligonucleotide"
  source: /note="RNA"
  modified_base (11)..(11): 5-methyl modified nucleotide
aggaagauggca

SEQ ID NO: 1829 - RNA, 10 nt, Artificial Sequence
  source: /note="Description of Artificial Sequence: Synthetic oligonucleotide"
  source: /note="RNA"
aggaagaugg

SEQ ID NO: 1830 - RNA, 9 nt, Artificial Sequence
  source: /note="Description of Artificial Sequence: Synthetic oligonucleotide"
  source: /note="RNA"
aggaagaug

SEQ ID NO: 1831 - RNA, 8 nt, Artificial Sequence
  source: /note="Description of Artificial Sequence: Synthetic oligonucleotide"
  source: /note="RNA"
aggaagau

SEQ ID NO: 1832 - RNA, 18 nt, Artificial Sequence
  source: /note="Description of Artificial Sequence: Synthetic oligonucleotide"
  source: /note="RNA"
  modified_base (10)..(10): 5-methyl modified nucleotide
  modified_base (15)..(15): 5-methyl modified nucleotide
ggaagauggcauuucuag

SEQ ID NO: 1833 - RNA, 17 nt, Artificial Sequence
  source: /note="Description of Artificial Sequence: Synthetic oligonucleotide"
  source: /note="RNA"
  modified_base (10)..(10): 5-methyl modified nucleotide
  modified_base (15)..(15): 5-methyl modified nucleotide
ggaagauggcauuucua

SEQ ID NO: 1834 - RNA, 16 nt, Artificial Sequence
  source: /note="Description of Artificial Sequence: Synthetic oligonucleotide"
  source: /note="RNA"
  modified_base (10)..(10): 5-methyl modified nucleotide
  modified_base (15)..(15): 5-methyl modified nucleotide
ggaagauggcauuucu

SEQ ID NO: 1835 - RNA, 15 nt, Artificial Sequence
  source: /note="Description of Artificial Sequence: Synthetic oligonucleotide"
  source: /note="RNA"
  modified_base (10)..(10): 5-methyl modified nucleotide
  modified_base (15)..(15): 5-methyl modified nucleotide
ggaagauggcauuuc

SEQ ID NO: 1836 - RNA, 14 nt, Artificial Sequence
  source: /note="Description of Artificial Sequence: Synthetic oligonucleotide"
  source: /note="RNA"
  modified_base (10)..(10): 5-methyl modified nucleotide
ggaagauggcauuu

SEQ ID NO: 1837 - RNA, 13 nt, Artificial Sequence
  source: /note="Description of Artificial Sequence: Synthetic oligonucleotide"
  source: /note="RNA"
  modified_base (10)..(10): 5-methyl modified nucleotide
ggaagauggcauu

SEQ ID NO: 1838 - RNA, 12 nt, Artificial Sequence
  source: /note="Description of Artificial Sequence: Synthetic oligonucleotide"
  source: /note="RNA"
  modified_base (10)..(10): 5-methyl modified nucleotide
ggaagauggcau

SEQ ID NO: 1839 - RNA, 11 nt, Artificial Sequence
  source: /note="Description of Artificial Sequence: Synthetic oligonucleotide"
  source: /note="RNA"
  modified_base (10)..(10): 5-methyl modified nucleotide
ggaagauggca

SEQ ID NO: 1840 - RNA, 10 nt, Artificial Sequence
  source: /note="Description of Artificial Sequence: Synthetic oligonucleotide"
  source: /note="RNA"
  modified_base (10)..(10): 5-methyl modified nucleotide
ggaagauggc

SEQ ID NO: 1841 - RNA, 8 nt, Artificial Sequence
  source: /note="Description of Artificial Sequence: Synthetic oligonucleotide"
  source: /note="RNA"
ggaagaug

SEQ ID NO: 1842 - RNA, 17 nt, Artificial Sequence
  source: /note="Description of Artificial Sequence: Synthetic oligonucleotide"
  source: /note="RNA"
  modified_base (9)..(9): 5-methyl modified nucleotide
  modified_base (14)..(14): 5-methyl modified nucleotide
gaagauggcauuucuag

SEQ ID NO: 1843 - RNA, 16 nt, Artificial Sequence
  source: /note="Description of Artificial Sequence: Synthetic oligonucleotide"
  source: /note="RNA"
  modified_base (9)..(9): 5-methyl modified nucleotide
  modified_base (14)..(14): 5-methyl modified nucleotide
gaagauggcauuucua

SEQ ID NO: 1844 - RNA, 14 nt, Artificial Sequence
  source: /note="Description of Artificial Sequence: Synthetic oligonucleotide"
  source: /note="RNA"
  modified_base (9)..(9): 5-methyl modified nucleotide
  modified_base (14)..(14): 5-methyl modified nucleotide
gaagauggcauuuc

SEQ ID NO: 1845 - RNA, 13 nt, Artificial Sequence
  source: /note="Description of Artificial Sequence: Synthetic oligonucleotide"
  source: /note="RNA"
  modified_base (9)..(9): 5-methyl modified nucleotide
gaagauggcauuu

SEQ ID NO: 1846 - RNA, 12 nt, Artificial Sequence
  source: /note="Description of Artificial Sequence: Synthetic oligonucleotide"
  source: /note="RNA"
  modified_base (9)..(9): 5-methyl modified nucleotide
gaagauggcauu

SEQ ID NO: 1847 - RNA, 11 nt, Artificial Sequence
  source: /note="Description of Artificial Sequence: Synthetic oligonucleotide"
  source: /note="RNA"
  modified_base (9)..(9): 5-methyl modified nucleotide
gaagauggcau

SEQ ID NO: 1848 - RNA, 10 nt, Artificial Sequence
  source: /note="Description of Artificial Sequence: Synthetic oligonucleotide"
  source: /note="RNA"
  modified_base (9)..(9): 5-methyl modified nucleotide
gaagauggca

SEQ ID NO: 1849 - RNA, 9 nt, Artificial Sequence
  source: /note="Description of Artificial Sequence: Synthetic oligonucleotide"
  source: /note="RNA"
  modified_base (9)..(9): 5-methyl modified nucleotide
gaagauggc

SEQ ID NO: 1850 - RNA, 8 nt, Artificial Sequence
  source: /note="Description of Artificial Sequence: Synthetic oligonucleotide"
  source: /note="RNA"
gaagaugg

SEQ ID NO: 1851 - RNA, 16 nt, Artificial Sequence
  source: /note="Description of Artificial Sequence: Synthetic oligonucleotide"
  source: /note="RNA"
  modified_base (8)..(8): 5-methyl modified nucleotide
  modified_base (13)..(13): 5-methyl modified nucleotide
aagauggcauuucuag

SEQ ID NO: 1852 - RNA, 15 nt, Artificial Sequence
  source: /note="Description of Artificial Sequence: Synthetic oligonucleotide"
  source: /note="RNA"
  modified_base (8)..(8): 5-methyl modified nucleotide
  modified_base (13)..(13): 5-methyl modified nucleotide
aagauggcauuucua

SEQ ID NO: 1853 - RNA, 14 nt, Artificial Sequence
  source: /note="Description of Artificial Sequence: Synthetic oligonucleotide"
  source: /note="RNA"
  modified_base (8)..(8): 5-methyl modified nucleotide
  modified_base (13)..(13): 5-methyl modified nucleotide
aagauggcauuucu

SEQ ID NO: 1854 - RNA, 13 nt, Artificial Sequence
  source: /note="Description of Artificial Sequence: Synthetic oligonucleotide"
  source: /note="RNA"
  modified_base (8)..(8): 5-methyl modified nucleotide
  modified_base (13)..(13): 5-methyl modified nucleotide
aagauggcauuuc

SEQ ID NO: 1855 - RNA, 12 nt, Artificial Sequence
  source: /note="Description of Artificial Sequence: Synthetic oligonucleotide"
  source: /note="RNA"
  modified_base (8)..(8): 5-methyl modified nucleotide
aagauggcauuu

SEQ ID NO: 1856 - RNA, 11 nt, Artificial Sequence
  source: /note="Description of Artificial Sequence: Synthetic oligonucleotide"
  source: /note="RNA"
  modified_base (8)..(8): 5-methyl modified nucleotide
aagauggcauu

SEQ ID NO: 1857 - RNA, 10 nt, Artificial Sequence
  source: /note="Description of Artificial Sequence: Synthetic oligonucleotide"
  source: /note="RNA"
  modified_base (8)..(8): 5-methyl modified nucleotide
aagauggcau

SEQ ID NO: 1858 - RNA, 9 nt, Artificial Sequence
  source: /note="Description of Artificial Sequence: Synthetic oligonucleotide"
  source: /note="RNA"
  modified_base (8)..(8): 5-methyl modified nucleotide
aagauggca

SEQ ID NO: 1859 - RNA, 8 nt, Artificial Sequence
  source: /note="Description of Artificial Sequence: Synthetic oligonucleotide"
  source: /note="RNA"
  modified_base (8)..(8): 5-methyl modified nucleotide
aagauggc

SEQ ID NO: 1860 - RNA, 15 nt, Artificial Sequence
  source: /note="Description of Artificial Sequence: Synthetic oligonucleotide"
  source: /note="RNA"
  modified_base (7)..(7): 5-methyl modified nucleotide
  modified_base (12)..(12): 5-methyl modified nucleotide
agauggcauuucuag

SEQ ID NO: 1861 - RNA, 14 nt, Artificial Sequence
  source: /note="Description of Artificial Sequence: Synthetic oligonucleotide"
  source: /note="RNA"
  modified_base (7)..(7): 5-methyl modified nucleotide
  modified_base (12)..(12): 5-methyl modified nucleotide
agauggcauuucua

SEQ ID NO: 1862 - RNA, 13 nt, Artificial Sequence
  source: /note="Description of Artificial Sequence: Synthetic oligonucleotide"
  source: /note="RNA"
  modified_base (7)..(7): 5-methyl modified nucleotide
  modified_base (12)..(12): 5-methyl modified nucleotide
agauggcauuucu

SEQ ID NO: 1863 - RNA, 12 nt, Artificial Sequence
  source: /note="Description of Artificial Sequence: Synthetic oligonucleotide"
  source: /note="RNA"
  modified_base (7)..(7): 5-methyl modified nucleotide
  modified_base (12)..(12): 5-methyl modified nucleotide
agauggcauuuc

SEQ ID NO: 1864 - RNA, 11 nt, Artificial Sequence
  source: /note="Description of Artificial Sequence: Synthetic oligonucleotide"
  source: /note="RNA"
  modified_base (7)..(7): 5-methyl modified nucleotide
agauggcauuu

SEQ ID NO: 1865 - RNA, 10 nt, Artificial Sequence
  source: /note="Description of Artificial Sequence: Synthetic oligonucleotide"
  source: /note="RNA"
  modified_base (7)..(7): 5-methyl modified nucleotide
agauggcauu

SEQ ID NO: 1866 - RNA, 9 nt, Artificial Sequence
  source: /note="Description of Artificial Sequence: Synthetic oligonucleotide"
  source: /note="RNA"
  modified_base (7)..(7): 5-methyl modified nucleotide
agauggcau

SEQ ID NO: 1867 - RNA, 8 nt, Artificial Sequence
  source: /note="Description of Artificial Sequence: Synthetic oligonucleotide"
  source: /note="RNA"
  modified_base (7)..(7): 5-methyl modified nucleotide
agauggca

SEQ ID NO: 1868 - RNA, 30 nt, Artificial Sequence; identical to SEQ ID NO: 284
  source: /note="Description of Artificial Sequence: Synthetic oligonucleotide"
  source: /note="RNA"
  modified_base (1)..(1): 5-methyl modified nucleotide
  modified_base (3)..(3): 5-methyl modified nucleotide
  modified_base (4)..(4): 5-methyl modified nucleotide
  modified_base (7)..(7): 5-methyl modified nucleotide
  modified_base (10)..(10): 5-methyl modified nucleotide
  modified_base (22)..(22): 5-methyl modified nucleotide
  modified_base (27)..(27): 5-methyl modified nucleotide

SEQ ID NO: 1869 - RNA, 29 nt, Artificial Sequence
  source: /note="Description of Artificial Sequence: Synthetic oligonucleotide"
  source: /note="RNA"
  modified_base (1)..(1): 5-methyl modified nucleotide
  modified_base (3)..(3): 5-methyl modified nucleotide
  modified_base (4)..(4): 5-methyl modified nucleotide
  modified_base (7)..(7): 5-methyl modified nucleotide
  modified_base (10)..(10): 5-methyl modified nucleotide
  modified_base (22)..(22): 5-methyl modified nucleotide
  modified_base (27)..(27): 5-methyl modified nucleotide
cuccaacaucaaggaagauggcauuucua

SEQ ID NO: 1870 - RNA, 28 nt, Artificial Sequence
  source: /note="Description of Artificial Sequence: Synthetic oligonucleotide"
  source: /note="RNA"
  modified_base (1)..(1): 5-methyl modified nucleotide
  modified_base (3)..(3): 5-methyl modified nucleotide
  modified_base (4)..(4): 5-methyl modified nucleotide
  modified_base (7)..(7): 5-methyl modified nucleotide
  modified_base (10)..(10): 5-methyl modified nucleotide
  modified_base (22)..(22): 5-methyl modified nucleotide
  modified_base (27)..(27): 5-methyl modified nucleotide
cuccaacaucaaggaagauggcauuucu

SEQ ID NO: 1871 - RNA, 27 nt, Artificial Sequence
  source: /note="Description of Artificial Sequence: Synthetic oligonucleotide"
  source: /note="RNA"
  modified_base (1)..(1): 5-methyl modified nucleotide
  modified_base (3)..(3): 5-methyl modified nucleotide
  modified_base (4)..(4): 5-methyl modified nucleotide
  modified_base (7)..(7): 5-methyl modified nucleotide
  modified_base (10)..(10): 5-methyl modified nucleotide
  modified_base (22)..(22): 5-methyl modified nucleotide
  modified_base (27)..(27): 5-methyl modified nucleotide
cuccaacaucaaggaagauggcauuuc

SEQ ID NO: 1872 - RNA, 26 nt, Artificial Sequence
  source: /note="Description of Artificial Sequence: Synthetic oligonucleotide"
  source: /note="RNA"
  modified_base (1)..(1): 5-methyl modified nucleotide
  modified_base (3)..(3): 5-methyl modified nucleotide
  modified_base (4)..(4): 5-methyl modified nucleotide
  modified_base (7)..(7): 5-methyl modified nucleotide
  modified_base (10)..(10): 5-methyl modified nucleotide
  modified_base (22)..(22): 5-methyl modified nucleotide
cuccaacaucaaggaagauggcauuu

SEQ ID NO: 1873 - RNA, 25 nt, Artificial Sequence
  source: /note="Description of Artificial Sequence: Synthetic oligonucleotide"
  source: /note="RNA"
  modified_base (1)..(1): 5-methyl modified nucleotide
  modified_base (3)..(3): 5-methyl modified nucleotide
  modified_base (4)..(4): 5-methyl modified nucleotide
  modified_base (7)..(7): 5-methyl modified nucleotide
  modified_base (10)..(10): 5-methyl modified nucleotide
  modified_base (22)..(22): 5-methyl modified nucleotide
cuccaacaucaaggaagauggcauu

SEQ ID NO: 1874 - RNA, 24 nt, Artificial Sequence
  source: /note="Description of Artificial Sequence: Synthetic oligonucleotide"
  source: /note="RNA"
  modified_base (1)..(1): 5-methyl modified nucleotide
  modified_base (3)..(3): 5-methyl modified nucleotide
  modified_base (4)..(4): 5-methyl modified nucleotide
  modified_base (7)..(7): 5-methyl modified nucleotide
  modified_base (10)..(10): 5-methyl modified nucleotide
  modified_base (22)..(22): 5-methyl modified nucleotide
cuccaacaucaaggaagauggcau

SEQ ID NO: 1875 - RNA, 23 nt, Artificial Sequence
  source: /note="Description of Artificial Sequence: Synthetic oligonucleotide"
  source: /note="RNA"
  modified_base (1)..(1): 5-methyl modified nucleotide
  modified_base (3)..(3): 5-methyl modified nucleotide
  modified_base (4)..(4): 5-methyl modified nucleotide
  modified_base (7)..(7): 5-methyl modified nucleotide
  modified_base (10)..(10): 5-methyl modified nucleotide
  modified_base (22)..(22): 5-methyl modified nucleotide
cuccaacaucaaggaagauggca

SEQ ID NO: 1876 - RNA, 22 nt, Artificial Sequence
  source: /note="Description of Artificial Sequence: Synthetic oligonucleotide"
  source: /note="RNA"
  modified_base (1)..(1): 5-methyl modified nucleotide
  modified_base (3)..(3): 5-methyl modified nucleotide
  modified_base (4)..(4): 5-methyl modified nucleotide
  modified_base (7)..(7): 5-methyl modified nucleotide
  modified_base (10)..(10): 5-methyl modified nucleotide
  modified_base (22)..(22): 5-methyl modified nucleotide
cuccaacaucaaggaagauggc

SEQ ID NO: 1877 - RNA, 21 nt, Artificial Sequence
  source: /note="Description of Artificial Sequence: Synthetic oligonucleotide"
  source: /note="RNA"
  modified_base (1)..(1): 5-methyl modified nucleotide
  modified_base (3)..(3): 5-methyl modified nucleotide
  modified_base (4)..(4): 5-methyl modified nucleotide
  modified_base (7)..(7): 5-methyl modified nucleotide
  modified_base (10)..(10): 5-methyl modified nucleotide
cuccaacaucaaggaagaugg

SEQ ID NO: 1878 - RNA, 20 nt, Artificial Sequence
  source: /note="Description of Artificial Sequence: Synthetic oligonucleotide"
  source: /note="RNA"
  modified_base (1)..(1): 5-methyl modified nucleotide
  modified_base (3)..(3): 5-methyl modified nucleotide
  modified_base (4)..(4): 5-methyl modified nucleotide
  modified_base (7)..(7): 5-methyl modified nucleotide
  modified_base (10)..(10): 5-methyl modified nucleotide
cuccaacaucaaggaagaug

SEQ ID NO: 1879 - RNA, 19 nt, Artificial Sequence
  source: /note="Description of Artificial Sequence: Synthetic oligonucleotide"
  source: /note="RNA"
  modified_base (1)..(1): 5-methyl modified nucleotide
  modified_base (3)..(3): 5-methyl modified nucleotide
  modified_base (4)..(4): 5-methyl modified nucleotide
  modified_base (7)..(7): 5-methyl modified nucleotide
  modified_base (10)..(10): 5-methyl modified nucleotide
cuccaacaucaaggaagau

SEQ ID NO: 1880 - RNA, 18 nt, Artificial Sequence
  source: /note="Description of Artificial Sequence: Synthetic oligonucleotide"
  source: /note="RNA"
  modified_base (1)..(1): 5-methyl modified nucleotide
  modified_base (3)..(3): 5-methyl modified nucleotide
  modified_base (4)..(4): 5-methyl modified nucleotide
  modified_base (7)..(7): 5-methyl modified nucleotide
  modified_base (10)..(10): 5-methyl modified nucleotide
cuccaacaucaaggaaga

SEQ ID NO: 1881 - RNA, 17 nt, Artificial Sequence
  source: /note="Description of Artificial Sequence: Synthetic oligonucleotide"
  source: /note="RNA"
  modified_base (1)..(1): 5-methyl modified nucleotide
  modified_base (3)..(3): 5-methyl modified nucleotide
  modified_base (4)..(4): 5-methyl modified nucleotide
  modified_base (7)..(7): 5-methyl modified nucleotide
  modified_base (10)..(10): 5-methyl modified nucleotide
cuccaacaucaaggaag

SEQ ID NO: 1882 - RNA, 29 nt, Artificial Sequence
  source: /note="Description of Artificial Sequence: Synthetic oligonucleotide"
  source: /note="RNA"
  modified_base (2)..(2): 5-methyl modified nucleotide
  modified_base (3)..(3): 5-methyl modified nucleotide
  modified_base (6)..(6): 5-methyl modified nucleotide
  modified_base (9)..(9): 5-methyl modified nucleotide
  modified_base (21)..(21): 5-methyl modified nucleotide
  modified_base (26)..(26): 5-methyl modified nucleotide
uccaacaucaaggaagauggcauuucuag

SEQ ID NO: 1883 - RNA, 28 nt, Artificial Sequence
  source: /note="Description of Artificial Sequence: Synthetic oligonucleotide"
  source: /note="RNA"
  modified_base (2)..(2): 5-methyl modified nucleotide
  modified_base (3)..(3): 5-methyl modified nucleotide
  modified_base (6)..(6): 5-methyl modified nucleotide
  modified_base (9)..(9): 5-methyl modified nucleotide
  modified_base (21)..(21): 5-methyl modified nucleotide
  modified_base (26)..(26): 5-methyl modified nucleotide
uccaacaucaaggaagauggcauuucua

SEQ ID NO: 1884 - RNA, 27 nt, Artificial Sequence
  source: /note="Description of Artificial Sequence: Synthetic oligonucleotide"
  source: /note="RNA"
  modified_base (2)..(2): 5-methyl modified nucleotide
  modified_base (3)..(3): 5-methyl modified nucleotide
  modified_base (6)..(6): 5-methyl modified nucleotide
  modified_base (9)..(9): 5-methyl modified nucleotide
  modified_base (21)..(21): 5-methyl modified nucleotide
  modified_base (26)..(26): 5-methyl modified nucleotide
uccaacaucaaggaagauggcauuucu

SEQ ID NO: 1885 - RNA, 26 nt, Artificial Sequence
  source: /note="Description of Artificial Sequence: Synthetic oligonucleotide"
  source: /note="RNA"
  modified_base (2)..(2): 5-methyl modified nucleotide
  modified_base (3)..(3): 5-methyl modified nucleotide
  modified_base (6)..(6): 5-methyl modified nucleotide
  modified_base (9)..(9): 5-methyl modified nucleotide
  modified_base (21)..(21): 5-methyl modified nucleotide
  modified_base (26)..(26): 5-methyl modified nucleotide
uccaacaucaaggaagauggcauuuc

SEQ ID NO: 1886 - RNA, 25 nt, Artificial Sequence
  source: /note="Description of Artificial Sequence: Synthetic oligonucleotide"
  source: /note="RNA"
  modified_base (2)..(2): 5-methyl modified nucleotide
  modified_base (3)..(3): 5-methyl modified nucleotide
  modified_base (6)..(6): 5-methyl modified nucleotide
  modified_base (9)..(9): 5-methyl modified nucleotide
  modified_base (21)..(21): 5-methyl modified nucleotide
uccaacaucaaggaagauggcauuu

SEQ ID NO: 1887 - RNA, 24 nt, Artificial Sequence
  source: /note="Description of Artificial Sequence: Synthetic oligonucleotide"
  source: /note="RNA"
  modified_base (2)..(2): 5-methyl modified nucleotide
  modified_base (3)..(3): 5-methyl modified nucleotide
  modified_base (6)..(6): 5-methyl modified nucleotide
  modified_base (9)..(9): 5-methyl modified nucleotide
  modified_base (21)..(21): 5-methyl modified nucleotide
uccaacaucaaggaagauggcauu

SEQ ID NO: 1888 - RNA, 23 nt, Artificial Sequence
  source: /note="Description of Artificial Sequence: Synthetic oligonucleotide"
  source: /note="RNA"
  modified_base (2)..(2): 5-methyl modified nucleotide
  modified_base (3)..(3): 5-methyl modified nucleotide
  modified_base (6)..(6): 5-methyl modified nucleotide
  modified_base (9)..(9): 5-methyl modified nucleotide
  modified_base (21)..(21): 5-methyl modified nucleotide
uccaacaucaaggaagauggcau

SEQ ID NO: 1889 - RNA, 22 nt, Artificial Sequence
  source: /note="Description of Artificial Sequence: Synthetic oligonucleotide"
  source: /note="RNA"
  modified_base (2)..(2): 5-methyl modified nucleotide
  modified_base (3)..(3): 5-methyl modified nucleotide
  modified_base (6)..(6): 5-methyl modified nucleotide
  modified_base (9)..(9): 5-methyl modified nucleotide
  modified_base (21)..(21): 5-methyl modified nucleotide
uccaacaucaaggaagauggca

SEQ ID NO: 1890 - RNA, 21 nt, Artificial Sequence
  source: /note="Description of Artificial Sequence: Synthetic oligonucleotide"
  source: /note="RNA"
  modified_base (2)..(2): 5-methyl modified nucleotide
  modified_base (3)..(3): 5-methyl modified nucleotide
  modified_base (6)..(6): 5-methyl modified nucleotide
  modified_base (9)..(9): 5-methyl modified nucleotide
  modified_base (21)..(21): 5-methyl modified nucleotide
uccaacaucaaggaagauggc

SEQ ID NO: 1891 - RNA, 20 nt, Artificial Sequence
  source: /note="Description of Artificial Sequence: Synthetic oligonucleotide"
  source: /note="RNA"
  modified_base (2)..(2): 5-methyl modified nucleotide
  modified_base (3)..(3): 5-methyl modified nucleotide
  modified_base (6)..(6): 5-methyl modified nucleotide
  modified_base (9)..(9): 5-methyl modified nucleotide
uccaacaucaaggaagaugg

SEQ ID NO: 1892 - RNA, 19 nt, Artificial Sequence
  source: /note="Description of Artificial Sequence: Synthetic oligonucleotide"
  source: /note="RNA"
  modified_base (2)..(2): 5-methyl modified nucleotide
  modified_base (3)..(3): 5-methyl modified nucleotide
  modified_base (6)..(6): 5-methyl modified nucleotide
  modified_base (9)..(9): 5-methyl modified nucleotide
uccaacaucaaggaagaug

SEQ ID NO: 1893 - RNA, 18 nt, Artificial Sequence
  source: /note="Description of Artificial Sequence: Synthetic oligonucleotide"
  source: /note="RNA"
  modified_base (2)..(2): 5-methyl modified nucleotide
  modified_base (3)..(3): 5-methyl modified nucleotide
  modified_base (6)..(6): 5-methyl modified nucleotide
  modified_base (9)..(9): 5-methyl modified nucleotide
uccaacaucaaggaagau

SEQ ID NO: 1894 - RNA, 17 nt, Artificial Sequence
  source: /note="Description of Artificial Sequence: Synthetic oligonucleotide"
  source: /note="RNA"
  modified_base (2)..(2): 5-methyl modified nucleotide
  modified_base (3)..(3): 5-methyl modified nucleotide
  modified_base (6)..(6): 5-methyl modified nucleotide
  modified_base (9)..(9): 5-methyl modified nucleotide
uccaacaucaaggaaga

SEQ ID NO: 1895 - RNA, 16 nt, Artificial Sequence
  source: /note="Description of Artificial Sequence: Synthetic oligonucleotide"
  source: /note="RNA"
  modified_base (2)..(2): 5-methyl modified nucleotide
  modified_base (3)..(3): 5-methyl modified nucleotide
  modified_base (6)..(6): 5-methyl modified nucleotide
  modified_base (9)..(9): 5-methyl modified nucleotide
uccaacaucaaggaag

SEQ ID NO: 1896 - RNA, 28 nt, Artificial Sequence
  source: /note="Description of Artificial Sequence: Synthetic oligonucleotide"
  source: /note="RNA"
  modified_base (1)..(1): 5-methyl modified nucleotide
  modified_base (2)..(2): 5-methyl modified nucleotide
  modified_base (5)..(5): 5-methyl modified nucleotide
  modified_base (8)..(8): 5-methyl modified nucleotide
  modified_base (20)..(20): 5-methyl modified nucleotide
  modified_base (25)..(25): 5-methyl modified nucleotide
ccaacaucaaggaagauggcauuucuag

SEQ ID NO: 1897 - RNA, 27 nt, Artificial Sequence
  source: /note="Description of Artificial Sequence: Synthetic oligonucleotide"
  source: /note="RNA"
  modified_base (1)..(1): 5-methyl modified nucleotide
  modified_base (2)..(2): 5-methyl modified nucleotide
  modified_base (5)..(5): 5-methyl modified nucleotide
  modified_base (8)..(8): 5-methyl modified nucleotide
  modified_base (20)..(20): 5-methyl modified nucleotide
  modified_base (25)..(25): 5-methyl modified nucleotide
ccaacaucaaggaagauggcauuucua

SEQ ID NO: 1898 - RNA, 26 nt, Artificial Sequence
  source: /note="Description of Artificial Sequence: Synthetic oligonucleotide"
  source: /note="RNA"
  modified_base (1)..(1): 5-methyl modified nucleotide
  modified_base (2)..(2): 5-methyl modified nucleotide
  modified_base (5)..(5): 5-methyl modified nucleotide
  modified_base (8)..(8): 5-methyl modified nucleotide
  modified_base (20)..(20): 5-methyl modified nucleotide
  modified_base (25)..(25): 5-methyl modified nucleotide
ccaacaucaaggaagauggcauuucu

SEQ ID NO: 1899 - RNA, 25 nt, Artificial Sequence
  source: /note="Description of Artificial Sequence: Synthetic oligonucleotide"
  source: /note="RNA"
  modified_base (1)..(1): 5-methyl modified nucleotide
  modified_base (2)..(2): 5-methyl modified nucleotide
  modified_base (5)..(5): 5-methyl modified nucleotide
  modified_base (8)..(8): 5-methyl modified nucleotide
  modified_base (20)..(20): 5-methyl modified nucleotide
  modified_base (25)..(25): 5-methyl modified nucleotide
ccaacaucaaggaagauggcauuuc

SEQ ID NO: 1900 - RNA, 24 nt, Artificial Sequence
  source: /note="Description of Artificial Sequence: Synthetic oligonucleotide"
  source: /note="RNA"
  modified_base (1)..(1): 5-methyl modified nucleotide
  modified_base (2)..(2): 5-methyl modified nucleotide
  modified_base (5)..(5): 5-methyl modified nucleotide
  modified_base (8)..(8): 5-methyl modified nucleotide
  modified_base (20)..(20): 5-methyl modified nucleotide
ccaacaucaaggaagauggcauuu

SEQ ID NO: 1901 - RNA, 23 nt, Artificial Sequence
  source: /note="Description of Artificial Sequence: Synthetic oligonucleotide"
  source: /note="RNA"
  modified_base (1)..(1): 5-methyl modified nucleotide
  modified_base (2)..(2): 5-methyl modified nucleotide
  modified_base (5)..(5): 5-methyl modified nucleotide
  modified_base (8)..(8): 5-methyl modified nucleotide
  modified_base (20)..(20): 5-methyl modified nucleotide
ccaacaucaaggaagauggcauu

SEQ ID NO: 1902 - RNA, 22 nt, Artificial Sequence
  source: /note="Description of Artificial Sequence: Synthetic oligonucleotide"
  source: /note="RNA"
  modified_base (1)..(1): 5-methyl modified nucleotide
  modified_base (2)..(2): 5-methyl modified nucleotide
  modified_base (5)..(5): 5-methyl modified nucleotide
  modified_base (8)..(8): 5-methyl modified nucleotide
  modified_base (20)..(20): 5-methyl modified nucleotide
ccaacaucaaggaagauggcau

SEQ ID NO: 1903 - RNA, 21 nt, Artificial Sequence
  source: /note="Description of Artificial Sequence: Synthetic oligonucleotide"
  source: /note="RNA"
  modified_base (1)..(1): 5-methyl modified nucleotide
  modified_base (2)..(2): 5-methyl modified nucleotide
  modified_base (5)..(5): 5-methyl modified nucleotide
  modified_base (8)..(8): 5-methyl modified nucleotide
  modified_base (20)..(20): 5-methyl modified nucleotide
ccaacaucaaggaagauggca

SEQ ID NO: 1904 - RNA, 20 nt, Artificial Sequence
  source: /note="Description of Artificial Sequence: Synthetic oligonucleotide"
  source: /note="RNA"
  modified_base (1)..(1): 5-methyl modified nucleotide
  modified_base (2)..(2): 5-methyl modified nucleotide
  modified_base (5)..(5): 5-methyl modified nucleotide
  modified_base (8)..(8): 5-methyl modified nucleotide
  modified_base (20)..(20): 5-methyl modified nucleotide
ccaacaucaaggaagauggc

SEQ ID NO: 1905 - RNA, 19 nt, Artificial Sequence
  source: /note="Description of Artificial Sequence: Synthetic oligonucleotide"
  source: /note="RNA"
  modified_base (1)..(1): 5-methyl modified nucleotide
  modified_base (2)..(2): 5-methyl modified nucleotide
  modified_base (5)..(5): 5-methyl modified nucleotide
  modified_base (8)..(8): 5-methyl modified nucleotide
ccaacaucaaggaagaugg

SEQ ID NO: 1906 - RNA, 18 nt, Artificial Sequence
  source: /note="Description of Artificial Sequence: Synthetic oligonucleotide"
  source: /note="RNA"
  modified_base (1)..(1): 5-methyl modified nucleotide
  modified_base (2)..(2): 5-methyl modified nucleotide
  modified_base (5)..(5): 5-methyl modified nucleotide
  modified_base (8)..(8): 5-methyl modified nucleotide
ccaacaucaaggaagaug

SEQ ID NO: 1907 - RNA, 17 nt, Artificial Sequence
  source: /note="Description of Artificial Sequence: Synthetic oligonucleotide"
  source: /note="RNA"
  modified_base (1)..(1): 5-methyl modified nucleotide
  modified_base (2)..(2): 5-methyl modified nucleotide
  modified_base (5)..(5): 5-methyl modified nucleotide
  modified_base (8)..(8): 5-methyl modified nucleotide
ccaacaucaaggaagau

SEQ ID NO: 1908 - RNA, 16 nt, Artificial Sequence
  source: /note="Description of Artificial Sequence: Synthetic oligonucleotide"
  source: /note="RNA"
  modified_base (1)..(1): 5-methyl modified nucleotide
  modified_base (2)..(2): 5-methyl modified nucleotide
  modified_base (5)..(5): 5-methyl modified nucleotide
  modified_base (8)..(8): 5-methyl modified nucleotide
ccaacaucaaggaaga

SEQ ID NO: 1909 - RNA, 15 nt, Artificial Sequence
  source: /note="Description of Artificial Sequence: Synthetic oligonucleotide"
  source: /note="RNA"
  modified_base (1)..(1): 5-methyl modified nucleotide
  modified_base (2)..(2): 5-methyl modified nucleotide
  modified_base (5)..(5): 5-methyl modified nucleotide
  modified_base (8)..(8): 5-methyl modified nucleotide
ccaacaucaaggaag

SEQ ID NO: 1910 - RNA, 27 nt, Artificial Sequence
  source: /note="Description of Artificial Sequence: Synthetic oligonucleotide"
  source: /note="RNA"
  modified_base (1)..(1): 5-methyl modified nucleotide
  modified_base (4)..(4): 5-methyl modified nucleotide
  modified_base (7)..(7): 5-methyl modified nucleotide
  modified_base (19)..(19): 5-methyl modified nucleotide
  modified_base (24)..(24): 5-methyl modified nucleotide
caacaucaaggaagauggcauuucuag

SEQ ID NO: 1911 - RNA, 26 nt, Artificial Sequence
  source: /note="Description of Artificial Sequence: Synthetic oligonucleotide"
  source: /note="RNA"
  modified_base (1)..(1): 5-methyl modified nucleotide
  modified_base (4)..(4): 5-methyl modified nucleotide
  modified_base (7)..(7): 5-methyl modified nucleotide
  modified_base (19)..(19): 5-methyl modified nucleotide
  modified_base (24)..(24): 5-methyl modified nucleotide
caacaucaaggaagauggcauuucua

SEQ ID NO: 1912 - RNA, 25 nt, Artificial Sequence
  source: /note="Description of Artificial Sequence: Synthetic oligonucleotide"
  source: /note="RNA"
  modified_base (1)..(1): 5-methyl modified nucleotide
  modified_base (4)..(4): 5-methyl modified nucleotide
  modified_base (7)..(7): 5-methyl modified nucleotide
  modified_base (19)..(19): 5-methyl modified nucleotide
  modified_base (24)..(24): 5-methyl modified nucleotide
caacaucaaggaagauggcauuucu

SEQ ID NO: 1913 - RNA, 24 nt, Artificial Sequence
  source: /note="Description of Artificial Sequence: Synthetic oligonucleotide"
  source: /note="RNA"
  modified_base (1)..(1): 5-methyl modified nucleotide
  modified_base (4)..(4): 5-methyl modified nucleotide
  modified_base (7)..(7): 5-methyl modified nucleotide
  modified_base (19)..(19): 5-methyl modified nucleotide
  modified_base (24)..(24): 5-methyl modified nucleotide
caacaucaaggaagauggcauuuc

SEQ ID NO: 1914 - RNA, 23 nt, Artificial Sequence
  source: /note="Description of Artificial Sequence: Synthetic oligonucleotide"
  source: /note="RNA"
  modified_base (1)..(1): 5-methyl modified nucleotide
  modified_base (4)..(4): 5-methyl modified nucleotide
  modified_base (7)..(7): 5-methyl modified nucleotide
  modified_base (19)..(19): 5-methyl modified nucleotide
caacaucaaggaagauggcauuu

SEQ ID NO: 1915 - RNA, 22 nt, Artificial Sequence
  source: /note="Description of Artificial Sequence: Synthetic oligonucleotide"
  source: /note="RNA"
  modified_base (1)..(1): 5-methyl modified nucleotide
  modified_base (4)..(4): 5-methyl modified nucleotide
  modified_base (7)..(7): 5-methyl modified nucleotide
  modified_base (19)..(19): 5-methyl modified nucleotide
caacaucaaggaagauggcauu

SEQ ID NO: 1916 - RNA, 21 nt, Artificial Sequence
  source: /note="Description of Artificial Sequence: Synthetic oligonucleotide"
  source: /note="RNA"
  modified_base (1)..(1): 5-methyl modified nucleotide
  modified_base (4)..(4): 5-methyl modified nucleotide
  modified_base (7)..(7): 5-methyl modified nucleotide
  modified_base (19)..(19): 5-methyl modified nucleotide
caacaucaaggaagauggcau

SEQ ID NO: 1917 - RNA, 20 nt, Artificial Sequence
  source: /note="Description of Artificial Sequence: Synthetic oligonucleotide"
  source: /note="Antisense Oligonucleotide"
  modified_base (1)..(1): 5-methyl modified nucleotide
  modified_base (4)..(4): 5-methyl modified nucleotide
  modified_base (7)..(7): 5-methyl modified nucleotide
  modified_base (19)..(19): 5-methyl modified nucleotide
caacaucaaggaagauggca

SEQ ID NO: 1918 - RNA, 19 nt, Artificial Sequence
  source: /note="Description of Artificial Sequence: Synthetic oligonucleotide"
  source: /note="Antisense Oligonucleotide"
  modified_base (1)..(1): 5-methyl modified nucleotide
  modified_base (4)..(4): 5-methyl modified nucleotide
  modified_base (7)..(7): 5-methyl modified nucleotide
  modified_base (19)..(19): 5-methyl modified nucleotide
caacaucaaggaagauggc

SEQ ID NO: 1919 - RNA, 18 nt, Artificial Sequence
  source: /note="Description of Artificial Sequence: Synthetic oligonucleotide"
  source: /note="Antisense Oligonucleotide"
  modified_base (1)..(1): 5-methyl modified nucleotide
  modified_base (4)..(4): 5-methyl modified nucleotide
  modified_base (7)..(7): 5-methyl modified nucleotide
caacaucaaggaagaugg

SEQ ID NO: 1920 - RNA, 17 nt, Artificial Sequence
  source: /note="Description of Artificial Sequence: Synthetic oligonucleotide"
  source: /note="Antisense Oligonucleotide"
  modified_base (1)..(1): 5-methyl modified nucleotide
  modified_base (4)..(4): 5-methyl modified nucleotide
  modified_base (7)..(7): 5-methyl modified nucleotide
caacaucaaggaagaug

SEQ ID NO: 1921 - RNA, 16 nt, Artificial Sequence
  source: /note="Description of Artificial Sequence: Synthetic oligonucleotide"
  source: /note="RNA"
  modified_base (1)..(1): 5-methyl modified nucleotide
  modified_base (4)..(4): 5-methyl modified nucleotide
  modified_base (7)..(7): 5-methyl modified nucleotide
caacaucaaggaagau

SEQ ID NO: 1922 - RNA, 15 nt, Artificial Sequence
  source: /note="Description of Artificial Sequence: Synthetic oligonucleotide"
  source: /note="RNA"
  modified_base (1)..(1): 5-methyl modified nucleotide
  modified_base (4)..(4): 5-methyl modified nucleotide
  modified_base (7)..(7): 5-methyl modified nucleotide
caacaucaaggaaga

SEQ ID NO: 1923 - RNA, 14 nt, Artificial Sequence
  source: /note="Description of Artificial Sequence: Synthetic oligonucleotide"
  source: /note="RNA"
  modified_base (1)..(1): 5-methyl modified nucleotide
  modified_base (4)..(4): 5-methyl modified nucleotide
  modified_base (7)..(7): 5-methyl modified nucleotide
caacaucaaggaag

SEQ ID NO: 1924 - RNA, 26 nt, Artificial Sequence
  source: /note="Description of Artificial Sequence: Synthetic oligonucleotide"
  source: /note="RNA"
  modified_base (3)..(3): 5-methyl modified nucleotide
  modified_base (6)..(6): 5-methyl modified nucleotide
  modified_base (18)..(18): 5-methyl modified nucleotide
  modified_base (23)..(23): 5-methyl modified nucleotide
aacaucaaggaagauggcauuucuag

SEQ ID NO: 1925 - RNA, 25 nt, Artificial Sequence
  source: /note="Description of Artificial Sequence: Synthetic oligonucleotide"
  source: /note="RNA"
  modified_base (3)..(3): 5-methyl modified nucleotide
  modified_base (6)..(6): 5-methyl modified nucleotide
  modified_base (18)..(18): 5-methyl modified nucleotide
  modified_base (23)..(23): 5-methyl modified nucleotide
aacaucaaggaagauggcauuucua

SEQ ID NO: 1926 - RNA, 24 nt, Artificial Sequence
  source: /note="Description of Artificial Sequence: Synthetic oligonucleotide"
  source: /note="RNA"
  modified_base (3)..(3): 5-methyl modified nucleotide
  modified_base (6)..(6): 5-methyl modified nucleotide
  modified_base (18)..(18): 5-methyl modified nucleotide
  modified_base (23)..(23): 5-methyl modified nucleotide
aacaucaaggaagauggcauuucu

SEQ ID NO: 1927 - RNA, 23 nt, Artificial Sequence
  source: /note="Description of Artificial Sequence: Synthetic oligonucleotide"
  source: /note="RNA"
  modified_base (3)..(3): 5-methyl modified nucleotide
  modified_base (6)..(6): 5-methyl modified nucleotide
  modified_base (18)..(18): 5-methyl modified nucleotide
  modified_base (23)..(23): 5-methyl modified nucleotide
aacaucaaggaagauggcauuuc

SEQ ID NO: 1928 - RNA, 22 nt, Artificial Sequence
  source: /note="Description of Artificial Sequence: Synthetic oligonucleotide"
  source: /note="RNA"
  modified_base (3)..(3): 5-methyl modified nucleotide
  modified_base (6)..(6): 5-methyl modified nucleotide
  modified_base (18)..(18): 5-methyl modified nucleotide
aacaucaaggaagauggcauuu

SEQ ID NO: 1929 - RNA, 21 nt, Artificial Sequence
  source: /note="Description of Artificial Sequence: Synthetic oligonucleotide"
  source: /note="Antisense Oligonucleotide"
  modified_base (3)..(3): 5-methyl modified nucleotide
  modified_base (6)..(6): 5-methyl modified nucleotide
  modified_base (18)..(18): 5-methyl modified nucleotide
aacaucaaggaagauggcauu

SEQ ID NO: 1930 - RNA, 20 nt, Artificial Sequence
  source: /note="Description of Artificial Sequence: Synthetic oligonucleotide"
  source: /note="Antisense Oligonucleotide"
  modified_base (3)..(3): 5-methyl modified nucleotide
  modified_base (6)..(6): 5-methyl modified nucleotide
  modified_base (18)..(18): 5-methyl modified nucleotide
aacaucaaggaagauggcau

SEQ ID NO: 1931 - RNA, 19 nt, Artificial Sequence
  source: /note="Description of Artificial Sequence: Synthetic oligonucleotide"
  source: /note="Antisense Oligonucleotide"
  modified_base (3)..(3): 5-methyl modified nucleotide
  modified_base (6)..(6): 5-methyl modified nucleotide
  modified_base (18)..(18): 5-methyl modified nucleotide
aacaucaaggaagauggca

SEQ ID NO: 1932 - RNA, 18 nt, Artificial Sequence
  source: /note="Description of Artificial Sequence: Synthetic oligonucleotide"
  source: /note="RNA"
  modified_base (3)..(3): 5-methyl modified nucleotide
  modified_base (6)..(6): 5-methyl modified nucleotide
  modified_base (18)..(18): 5-methyl modified nucleotide
aacaucaaggaagauggc

SEQ ID NO: 1933 - RNA, 17 nt, Artificial Sequence
  source: /note="Description of Artificial Sequence: Synthetic oligonucleotide"
  source: /note="RNA"
  modified_base (3)..(3): 5-methyl modified nucleotide
  modified_base (6)..(6): 5-methyl modified nucleotide
aacaucaaggaagaugg

SEQ ID NO: 1934 - RNA, 16 nt, Artificial Sequence
  source: /note="Description of Artificial Sequence: Synthetic oligonucleotide"
  source: /note="RNA"
  modified_base (3)..(3): 5-methyl modified nucleotide
  modified_base (6)..(6): 5-methyl modified nucleotide
aacaucaaggaagaug

SEQ ID NO: 1935 - RNA, 15 nt, Artificial Sequence
  source: /note="Description of Artificial Sequence: Synthetic oligonucleotide"
  source: /note="RNA"
  modified_base (3)..(3): 5-methyl modified nucleotide
  modified_base (6)..(6): 5-methyl modified nucleotide
aacaucaaggaagau

SEQ ID NO: 1936 - RNA, 14 nt, Artificial Sequence
  source: /note="Description of Artificial Sequence: Synthetic oligonucleotide"
  source: /note="RNA"
  modified_base (3)..(3): 5-methyl modified nucleotide
  modified_base (6)..(6): 5-methyl modified nucleotide
aacaucaaggaaga

SEQ ID NO: 1937 - RNA, 13 nt, Artificial Sequence
  source: /note="Description of Artificial Sequence: Synthetic oligonucleotide"
  source: /note="RNA"
  modified_base (3)..(3): 5-methyl modified nucleotide
  modified_base (6)..(6): 5-methyl modified nucleotide
aacaucaaggaag

SEQ ID NO: 1938 - RNA, 25 nt, Artificial Sequence
  source: /note="Description of Artificial Sequence: Synthetic oligonucleotide"
  source: /note="RNA"
  modified_base (2)..(2): 5-methyl modified nucleotide
  modified_base (5)..(5): 5-methyl modified nucleotide
  modified_base (17)..(17): 5-methyl modified nucleotide
  modified_base (22)..(22): 5-methyl modified nucleotide
acaucaaggaagauggcauuucuag

SEQ ID NO: 1939 - RNA, 24 nt, Artificial Sequence
  source: /note="Description of Artificial Sequence: Synthetic oligonucleotide"
  source: /note="RNA"
  modified_base (2)..(2): 5-methyl modified nucleotide
  modified_base (5)..(5): 5-methyl modified nucleotide
  modified_base (17)..(17): 5-methyl modified nucleotide
  modified_base (22)..(22): 5-methyl modified nucleotide
acaucaaggaagauggcauuucua

SEQ ID NO: 1940 - RNA, 23 nt, Artificial Sequence
  source: /note="Description of Artificial Sequence: Synthetic oligonucleotide"
  source: /note="RNA"
  modified_base (2)..(2): 5-methyl modified nucleotide
  modified_base (5)..(5): 5-methyl modified nucleotide
  modified_base (17)..(17): 5-methyl modified nucleotide
  modified_base (22)..(22): 5-methyl modified nucleotide
acaucaaggaagauggcauuucu

SEQ ID NO: 1941 - RNA, 22 nt, Artificial Sequence
  source: /note="Description of Artificial Sequence: Synthetic oligonucleotide"
  source: /note="Antisense Oligonucleotide"
  modified_base (2)..(2): 5-methyl modified nucleotide
  modified_base (5)..(5): 5-methyl modified nucleotide
  modified_base (17)..(17): 5-methyl modified nucleotide
  modified_base (22)..(22): 5-methyl modified nucleotide
acaucaaggaagauggcauuuc

SEQ ID NO: 1942 - RNA, 21 nt, Artificial Sequence
  source: /note="Description of Artificial Sequence: Synthetic oligonucleotide"
  source: /note="RNA"
  modified_base (2)..(2): 5-methyl modified nucleotide
  modified_base (5)..(5): 5-methyl modified nucleotide
  modified_base (17)..(17): 5-methyl modified nucleotide
acaucaaggaagauggcauuu

SEQ ID NO: 1943 - RNA, 20 nt, Artificial Sequence
  source: /note="Description of Artificial Sequence: Synthetic oligonucleotide"
  source: /note="RNA"
  modified_base (2)..(2): 5-methyl modified nucleotide
  modified_base (5)..(5): 5-methyl modified nucleotide
  modified_base (17)..(17): 5-methyl modified nucleotide
acaucaaggaagauggcauu

SEQ ID NO: 1944 - RNA, 19 nt, Artificial Sequence
  source: /note="Description of Artificial Sequence: Synthetic oligonucleotide"
  source: /note="RNA"
  modified_base (2)..(2): 5-methyl modified nucleotide
  modified_base (5)..(5): 5-methyl modified nucleotide
  modified_base (17)..(17): 5-methyl modified nucleotide
acaucaaggaagauggcau

SEQ ID NO: 1945 - RNA, 18 nt, Artificial Sequence
  source: /note="Description of Artificial Sequence: Synthetic oligonucleotide"
  source: /note="RNA"
  modified_base (2)..(2): 5-methyl modified nucleotide
  modified_base (5)..(5): 5-methyl modified nucleotide
  modified_base (17)..(17): 5-methyl modified nucleotide
acaucaaggaagauggca

SEQ ID NO: 1946 - RNA, 17 nt, Artificial Sequence
  source: /note="Description of Artificial Sequence: Synthetic oligonucleotide"
  source: /note="RNA"
  modified_base (2)..(2): 5-methyl modified nucleotide
  modified_base (5)..(5): 5-methyl modified nucleotide
  modified_base (17)..(17): 5-methyl modified nucleotide
acaucaaggaagauggc

SEQ ID NO: 1947 - RNA, 16 nt, Artificial Sequence
  source: /note="Description of Artificial Sequence: Synthetic oligonucleotide"
  source: /note="RNA"
  modified_base (2)..(2): 5-methyl modified nucleotide
  modified_base (5)..(5): 5-methyl modified nucleotide
acaucaaggaagaugg

SEQ ID NO: 1948 - RNA, 15 nt, Artificial Sequence
  source: /note="Description of Artificial Sequence: Synthetic oligonucleotide"
  source: /note="RNA"
  modified_base (2)..(2): 5-methyl modified nucleotide
  modified_base (5)..(5): 5-methyl modified nucleotide
acaucaaggaagaug

SEQ ID NO: 1949 - RNA, 14 nt, Artificial Sequence
  source: /note="Description of Artificial Sequence: Synthetic oligonucleotide"
  source: /note="RNA"
  modified_base (2)..(2): 5-methyl modified nucleotide
  modified_base (5)..(5): 5-methyl modified nucleotide
acaucaaggaagau

SEQ ID NO: 1950 - RNA, 13 nt, Artificial Sequence
  source: /note="Description of Artificial Sequence: Synthetic oligonucleotide"
  source: /note="Antisense Oligonucleotide"
  modified_base (2)..(2): 5-methyl modified nucleotide
  modified_base (5)..(5): 5-methyl modified nucleotide
acaucaaggaaga

SEQ ID NO: 1951 - RNA, 12 nt, Artificial Sequence
  source: /note="Description of Artificial Sequence: Synthetic oligonucleotide"
  source: /note="RNA"
  modified_base (2)..(2): 5-methyl modified nucleotide
  modified_base (5)..(5): 5-methyl modified nucleotide
acaucaaggaag

SEQ ID NO: 1952 - RNA, 24 nt, Artificial Sequence
  source: /note="Description of Artificial Sequence: Synthetic oligonucleotide"
  source: /note="RNA"
  modified_base (1)..(1): 5-methyl modified nucleotide
  modified_base (4)..(4): 5-methyl modified nucleotide
  modified_base (16)..(16): 5-methyl modified nucleotide
  modified_base (21)..(21): 5-methyl modified nucleotide
caucaaggaagauggcauuucuag

SEQ ID NO: 1953 - RNA, 23 nt, Artificial Sequence
  source: /note="Description of Artificial Sequence: Synthetic oligonucleotide"
  source: /note="RNA"
  modified_base (1)..(1): 5-methyl modified nucleotide
  modified_base (4)..(4): 5-methyl modified nucleotide
  modified_base (16)..(16): 5-methyl modified nucleotide
  modified_base (21)..(21): 5-methyl modified nucleotide
caucaaggaagauggcauuucua

SEQ ID NO: 1954 - RNA, 22 nt, Artificial Sequence
  source: /note="Description of Artificial Sequence: Synthetic oligonucleotide"
  source: /note="RNA"
  modified_base (1)..(1): 5-methyl modified nucleotide
  modified_base (4)..(4): 5-methyl modified nucleotide
  modified_base (16)..(16): 5-methyl modified nucleotide
  modified_base (21)..(21): 5-methyl modified nucleotide
caucaaggaagauggcauuucu

SEQ ID NO: 1955 - RNA, 21 nt, Artificial Sequence
  source: /note="Description of Artificial Sequence: Synthetic oligonucleotide"
  source: /note="RNA"
  modified_base (1)..(1): 5-methyl modified nucleotide
  modified_base (4)..(4): 5-methyl modified nucleotide
  modified_base (16)..(16): 5-methyl modified nucleotide
  modified_base (21)..(21): 5-methyl modified nucleotide
caucaaggaagauggcauuuc

SEQ ID NO: 1956 - RNA, 20 nt, Artificial Sequence
  source: /note="Description of Artificial Sequence: Synthetic oligonucleotide"
  source: /note="RNA"
  modified_base (1)..(1): 5-methyl modified nucleotide
  modified_base (4)..(4): 5-methyl modified nucleotide
  modified_base (16)..(16): 5-methyl modified nucleotide
caucaaggaagauggcauuu

SEQ ID NO: 1957 - RNA, 19 nt, Artificial Sequence
  source: /note="Description of Artificial Sequence: Synthetic oligonucleotide"
  source: /note="RNA"
  modified_base (1)..(1): 5-methyl modified nucleotide
  modified_base (4)..(4): 5-methyl modified nucleotide
  modified_base (16)..(16): 5-methyl modified nucleotide
caucaaggaagauggcauu

SEQ ID NO: 1958 - RNA, 18 nt, Artificial Sequence
  source: /note="Description of Artificial Sequence: Synthetic oligonucleotide"
  source: /note="RNA"
  modified_base (1)..(1): 5-methyl modified nucleotide
  modified_base (4)..(4): 5-methyl modified nucleotide
  modified_base (16)..(16): 5-methyl modified nucleotide
caucaaggaagauggcau

SEQ ID NO: 1959 - RNA, 17 nt, Artificial Sequence
  source: /note="Description of Artificial Sequence: Synthetic oligonucleotide"
  source: /note="RNA"
  modified_base (1)..(1): 5-methyl modified nucleotide
  modified_base (4)..(4): 5-methyl modified nucleotide
  modified_base (16)..(16): 5-methyl modified nucleotide
caucaaggaagauggca

SEQ ID NO: 1960 - RNA, 16 nt, Artificial Sequence
  source: /note="Description of Artificial Sequence: Synthetic oligonucleotide"
  source: /note="RNA"
  modified_base (1)..(1): 5-methyl modified nucleotide
  modified_base (4)..(4): 5-methyl modified nucleotide
  modified_base (16)..(16): 5-methyl modified nucleotide
caucaaggaagauggc

SEQ ID NO: 1961 - RNA, 15 nt, Artificial Sequence
  source: /note="Description of Artificial Sequence: Synthetic oligonucleotide"
  source: /note="RNA"
  modified_base (1)..(1): 5-methyl modified nucleotide
  modified_base (4)..(4): 5-methyl modified nucleotide
caucaaggaagaugg

SEQ ID NO: 1962 - RNA, 14 nt, Artificial Sequence
  source: /note="Description of Artificial Sequence: Synthetic oligonucleotide"
  source: /note="RNA"
  modified_base (1)..(1): 5-methyl modified nucleotide
  modified_base (4)..(4): 5-methyl modified nucleotide
caucaaggaagaug

SEQ ID NO: 1963 - RNA, 13 nt, Artificial Sequence
  source: /note="Description of Artificial Sequence: Synthetic oligonucleotide"
  source: /note="RNA"
  modified_base (1)..(1): 5-methyl modified nucleotide
  modified_base (4)..(4): 5-methyl modified nucleotide
caucaaggaagau

SEQ ID NO: 1964 - RNA, 12 nt, Artificial Sequence
  source: /note="Description of Artificial Sequence: Synthetic oligonucleotide"
  source: /note="RNA"
  modified_base (1)..(1): 5-methyl modified nucleotide
  modified_base (4)..(4): 5-methyl modified nucleotide
caucaaggaaga

SEQ ID NO: 1965 - RNA, 11 nt, Artificial Sequence
  source: /note="Description of Artificial Sequence: Synthetic oligonucleotide"
  source: /note="RNA"
  modified_base (1)..(1): 5-methyl modified nucleotide
  modified_base (4)..(4): 5-methyl modified nucleotide
caucaaggaag

SEQ ID NO: 1966 - RNA, 23 nt, Artificial Sequence
  source: /note="Description of Artificial Sequence: Synthetic oligonucleotide"
  source: /note="RNA"
  modified_base (3)..(3): 5-methyl modified nucleotide
  modified_base (15)..(15): 5-methyl modified nucleotide
  modified_base (20)..(20): 5-methyl modified nucleotide
aucaaggaagauggcauuucuag

SEQ ID NO: 1967 - RNA, 22 nt, Artificial Sequence
  source: /note="Description of Artificial Sequence: Synthetic oligonucleotide"
  source: /note="RNA"
  modified_base (3)..(3): 5-methyl modified nucleotide
  modified_base (15)..(15): 5-methyl modified nucleotide
  modified_base (20)..(20): 5-methyl modified nucleotide
aucaaggaagauggcauuucua

SEQ ID NO: 1968 - RNA, 21 nt, Artificial Sequence
  source: /note="Description of Artificial Sequence: Synthetic oligonucleotide"
  source: /note="RNA"
  modified_base (3)..(3): 5-methyl modified nucleotide
  modified_base (15)..(15): 5-methyl modified nucleotide
  modified_base (20)..(20): 5-methyl modified nucleotide
aucaaggaagauggcauuucu

SEQ ID NO: 1969 - RNA, 20 nt, Artificial Sequence
  source: /note="Description of Artificial Sequence: Synthetic oligonucleotide"
  source: /note="RNA"
  modified_base (3)..(3): 5-methyl modified nucleotide
  modified_base (15)..(15): 5-methyl modified nucleotide
  modified_base (20)..(20): 5-methyl modified nucleotide
aucaaggaagauggcauuuc

SEQ ID NO: 1970 - RNA, 19 nt, Artificial Sequence
  source: /note="Description of Artificial Sequence: Synthetic oligonucleotide"
  source: /note="RNA"
  modified_base (3)..(3): 5-methyl modified nucleotide
  modified_base (15)..(15): 5-methyl modified nucleotide
aucaaggaagauggcauuu

SEQ ID NO: 1971 - RNA, 18 nt, Artificial Sequence
  source: /note="Description of Artificial Sequence: Synthetic oligonucleotide"
  source: /note="RNA"
  modified_base (3)..(3): 5-methyl modified nucleotide
  modified_base (15)..(15): 5-methyl modified nucleotide
aucaaggaagauggcauu

SEQ ID NO: 1972 - RNA, 17 nt, Artificial Sequence
  source: /note="Description of Artificial Sequence: Synthetic oligonucleotide"
  source: /note="RNA"
  modified_base (3)..(3): 5-methyl modified nucleotide
  modified_base (15)..(15): 5-methyl modified nucleotide
aucaaggaagauggcau

SEQ ID NO: 1973 - RNA, 16 nt, Artificial Sequence
  source: /note="Description of Artificial Sequence: Synthetic oligonucleotide"
  source: /note="RNA"
  modified_base (3)..(3): 5-methyl modified nucleotide
  modified_base (15)..(15): 5-methyl modified nucleotide
aucaaggaagauggca

SEQ ID NO: 1974 - RNA, 15 nt, Artificial Sequence
  source: /note="Description of Artificial Sequence: Synthetic oligonucleotide"
  source: /note="RNA"
  modified_base (3)..(3): 5-methyl modified nucleotide
  modified_base (15)..(15): 5-methyl modified nucleotide
aucaaggaagauggc

SEQ ID NO: 1975 - RNA, 14 nt, Artificial Sequence
  source: /note="Description of Artificial Sequence: Synthetic oligonucleotide"
  source: /note="RNA"
  modified_base (3)..(3): 5-methyl modified nucleotide
aucaaggaagaugg

SEQ ID NO: 1976 - RNA, 13 nt, Artificial Sequence
  source: /note="Description of Artificial Sequence: Synthetic oligonucleotide"
  source: /note="RNA"
  modified_base (3)..(3): 5-methyl modified nucleotide
aucaaggaagaug

SEQ ID NO: 1977 - RNA, 12 nt, Artificial Sequence
  source: /note="Description of Artificial Sequence: Synthetic oligonucleotide"
  source: /note="RNA"
  modified_base (3)..(3): 5-methyl modified nucleotide
aucaaggaagau

SEQ ID NO: 1978 - RNA, 11 nt, Artificial Sequence
  source: /note="Description of Artificial Sequence: Synthetic oligonucleotide"
  source: /note="RNA"
  modified_base (3)..(3): 5-methyl modified nucleotide
aucaaggaaga

SEQ ID NO: 1979 - RNA, 10 nt, Artificial Sequence
  source: /note="Description of Artificial Sequence: Synthetic oligonucleotide"
  source: /note="RNA"
  modified_base (3)..(3): 5-methyl modified nucleotide
aucaaggaag

SEQ ID NO: 1980 - RNA, 23 nt, Artificial Sequence
  source: /note="Description of Artificial Sequence: Synthetic oligonucleotide"
  source: /note="RNA"
  modified_base (1)..(1): 5-methyl modified nucleotide
  modified_base (2)..(2): 5-methyl modified nucleotide
  modified_base (7)..(7): 5-methyl modified nucleotide
  modified_base (13)..(13): 5-methyl modified nucleotide
  modified_base (14)..(14): 5-methyl modified nucleotide
  modified_base (16)..(16): 5-methyl modified nucleotide
  modified_base (17)..(17): 5-methyl modified nucleotide
  modified_base (20)..(20): 5-methyl modified nucleotide
  modified_base (23)..(23): 5-methyl modified nucleotide
ccagagcagguaccuccaacauc

SEQ ID NO: 1981 - RNA, 18 nt, Artificial Sequence
  source: /note="Description of Artificial Sequence: Synthetic oligonucleotide"
  source: /note="RNA"
  modified_base (1)..(1): 5-methyl modified nucleotide
  modified_base (2)..(2): 5-methyl modified nucleotide
  modified_base (7)..(7): 5-methyl modified nucleotide
  modified_base (13)..(13): 5-methyl modified nucleotide
  modified_base (14)..(14): 5-methyl modified nucleotide
  modified_base (16)..(16): 5-methyl modified nucleotide
  modified_base (17)..(17): 5-methyl modified nucleotide
ccagagcagguaccucca

SEQ ID NO: 1982 - RNA, 23 nt, Artificial Sequence
  source: /note="Description of Artificial Sequence: Synthetic oligonucleotide"
  source: /note="RNA"
  modified_base (1)..(1): 5-methyl modified nucleotide
  modified_base (2)..(2): 5-methyl modified nucleotide
  modified_base (4)..(4): 5-methyl modified nucleotide
  modified_base (18)..(18): 5-methyl modified nucleotide
ccucugugauuuuauaacuugau

SEQ ID NO: 1983 - RNA, 17 nt, Artificial Sequence
  source: /note="Description of Artificial Sequence: Synthetic oligonucleotide"
  source: /note="RNA"
  modified_base (2)..(2): 5-methyl modified nucleotide
  modified_base (4)..(4): 5-methyl modified nucleotide
  modified_base (5)..(5): 5-methyl modified nucleotide
  modified_base (6)..(6): 5-methyl modified nucleotide
  modified_base (8)..(8): 5-methyl modified nucleotide
  modified_base (9)..(9): 5-methyl modified nucleotide
  modified_base (12)..(12): 5-methyl modified nucleotide
  modified_base (14)..(14): 5-methyl modified nucleotide
  modified_base (15)..(15): 5-methyl modified nucleotide
  modified_base (16)..(16): 5-methyl modified nucleotide
ucacccaccaucacccu

SEQ ID NO: 1984 - RNA, 20 nt, Artificial Sequence
  source: /note="Description of Artificial Sequence: Synthetic oligonucleotide"
  source: /note="RNA"
  modified_base (7)..(7): 5-methyl modified nucleotide
  modified_base (8)..(8): 5-methyl modified nucleotide
  modified_base (10)..(10): 5-methyl modified nucleotide
  modified_base (16)..(16): 5-methyl modified nucleotide
  modified_base (18)..(18): 5-methyl modified nucleotide
  modified_base (19)..(19): 5-methyl modified nucleotide
  modified_base (20)..(20): 5-methyl modified nucleotide
ugauauccucaaggucaccc

SEQ ID NO: 1985 - RNA, 22 nt, Artificial Sequence
  source: /note="Description of Artificial Sequence: Synthetic oligonucleotide"
  source: /note="RNA"
  modified_base (1)..(1): 5-methyl modified nucleotide
  modified_base (4)..(4): 5-methyl modified nucleotide
  modified_base (13)..(13): 5-methyl modified nucleotide
  modified_base (16)..(16): 5-methyl modified nucleotide
  modified_base (18)..(18): 5-methyl modified nucleotide
cugcuugaugaucaucucguug

SEQ ID NO: 1986 - RNA, 18 nt, Artificial Sequence
  source: /note="Description of Artificial Sequence: Synthetic oligonucleotide"
  source: /note="RNA"
  modified_base (1)..(1): 5-methyl modified nucleotide
  modified_base (4)..(4): 5-methyl modified nucleotide
  modified_base (13)..(13): 5-methyl modified nucleotide
  modified_base (16)..(16): 5-methyl modified nucleotide
  modified_base (18)..(18): 5-methyl modified nucleotide
cugcuugaugaucaucuc

SEQ ID NO: 1987 - RNA, 19 nt, Artificial Sequence
  source: /note="Description of Artificial Sequence: Synthetic oligonucleotide"
  source: /note="RNA"
  modified_base (5)..(5): 5-methyl modified nucleotide
  modified_base (6)..(6): 5-methyl modified nucleotide
  modified_base (14)..(14): 5-methyl modified nucleotide
  modified_base (15)..(15): 5-methyl modified nucleotide
  modified_base (17)..(17): 5-methyl modified nucleotide
guuuccuuaguaaccacag

SEQ ID NO: 1988 - RNA, 17 nt, Artificial Sequence
  source: /note="Description of Artificial Sequence: Synthetic oligonucleotide"
  source: /note="RNA"
  modified_base (5)..(5): 5-methyl modified nucleotide
  modified_base (6)..(6): 5-methyl modified nucleotide
  modified_base (14)..(14): 5-methyl modified nucleotide
  modified_base (15)..(15): 5-methyl modified nucleotide
  modified_base (17)..(17): 5-methyl modified nucleotide
guuuccuuaguaaccac

SEQ ID NO: 1989 - RNA, 20 nt, Artificial Sequence
  source: /note="Description of Artificial Sequence: Synthetic oligonucleotide"
  source: /note="RNA"
  source: /note="5' tri-ethylene glycol (TEG)"
  modified_base (2)..(2): 5-methyl modified nucleotide
  modified_base (14)..(14): 5-methyl modified nucleotide
  modified_base (19)..(19): 5-methyl modified nucleotide
ucaaggaagauggcauuucu

SEQ ID NO: 1990 - RNA, 22 nt, Artificial Sequence
  source: /note="Description of Artificial Sequence: Synthetic oligonucleotide"
  source: /note="RNA"
  source: /note="5' tri-ethylene glycol (TEG)"
  modified_base (2)..(2): 5-methyl modified nucleotide
  modified_base (14)..(14): 5-methyl modified nucleotide
  modified_base (19)..(19): 5-methyl modified nucleotide
ucaaggaagauggcauuucuag

SEQ ID NO: 1991 - RNA, 18 nt, Artificial Sequence
  source: /note="Description of Artificial Sequence: Synthetic oligonucleotide"
  source: /note="RNA"
  source: /note="5' tri-ethylene glycol (TEG)"
  modified_base (9)..(9): 5-methyl modified nucleotide
  modified_base (13)..(13): 5-methyl modified nucleotide
  modified_base (14)..(14): 5-methyl modified nucleotide
  modified_base (18)..(18): 5-methyl modified nucleotide
gguaaguucuguccaagc

SEQ ID NO: 1992 - RNA, 18 nt, Artificial Sequence
  source: /note="Description of Artificial Sequence: Synthetic oligonucleotide"
  source: /note="RNA"
  source: /note="5' tri-ethylene glycol (TEG)"
  modified_base (8)..(8): 5-methyl modified nucleotide
  modified_base (12)..(12): 5-methyl modified nucleotide
  modified_base (13)..(13): 5-methyl modified nucleotide
  modified_base (17)..(17): 5-methyl modified nucleotide
  modified_base (18)..(18): 5-methyl modified nucleotide
guaaguucuguccaagcc

SEQ ID NO: 1993 - RNA, 18 nt, Artificial Sequence
  source: /note="Description of Artificial Sequence: Synthetic oligonucleotide"
  source: /note="RNA"
  source: /note="5' tri-ethylene glycol (TEG)"
  modified_base (4)..(4): 5-methyl modified nucleotide
  modified_base (13)..(13): 5-methyl modified nucleotide
  modified_base (17)..(17): 5-methyl modified nucleotide
  modified_base (18)..(18): 5-methyl modified nucleotide
agucgguaaguucugucc

SEQ ID NO: 1994 - RNA, 18 nt, Artificial Sequence
  source: /note="Description of Artificial Sequence: Synthetic oligonucleotide"
  source: /note="RNA"
  source: /note="5' tri-ethylene glycol (TEG)"
  modified_base (1)..(1): 5-methyl modified nucleotide
  modified_base (5)..(5): 5-methyl modified nucleotide
  modified_base (6)..(6): 5-methyl modified nucleotide
  modified_base (10)..(10): 5-methyl modified nucleotide
  modified_base (11)..(11): 5-methyl modified nucleotide
  modified_base (12)..(12): 5-methyl modified nucleotide
cuguccaagcccgguuga

SEQ ID NO: 1995 - RNA, 15 nt, Artificial Sequence
  source: /note="Description of Artificial Sequence: Synthetic oligonucleotide"
  source: /note="RNA"
  source: /note="5' tri-ethylene glycol (TEG)"
  modified_base (7)..(7): 5-methyl modified nucleotide
  modified_base (11)..(11): 5-methyl modified nucleotide
  modified_base (12)..(12): 5-methyl modified nucleotide
uaaguucuguccaag

SEQ ID NO: 1996 - RNA, 20 nt, Artificial Sequence
  source: /note="Description of Artificial Sequence: Synthetic oligonucleotide"
  source: /note="RNA"
  source: /note="5' tri-ethylene glycol (TEG)"
  modified_base (3)..(3): 5-methyl modified nucleotide
  modified_base (7)..(7): 5-methyl modified nucleotide
  modified_base (8)..(8): 5-methyl modified nucleotide
  modified_base (12)..(12): 5-methyl modified nucleotide
  modified_base (13)..(13): 5-methyl modified nucleotide
  modified_base (14)..(14): 5-methyl modified nucleotide
uucuguccaagcccgguuga

SEQ ID NO: 1997 - RNA, 19 nt, Artificial Sequence
  source: /note="Description of Artificial Sequence: Synthetic oligonucleotide"
  source: /note="RNA"
  source: /note="5' tri-ethylene glycol (TEG)"
  modified_base (3)..(3): 5-methyl modified nucleotide
  modified_base (7)..(7): 5-methyl modified nucleotide
  modified_base (8)..(8): 5-methyl modified nucleotide
  modified_base (12)..(12): 5-methyl modified nucleotide
  modified_base (13)..(13): 5-methyl modified nucleotide
  modified_base (14)..(14): 5-methyl modified nucleotide
uucuguccaagcccgguug

SEQ ID NO: 1998 - RNA, 18 nt, Artificial Sequence
  source: /note="Description of Artificial Sequence: Synthetic oligonucleotide"
  source: /note="RNA"
  source: /note="5' tri-ethylene glycol (TEG)"
  modified_base (3)..(3): 5-methyl modified nucleotide
  modified_base (7)..(7): 5-methyl modified nucleotide
  modified_base (8)..(8): 5-methyl modified nucleotide
  modified_base (12)..(12): 5-methyl modified nucleotide
  modified_base (13)..(13): 5-methyl modified nucleotide
  modified_base (14)..(14): 5-methyl modified nucleotide
uucuguccaagcccgguu

SEQ ID NO: 1999 - RNA, 17 nt, Artificial Sequence
  source: /note="Description of Artificial Sequence: Synthetic oligonucleotide"
  source: /note="RNA"
  source: /note="5' tri-ethylene glycol (TEG)"
  modified_base (3)..(3): 5-methyl modified nucleotide
  modified_base (7)..(7): 5-methyl modified nucleotide
  modified_base (8)..(8): 5-methyl modified nucleotide
  modified_base (12)..(12): 5-methyl modified nucleotide
  modified_base (13)..(13): 5-methyl modified nucleotide
  modified_base (14)..(14): 5-methyl modified nucleotide
uucuguccaagcccggu

SEQ ID NO: 2000 - RNA, 16 nt, Artificial Sequence
  source: /note="Description of Artificial Sequence: Synthetic oligonucleotide"
  source: /note="RNA"
  source: /note="5' tri-ethylene glycol (TEG)"
  modified_base (3)..(3): 5-methyl modified nucleotide
  modified_base (7)..(7): 5-methyl modified nucleotide
  modified_base (8)..(8): 5-methyl modified nucleotide
  modified_base (12)..(12): 5-methyl modified nucleotide
  modified_base (13)..(13): 5-methyl modified nucleotide
  modified_base (14)..(14): 5-methyl modified nucleotide
uucuguccaagcccgg

SEQ ID NO: 2001 - RNA, 15 nt, Artificial Sequence
  source: /note="Description of Artificial Sequence: Synthetic oligonucleotide"
  source: /note="RNA"
  source: /note="5' tri-ethylene glycol (TEG)"
  modified_base (3)..(3): 5-methyl modified nucleotide
  modified_base (7)..(7): 5-methyl modified nucleotide
  modified_base (8)..(8): 5-methyl modified nucleotide
  modified_base (12)..(12): 5-methyl modified nucleotide
  modified_base (13)..(13): 5-methyl modified nucleotide
  modified_base (14)..(14): 5-methyl modified nucleotide
uucuguccaagcccg

SEQ ID NO: 2002 - RNA, 14 nt, Artificial Sequence
  source: /note="Description of Artificial Sequence: Synthetic oligonucleotide"
  source: /note="RNA"
  source: /note="5' tri-ethylene glycol (TEG)"
  modified_base (3)..(3): 5-methyl modified nucleotide
  modified_base (7)..(7): 5-methyl modified nucleotide
  modified_base (8)..(8): 5-methyl modified nucleotide
  modified_base (12)..(12): 5-methyl modified nucleotide
  modified_base (13)..(13): 5-methyl modified nucleotide
  modified_base (14)..(14): 5-methyl modified nucleotide
uucuguccaagccc

SEQ ID NO: 2003 - RNA, 13 nt, Artificial Sequence
  source: /note="Description of Artificial Sequence: Synthetic oligonucleotide"
  source: /note="RNA"
  source: /note="5' tri-ethylene glycol (TEG)"
  modified_base (3)..(3): 5-methyl modified nucleotide
  modified_base (7)..(7): 5-methyl modified nucleotide
  modified_base (8)..(8): 5-methyl modified nucleotide
  modified_base (12)..(12): 5-methyl modified nucleotide
  modified_base (13)..(13): 5-methyl modified nucleotide
uucuguccaagcc

SEQ ID NO: 2004 - RNA, 12 nt, Artificial Sequence
  source: /note="Description of Artificial Sequence: Synthetic oligonucleotide"
  source: /note="RNA"
  source: /note="5' tri-ethylene glycol (TEG)"
  modified_base (3)..(3): 5-methyl modified nucleotide
  modified_base (7)..(7): 5-methyl modified nucleotide
  modified_base (8)..(8): 5-methyl modified nucleotide
  modified_base (12)..(12): 5-methyl modified nucleotide
uucuguccaagc

SEQ ID NO: 2005 - RNA, 11 nt, Artificial Sequence
  source: /note="Description of Artificial Sequence: Synthetic oligonucleotide"
  source: /note="RNA"
  source: /note="5' tri-ethylene glycol (TEG)"
  modified_base (3)..(3): 5-methyl modified nucleotide
  modified_base (7)..(7): 5-methyl modified nucleotide
  modified_base (8)..(8): 5-methyl modified nucleotide
uucuguccaag

SEQ ID NO: 2006 - RNA, 10 nt, Artificial Sequence
  source: /note="Description of Artificial Sequence: Synthetic oligonucleotide"
  source: /note="RNA"
  source: /note="5' tri-ethylene glycol (TEG)"
  modified_base (3)..(3): 5-methyl modified nucleotide
  modified_base (7)..(7): 5-methyl modified nucleotide
  modified_base (8)..(8): 5-methyl modified nucleotide
uucuguccaa

SEQ ID NO: 2007 - RNA, 9 nt, Artificial Sequence
  source: /note="Description of Artificial Sequence: Synthetic oligonucleotide"
  source: /note="RNA"
  source: /note="5' tri-ethylene glycol (TEG)"
  modified_base (3)..(3): 5-methyl modified nucleotide
  modified_base (7)..(7): 5-methyl modified nucleotide
  modified_base (8)..(8): 5-methyl modified nucleotide
uucugucca

SEQ ID NO: 2008 - RNA, 8 nt, Artificial Sequence
  source: /note="Description of Artificial Sequence: Synthetic oligonucleotide"
  source: /note="RNA"
  source: /note="5' tri-ethylene glycol (TEG)"
  modified_base (3)..(3): 5-methyl modified nucleotide
  modified_base (7)..(7): 5-methyl modified nucleotide
  modified_base (8)..(8): 5-methyl modified nucleotide
uucugucc

SEQ ID NO: 2009 - RNA, 19 nt, Artificial Sequence
  source: /note="Description of Artificial Sequence: Synthetic oligonucleotide"
  source: /note="RNA"
  source: /note="5' tri-ethylene glycol (TEG)"
  modified_base (2)..(2): 5-methyl modified nucleotide
  modified_base (6)..(6): 5-methyl modified nucleotide
  modified_base (7)..(7): 5-methyl modified nucleotide
  modified_base (11)..(11): 5-methyl modified nucleotide
  modified_base (12)..(12): 5-methyl modified nucleotide
  modified_base (13)..(13): 5-methyl modified nucleotide
ucuguccaagcccgguuga

SEQ ID NO: 2010 - RNA, 18 nt, Artificial Sequence
  source: /note="Description of Artificial Sequence: Synthetic oligonucleotide"
  source: /note="RNA"
  source: /note="5' tri-ethylene glycol (TEG)"
  modified_base (2)..(2): 5-methyl modified nucleotide
  modified_base (6)..(6): 5-methyl modified nucleotide
  modified_base (7)..(7): 5-methyl modified nucleotide
  modified_base (11)..(11): 5-methyl modified nucleotide
  modified_base (12)..(12): 5-methyl modified nucleotide
  modified_base (13)..(13): 5-methyl modified nucleotide
ucuguccaagcccgguug

SEQ ID NO: 2011 - RNA, 17 nt, Artificial Sequence
  source: /note="Description of Artificial Sequence: Synthetic oligonucleotide"
  source: /note="RNA"
  source: /note="5' tri-ethylene glycol (TEG)"
  modified_base (2)..(2): 5-methyl modified nucleotide
  modified_base (6)..(6): 5-methyl modified nucleotide
  modified_base (7)..(7): 5-methyl modified nucleotide
  modified_base (11)..(11): 5-methyl modified nucleotide
  modified_base (12)..(12): 5-methyl modified nucleotide
  modified_base (13)..(13): 5-methyl modified nucleotide
ucuguccaagcccgguu

SEQ ID NO: 2012 - RNA, 16 nt, Artificial Sequence
  source: /note="Description of Artificial Sequence: Synthetic oligonucleotide"
  source: /note="RNA"
  source: /note="5' tri-ethylene glycol (TEG)"
  modified_base (2)..(2): 5-methyl modified nucleotide
  modified_base (6)..(6): 5-methyl modified nucleotide
  modified_base (7)..(7): 5-methyl modified nucleotide
  modified_base (11)..(11): 5-methyl modified nucleotide
  modified_base (12)..(12): 5-methyl modified nucleotide
  modified_base (13)..(13): 5-methyl modified nucleotide
ucuguccaagcccggu

SEQ ID NO: 2013 - RNA, 15 nt, Artificial Sequence
  source: /note="Description of Artificial Sequence: Synthetic oligonucleotide"
  source: /note="RNA"
  source: /note="5' tri-ethylene glycol (TEG)"
  modified_base (2)..(2): 5-methyl modified nucleotide
  modified_base (6)..(6): 5-methyl modified nucleotide
  modified_base (7)..(7): 5-methyl modified nucleotide
  modified_base (11)..(11): 5-methyl modified nucleotide
  modified_base (12)..(12): 5-methyl modified nucleotide
  modified_base (13)..(13): 5-methyl modified nucleotide
ucuguccaagcccgg

SEQ ID NO: 2014 - RNA, 14 nt, Artificial Sequence
  source: /note="Description of Artificial Sequence: Synthetic oligonucleotide"
  source: /note="RNA"
  source: /note="5' tri-ethylene glycol (TEG)"
  modified_base (2)..(2): 5-methyl modified nucleotide
  modified_base (6)..(6): 5-methyl modified nucleotide
  modified_base (7)..(7): 5-methyl modified nucleotide
  modified_base (11)..(11): 5-methyl modified nucleotide
  modified_base (12)..(12): 5-methyl modified nucleotide
  modified_base (13)..(13): 5-methyl modified nucleotide
ucuguccaagcccg

SEQ ID NO: 2015 - RNA, 13 nt, Artificial Sequence
  source: /note="Description of Artificial Sequence: Synthetic oligonucleotide"
  source: /note="RNA"
  source: /note="5' tri-ethylene glycol (TEG)"
  modified_base (2)..(2): 5-methyl modified nucleotide
  modified_base (6)..(6): 5-methyl modified nucleotide
  modified_base (7)..(7): 5-methyl modified nucleotide
  modified_base (11)..(11): 5-methyl modified nucleotide
  modified_base (12)..(12): 5-methyl modified nucleotide
  modified_base (13)..(13): 5-methyl modified nucleotide
ucuguccaagccc

SEQ ID NO: 2016 - RNA, 12 nt, Artificial Sequence
  source: /note="Description of Artificial Sequence: Synthetic oligonucleotide"
  source: /note="RNA"
  source: /note="5' tri-ethylene glycol (TEG)"
  modified_base (2)..(2): 5-methyl modified nucleotide
  modified_base (6)..(6): 5-methyl modified nucleotide
  modified_base (7)..(7): 5-methyl modified nucleotide
  modified_base (11)..(11): 5-methyl modified nucleotide
  modified_base (12)..(12): 5-methyl modified nucleotide
ucuguccaagcc

SEQ ID NO: 2017 - RNA, 11 nt, Artificial Sequence
  source: /note="Description of Artificial Sequence: Synthetic oligonucleotide"
  source: /note="RNA"
  source: /note="5' tri-ethylene glycol (TEG)"
  modified_base (2)..(2): 5-methyl modified nucleotide
  modified_base (6)..(6): 5-methyl modified nucleotide
  modified_base (7)..(7): 5-methyl modified nucleotide
  modified_base (11)..(11): 5-methyl modified nucleotide
ucuguccaagc

SEQ ID NO: 2018 - RNA, 10 nt, Artificial Sequence
  source: /note="Description of Artificial Sequence: Synthetic oligonucleotide"
  source: /note="RNA"
  source: /note="5' tri-ethylene glycol (TEG)"
  modified_base (2)..(2): 5-methyl modified nucleotide
  modified_base (6)..(6): 5-methyl modified nucleotide
  modified_base (7)..(7): 5-methyl modified nucleotide
ucuguccaag

SEQ ID NO: 2019 - RNA, 9 nt, Artificial Sequence
  source: /note="Description of Artificial Sequence: Synthetic oligonucleotide"
  source: /note="RNA"
  source: /note="5' tri-ethylene glycol (TEG)"
  modified_base (2)..(2): 5-methyl modified nucleotide
  modified_base (6)..(6): 5-methyl modified nucleotide
  modified_base (7)..(7): 5-methyl modified nucleotide
ucuguccaa

SEQ ID NO: 2020 - RNA, 8 nt, Artificial Sequence
  source: /note="Description of Artificial Sequence: Synthetic oligonucleotide"
  source: /note="RNA"
  source: /note="5' tri-ethylene glycol (TEG)"
  modified_base (2)..(2): 5-methyl modified nucleotide
  modified_base (6)..(6): 5-methyl modified nucleotide
  modified_base (7)..(7): 5-methyl modified nucleotide
ucugucca

SEQ ID NO: 2021 - RNA, 17 nt, Artificial Sequence
  source: /note="Description of Artificial Sequence: Synthetic oligonucleotide"
  source: /note="RNA"
  source: /note="5' tri-ethylene glycol (TEG)"
  modified_base (1)..(1): 5-methyl modified nucleotide
  modified_base (5)..(5): 5-methyl modified nucleotide
  modified_base (6)..(6): 5-methyl modified nucleotide
  modified_base (10)..(10): 5-methyl modified nucleotide
  modified_base (11)..(11): 5-methyl modified nucleotide
  modified_base (12)..(12): 5-methyl modified nucleotide
cuguccaagcccgguug

SEQ ID NO: 2022 - RNA, 16 nt, Artificial Sequence
  source: /note="Description of Artificial Sequence: Synthetic oligonucleotide"
  source: /note="RNA"
  source: /note="5' tri-ethylene glycol (TEG)"
  modified_base (1)..(1): 5-methyl modified nucleotide
  modified_base (5)..(5): 5-methyl modified nucleotide
  modified_base (6)..(6): 5-methyl modified nucleotide
  modified_base (10)..(10): 5-methyl modified nucleotide
  modified_base (11)..(11): 5-methyl modified nucleotide
  modified_base (12)..(12): 5-methyl modified nucleotide
cuguccaagcccgguu

SEQ ID NO: 2023 - RNA, 15 nt, Artificial Sequence
  source: /note="Description of Artificial Sequence: Synthetic oligonucleotide"
  source: /note="RNA"
  source: /note="5' tri-ethylene glycol (TEG)"
  modified_base (1)..(1): 5-methyl modified nucleotide
  modified_base (5)..(5): 5-methyl modified nucleotide
  modified_base (6)..(6): 5-methyl modified nucleotide
  modified_base (10)..(10): 5-methyl modified nucleotide
  modified_base (11)..(11): 5-methyl modified nucleotide
  modified_base (12)..(12): 5-methyl modified nucleotide
cuguccaagcccggu

SEQ ID NO: 2024 - RNA, 14 nt, Artificial Sequence
  source: /note="Description of Artificial Sequence: Synthetic oligonucleotide"
  source: /note="RNA"
  source: /note="5' tri-ethylene glycol (TEG)"
  modified_base (1)..(1): 5-methyl modified nucleotide
  modified_base (5)..(5): 5-methyl modified nucleotide
  modified_base (6)..(6): 5-methyl modified nucleotide
  modified_base (10)..(10): 5-methyl modified nucleotide
  modified_base (11)..(11): 5-methyl modified nucleotide
  modified_base (12)..(12): 5-methyl modified nucleotide
cuguccaagcccgg

SEQ ID NO: 2025 - RNA, 13 nt, Artificial Sequence
  source: /note="Description of Artificial Sequence: Synthetic oligonucleotide"
  source: /note="RNA"
  source: /note="5' tri-ethylene glycol (TEG)"
  modified_base (1)..(1): 5-methyl modified nucleotide
  modified_base (5)..(5): 5-methyl modified nucleotide
  modified_base (6)..(6): 5-methyl modified nucleotide
  modified_base (10)..(10): 5-methyl modified nucleotide
  modified_base (11)..(11): 5-methyl modified nucleotide
  modified_base (12)..(12): 5-methyl modified nucleotide
cuguccaagcccg

SEQ ID NO: 2026 - RNA, 12 nt, Artificial Sequence
  source: /note="Description of Artificial Sequence: Synthetic oligonucleotide"
  source: /note="RNA"
  source: /note="5' tri-ethylene glycol (TEG)"
  modified_base (1)..(1): 5-methyl modified nucleotide
  modified_base (5)..(5): 5-methyl modified nucleotide
  modified_base (6)..(6): 5-methyl modified nucleotide
  modified_base (10)..(10): 5-methyl modified nucleotide
  modified_base (11)..(11): 5-methyl modified nucleotide
  modified_base (12)..(12): 5-methyl modified nucleotide
cuguccaagccc

SEQ ID NO: 2027 - RNA, 11 nt, Artificial Sequence
  source: /note="Description of Artificial Sequence: Synthetic oligonucleotide"
  source: /note="RNA"
  source: /note="5' tri-ethylene glycol (TEG)"
  modified_base (1)..(1): 5-methyl modified nucleotide
  modified_base (5)..(5): 5-methyl modified nucleotide
  modified_base (6)..(6): 5-methyl modified nucleotide
  modified_base (10)..(10): 5-methyl modified nucleotide
  modified_base (11)..(11): 5-methyl modified nucleotide
cuguccaagcc

SEQ ID NO: 2028 - RNA, 10 nt, Artificial Sequence
  source: /note="Description of Artificial Sequence: Synthetic oligonucleotide"
  source: /note="RNA"
  source: /note="5' tri-ethylene glycol (TEG)"
  modified_base (1)..(1): 5-methyl modified nucleotide
  modified_base (5)..(5): 5-methyl modified nucleotide
  modified_base (6)..(6): 5-methyl modified nucleotide
  modified_base (10)..(10): 5-methyl modified nucleotide
cuguccaagc

SEQ ID NO: 2029 - RNA, 9 nt, Artificial Sequence
  source: /note="Description of Artificial Sequence: Synthetic oligonucleotide"
  source: /note="RNA"
  source: /note="5' tri-ethylene glycol (TEG)"
  modified_base (1)..(1): 5-methyl modified nucleotide
  modified_base (5)..(5): 5-methyl modified nucleotide
  modified_base (6)..(6): 5-methyl modified nucleotide
cuguccaag

SEQ ID NO: 2030 - RNA, 8 nt, Artificial Sequence
  source: /note="Description of Artificial Sequence: Synthetic oligonucleotide"
  source: /note="RNA"
  source: /note="5' tri-ethylene glycol (TEG)"
  modified_base (1)..(1): 5-methyl modified nucleotide
  modified_base (5)..(5): 5-methyl modified nucleotide
  modified_base (6)..(6): 5-methyl modified nucleotide
cuguccaa

SEQ ID NO: 2031 - RNA, 20 nt, Artificial Sequence
  source: /note="Description of Artificial Sequence: Synthetic oligonucleotide"
  source: /note="RNA"
  source: /note="5' tri-ethylene glycol (TEG)"
  modified_base (4)..(4): 5-methyl modified nucleotide
  modified_base (8)..(8): 5-methyl modified nucleotide
  modified_base (9)..(9): 5-methyl modified nucleotide
  modified_base (13)..(13): 5-methyl modified nucleotide
  modified_base (14)..(14): 5-methyl modified nucleotide
  modified_base (15)..(15): 5-methyl modified nucleotide
guucuguccaagcccgguug

SEQ ID NO: 2032 - RNA, 19 nt, Artificial Sequence
  source: /note="Description of Artificial Sequence: Synthetic oligonucleotide"
  source: /note="RNA"
  source: /note="5' tri-ethylene glycol (TEG)"
  modified_base (4)..(4): 5-methyl modified nucleotide
  modified_base (8)..(8): 5-methyl modified nucleotide
  modified_base (9)..(9): 5-methyl modified nucleotide
  modified_base (13)..(13): 5-methyl modified nucleotide
  modified_base (14)..(14): 5-methyl modified nucleotide
  modified_base (15)..(15): 5-methyl modified nucleotide
guucuguccaagcccgguu

SEQ ID NO: 2033 - RNA, 18 nt, Artificial Sequence
  source: /note="Description of Artificial Sequence: Synthetic oligonucleotide"
  source: /note="RNA"
  source: /note="5' tri-ethylene glycol (TEG)"
  modified_base (4)..(4): 5-methyl modified nucleotide
  modified_base (8)..(8): 5-methyl modified nucleotide
  modified_base (9)..(9): 5-methyl modified nucleotide
  modified_base (13)..(13): 5-methyl modified nucleotide
  modified_base (14)..(14): 5-methyl modified nucleotide
  modified_base (15)..(15): 5-methyl modified nucleotide
guucuguccaagcccggu

SEQ ID NO: 2034 - RNA, 17 nt, Artificial Sequence
  source: /note="Description of Artificial Sequence: Synthetic oligonucleotide"
  source: /note="RNA"
  source: /note="5' tri-ethylene glycol (TEG)"
  modified_base (4)..(4): 5-methyl modified nucleotide
  modified_base (8)..(8): 5-methyl modified nucleotide
  modified_base (9)..(9): 5-methyl modified nucleotide
  modified_base (13)..(13): 5-methyl modified nucleotide
  modified_base (14)..(14): 5-methyl modified nucleotide
  modified_base (15)..(15): 5-methyl modified nucleotide
guucuguccaagcccgg

SEQ ID NO: 2035 - RNA, 16 nt, Artificial Sequence
  source: /note="Description of Artificial Sequence: Synthetic oligonucleotide"
  source: /note="RNA"
  source: /note="5' tri-ethylene glycol (TEG)"
  modified_base (4)..(4): 5-methyl modified nucleotide
  modified_base (8)..(8): 5-methyl modified nucleotide
  modified_base (9)..(9): 5-methyl modified nucleotide
  modified_base (13)..(13): 5-methyl modified nucleotide
  modified_base (14)..(14): 5-methyl modified nucleotide
  modified_base (15)..(15): 5-methyl modified nucleotide
guucuguccaagcccg

SEQ ID NO: 2036 - RNA, 15 nt, Artificial Sequence
  source: /note="Description of Artificial Sequence: Synthetic oligonucleotide"
  source: /note="RNA"
  source: /note="5' tri-ethylene glycol (TEG)"
  modified_base (4)..(4): 5-methyl modified nucleotide
  modified_base (8)..(8): 5-methyl modified nucleotide
  modified_base (9)..(9): 5-methyl modified nucleotide
  modified_base (13)..(13): 5-methyl modified nucleotide
  modified_base (14)..(14): 5-methyl modified nucleotide
  modified_base (15)..(15): 5-methyl modified nucleotide
guucuguccaagccc

SEQ ID NO: 2037 - RNA, 14 nt, Artificial Sequence
  source: /note="Description of Artificial Sequence: Synthetic oligonucleotide"
  source: /note="RNA"
  source: /note="5' tri-ethylene glycol (TEG)"
  modified_base (4)..(4): 5-methyl modified nucleotide
  modified_base (8)..(8): 5-methyl modified nucleotide
  modified_base (9)..(9): 5-methyl modified nucleotide
  modified_base (13)..(13): 5-methyl modified nucleotide
  modified_base (14)..(14): 5-methyl modified nucleotide
guucuguccaagcc

SEQ ID NO: 2038 - RNA, 13 nt, Artificial Sequence
  source: /note="Description of Artificial Sequence: Synthetic oligonucleotide"
  source: /note="RNA"
  source: /note="5' tri-ethylene glycol (TEG)"
  modified_base (4)..(4): 5-methyl modified nucleotide
  modified_base (8)..(8): 5-methyl modified nucleotide
  modified_base (9)..(9): 5-methyl modified nucleotide
  modified_base (13)..(13): 5-methyl modified nucleotide
guucuguccaagc

SEQ ID NO: 2039 - RNA, 12 nt, Artificial Sequence
  source: /note="Description of Artificial Sequence: Synthetic oligonucleotide"
  source: /note="RNA"
  source: /note="5' tri-ethylene glycol (TEG)"
  modified_base (4)..(4): 5-methyl modified nucleotide
  modified_base (8)..(8): 5-methyl modified nucleotide
  modified_base (9)..(9): 5-methyl modified nucleotide
guucuguccaag

SEQ ID NO: 2040 - RNA, 11 nt, Artificial Sequence
  source: /note="Description of Artificial Sequence: Synthetic oligonucleotide"
  source: /note="RNA"
  source: /note="5' tri-ethylene glycol (TEG)"
  modified_base (4)..(4): 5-methyl modified nucleotide
  modified_base (8)..(8): 5-methyl modified nucleotide
  modified_base (9)..(9): 5-methyl modified nucleotide
guucuguccaa

SEQ ID NO: 2041 - RNA, 10 nt, Artificial Sequence
  source: /note="Description of Artificial Sequence: Synthetic oligonucleotide"
  source: /note="RNA"
  source: /note="5' tri-ethylene glycol (TEG)"
  modified_base (4)..(4): 5-methyl modified nucleotide
  modified_base (8)..(8): 5-methyl modified nucleotide
  modified_base (9)..(9): 5-methyl modified nucleotide
guucugucca

SEQ ID NO: 2042 - RNA, 9 nt, Artificial Sequence
  source: /note="Description of Artificial Sequence: Synthetic oligonucleotide"
  source: /note="RNA"
  source: /note="5' tri-ethylene glycol (TEG)"
  modified_base (4)..(4): 5-methyl modified nucleotide
  modified_base (8)..(8): 5-methyl modified nucleotide
  modified_base (9)..(9): 5-methyl modified nucleotide
guucugucc

SEQ ID NO: 2043 - RNA, 8 nt, Artificial Sequence
  source: /note="Description of Artificial Sequence: Synthetic oligonucleotide"
  source: /note="RNA"
  source: /note="5' tri-ethylene glycol (TEG)"
  modified_base (4)..(4): 5-methyl modified nucleotide
  modified_base (8)..(8): 5-methyl modified nucleotide
guucuguc

SEQ ID NO: 2044 - RNA, 20 nt, Artificial Sequence
  source: /note="Description of Artificial Sequence: Synthetic oligonucleotide"
  source: /note="RNA"
  source: /note="5' tri-ethylene glycol (TEG)"
  modified_base (5)..(5): 5-methyl modified nucleotide
  modified_base (9)..(9): 5-methyl modified nucleotide
  modified_base (10)..(10): 5-methyl modified nucleotide
  modified_base (14)..(14): 5-methyl modified nucleotide
  modified_base (15)..(15): 5-methyl modified nucleotide
  modified_base (16)..(16): 5-methyl modified nucleotide
aguucuguccaagcccgguu

SEQ ID NO: 2045 - RNA, 19 nt, Artificial Sequence
  source: /note="Description of Artificial Sequence: Synthetic oligonucleotide"
  source: /note="RNA"
  source: /note="5' tri-ethylene glycol (TEG)"
  modified_base (5)..(5): 5-methyl modified nucleotide
  modified_base (9)..(9): 5-methyl modified nucleotide
  modified_base (10)..(10): 5-methyl modified nucleotide
  modified_base (14)..(14): 5-methyl modified nucleotide
  modified_base (15)..(15): 5-methyl modified nucleotide
  modified_base (16)..(16): 5-methyl modified nucleotide
aguucuguccaagcccggu

SEQ ID NO: 2046 - RNA, 18 nt, Artificial Sequence
  source: /note="Description of Artificial Sequence: Synthetic oligonucleotide"
  source: /note="RNA"
  source: /note="5' tri-ethylene glycol (TEG)"
  modified_base (5)..(5): 5-methyl modified nucleotide
  modified_base (9)..(9): 5-methyl modified nucleotide
  modified_base (10)..(10): 5-methyl modified nucleotide
  modified_base (14)..(14): 5-methyl modified nucleotide
  modified_base (15)..(15): 5-methyl modified nucleotide
  modified_base (16)..(16): 5-methyl modified nucleotide
aguucuguccaagcccgg

SEQ ID NO: 2047 - RNA, 17 nt, Artificial Sequence
  source: /note="Description of Artificial Sequence: Synthetic oligonucleotide"
  source: /note="RNA"
  source: /note="5' tri-ethylene glycol (TEG)"
  modified_base (5)..(5): 5-methyl modified nucleotide
  modified_base (9)..(9): 5-methyl modified nucleotide
  modified_base (10)..(10): 5-methyl modified nucleotide
  modified_base (14)..(14): 5-methyl modified nucleotide
  modified_base (15)..(15): 5-methyl modified nucleotide
  modified_base (16)..(16): 5-methyl modified nucleotide
aguucuguccaagcccg

SEQ ID NO: 2048 - RNA, 16 nt, Artificial Sequence
  source: /note="Description of Artificial Sequence: Synthetic oligonucleotide"
  source: /note="RNA"
  source: /note="5' tri-ethylene glycol (TEG)"
  modified_base (5)..(5): 5-methyl modified nucleotide
  modified_base (9)..(9): 5-methyl modified nucleotide
  modified_base (10)..(10): 5-methyl modified nucleotide
  modified_base (14)..(14): 5-methyl modified nucleotide
  modified_base (15)..(15): 5-methyl modified nucleotide
  modified_base (16)..(16): 5-methyl modified nucleotide
aguucuguccaagccc

SEQ ID NO: 2049 - RNA, 15 nt, Artificial Sequence
  source: /note="Description of Artificial Sequence: Synthetic oligonucleotide"
  source: /note="RNA"
  source: /note="5' tri-ethylene glycol (TEG)"
  modified_base (5)..(5): 5-methyl modified nucleotide
  modified_base (9)..(9): 5-methyl modified nucleotide
  modified_base (10)..(10): 5-methyl modified nucleotide
  modified_base (14)..(14): 5-methyl modified nucleotide
  modified_base (15)..(15): 5-methyl modified nucleotide
aguucuguccaagcc

SEQ ID NO: 2050 - RNA, 14 nt, Artificial Sequence
  source: /note="Description of Artificial Sequence: Synthetic oligonucleotide"
  source: /note="RNA"
  source: /note="5' tri-ethylene glycol (TEG)"
  modified_base (5)..(5): 5-methyl modified nucleotide
  modified_base (9)..(9): 5-methyl modified nucleotide
  modified_base (10)..(10): 5-methyl modified nucleotide
  modified_base (14)..(14): 5-methyl modified nucleotide
aguucuguccaagc

SEQ ID NO: 2051 - RNA, 13 nt, Artificial Sequence
  source: /note="Description of Artificial Sequence: Synthetic oligonucleotide"
  source: /note="RNA"
  source: /note="5' tri-ethylene glycol (TEG)"
  modified_base (5)..(5): 5-methyl modified nucleotide
  modified_base (9)..(9): 5-methyl modified nucleotide
  modified_base (10)..(10): 5-methyl modified nucleotide
aguucuguccaag

SEQ ID NO: 2052 - RNA, 12 nt, Artificial Sequence
  source: /note="Description of Artificial Sequence: Synthetic oligonucleotide"
  source: /note="RNA"
  source: /note="5' tri-ethylene glycol (TEG)"
  modified_base (5)..(5): 5-methyl modified nucleotide
  modified_base (9)..(9): 5-methyl modified nucleotide
  modified_base (10)..(10): 5-methyl modified nucleotide
aguucuguccaa

SEQ ID NO: 2053 - RNA, 11 nt, Artificial Sequence
  source: /note="Description of Artificial Sequence: Synthetic oligonucleotide"
  source: /note="RNA"
  source: /note="5' tri-ethylene glycol (TEG)"
  modified_base (5)..(5): 5-methyl modified nucleotide
  modified_base (9)..(9): 5-methyl modified nucleotide
  modified_base (10)..(10): 5-methyl modified nucleotide
aguucugucca

SEQ ID NO: 2054 - RNA, 10 nt, Artificial Sequence
  source: /note="Description of Artificial Sequence: Synthetic oligonucleotide"
  source: /note="RNA"
  source: /note="5' tri-ethylene glycol (TEG)"
  modified_base (5)..(5): 5-methyl modified nucleotide
  modified_base (9)..(9): 5-methyl modified nucleotide
  modified_base (10)..(10): 5-methyl modified nucleotide
aguucugucc

SEQ ID NO: 2055 - RNA, 9 nt, Artificial Sequence
  source: /note="Description of Artificial Sequence: Synthetic oligonucleotide"
  source: /note="RNA"
  source: /note="5' tri-ethylene glycol (TEG)"
  modified_base (5)..(5): 5-methyl modified nucleotide
  modified_base (9)..(9): 5-methyl modified nucleotide
aguucuguc

SEQ ID NO: 2056 - RNA, 8 nt, Artificial Sequence
  source: /note="Description of Artificial Sequence: Synthetic oligonucleotide"
  source: /note="RNA"
  source: /note="5' tri-ethylene glycol (TEG)"
  modified_base (5)..(5): 5-methyl modified nucleotide
aguucugu

SEQ ID NO: 2057 - RNA, 20 nt, Artificial Sequence
  source: /note="Description of Artificial Sequence: Synthetic oligonucleotide"
  source: /note="RNA"
  source: /note="5' tri-ethylene glycol (TEG)"
  modified_base (6)..(6): 5-methyl modified nucleotide
  modified_base (10)..(10): 5-methyl modified nucleotide
  modified_base (11)..(11): 5-methyl modified nucleotide
  modified_base (15)..(15): 5-methyl modified nucleotide
  modified_base (16)..(16): 5-methyl modified nucleotide
  modified_base (17)..(17): 5-methyl modified nucleotide
aaguucuguccaagcccggu

SEQ ID NO: 2058 - RNA, 19 nt, Artificial Sequence
  source: /note="Description of Artificial Sequence: Synthetic oligonucleotide"
  source: /note="RNA"
  source: /note="5' tri-ethylene glycol (TEG)"
  modified_base (6)..(6): 5-methyl modified nucleotide
  modified_base (10)..(10): 5-methyl modified nucleotide
  modified_base (11)..(11): 5-methyl modified nucleotide
  modified_base (15)..(15): 5-methyl modified nucleotide
  modified_base (16)..(16): 5-methyl modified nucleotide
  modified_base (17)..(17): 5-methyl modified nucleotide
aaguucuguccaagcccgg

SEQ ID NO: 2059 - RNA, 18 nt, Artificial Sequence
  source: /note="Description of Artificial Sequence: Synthetic oligonucleotide"
  source: /note="RNA"
  source: /note="5' tri-ethylene glycol (TEG)"
  modified_base (6)..(6): 5-methyl modified nucleotide
  modified_base (10)..(10): 5-methyl modified nucleotide
  modified_base (11)..(11): 5-methyl modified nucleotide
  modified_base (15)..(15): 5-methyl modified nucleotide
  modified_base (16)..(16): 5-methyl modified nucleotide
  modified_base (17)..(17): 5-methyl modified nucleotide
aaguucuguccaagcccg

SEQ ID NO: 2060 - RNA, 17 nt, Artificial Sequence
  source: /note="Description of Artificial Sequence: Synthetic oligonucleotide"
  source: /note="RNA"
  source: /note="5' tri-ethylene glycol (TEG)"
  modified_base (6)..(6): 5-methyl modified nucleotide
  modified_base (10)..(10): 5-methyl modified nucleotide
  modified_base (11)..(11): 5-methyl modified nucleotide
  modified_base (15)..(15): 5-methyl modified nucleotide
  modified_base (16)..(16): 5-methyl modified nucleotide
  modified_base (17)..(17): 5-methyl modified nucleotide
aaguucuguccaagccc

SEQ ID NO: 2061 - RNA, 16 nt, Artificial Sequence
  source: /note="Description of Artificial Sequence: Synthetic oligonucleotide"
  source: /note="RNA"
  source: /note="5' tri-ethylene glycol (TEG)"
  modified_base (6)..(6): 5-methyl modified nucleotide
  modified_base (10)..(10): 5-methyl modified nucleotide
  modified_base (11)..(11): 5-methyl modified nucleotide
  modified_base (15)..(15): 5-methyl modified nucleotide
  modified_base (16)..(16): 5-methyl modified nucleotide
aaguucuguccaagcc

SEQ ID NO: 2062 - RNA, 15 nt, Artificial Sequence
  source: /note="Description of Artificial Sequence: Synthetic oligonucleotide"
  source: /note="RNA"
  source: /note="5' tri-ethylene glycol (TEG)"
  modified_base (6)..(6): 5-methyl modified nucleotide
  modified_base (10)..(10): 5-methyl modified nucleotide
  modified_base (11)..(11): 5-methyl modified nucleotide
  modified_base (15)..(15): 5-methyl modified nucleotide
aaguucuguccaagc

SEQ ID NO: 2063 - RNA, 14 nt, Artificial Sequence
  source: /note="Description of Artificial Sequence: Synthetic oligonucleotide"
  source: /note="RNA"
  source: /note="5' tri-ethylene glycol (TEG)"
  modified_base (6)..(6): 5-methyl modified nucleotide
  modified_base (10)..(10): 5-methyl modified nucleotide
  modified_base (11)..(11): 5-methyl modified nucleotide
aaguucuguccaag

SEQ ID NO: 2064 - RNA, 13 nt, Artificial Sequence
  source: /note="Description of Artificial Sequence: Synthetic oligonucleotide"
  source: /note="RNA"
  source: /note="5' tri-ethylene glycol (TEG)"
  modified_base (6)..(6): 5-methyl modified nucleotide
  modified_base (10)..(10): 5-methyl modified nucleotide
  modified_base (11)..(11): 5-methyl modified nucleotide
aaguucuguccaa

SEQ ID NO: 2065 - RNA, 12 nt, Artificial Sequence
  source: /note="Description of Artificial Sequence: Synthetic oligonucleotide"
  source: /note="RNA"
  source: /note="5' tri-ethylene glycol (TEG)"
  modified_base (6)..(6): 5-methyl modified nucleotide
  modified_base (10)..(10): 5-methyl modified nucleotide
  modified_base (11)..(11): 5-methyl modified nucleotide
aaguucugucca

SEQ ID NO: 2066 - RNA, 11 nt, Artificial Sequence
  source: /note="Description of Artificial Sequence: Synthetic oligonucleotide"
  source: /note="RNA"
  source: /note="5' tri-ethylene glycol (TEG)"
  modified_base (6)..(6): 5-methyl modified nucleotide
  modified_base (10)..(10): 5-methyl modified nucleotide
  modified_base (11)..(11): 5-methyl modified nucleotide
aaguucugucc

SEQ ID NO: 2067 - RNA, 10 nt, Artificial Sequence
  source: /note="Description of Artificial Sequence: Synthetic oligonucleotide"
  source: /note="RNA"
  source: /note="5' tri-ethylene glycol (TEG)"
  modified_base (6)..(6): 5-methyl modified nucleotide
  modified_base (10)..(10): 5-methyl modified nucleotide
aaguucuguc

SEQ ID NO: 2068 - RNA, 9 nt, Artificial Sequence
  source: /note="Description of Artificial Sequence: Synthetic oligonucleotide"
  source: /note="RNA"
  source: /note="5' tri-ethylene glycol (TEG)"
  modified_base (6)..(6): 5-methyl modified nucleotide
aaguucugu

SEQ ID NO: 2069 - RNA, 8 nt, Artificial Sequence
  source: /note="Description of Artificial Sequence: Synthetic oligonucleotide"
  source: /note="RNA"
  source: /note="5' tri-ethylene glycol (TEG)"
  modified_base (6)..(6): 5-methyl modified nucleotide
aaguucug

SEQ ID NO: 2070 - RNA, 20 nt, Artificial Sequence
  source: /note="Description of Artificial Sequence: Synthetic oligonucleotide"
  source: /note="RNA"
  source: /note="5' tri-ethylene glycol (TEG)"
  modified_base (7)..(7): 5-methyl modified nucleotide
  modified_base (11)..(11): 5-methyl modified nucleotide
  modified_base (12)..(12): 5-methyl modified nucleotide
  modified_base (16)..(16): 5-methyl modified nucleotide
  modified_base (17)..(17): 5-methyl modified nucleotide
  modified_base (18)..(18): 5-methyl modified nucleotide
uaaguucuguccaagcccgg

SEQ ID NO: 2071 - RNA, 19 nt, Artificial Sequence
  source: /note="Description of Artificial Sequence: Synthetic oligonucleotide"
  source: /note="RNA"
  source: /note="5' tri-ethylene glycol (TEG)"
  modified_base (7)..(7): 5-methyl modified nucleotide
  modified_base (11)..(11): 5-methyl modified nucleotide
  modified_base (12)..(12): 5-methyl modified nucleotide
  modified_base (16)..(16): 5-methyl modified nucleotide
  modified_base (17)..(17): 5-methyl modified nucleotide
  modified_base (18)..(18): 5-methyl modified nucleotide
uaaguucuguccaagcccg

SEQ ID NO: 2072 - RNA, 18 nt, Artificial Sequence
  source: /note="Description of Artificial Sequence: Synthetic oligonucleotide"
  source: /note="RNA"
  source: /note="5' tri-ethylene glycol (TEG)"
  modified_base (7)..(7): 5-methyl modified nucleotide
  modified_base (11)..(11): 5-methyl modified nucleotide
  modified_base (12)..(12): 5-methyl modified nucleotide
  modified_base (16)..(16): 5-methyl modified nucleotide
  modified_base (17)..(17): 5-methyl modified nucleotide
  modified_base (18)..(18): 5-methyl modified nucleotide
uaaguucuguccaagccc

SEQ ID NO: 2073 - RNA, 17 nt, Artificial Sequence
  source: /note="Description of Artificial Sequence: Synthetic oligonucleotide"
  source: /note="RNA"
  source: /note="5' tri-ethylene glycol (TEG)"
  modified_base (7)..(7): 5-methyl modified nucleotide
  modified_base (11)..(11): 5-methyl modified nucleotide
  modified_base (12)..(12): 5-methyl modified nucleotide
  modified_base (16)..(16): 5-methyl modified nucleotide
  modified_base (17)..(17): 5-methyl modified nucleotide
uaaguucuguccaagcc

SEQ ID NO: 2074 - RNA, 16 nt, Artificial Sequence
  source: /note="Description of Artificial Sequence: Synthetic oligonucleotide"
  source: /note="RNA"
  source: /note="5' tri-ethylene glycol (TEG)"
  modified_base (7)..(7): 5-methyl modified nucleotide
  modified_base (11)..(11): 5-methyl modified nucleotide
  modified_base (12)..(12): 5-methyl modified nucleotide
  modified_base (16)..(16): 5-methyl modified nucleotide
uaaguucuguccaagc

SEQ ID NO: 2075 - RNA, 14 nt, Artificial Sequence
  source: /note="Description of Artificial Sequence: Synthetic oligonucleotide"
  source: /note="RNA"
  source: /note="5' tri-ethylene glycol (TEG)"
  modified_base (7)..(7): 5-methyl modified nucleotide
  modified_base (11)..(11): 5-methyl modified nucleotide
  modified_base (12)..(12): 5-methyl modified nucleotide
uaaguucuguccaa

SEQ ID NO: 2076 - RNA, 13 nt, Artificial Sequence
  source: /note="Description of Artificial Sequence: Synthetic oligonucleotide"
  source: /note="RNA"
  source: /note="5' tri-ethylene glycol (TEG)"
  modified_base (7)..(7): 5-methyl modified nucleotide
  modified_base (11)..(11): 5-methyl modified nucleotide
  modified_base (12)..(12): 5-methyl modified nucleotide
uaaguucugucca

SEQ ID NO: 2077 - RNA, 12 nt, Artificial Sequence
  source: /note="Description of Artificial Sequence: Synthetic oligonucleotide"
  source: /note="RNA"
  source: /note="5' tri-ethylene glycol (TEG)"
  modified_base (7)..(7): 5-methyl modified nucleotide
  modified_base (11)..(11): 5-methyl modified nucleotide
  modified_base (12)..(12): 5-methyl modified nucleotide
uaaguucugucc

SEQ ID NO: 2078 - RNA, 11 nt, Artificial Sequence
  source: /note="Description of Artificial Sequence: Synthetic oligonucleotide"
  source: /note="RNA"
  source: /note="5' tri-ethylene glycol (TEG)"
  modified_base (7)..(7): 5-methyl modified nucleotide
  modified_base (11)..(11): 5-methyl modified nucleotide
uaaguucuguc

SEQ ID NO: 2079 - RNA, 10 nt, Artificial Sequence
  source: /note="Description of Artificial Sequence: Synthetic oligonucleotide"
  source: /note="RNA"
  source: /note="5' tri-ethylene glycol (TEG)"
  modified_base (7)..(7): 5-methyl modified nucleotide
uaaguucugu

SEQ ID NO: 2080 - RNA, 9 nt, Artificial Sequence
  source: /note="Description of Artificial Sequence: Synthetic oligonucleotide"
  source: /note="RNA"
  source: /note="5' tri-ethylene glycol (TEG)"
  modified_base (7)..(7): 5-methyl modified nucleotide
uaaguucug

SEQ ID NO: 2081 - RNA, 8 nt, Artificial Sequence
  source: /note="Description of Artificial Sequence: Synthetic oligonucleotide"
  source: /note="RNA"
  source: /note="5' tri-ethylene glycol (TEG)"
  modified_base (7)..(7): 5-methyl modified nucleotide
uaaguucu

SEQ ID NO: 2082 - RNA, 20 nt, Artificial Sequence
  source: /note="Description of Artificial Sequence: Synthetic oligonucleotide"
  source: /note="RNA"
  source: /note="5' tri-ethylene glycol (TEG)"
  modified_base (8)..(8): 5-methyl modified nucleotide
  modified_base (12)..(12): 5-methyl modified nucleotide
  modified_base (13)..(13): 5-methyl modified nucleotide
  modified_base (17)..(17): 5-methyl modified nucleotide
  modified_base (18)..(18): 5-methyl modified nucleotide
  modified_base (19)..(19): 5-methyl modified nucleotide
guaaguucuguccaagcccg

SEQ ID NO: 2083 - RNA, 19 nt, Artificial Sequence
  source: /note="Description of Artificial Sequence: Synthetic oligonucleotide"
  source: /note="RNA"
  source: /note="5' tri-ethylene glycol (TEG)"
  modified_base (8)..(8): 5-methyl modified nucleotide
  modified_base (12)..(12): 5-methyl modified nucleotide
  modified_base (13)..(13): 5-methyl modified nucleotide
  modified_base (17)..(17): 5-methyl modified nucleotide
  modified_base (18)..(18): 5-methyl modified nucleotide
  modified_base (19)..(19): 5-methyl modified nucleotide
guaaguucuguccaagccc

SEQ ID NO: 2084 - RNA, 17 nt, Artificial Sequence
  source: /note="Description of Artificial Sequence: Synthetic oligonucleotide"
  source: /note="RNA"
  source: /note="5' tri-ethylene glycol (TEG)"
  modified_base (8)..(8): 5-methyl modified nucleotide
  modified_base (12)..(12): 5-methyl modified nucleotide
  modified_base (13)..(13): 5-methyl modified nucleotide
  modified_base (17)..(17): 5-methyl modified nucleotide
guaaguucuguccaagc

SEQ ID NO: 2085 - RNA, 16 nt, Artificial Sequence
  source: /note="Description of Artificial Sequence: Synthetic oligonucleotide"
  source: /note="RNA"
  source: /note="5' tri-ethylene glycol (TEG)"
  modified_base (8)..(8): 5-methyl modified nucleotide
  modified_base (12)..(12): 5-methyl modified nucleotide
  modified_base (13)..(13): 5-methyl modified nucleotide
guaaguucuguccaag

SEQ ID NO: 2086 - RNA, 15 nt, Artificial Sequence
  source: /note="Description of Artificial Sequence: Synthetic oligonucleotide"
  source: /note="RNA"
  source: /note="5' tri-ethylene glycol (TEG)"
  modified_base (8)..(8): 5-methyl modified nucleotide
  modified_base (12)..(12): 5-methyl modified nucleotide
  modified_base (13)..(13): 5-methyl modified nucleotide
guaaguucuguccaa

SEQ ID NO: 2087 - RNA, 14 nt, Artificial Sequence
  source: /note="Description of Artificial Sequence: Synthetic oligonucleotide"
  source: /note="RNA"
  source: /note="5' tri-ethylene glycol (TEG)"
  modified_base (8)..(8): 5-methyl modified nucleotide
  modified_base (12)..(12): 5-methyl modified nucleotide
  modified_base (13)..(13): 5-methyl modified nucleotide
guaaguucugucca

SEQ ID NO: 2088 - RNA, 13 nt, Artificial Sequence
  source: /note="Description of Artificial Sequence: Synthetic oligonucleotide"
  source: /note="RNA"
  source: /note="5' tri-ethylene glycol (TEG)"
  modified_base (8)..(8): 5-methyl modified nucleotide
  modified_base (12)..(12): 5-methyl modified nucleotide
  modified_base (13)..(13): 5-methyl modified nucleotide
guaaguucugucc

SEQ ID NO: 2089 - RNA, 12 nt, Artificial Sequence
  source: /note="Description of Artificial Sequence: Synthetic oligonucleotide"
  source: /note="RNA"
  source: /note="5' tri-ethylene glycol (TEG)"
  modified_base (8)..(8): 5-methyl modified nucleotide
  modified_base (12)..(12): 5-methyl modified nucleotide
guaaguucuguc

SEQ ID NO: 2090 - RNA, 11 nt, Artificial Sequence
  source: /note="Description of Artificial Sequence: Synthetic oligonucleotide"
  source: /note="RNA"
  source: /note="5' tri-ethylene glycol (TEG)"
  modified_base (8)..(8): 5-methyl modified nucleotide
guaaguucugu

SEQ ID NO: 2091 - RNA, 10 nt, Artificial Sequence
  source: /note="Description of Artificial Sequence: Synthetic oligonucleotide"
  source: /note="RNA"
  source: /note="5' tri-ethylene glycol (TEG)"
  modified_base (8)..(8): 5-methyl modified nucleotide
guaaguucug

SEQ ID NO: 2092 - RNA, 9 nt, Artificial Sequence
  source: /note="Description of Artificial Sequence: Synthetic oligonucleotide"
  source: /note="RNA"
  source: /note="5' tri-ethylene glycol (TEG)"
  modified_base (8)..(8): 5-methyl modified nucleotide
guaaguucu

SEQ ID NO: 2093 - RNA, 8 nt, Artificial Sequence
  source: /note="Description of Artificial Sequence: Synthetic oligonucleotide"
  source: /note="RNA"
  source: /note="5' tri-ethylene glycol (TEG)"
  modified_base (8)..(8): 5-methyl modified nucleotide
guaaguuc

SEQ ID NO: 2094 - RNA, 20 nt, Artificial Sequence
  source: /note="Description of Artificial Sequence: Synthetic oligonucleotide"
  source: /note="RNA"
  source: /note="5' tri-ethylene glycol (TEG)"
  modified_base (9)..(9): 5-methyl modified nucleotide
  modified_base (13)..(13): 5-methyl modified nucleotide
  modified_base (14)..(14): 5-methyl modified nucleotide
  modified_base (18)..(18): 5-methyl modified nucleotide
  modified_base (19)..(19): 5-methyl modified nucleotide
  modified_base (20)..(20): 5-methyl modified nucleotide
gguaaguucuguccaagccc

SEQ ID NO: 2095 - RNA, 19 nt, Artificial Sequence
  source: /note="Description of Artificial Sequence: Synthetic oligonucleotide"
  source: /note="RNA"
  source: /note="5' tri-ethylene glycol (TEG)"
  modified_base (9)..(9): 5-methyl modified nucleotide
  modified_base (13)..(13): 5-methyl modified nucleotide
  modified_base (14)..(14): 5-methyl modified nucleotide
  modified_base (18)..(18): 5-methyl modified nucleotide
  modified_base (19)..(19): 5-methyl modified nucleotide
gguaaguucuguccaagcc

SEQ ID NO: 2096 - RNA, 17 nt, Artificial Sequence
  source: /note="Description of Artificial Sequence: Synthetic oligonucleotide"
  source: /note="RNA"
  source: /note="5' tri-ethylene glycol (TEG)"
  modified_base (9)..(9): 5-methyl modified nucleotide
  modified_base (13)..(13): 5-methyl modified nucleotide
  modified_base (14)..(14): 5-methyl modified nucleotide
gguaaguucuguccaag

SEQ ID NO: 2097 - RNA, 16 nt, Artificial Sequence
  source: /note="Description of Artificial Sequence: Synthetic oligonucleotide"
  source: /note="RNA"
  source: /note="5' tri-ethylene glycol (TEG)"
  modified_base (9)..(9): 5-methyl modified nucleotide
  modified_base (13)..(13): 5-methyl modified nucleotide
  modified_base (14)..(14): 5-methyl modified nucleotide
gguaaguucuguccaa

SEQ ID NO: 2098 - RNA, 15 nt, Artificial Sequence
  source: /note="Description of Artificial Sequence: Synthetic oligonucleotide"
  source: /note="RNA"
  source: /note="5' tri-ethylene glycol (TEG)"
  modified_base (9)..(9): 5-methyl modified nucleotide
  modified_base (13)..(13): 5-methyl modified nucleotide
  modified_base (14)..(14): 5-methyl modified nucleotide
gguaaguucugucca

SEQ ID NO: 2099 - RNA, 14 nt, Artificial Sequence
  source: /note="Description of Artificial Sequence: Synthetic oligonucleotide"
  source: /note="RNA"
  source: /note="5' tri-ethylene glycol (TEG)"
  modified_base (9)..(9): 5-methyl modified nucleotide
  modified_base (13)..(13): 5-methyl modified nucleotide
  modified_base (14)..(14): 5-methyl modified nucleotide
gguaaguucugucc

SEQ ID NO: 2100 - RNA, 13 nt, Artificial Sequence
  source: /note="Description of Artificial Sequence: Synthetic oligonucleotide"
  source: /note="RNA"
  source: /note="5' tri-ethylene glycol (TEG)"
  modified_base (9)..(9): 5-methyl modified nucleotide
  modified_base (13)..(13): 5-methyl modified nucleotide
gguaaguucuguc

SEQ ID NO: 2101 - RNA, 12 nt, Artificial Sequence
  source: /note="Description of Artificial Sequence: Synthetic oligonucleotide"
  source: /note="RNA"
  source: /note="5' tri-ethylene glycol (TEG)"
  modified_base (9)..(9): 5-methyl modified nucleotide
gguaaguucugu

SEQ ID NO: 2102 - RNA, 11 nt, Artificial Sequence
  source: /note="Description of Artificial Sequence: Synthetic oligonucleotide"
  source: /note="RNA"
  source: /note="5' tri-ethylene glycol (TEG)"
  modified_base (9)..(9): 5-methyl modified nucleotide
gguaaguucug

SEQ ID NO: 2103 - RNA, 10 nt, Artificial Sequence
  source: /note="Description of Artificial Sequence: Synthetic oligonucleotide"
  source: /note="RNA"
  source: /note="5' tri-ethylene glycol (TEG)"
  modified_base (9)..(9): 5-methyl modified nucleotide
gguaaguucu

SEQ ID NO: 2104 - RNA, 9 nt, Artificial Sequence
  source: /note="Description of Artificial Sequence: Synthetic oligonucleotide"
  source: /note="RNA"
  source: /note="5' tri-ethylene glycol (TEG)"
  modified_base (9)..(9): 5-methyl modified nucleotide
gguaaguuc

SEQ ID NO: 2105 - RNA, 8 nt, Artificial Sequence
  source: /note="Description of Artificial Sequence: Synthetic oligonucleotide"
  source: /note="RNA"
  source: /note="5' tri-ethylene glycol (TEG)"
gguaaguu

SEQ ID NO: 2106 - RNA, 20 nt, Artificial Sequence
  source: /note="Description of Artificial Sequence: Synthetic oligonucleotide"
  source: /note="RNA"
  source: /note="5' tri-ethylene glycol (TEG)"
  modified_base (1)..(1): 5-methyl modified nucleotide
  modified_base (10)..(10): 5-methyl modified nucleotide
  modified_base (14)..(14): 5-methyl modified nucleotide
  modified_base (15)..(15): 5-methyl modified nucleotide
  modified_base (19)..(19): 5-methyl modified nucleotide
  modified_base (20)..(20): 5-methyl modified nucleotide
cgguaaguucuguccaagcc

SEQ ID NO: 2107 - RNA, 19 nt, Artificial Sequence
  source: /note="Description of Artificial Sequence: Synthetic oligonucleotide"
  source: /note="RNA"
  source: /note="5' tri-ethylene glycol (TEG)"
  modified_base (1)..(1): 5-methyl modified nucleotide
  modified_base (10)..(10): 5-methyl modified nucleotide
  modified_base (14)..(14): 5-methyl modified nucleotide
  modified_base (15)..(15): 5-methyl modified nucleotide
  modified_base (19)..(19): 5-methyl modified nucleotide
cgguaaguucuguccaagc

SEQ ID NO: 2108 - RNA, 18 nt, Artificial Sequence
  source: /note="Description of Artificial Sequence: Synthetic oligonucleotide"
  source: /note="RNA"
  source: /note="5' tri-ethylene glycol (TEG)"
  modified_base (1)..(1): 5-methyl modified nucleotide
  modified_base (10)..(10): 5-methyl modified nucleotide
  modified_base (14)..(14): 5-methyl modified nucleotide
  modified_base (15)..(15): 5-methyl modified nucleotide
cgguaaguucuguccaag

SEQ ID NO: 2109 - RNA, 17 nt, Artificial Sequence
  source: /note="Description of Artificial Sequence: Synthetic oligonucleotide"
  source: /note="RNA"
  source: /note="5' tri-ethylene glycol (TEG)"
  modified_base (1)..(1): 5-methyl modified nucleotide
  modified_base (10)..(10): 5-methyl modified nucleotide
  modified_base (14)..(14): 5-methyl modified nucleotide
  modified_base (15)..(15): 5-methyl modified nucleotide
cgguaaguucuguccaa

SEQ ID NO: 2110 - RNA, 16 nt, Artificial Sequence
  source: /note="Description of Artificial Sequence: Synthetic oligonucleotide"
  source: /note="RNA"
  source: /note="5' tri-ethylene glycol (TEG)"
  modified_base (1)..(1): 5-methyl modified nucleotide
  modified_base (10)..(10): 5-methyl modified nucleotide
  modified_base (14)..(14): 5-methyl modified nucleotide
  modified_base (15)..(15): 5-methyl modified nucleotide
cgguaaguucugucca

SEQ ID NO: 2111 - RNA, 15 nt, Artificial Sequence
  source: /note="Description of Artificial Sequence: Synthetic oligonucleotide"
  source: /note="RNA"
  source: /note="5' tri-ethylene glycol (TEG)"
  modified_base (1)..(1): 5-methyl modified nucleotide
  modified_base (10)..(10): 5-methyl modified nucleotide
  modified_base (14)..(14): 5-methyl modified nucleotide
  modified_base (15)..(15): 5-methyl modified nucleotide
cgguaaguucugucc

SEQ ID NO: 2112 - RNA, 14 nt, Artificial Sequence
  source: /note="Description of Artificial Sequence: Synthetic oligonucleotide"
  source: /note="RNA"
  source: /note="5' tri-ethylene glycol (TEG)"
  modified_base (1)..(1): 5-methyl modified nucleotide
  modified_base (10)..(10): 5-methyl modified nucleotide
  modified_base (14)..(14): 5-methyl modified nucleotide
cgguaaguucuguc

SEQ ID NO: 2113 - RNA, 13 nt, Artificial Sequence
  source: /note="Description of Artificial Sequence: Synthetic oligonucleotide"
  source: /note="RNA"
  source: /note="5' tri-ethylene glycol (TEG)"
  modified_base (1)..(1): 5-methyl modified nucleotide
  modified_base (10)..(10): 5-methyl modified nucleotide
cgguaaguucugu

SEQ ID NO: 2114 - RNA, 12 nt, Artificial Sequence
  source: /note="Description of Artificial Sequence: Synthetic oligonucleotide"
  source: /note="RNA"
  source: /note="5' tri-ethylene glycol (TEG)"
  modified_base (1)..(1): 5-methyl modified nucleotide
  modified_base (10)..(10): 5-methyl modified nucleotide
cgguaaguucug

SEQ ID NO: 2115 - RNA, 11 nt, Artificial Sequence
  source: /note="Description of Artificial Sequence: Synthetic oligonucleotide"
  source: /note="RNA"
  source: /note="5' tri-ethylene glycol (TEG)"
  modified_base (1)..(1): 5-methyl modified nucleotide
  modified_base (10)..(10): 5-methyl modified nucleotide
cgguaaguucu

SEQ ID NO: 2116 - RNA, 10 nt, Artificial Sequence
  source: /note="Description of Artificial Sequence: Synthetic oligonucleotide"
  source: /note="RNA"
  source: /note="5' tri-ethylene glycol (TEG)"
  modified_base (1)..(1): 5-methyl modified nucleotide
  modified_base (10)..(10): 5-methyl modified nucleotide
cgguaaguuc

SEQ ID NO: 2117 - RNA, 9 nt, Artificial Sequence
  source: /note="Description of Artificial Sequence: Synthetic oligonucleotide"
  source: /note="RNA"
  source: /note="5' tri-ethylene glycol (TEG)"
  modified_base (1)..(1): 5-methyl modified nucleotide
cgguaaguu

SEQ ID NO: 2118 - RNA, 8 nt, Artificial Sequence
  source: /note="Description of Artificial Sequence: Synthetic oligonucleotide"
  source: /note="RNA"
  source: /note="5' tri-ethylene glycol (TEG)"
  modified_base (1)..(1): 5-methyl modified nucleotide
cgguaagu

SEQ ID NO: 2119 - RNA, 20 nt, Artificial Sequence
  source: /note="Description of Artificial Sequence: Synthetic oligonucleotide"
  source: /note="RNA"
  source: /note="5' tri-ethylene glycol (TEG)"
  modified_base (2)..(2): 5-methyl modified nucleotide
  modified_base (11)..(11): 5-methyl modified nucleotide
  modified_base (15)..(15): 5-methyl modified nucleotide
  modified_base (16)..(16): 5-methyl modified nucleotide
  modified_base (20)..(20): 5-methyl modified nucleotide
ucgguaaguucuguccaagc

SEQ ID NO: 2120 - RNA, 19 nt, Artificial Sequence
  source: /note="Description of Artificial Sequence: Synthetic oligonucleotide"
  source: /note="RNA"
  source: /note="5' tri-ethylene glycol (TEG)"
  modified_base (2)..(2): 5-methyl modified nucleotide
  modified_base (11)..(11): 5-methyl modified nucleotide
  modified_base (15)..(15): 5-methyl modified nucleotide
  modified_base (16)..(16): 5-methyl modified nucleotide
ucgguaaguucuguccaag

SEQ ID NO: 2121 - RNA, 18 nt, Artificial Sequence
  source: /note="Description of Artificial Sequence: Synthetic oligonucleotide"
  source: /note="RNA"
  source: /note="5' tri-ethylene glycol (TEG)"
  modified_base (2)..(2): 5-methyl modified nucleotide
  modified_base (11)..(11): 5-methyl modified nucleotide
  modified_base (15)..(15): 5-methyl modified nucleotide
  modified_base (16)..(16): 5-methyl modified nucleotide
ucgguaaguucuguccaa

SEQ ID NO: 2122 - RNA, 17 nt, Artificial Sequence
  source: /note="Description of Artificial Sequence: Synthetic oligonucleotide"
  source: /note="RNA"
  source: /note="5' tri-ethylene glycol (TEG)"
  modified_base (2)..(2): 5-methyl modified nucleotide
  modified_base (11)..(11): 5-methyl modified nucleotide
  modified_base (15)..(15): 5-methyl modified nucleotide
  modified_base (16)..(16): 5-methyl modified nucleotide
ucgguaaguucugucca

SEQ ID NO: 2123 - RNA, 16 nt, Artificial Sequence
  source: /note="Description of Artificial Sequence: Synthetic oligonucleotide"
  source: /note="RNA"
  source: /note="5' tri-ethylene glycol (TEG)"
  modified_base (2)..(2): 5-methyl modified nucleotide
  modified_base (11)..(11): 5-methyl modified nucleotide
  modified_base (15)..(15): 5-methyl modified nucleotide
  modified_base (16)..(16): 5-methyl modified nucleotide
ucgguaaguucugucc

SEQ ID NO: 2124 - RNA, 15 nt, Artificial Sequence
  source: /note="Description of Artificial Sequence: Synthetic oligonucleotide"
  source: /note="RNA"
  source: /note="5' tri-ethylene glycol (TEG)"
  modified_base (2)..(2): 5-methyl modified nucleotide
  modified_base (11)..(11): 5-methyl modified nucleotide
  modified_base (15)..(15): 5-methyl modified nucleotide
ucgguaaguucuguc

SEQ ID NO: 2125 - RNA, 14 nt, Artificial Sequence
  source: /note="Description of Artificial Sequence: Synthetic oligonucleotide"
  source: /note="RNA"
  source: /note="5' tri-ethylene glycol (TEG)"
  modified_base (2)..(2): 5-methyl modified nucleotide
  modified_base (11)..(11): 5-methyl modified nucleotide
ucgguaaguucugu

SEQ ID NO: 2126 - RNA, 13 nt, Artificial Sequence
  source: /note="Description of Artificial Sequence: Synthetic oligonucleotide"
  source: /note="RNA"
  source: /note="5' tri-ethylene glycol (TEG)"
  modified_base (2)..(2): 5-methyl modified nucleotide
  modified_base (11)..(11): 5-methyl modified nucleotide
ucgguaaguucug

SEQ ID NO: 2127 - RNA, 12 nt, Artificial Sequence
  source: /note="Description of Artificial Sequence: Synthetic oligonucleotide"
  source: /note="RNA"
  source: /note="5' tri-ethylene glycol (TEG)"
  modified_base (2)..(2): 5-methyl modified nucleotide
  modified_base (11)..(11): 5-methyl modified nucleotide
ucgguaaguucu

SEQ ID NO: 2128 - RNA, 11 nt, Artificial Sequence
  source: /note="Description of Artificial Sequence: Synthetic oligonucleotide"
  source: /note="RNA"
  source: /note="5' tri-ethylene glycol (TEG)"
  modified_base (2)..(2): 5-methyl modified nucleotide
  modified_base (11)..(11): 5-methyl modified nucleotide
ucgguaaguuc

SEQ ID NO: 2129 - RNA, 10 nt, Artificial Sequence
  source: /note="Description of Artificial Sequence: Synthetic oligonucleotide"
  source: /note="RNA"
  source: /note="5' tri-ethylene glycol (TEG)"
  modified_base (2)..(2): 5-methyl modified nucleotide
ucgguaaguu

SEQ ID NO: 2130 - RNA, 9 nt, Artificial Sequence
  source: /note="Description of Artificial Sequence: Synthetic oligonucleotide"
  source: /note="RNA"
  source: /note="5' tri-ethylene glycol (TEG)"
  modified_base (2)..(2): 5-methyl modified nucleotide
ucgguaagu

SEQ ID NO: 2131 - RNA, 20 nt, Artificial Sequence
  source: /note="Description of Artificial Sequence: Synthetic oligonucleotide"
  source: /note="RNA"
  source: /note="5' tri-ethylene glycol (TEG)"
  modified_base (3)..(3): 5-methyl modified nucleotide
  modified_base (12)..(12): 5-methyl modified nucleotide
  modified_base (16)..(16): 5-methyl modified nucleotide
  modified_base (17)..(17): 5-methyl modified nucleotide
gucgguaaguucuguccaag

SEQ ID NO: 2132 - RNA, 19 nt, Artificial Sequence
  source: /note="Description of Artificial Sequence: Synthetic oligonucleotide"
  source: /note="RNA"
  source: /note="5' tri-ethylene glycol (TEG)"
  modified_base (3)..(3): 5-methyl modified nucleotide
  modified_base (12)..(12): 5-methyl modified nucleotide
  modified_base (16)..(16): 5-methyl modified nucleotide
  modified_base (17)..(17): 5-methyl modified nucleotide
gucgguaaguucuguccaa

SEQ ID NO: 2133 - RNA, 18 nt, Artificial Sequence
  source: /note="Description of Artificial Sequence: Synthetic oligonucleotide"
  source: /note="RNA"
  source: /note="5' tri-ethylene glycol (TEG)"
  modified_base (3)..(3): 5-methyl modified nucleotide
  modified_base (12)..(12): 5-methyl modified nucleotide
  modified_base (16)..(16): 5-methyl modified nucleotide
  modified_base (17)..(17): 5-methyl modified nucleotide
gucgguaaguucugucca

SEQ ID NO: 2134 - RNA, 17 nt, Artificial Sequence
  source: /note="Description of Artificial Sequence: Synthetic oligonucleotide"
  source: /note="RNA"
  source: /note="5' tri-ethylene glycol (TEG)"
  modified_base (3)..(3): 5-methyl modified nucleotide
  modified_base (12)..(12): 5-methyl modified nucleotide
  modified_base (16)..(16): 5-methyl modified nucleotide
  modified_base (17)..(17): 5-methyl modified nucleotide
gucgguaaguucugucc

SEQ ID NO: 2135 - RNA, 16 nt, Artificial Sequence
  source: /note="Description of Artificial Sequence: Synthetic oligonucleotide"
  source: /note="RNA"
  source: /note="5' tri-ethylene glycol (TEG)"
  modified_base (3)..(3): 5-methyl modified nucleotide
  modified_base (12)..(12): 5-methyl modified nucleotide
  modified_base (16)..(16): 5-methyl modified nucleotide
gucgguaaguucuguc

SEQ ID NO: 2136 - RNA, 15 nt, Artificial Sequence
  source: /note="Description of Artificial Sequence: Synthetic oligonucleotide"
  source: /note="RNA"
  source: /note="5' tri-ethylene glycol (TEG)"
  modified_base (3)..(3): 5-methyl modified nucleotide
  modified_base (12)..(12): 5-methyl modified nucleotide
gucgguaaguucugu

SEQ ID NO: 2137 - RNA, 14 nt, Artificial Sequence
  source: /note="Description of Artificial Sequence: Synthetic oligonucleotide"
  source: /note="RNA"
  source: /note="5' tri-ethylene glycol (TEG)"
  modified_base (3)..(3): 5-methyl modified nucleotide
  modified_base (12)..(12): 5-methyl modified nucleotide
gucgguaaguucug

SEQ ID NO: 2138 - RNA, 13 nt, Artificial Sequence
  source: /note="Description of Artificial Sequence: Synthetic oligonucleotide"
  source: /note="RNA"
  source: /note="5' tri-ethylene glycol (TEG)"
  modified_base (3)..(3): 5-methyl modified nucleotide
  modified_base (12)..(12): 5-methyl modified nucleotide
gucgguaaguucu

SEQ ID NO: 2139 - RNA, 12 nt, Artificial Sequence
  source: /note="Description of Artificial Sequence: Synthetic oligonucleotide"
  source: /note="RNA"
  source: /note="5' tri-ethylene glycol (TEG)"
  modified_base (3)..(3): 5-methyl modified nucleotide
  modified_base (12)..(12): 5-methyl modified nucleotide
gucgguaaguuc

SEQ ID NO: 2140 - RNA, 11 nt, Artificial Sequence
  source: /note="Description of Artificial Sequence: Synthetic oligonucleotide"
  source: /note="RNA"
  source: /note="5' tri-ethylene glycol (TEG)"
  modified_base (3)..(3): 5-methyl modified nucleotide
gucgguaaguu

SEQ ID NO: 2141 - RNA, 10 nt, Artificial Sequence
  source: /note="Description of Artificial Sequence: Synthetic oligonucleotide"
  source: /note="RNA"
  source: /note="5' tri-ethylene glycol (TEG)"
  modified_base (3)..(3): 5-methyl modified nucleotide
gucgguaagu

SEQ ID NO: 2142 - RNA, 20 nt, Artificial Sequence
  source: /note="Description of Artificial Sequence: Synthetic oligonucleotide"
  source: /note="RNA"
  source: /note="5' tri-ethylene glycol (TEG)"
  modified_base (4)..(4): 5-methyl modified nucleotide
  modified_base (13)..(13): 5-methyl modified nucleotide
  modified_base (17)..(17): 5-methyl modified nucleotide
  modified_base (18)..(18): 5-methyl modified nucleotide
agucgguaaguucuguccaa

SEQ ID NO: 2143 - RNA, 19 nt, Artificial Sequence
  source: /note="Description of Artificial Sequence: Synthetic oligonucleotide"
  source: /note="RNA"
  source: /note="5' tri-ethylene glycol (TEG)"
  modified_base (4)..(4): 5-methyl modified nucleotide
  modified_base (13)..(13): 5-methyl modified nucleotide
  modified_base (17)..(17): 5-methyl modified nucleotide
  modified_base (18)..(18): 5-methyl modified nucleotide
agucgguaaguucugucca

SEQ ID NO: 2144 - RNA, 17 nt, Artificial Sequence
  source: /note="Description of Artificial Sequence: Synthetic oligonucleotide"
  source: /note="RNA"
  source: /note="5' tri-ethylene glycol (TEG)"
  modified_base (4)..(4): 5-methyl modified nucleotide
  modified_base (13)..(13): 5-methyl modified nucleotide
  modified_base (17)..(17): 5-methyl modified nucleotide
agucgguaaguucuguc

SEQ ID NO: 2145 - RNA, 16 nt, Artificial Sequence
  source: /note="Description of Artificial Sequence: Synthetic oligonucleotide"
  source: /note="RNA"
  source: /note="5' tri-ethylene glycol (TEG)"
  modified_base (4)..(4): 5-methyl modified nucleotide
  modified_base (13)..(13): 5-methyl modified nucleotide
agucgguaaguucugu

SEQ ID NO: 2146 - RNA, 15 nt, Artificial Sequence
  source: /note="Description of Artificial Sequence: Synthetic oligonucleotide"
  source: /note="RNA"
  source: /note="5' tri-ethylene glycol (TEG)"
  modified_base (4)..(4): 5-methyl modified nucleotide
  modified_base (13)..(13): 5-methyl modified nucleotide
agucgguaaguucug

SEQ ID NO: 2147 - RNA, 14 nt, Artificial Sequence
  source: /note="Description of Artificial Sequence: Synthetic oligonucleotide"
  source: /note="RNA"
  source: /note="5' tri-ethylene glycol (TEG)"
  modified_base (4)..(4): 5-methyl modified nucleotide
  modified_base (13)..(13): 5-methyl modified nucleotide
agucgguaaguucu

SEQ ID NO: 2148 - RNA, 13 nt, Artificial Sequence
  source: /note="Description of Artificial Sequence: Synthetic oligonucleotide"
  source: /note="RNA"
  source: /note="5' tri-ethylene glycol (TEG)"
  modified_base (4)..(4): 5-methyl modified nucleotide
  modified_base (13)..(13): 5-methyl modified nucleotide
agucgguaaguuc

SEQ ID NO: 2149 - RNA, 12 nt, Artificial Sequence
  source: /note="Description of Artificial Sequence: Synthetic oligonucleotide"
  source: /note="RNA"
  source: /note="5' tri-ethylene glycol (TEG)"
  modified_base (4)..(4): 5-methyl modified nucleotide
agucgguaaguu

SEQ ID NO: 2150 - RNA, 11 nt, Artificial Sequence
  source: /note="Description of Artificial Sequence: Synthetic oligonucleotide"
  source: /note="RNA"
  source: /note="5' tri-ethylene glycol (TEG)"
  modified_base (4)..(4): 5-methyl modified nucleotide
agucgguaagu

SEQ ID NO: 2151 - RNA, 20 nt, Artificial Sequence
  source: /note="Description of Artificial Sequence: Synthetic oligonucleotide"
  source: /note="RNA"
  source: /note="5' tri-ethylene glycol (TEG)"
  modified_base (1)..(1): 5-methyl modified nucleotide
  modified_base (5)..(5): 5-methyl modified nucleotide
  modified_base (14)..(14): 5-methyl modified nucleotide
  modified_base (18)..(18): 5-methyl modified nucleotide
  modified_base (19)..(19): 5-methyl modified nucleotide
cagucgguaaguucugucca

SEQ ID NO: 2152 - RNA, 19 nt, Artificial Sequence
  source: /note="Description of Artificial Sequence: Synthetic oligonucleotide"
  source: /note="RNA"
  source: /note="5' tri-ethylene glycol (TEG)"
  modified_base (1)..(1): 5-methyl modified nucleotide
  modified_base (5)..(5): 5-methyl modified nucleotide
  modified_base (14)..(14): 5-methyl modified nucleotide
  modified_base (18)..(18): 5-methyl modified nucleotide
  modified_base (19)..(19): 5-methyl modified nucleotide
cagucgguaaguucugucc

SEQ ID NO: 2153 - RNA, 18 nt, Artificial Sequence
  source: /note="Description of Artificial Sequence: Synthetic oligonucleotide"
  source: /note="RNA"
  source: /note="5' tri-ethylene glycol (TEG)"
  modified_base (1)..(1): 5-methyl modified nucleotide
  modified_base (5)..(5): 5-methyl modified nucleotide
  modified_base (14)..(14): 5-methyl modified nucleotide
  modified_base (18)..(18): 5-methyl modified nucleotide
cagucgguaaguucuguc

SEQ ID NO: 2154 - RNA, 17 nt, Artificial Sequence
  source: /note="Description of Artificial Sequence: Synthetic oligonucleotide"
  source: /note="RNA"
  source: /note="5' tri-ethylene glycol (TEG)"
  modified_base (1)..(1): 5-methyl modified nucleotide
  modified_base (5)..(5): 5-methyl modified nucleotide
  modified_base (14)..(14): 5-methyl modified nucleotide
cagucgguaaguucugu

SEQ ID NO: 2155 - RNA, 16 nt, Artificial Sequence
  source: /note="Description of Artificial Sequence: Synthetic oligonucleotide"
  source: /note="RNA"
  source: /note="5' tri-ethylene glycol (TEG)"
  modified_base (1)..(1): 5-methyl modified nucleotide
  modified_base (5)..(5): 5-methyl modified nucleotide
  modified_base (14)..(14): 5-methyl modified nucleotide
cagucgguaaguucug

SEQ ID NO: 2156 - RNA, 15 nt, Artificial Sequence
  source: /note="Description of Artificial Sequence: Synthetic oligonucleotide"
  source: /note="RNA"
  source: /note="5' tri-ethylene glycol (TEG)"
  modified_base (1)..(1): 5-methyl modified nucleotide
  modified_base (5)..(5): 5-methyl modified nucleotide
  modified_base (14)..(14): 5-methyl modified nucleotide
cagucgguaaguucu

SEQ ID NO: 2157 - RNA, 14 nt, Artificial Sequence
  source: /note="Description of Artificial Sequence: Synthetic oligonucleotide"
  source: /note="RNA"
  source: /note="5' tri-ethylene glycol (TEG)"
  modified_base (1)..(1): 5-methyl modified nucleotide
  modified_base (5)..(5): 5-methyl modified nucleotide
  modified_base (14)..(14): 5-methyl modified nucleotide
cagucgguaaguuc

SEQ ID NO: 2158 - RNA, 13 nt, Artificial Sequence
  source: /note="Description of Artificial Sequence: Synthetic oligonucleotide"
  source: /note="RNA"
  source: /note="5' tri-ethylene glycol (TEG)"
  modified_base (1)..(1): 5-methyl modified nucleotide
  modified_base (5)..(5): 5-methyl modified nucleotide
cagucgguaaguu

SEQ ID NO: 2159 - RNA, 12 nt, Artificial Sequence
  source: /note="Description of Artificial Sequence: Synthetic oligonucleotide"
  source: /note="RNA"
  source: /note="5' tri-ethylene glycol (TEG)"
  modified_base (1)..(1): 5-methyl modified nucleotide
  modified_base (5)..(5): 5-methyl modified nucleotide
cagucgguaagu

SEQ ID NO: 2160 - RNA, 20 nt, Artificial Sequence
  source: /note="Description of Artificial Sequence: Synthetic oligonucleotide"
  source: /note="RNA"
  source: /note="5' tri-ethylene glycol (TEG)"
  modified_base (1)..(1): 5-methyl modified nucleotide
  modified_base (2)..(2): 5-methyl modified nucleotide
  modified_base (6)..(6): 5-methyl modified nucleotide
  modified_base (15)..(15): 5-methyl modified nucleotide
  modified_base (19)..(19): 5-methyl modified nucleotide
  modified_base (20)..(20): 5-methyl modified nucleotide
ccagucgguaaguucugucc

SEQ ID NO: 2161 - RNA, 19 nt, Artificial Sequence
  source: /note="Description of Artificial Sequence: Synthetic oligonucleotide"
  source: /note="RNA"
  source: /note="5' tri-ethylene glycol (TEG)"
  modified_base (1)..(1): 5-methyl modified nucleotide
  modified_base (2)..(2): 5-methyl modified nucleotide
  modified_base (6)..(6): 5-methyl modified nucleotide
  modified_base (15)..(15): 5-methyl modified nucleotide
  modified_base (19)..(19): 5-methyl modified nucleotide
ccagucgguaaguucuguc

SEQ ID NO: 2162 - RNA, 18 nt, Artificial Sequence
  source: /note="Description of Artificial Sequence: Synthetic oligonucleotide"
  source: /note="RNA"
  source: /note="5' tri-ethylene glycol (TEG)"
  modified_base (1)..(1): 5-methyl modified nucleotide
  modified_base (2)..(2): 5-methyl modified nucleotide
  modified_base (6)..(6): 5-methyl modified nucleotide
  modified_base (15)..(15): 5-methyl modified nucleotide
ccagucgguaaguucugu

SEQ ID NO: 2163 - RNA, 17 nt, Artificial Sequence
  source: /note="Description of Artificial Sequence: Synthetic oligonucleotide"
  source: /note="RNA"
  source: /note="5' tri-ethylene glycol (TEG)"
  modified_base (1)..(1): 5-methyl modified nucleotide
  modified_base (2)..(2): 5-methyl modified nucleotide
  modified_base (6)..(6): 5-methyl modified nucleotide
  modified_base (15)..(15): 5-methyl modified nucleotide
ccagucgguaaguucug

SEQ ID NO: 2164 - RNA, 16 nt, Artificial Sequence
  source: /note="Description of Artificial Sequence: Synthetic oligonucleotide"
  source: /note="RNA"
  source: /note="5' tri-ethylene glycol (TEG)"
  modified_base (1)..(1): 5-methyl modified nucleotide
  modified_base (2)..(2): 5-methyl modified nucleotide
  modified_base (6)..(6): 5-methyl modified nucleotide
  modified_base (15)..(15): 5-methyl modified nucleotide
ccagucgguaaguucu

SEQ ID NO: 2165 - RNA, 15 nt, Artificial Sequence
  source: /note="Description of Artificial Sequence: Synthetic oligonucleotide"
  source: /note="RNA"
  source: /note="5' tri-ethylene glycol (TEG)"
  modified_base (1)..(1): 5-methyl modified nucleotide
  modified_base (2)..(2): 5-methyl modified nucleotide
  modified_base (6)..(6): 5-methyl modified nucleotide
  modified_base (15)..(15): 5-methyl modified nucleotide
ccagucgguaaguuc

SEQ ID NO: 2166 - RNA, 14 nt, Artificial Sequence
  source: /note="Description of Artificial Sequence: Synthetic oligonucleotide"
  source: /note="RNA"
  source: /note="5' tri-ethylene glycol (TEG)"
  modified_base (1)..(1): 5-methyl modified nucleotide
  modified_base (2)..(2): 5-methyl modified nucleotide
  modified_base (6)..(6): 5-methyl modified nucleotide
ccagucgguaaguu

SEQ ID NO: 2167 - RNA, 13 nt, Artificial Sequence
  source: /note="Description of Artificial Sequence: Synthetic oligonucleotide"
  source: /note="RNA"
  source: /note="5' tri-ethylene glycol (TEG)"
  modified_base (1)..(1): 5-methyl modified nucleotide
  modified_base (2)..(2): 5-methyl modified nucleotide
  modified_base (6)..(6): 5-methyl modified nucleotide
ccagucgguaagu

SEQ ID NO: 2168 - RNA, 20 nt, Artificial Sequence
  source: /note="Description of Artificial Sequence: Synthetic oligonucleotide"
  source: /note="RNA"
  source: /note="5' tri-ethylene glycol (TEG)"
  modified_base (2)..(2): 5-methyl modified nucleotide
  modified_base (3)..(3): 5-methyl modified nucleotide
  modified_base (7)..(7): 5-methyl modified nucleotide
  modified_base (16)..(16): 5-methyl modified nucleotide
  modified_base (20)..(20): 5-methyl modified nucleotide
gccagucgguaaguucuguc

SEQ ID NO: 2169 - RNA, 19 nt, Artificial Sequence
  source: /note="Description of Artificial Sequence: Synthetic oligonucleotide"
  source: /note="RNA"
  source: /note="5' tri-ethylene glycol (TEG)"
  modified_base (2)..(2): 5-methyl modified nucleotide
  modified_base (3)..(3): 5-methyl modified nucleotide
  modified_base (7)..(7): 5-methyl modified nucleotide
  modified_base (16)..(16): 5-methyl modified nucleotide
gccagucgguaaguucugu

SEQ ID NO: 2170 - RNA, 18 nt, Artificial Sequence
  source: /note="Description of Artificial Sequence: Synthetic oligonucleotide"
  source: /note="RNA"
  source: /note="5' tri-ethylene glycol (TEG)"
  modified_base (2)..(2): 5-methyl modified nucleotide
  modified_base (3)..(3): 5-methyl modified nucleotide
  modified_base (7)..(7): 5-methyl modified nucleotide
  modified_base (16)..(16): 5-methyl modified nucleotide
gccagucgguaaguucug

SEQ ID NO: 2171 - RNA, 17 nt, Artificial Sequence
  source: /note="Description of Artificial Sequence: Synthetic oligonucleotide"
  source: /note="RNA"
  source: /note="5' tri-ethylene glycol (TEG)"
  modified_base (2)..(2): 5-methyl modified nucleotide
  modified_base (3)..(3): 5-methyl modified nucleotide
  modified_base (7)..(7): 5-methyl modified nucleotide
  modified_base (16)..(16): 5-methyl modified nucleotide
gccagucgguaaguucu

SEQ ID NO: 2172 - RNA, 16 nt, Artificial Sequence
  source: /note="Description of Artificial Sequence: Synthetic oligonucleotide"
  source: /note="RNA"
  source: /note="5' tri-ethylene glycol (TEG)"
  modified_base (2)..(2): 5-methyl modified nucleotide
  modified_base (3)..(3): 5-methyl modified nucleotide
  modified_base (7)..(7): 5-methyl modified nucleotide
  modified_base (16)..(16): 5-methyl modified nucleotide
gccagucgguaaguuc

SEQ ID NO: 2173 - RNA, 15 nt, Artificial Sequence
  source: /note="Description of Artificial Sequence: Synthetic oligonucleotide"
  source: /note="RNA"
  source: /note="5' tri-ethylene glycol (TEG)"
  modified_base (2)..(2): 5-methyl modified nucleotide
  modified_base (3)..(3): 5-methyl modified nucleotide
  modified_base (7)..(7): 5-methyl modified nucleotide
gccagucgguaaguu

SEQ ID NO: 2174 - RNA, 14 nt, Artificial Sequence
  source: /note="Description of Artificial Sequence: Synthetic oligonucleotide"
  source: /note="RNA"
  source: /note="5' tri-ethylene glycol (TEG)"
  modified_base (2)..(2): 5-methyl modified nucleotide
  modified_base (3)..(3): 5-methyl modified nucleotide
  modified_base (7)..(7): 5-methyl modified nucleotide
gccagucgguaagu

SEQ ID NO: 2175 - RNA, 20 nt, Artificial Sequence
  source: /note="Description of Artificial Sequence: Synthetic oligonucleotide"
  source: /note="RNA"
  source: /note="5' tri-ethylene glycol (TEG)"
  modified_base (2)..(2): 5-methyl modified nucleotide
  modified_base (14)..(14): 5-methyl modified nucleotide
  modified_base (19)..(19): 5-methyl modified nucleotide
ucaaggaagauggcauuucu

SEQ ID NO: 2176 - RNA, 22 nt, Artificial Sequence
  source: /note="Description of Artificial Sequence: Synthetic oligonucleotide"
  source: /note="RNA"
  source: /note="5' tri-ethylene glycol (TEG)"
  modified_base (2)..(2): 5-methyl modified nucleotide
  modified_base (14)..(14): 5-methyl modified nucleotide
  modified_base (19)..(19): 5-methyl modified nucleotide
ucaaggaagauggcauuucuag

SEQ ID NO: 2177 - RNA, 16 nt, Artificial Sequence
  source: /note="Description of Artificial Sequence: Synthetic oligonucleotide"
  source: /note="RNA"
  source: /note="5' tri-ethylene glycol (TEG)"
  modified_base (2)..(2): 5-methyl modified nucleotide
  modified_base (14)..(14): 5-methyl modified nucleotide
ucaaggaagauggcau

SEQ ID NO: 2178 - RNA, 15 nt, Artificial Sequence
  source: /note="Description of Artificial Sequence: Synthetic oligonucleotide"
  source: /note="RNA"
  source: /note="5' tri-ethylene glycol (TEG)"
  modified_base (9)..(9): 5-methyl modified nucleotide
  modified_base (14)..(14): 5-methyl modified nucleotide
gaagauggcauuucu

SEQ ID NO: 2179 - RNA, 21 nt, Artificial Sequence
  source: /note="Description of Artificial Sequence: Synthetic oligonucleotide"
  source: /note="RNA"
  source: /note="5' tri-ethylene glycol (TEG)"
  modified_base (2)..(2): 5-methyl modified nucleotide
  modified_base (14)..(14): 5-methyl modified nucleotide
  modified_base (19)..(19): 5-methyl modified nucleotide
ucaaggaagauggcauuucua

SEQ ID NO: 2180 - RNA, 19 nt, Artificial Sequence
  source: /note="Description of Artificial Sequence: Synthetic oligonucleotide"
  source: /note="RNA"
  source: /note="5' tri-ethylene glycol (TEG)"
  modified_base (2)..(2): 5-methyl modified nucleotide
  modified_base (14)..(14): 5-methyl modified nucleotide
  modified_base (19)..(19): 5-methyl modified nucleotide
ucaaggaagauggcauuuc

SEQ ID NO: 2181 - RNA, 18 nt, Artificial Sequence
  source: /note="Description of Artificial Sequence: Synthetic oligonucleotide"
  source: /note="RNA"
  source: /note="5' tri-ethylene glycol (TEG)"
  modified_base (2)..(2): 5-methyl modified nucleotide
  modified_base (14)..(14): 5-methyl modified nucleotide
ucaaggaagauggcauuu

SEQ ID NO: 2182 - RNA, 17 nt, Artificial Sequence
  source: /note="Description of Artificial Sequence: Synthetic oligonucleotide"
  source: /note="RNA"
  source: /note="5' tri-ethylene glycol (TEG)"
  modified_base (2)..(2): 5-methyl modified nucleotide
  modified_base (14)..(14): 5-methyl modified nucleotide
ucaaggaagauggcauu

SEQ ID NO: 2183 - RNA, 15 nt, Artificial Sequence
  source: /note="Description of Artificial Sequence: Synthetic oligonucleotide"
  source: /note="RNA"
  source: /note="5' tri-ethylene glycol (TEG)"
  modified_base (2)..(2): 5-methyl modified nucleotide
  modified_base (14)..(14): 5-methyl modified nucleotide
ucaaggaagauggca

SEQ ID NO: 2184 - RNA, 14 nt, Artificial Sequence
  source: /note="Description of Artificial Sequence: Synthetic oligonucleotide"
  source: /note="RNA"
  source: /note="5' tri-ethylene glycol (TEG)"
  modified_base (2)..(2): 5-methyl modified nucleotide
  modified_base (14)..(14): 5-methyl modified nucleotide
ucaaggaagauggc

SEQ ID NO: 2185 - RNA, 13 nt, Artificial Sequence
  source: /note="Description of Artificial Sequence: Synthetic oligonucleotide"
  source: /note="RNA"
  source: /note="5' tri-ethylene glycol (TEG)"
  modified_base (2)..(2): 5-methyl modified nucleotide
ucaaggaagaugg

SEQ ID NO: 2186 - RNA, 12 nt, Artificial Sequence
  source: /note="Description of Artificial Sequence: Synthetic oligonucleotide"
  source: /note="RNA"
  source: /note="5' tri-ethylene glycol (TEG)"
  modified_base (2)..(2): 5-methyl modified nucleotide
ucaaggaagaug

SEQ ID NO: 2187 - RNA, 11 nt, Artificial Sequence
  source: /note="Description of Artificial Sequence: Synthetic oligonucleotide"
  source: /note="RNA"
  source: /note="5' tri-ethylene glycol (TEG)"
  modified_base (2)..(2): 5-methyl modified nucleotide
ucaaggaagau

SEQ ID NO: 2188 - RNA, 10 nt, Artificial Sequence
  source: /note="Description of Artificial Sequence: Synthetic oligonucleotide"
  source: /note="RNA"
  source: /note="5' tri-ethylene glycol (TEG)"
  modified_base (2)..(2): 5-methyl modified nucleotide
ucaaggaaga

SEQ ID NO: 2189 - RNA, 9 nt, Artificial Sequence
  source: /note="Description of Artificial Sequence: Synthetic oligonucleotide"
  source: /note="RNA"
  source: /note="5' tri-ethylene glycol (TEG)"
  modified_base (2)..(2): 5-methyl modified nucleotide
ucaaggaag

SEQ ID NO: 2190 - RNA, 21 nt, Artificial Sequence
  source: /note="Description of Artificial Sequence: Synthetic oligonucleotide"
  source: /note="RNA"
  source: /note="5' tri-ethylene glycol (TEG)"
  modified_base (1)..(1): 5-methyl modified nucleotide
  modified_base (13)..(13): 5-methyl modified nucleotide
  modified_base (18)..(18): 5-methyl modified nucleotide
caaggaagauggcauuucuag

SEQ ID NO: 2191 - RNA, 20 nt, Artificial Sequence
  source: /note="Description of Artificial Sequence: Synthetic oligonucleotide"
  source: /note="RNA"
  source: /note="5' tri-ethylene glycol (TEG)"
  modified_base (1)..(1): 5-methyl modified nucleotide
  modified_base (13)..(13): 5-methyl modified nucleotide
  modified_base (18)..(18): 5-methyl modified nucleotide
caaggaagauggcauuucua

SEQ ID NO: 2192 - RNA, 19 nt, Artificial Sequence
  source: /note="Description of Artificial Sequence: Synthetic oligonucleotide"
  source: /note="RNA"
  source: /note="5' tri-ethylene glycol (TEG)"
  modified_base (1)..(1): 5-methyl modified nucleotide
  modified_base (13)..(13): 5-methyl modified nucleotide
  modified_base (18)..(18): 5-methyl modified nucleotide
caaggaagauggcauuucu

SEQ ID NO: 2193 - RNA, 18 nt, Artificial Sequence
  source: /note="Description of Artificial Sequence: Synthetic oligonucleotide"
  source: /note="RNA"
  source: /note="5' tri-ethylene glycol (TEG)"
  modified_base (1)..(1): 5-methyl modified nucleotide
  modified_base (13)..(13): 5-methyl modified nucleotide
  modified_base (18)..(18): 5-methyl modified nucleotide
caaggaagauggcauuuc

SEQ ID NO: 2194 - RNA, 17 nt, Artificial Sequence
  source: /note="Description of Artificial Sequence: Synthetic oligonucleotide"
  source: /note="RNA"
  source: /note="5' tri-ethylene glycol (TEG)"
  modified_base (1)..(1): 5-methyl modified nucleotide
  modified_base (13)..(13): 5-methyl modified nucleotide
caaggaagauggcauuu

SEQ ID NO: 2195 - RNA, 16 nt, Artificial Sequence
  source: /note="Description of Artificial Sequence: Synthetic oligonucleotide"
  source: /note="RNA"
  source: /note="5' tri-ethylene glycol (TEG)"
  modified_base (1)..(1): 5-methyl modified nucleotide
  modified_base (13)..(13): 5-methyl modified nucleotide
caaggaagauggcauu

SEQ ID NO: 2196 - RNA, 15 nt, Artificial Sequence
  source: /note="Description of Artificial Sequence: Synthetic oligonucleotide"
  source: /note="RNA"
  source: /note="5' tri-ethylene glycol (TEG)"
  modified_base (1)..(1): 5-methyl modified nucleotide
  modified_base (13)..(13): 5-methyl modified nucleotide
caaggaagauggcau

SEQ ID NO: 2197 - RNA, 14 nt, Artificial Sequence
  source: /note="Description of Artificial Sequence: Synthetic oligonucleotide"
  source: /note="RNA"
  source: /note="5' tri-ethylene glycol (TEG)"
  modified_base (1)..(1): 5-methyl modified nucleotide
  modified_base (13)..(13): 5-methyl modified nucleotide
caaggaagauggca

SEQ ID NO: 2198 - RNA, 13 nt, Artificial Sequence
  source: /note="Description of Artificial Sequence: Synthetic oligonucleotide"
  source: /note="RNA"
  source: /note="5' tri-ethylene glycol (TEG)"
  modified_base (1)..(1): 5-methyl modified nucleotide
  modified_base (13)..(13): 5-methyl modified nucleotide
caaggaagauggc

SEQ ID NO: 2199 - RNA, 12 nt, Artificial Sequence
  source: /note="Description of Artificial Sequence: Synthetic oligonucleotide"
  source: /note="RNA"
  source: /note="5' tri-ethylene glycol (TEG)"
  modified_base (1)..(1): 5-methyl modified nucleotide
caaggaagaugg

SEQ ID NO: 2200 - RNA, 11 nt, Artificial Sequence
  source: /note="Description of Artificial Sequence: Synthetic oligonucleotide"
  source: /note="RNA"
  source: /note="5' tri-ethylene glycol (TEG)"
  modified_base (1)..(1): 5-methyl modified nucleotide
caaggaagaug

SEQ ID NO: 2201 - RNA, 10 nt, Artificial Sequence
  source: /note="Description of Artificial Sequence: Synthetic oligonucleotide"
  source: /note="RNA"
  source: /note="5' tri-ethylene glycol (TEG)"
  modified_base (1)..(1): 5-methyl modified nucleotide
caaggaagau

SEQ ID NO: 2202 - RNA, 9 nt, Artificial Sequence
  source: /note="Description of Artificial Sequence: Synthetic oligonucleotide"
  source: /note="RNA/Antisense Oligonucleotide"
  source: /note="5' tri-ethylene glycol (TEG)"
  modified_base (1)..(1): 5-methyl modified nucleotide
caaggaaga

SEQ ID NO: 2203 - RNA, 8 nt, Artificial Sequence
  source: /note="Description of Artificial Sequence: Synthetic oligonucleotide"
  source: /note="RNA/Antisense Oligonucleotide"
  source: /note="5' tri-ethylene glycol (TEG)"
  modified_base (1)..(1): 5-methyl modified nucleotide
caaggaag

SEQ ID NO: 2204 - RNA, 20 nt, Artificial Sequence
  source: /note="Description of Artificial Sequence: Synthetic oligonucleotide"
  source: /note="RNA"
  source: /note="5' tri-ethylene glycol (TEG)"
  modified_base (12)..(12): 5-methyl modified nucleotide
  modified_base (17)..(17): 5-methyl modified nucleotide
aaggaagauggcauuucuag

SEQ ID NO: 2205 - RNA, 19 nt, Artificial Sequence
  source: /note="Description of Artificial Sequence: Synthetic oligonucleotide"
  source: /note="Antisense Oligonucleotide"
  source: /note="5' tri-ethylene glycol (TEG)"
  modified_base (12)..(12): 5-methyl modified nucleotide
  modified_base (17)..(17): 5-methyl modified nucleotide
aaggaagauggcauuucua

SEQ ID NO: 2206 - RNA, 18 nt, Artificial Sequence
  source: /note="Description of Artificial Sequence: Synthetic oligonucleotide"
  source: /note="RNA"
  source: /note="5' tri-ethylene glycol (TEG)"
  modified_base (12)..(12): 5-methyl modified nucleotide
  modified_base (17)..(17): 5-methyl modified nucleotide
aaggaagauggcauuucu

SEQ ID NO: 2207 - RNA, 17 nt, Artificial Sequence
  source: /note="Description of Artificial Sequence: Synthetic oligonucleotide"
  source: /note="RNA"
  source: /note="5' tri-ethylene glycol (TEG)"
  modified_base (12)..(12): 5-methyl modified nucleotide
  modified_base (17)..(17): 5-methyl modified nucleotide
aaggaagauggcauuuc

SEQ ID NO: 2208 - RNA, 16 nt, Artificial Sequence
  source: /note="Description of Artificial Sequence: Synthetic oligonucleotide"
  source: /note="RNA"
  source: /note="5' tri-ethylene glycol (TEG)"
  modified_base (12)..(12): 5-methyl modified nucleotide
aaggaagauggcauuu

SEQ ID NO: 2209 - RNA, 15 nt, Artificial Sequence
  source: /note="Description of Artificial Sequence: Synthetic oligonucleotide"
  source: /note="RNA"
  source: /note="5' tri-ethylene glycol (TEG)"
  modified_base (12)..(12): 5-methyl modified nucleotide
aaggaagauggcauu

SEQ ID NO: 2210 - RNA, 14 nt, Artificial Sequence
  source: /note="Description of Artificial Sequence: Synthetic oligonucleotide"
  source: /note="RNA"
  source: /note="5' tri-ethylene glycol (TEG)"
  modified_base (12)..(12): 5-methyl modified nucleotide
aaggaagauggcau

SEQ ID NO: 2211 - RNA, 13 nt, Artificial Sequence
  source: /note="Description of Artificial Sequence: Synthetic oligonucleotide"
  source: /note="RNA"
  source: /note="5' tri-ethylene glycol (TEG)"
  modified_base (12)..(12): 5-methyl modified nucleotide
aaggaagauggca

SEQ ID NO: 2212 - RNA, 12 nt, Artificial Sequence
  source: /note="Description of Artificial Sequence: Synthetic oligonucleotide"
  source: /note="RNA"
  source: /note="5' tri-ethylene glycol (TEG)"
  modified_base (12)..(12): 5-methyl modified nucleotide
aaggaagauggc

SEQ ID NO: 2213 - RNA, 11 nt, Artificial Sequence
  source: /note="Description of Artificial Sequence: Synthetic oligonucleotide"
  source: /note="RNA"
  source: /note="5' tri-ethylene glycol (TEG)"
aaggaagaugg

SEQ ID NO: 2214 - RNA, 10 nt, Artificial Sequence
  source: /note="Description of Artificial Sequence: Synthetic oligonucleotide"
  source: /note="RNA"
  source: /note="5' tri-ethylene glycol (TEG)"
aaggaagaug

SEQ ID NO: 2215 - RNA, 9 nt, Artificial Sequence
  source: /note="Description of Artificial Sequence: Synthetic oligonucleotide"
  source: /note="RNA"
  source: /note="5' tri-ethylene glycol (TEG)"
aaggaagau

SEQ ID NO: 2216 - RNA, 8 nt, Artificial Sequence
  source: /note="Description of Artificial Sequence: Synthetic oligonucleotide"
  source: /note="RNA/Antisense Oligonucleotide"
  source: /note="5' tri-ethylene glycol (TEG)"
aaggaaga

SEQ ID NO: 2217 - RNA, 19 nt, Artificial Sequence
  source: /note="Description of Artificial Sequence: Synthetic oligonucleotide"
  source: /note="RNA"
  source: /note="5' tri-ethylene glycol (TEG)"
  modified_base (11)..(11): 5-methyl modified nucleotide
  modified_base (16)..(16): 5-methyl modified nucleotide
aggaagauggcauuucuag

SEQ ID NO: 2218 - RNA, 18 nt, Artificial Sequence
  source: /note="Description of Artificial Sequence: Synthetic oligonucleotide"
  source: /note="RNA"
  source: /note="5' tri-ethylene glycol (TEG)"
  modified_base (11)..(11): 5-methyl modified nucleotide
  modified_base (16)..(16): 5-methyl modified nucleotide
aggaagauggcauuucua

SEQ ID NO: 2219 - RNA, 17 nt, Artificial Sequence
  source: /note="Description of Artificial Sequence: Synthetic oligonucleotide"
  source: /note="RNA"
  source: /note="5' tri-ethylene glycol (TEG)"
  modified_base (11)..(11): 5-methyl modified nucleotide
  modified_base (16)..(16): 5-methyl modified nucleotide
aggaagauggcauuucu

SEQ ID NO: 2220 - RNA, 16 nt, Artificial Sequence
  source: /note="Description of Artificial Sequence: Synthetic oligonucleotide"
  source: /note="RNA"
  source: /note="5' tri-ethylene glycol (TEG)"
  modified_base (11)..(11): 5-methyl modified nucleotide
  modified_base (16)..(16): 5-methyl modified nucleotide
aggaagauggcauuuc

SEQ ID NO: 2221 - RNA, 15 nt, Artificial Sequence
  source: /note="Description of Artificial Sequence: Synthetic oligonucleotide"
  source: /note="RNA"
  source: /note="5' tri-ethylene glycol (TEG)"
  modified_base (11)..(11): 5-methyl modified nucleotide
aggaagauggcauuu

SEQ ID NO: 2222 - RNA, 14 nt, Artificial Sequence
  source: /note="Description of Artificial Sequence: Synthetic oligonucleotide"
  source: /note="RNA"
  source: /note="5' tri-ethylene glycol (TEG)"
  modified_base (11)..(11): 5-methyl modified nucleotide
aggaagauggcauu

SEQ ID NO: 2223 - RNA, 13 nt, Artificial Sequence
  source: /note="Description of Artificial Sequence: Synthetic oligonucleotide"
  source: /note="RNA"
  source: /note="5' tri-ethylene glycol (TEG)"
  modified_base (11)..(11): 5-methyl modified nucleotide
aggaagauggcau

SEQ ID NO: 2224 - RNA, 12 nt, Artificial Sequence
  source: /note="Description of Artificial Sequence: Synthetic oligonucleotide"
  source: /note="RNA"
  source: /note="5' tri-ethylene glycol (TEG)"
  modified_base (11)..(11): 5-methyl modified nucleotide
aggaagauggca

SEQ ID NO: 2225 - RNA, 10 nt, Artificial Sequence
  source: /note="Description of Artificial Sequence: Synthetic oligonucleotide"
  source: /note="RNA"
  source: /note="5' tri-ethylene glycol (TEG)"
aggaagaugg

SEQ ID NO: 2226 - RNA, 9 nt, Artificial Sequence
  source: /note="Description of Artificial Sequence: Synthetic oligonucleotide"
  source: /note="RNA"
  source: /note="5' tri-ethylene glycol (TEG)"
aggaagaug

SEQ ID NO: 2227 - RNA, 8 nt, Artificial Sequence
  source: /note="Description of Artificial Sequence: Synthetic oligonucleotide"
  source: /note="RNA"
  source: /note="5' tri-ethylene glycol (TEG)"
aggaagau

SEQ ID NO: 2228 - RNA, 18 nt, Artificial Sequence
  source: /note="Description of Artificial Sequence: Synthetic oligonucleotide"
  source: /note="RNA"
  source: /note="5' tri-ethylene glycol (TEG)"
  modified_base (10)..(10): 5-methyl modified nucleotide
  modified_base (15)..(15): 5-methyl modified nucleotide
ggaagauggcauuucuag

SEQ ID NO: 2229 - RNA, 17 nt, Artificial Sequence
  source: /note="Description of Artificial Sequence: Synthetic oligonucleotide"
  source: /note="RNA"
  source: /note="5' tri-ethylene glycol (TEG)"
  modified_base (10)..(10): 5-methyl modified nucleotide
  modified_base (15)..(15): 5-methyl modified nucleotide
ggaagauggcauuucua

SEQ ID NO: 2230 - RNA, 16 nt, Artificial Sequence
  source: /note="Description of Artificial Sequence: Synthetic oligonucleotide"
  source: /note="RNA"
  source: /note="5' tri-ethylene glycol (TEG)"
  modified_base (10)..(10): 5-methyl modified nucleotide
  modified_base (15)..(15): 5-methyl modified nucleotide
ggaagauggcauuucu

SEQ ID NO: 2231 - RNA, 15 nt, Artificial Sequence
  source: /note="Description of Artificial Sequence: Synthetic oligonucleotide"
  source: /note="RNA"
  source: /note="5' tri-ethylene glycol (TEG)"
  modified_base (10)..(10): 5-methyl modified nucleotide
  modified_base (15)..(15): 5-methyl modified nucleotide
ggaagauggcauuuc

SEQ ID NO: 2232 - RNA, 14 nt, Artificial Sequence
  source: /note="Description of Artificial Sequence: Synthetic oligonucleotide"
  source: /note="RNA"
  source: /note="5' tri-ethylene glycol (TEG)"
  modified_base (10)..(10): 5-methyl modified nucleotide
ggaagauggcauuu

SEQ ID NO: 2233 - RNA, 13 nt, Artificial Sequence
  source: /note="Description of Artificial Sequence: Synthetic oligonucleotide"
  source: /note="RNA"
  source: /note="5' tri-ethylene glycol (TEG)"
  modified_base (10)..(10): 5-methyl modified nucleotide
ggaagauggcauu

SEQ ID NO: 2234 - RNA, 12 nt, Artificial Sequence
  source: /note="Description of Artificial Sequence: Synthetic oligonucleotide"
  source: /note="RNA"
  source: /note="5' tri-ethylene glycol (TEG)"
  modified_base (10)..(10): 5-methyl modified nucleotide
ggaagauggcau

SEQ ID NO: 2235 - RNA, 11 nt, Artificial Sequence
  source: /note="Description of Artificial Sequence: Synthetic oligonucleotide"
  source: /note="RNA"
  source: /note="5' tri-ethylene glycol (TEG)"
  modified_base (10)..(10): 5-methyl modified nucleotide
ggaagauggca

SEQ ID NO: 2236 - RNA, 10 nt, Artificial Sequence
  source: /note="Description of Artificial Sequence: Synthetic oligonucleotide"
  source: /note="RNA"
  source: /note="5' tri-ethylene glycol (TEG)"
  modified_base (10)..(10): 5-methyl modified nucleotide
ggaagauggc

SEQ ID NO: 2237 - RNA, 8 nt, Artificial Sequence
  source: /note="Description of Artificial Sequence: Synthetic oligonucleotide"
  source: /note="RNA"
  source: /note="5' tri-ethylene glycol (TEG)"
ggaagaug

SEQ ID NO: 2238 - RNA, 17 nt, Artificial Sequence
  source: /note="Description of Artificial Sequence: Synthetic oligonucleotide"
  source: /note="RNA"
  source: /note="5' tri-ethylene glycol (TEG)"
  modified_base (9)..(9): 5-methyl modified nucleotide
  modified_base (14)..(14): 5-methyl modified nucleotide
gaagauggcauuucuag

SEQ ID NO: 2239 - RNA, 16 nt, Artificial Sequence
  source: /note="Description of Artificial Sequence: Synthetic oligonucleotide"
  source: /note="RNA"
  source: /note="5' tri-ethylene glycol (TEG)"
  modified_base (9)..(9): 5-methyl modified nucleotide
  modified_base (14)..(14): 5-methyl modified nucleotide
gaagauggcauuucua

SEQ ID NO: 2240 - RNA, 14 nt, Artificial Sequence
  source: /note="Description of Artificial Sequence: Synthetic oligonucleotide"
  source: /note="RNA"
  source: /note="5' tri-ethylene glycol (TEG)"
  modified_base (9)..(9): 5-methyl modified nucleotide
  modified_base (14)..(14): 5-methyl modified nucleotide
gaagauggcauuuc

SEQ ID NO: 2241 - RNA, 13 nt, Artificial Sequence
  source: /note="Description of Artificial Sequence: Synthetic oligonucleotide"
  source: /note="RNA"
  source: /note="5' tri-ethylene glycol (TEG)"
  modified_base (9)..(9): 5-methyl modified nucleotide
gaagauggcauuu

SEQ ID NO: 2242 - RNA, 12 nt, Artificial Sequence
  source: /note="Description of Artificial Sequence: Synthetic oligonucleotide"
  source: /note="RNA"
  source: /note="5' tri-ethylene glycol (TEG)"
  modified_base (9)..(9): 5-methyl modified nucleotide
gaagauggcauu

SEQ ID NO: 2243 - RNA, 11 nt, Artificial Sequence
  source: /note="Description of Artificial Sequence: Synthetic oligonucleotide"
  source: /note="RNA"
  source: /note="5' tri-ethylene glycol (TEG)"
  modified_base (9)..(9): 5-methyl modified nucleotide
gaagauggcau

SEQ ID NO: 2244 - RNA, 10 nt, Artificial Sequence
  source: /note="Description of Artificial Sequence: Synthetic oligonucleotide"
  source: /note="RNA"
  source: /note="5' tri-ethylene glycol (TEG)"
  modified_base (9)..(9): 5-methyl modified nucleotide
gaagauggca

SEQ ID NO: 2245 - RNA, 9 nt, Artificial Sequence
  source: /note="Description of Artificial Sequence: Synthetic oligonucleotide"
  source: /note="RNA"
  source: /note="5' tri-ethylene glycol (TEG)"
  modified_base (9)..(9): 5-methyl modified nucleotide
gaagauggc

SEQ ID NO: 2246 - RNA, 8 nt, Artificial Sequence
  source: /note="Description of Artificial Sequence: Synthetic oligonucleotide"
  source: /note="RNA"
  source: /note="5' tri-ethylene glycol (TEG)"
gaagaugg

SEQ ID NO: 2247 - RNA, 16 nt, Artificial Sequence
  source: /note="Description of Artificial Sequence: Synthetic oligonucleotide"
  source: /note="RNA"
  source: /note="5' tri-ethylene glycol (TEG)"
  modified_base (8)..(8): 5-methyl modified nucleotide
  modified_base (13)..(13): 5-methyl modified nucleotide
aagauggcauuucuag

SEQ ID NO: 2248 - RNA, 15 nt, Artificial Sequence
  source: /note="Description of Artificial Sequence: Synthetic oligonucleotide"
  source: /note="RNA"
  source: /note="5' tri-ethylene glycol (TEG)"
  modified_base (8)..(8): 5-methyl modified nucleotide
  modified_base (13)..(13): 5-methyl modified nucleotide
aagauggcauuucua

SEQ ID NO: 2249 - RNA, 14 nt, Artificial Sequence
  source: /note="Description of Artificial Sequence: Synthetic oligonucleotide"
  source: /note="RNA"
  source: /note="5' tri-ethylene glycol (TEG)"
  modified_base (8)..(8): 5-methyl modified nucleotide
  modified_base (13)..(13): 5-methyl modified nucleotide
aagauggcauuucu

SEQ ID NO: 2250 - RNA, 13 nt, Artificial Sequence
  source: /note="Description of Artificial Sequence: Synthetic oligonucleotide"
  source: /note="RNA"
  source: /note="5' tri-ethylene glycol (TEG)"
  modified_base (8)..(8): 5-methyl modified nucleotide
  modified_base (13)..(13): 5-methyl modified nucleotide
aagauggcauuuc

SEQ ID NO: 2251 - RNA, 12 nt, Artificial Sequence
  source: /note="Description of Artificial Sequence: Synthetic oligonucleotide"
  source: /note="RNA"
  source: /note="5' tri-ethylene glycol (TEG)"
  modified_base (8)..(8): 5-methyl modified nucleotide
aagauggcauuu

SEQ ID NO: 2252 - RNA, 11 nt, Artificial Sequence
  source: /note="Description of Artificial Sequence: Synthetic oligonucleotide"
  source: /note="RNA"
  source: /note="5' tri-ethylene glycol (TEG)"
  modified_base (8)..(8): 5-methyl modified nucleotide
aagauggcauu

SEQ ID NO: 2253 - RNA, 10 nt, Artificial Sequence
  source: /note="Description of Artificial Sequence: Synthetic oligonucleotide"
  source: /note="RNA"
  source: /note="5' tri-ethylene glycol (TEG)"
  modified_base (8)..(8): 5-methyl modified nucleotide
aagauggcau

SEQ ID NO: 2254 - RNA, 9 nt, Artificial Sequence
  source: /note="Description of Artificial Sequence: Synthetic oligonucleotide"
  source: /note="RNA"
  source: /note="5' tri-ethylene glycol (TEG)"
  modified_base (8)..(8): 5-methyl modified nucleotide
aagauggca

SEQ ID NO: 2255 - RNA, 8 nt, Artificial Sequence
  source: /note="Description of Artificial Sequence: Synthetic oligonucleotide"
  source: /note="RNA"
  source: /note="5' tri-ethylene glycol (TEG)"
  modified_base (8)..(8): 5-methyl modified nucleotide
aagauggc

SEQ ID NO: 2256 - RNA, 15 nt, Artificial Sequence
  source: /note="Description of Artificial Sequence: Synthetic oligonucleotide"
  source: /note="RNA"
  source: /note="5' tri-ethylene glycol (TEG)"
  modified_base (7)..(7): 5-methyl modified nucleotide
  modified_base (12)..(12): 5-methyl modified nucleotide
agauggcauuucuag

SEQ ID NO: 2257 - RNA, 14 nt, Artificial Sequence
  source: /note="Description of Artificial Sequence: Synthetic oligonucleotide"
  source: /note="RNA"
  source: /note="5' tri-ethylene glycol (TEG)"
  modified_base (7)..(7): 5-methyl modified nucleotide
  modified_base (12)..(12): 5-methyl modified nucleotide
agauggcauuucua

SEQ ID NO: 2258 - RNA, 13 nt, Artificial Sequence
  source: /note="Description of Artificial Sequence: Synthetic oligonucleotide"
  source: /note="RNA"
  source: /note="5' tri-ethylene glycol (TEG)"
  modified_base (7)..(7): 5-methyl modified nucleotide
  modified_base (12)..(12): 5-methyl modified nucleotide
agauggcauuucu

SEQ ID NO: 2259 - RNA, 12 nt, Artificial Sequence
  source: /note="Description of Artificial Sequence: Synthetic oligonucleotide"
  source: /note="RNA"
  source: /note="5' tri-ethylene glycol (TEG)"
  modified_base (7)..(7): 5-methyl modified nucleotide
  modified_base (12)..(12): 5-methyl modified nucleotide
agauggcauuuc

SEQ ID NO: 2260 - RNA, 11 nt, Artificial Sequence
  source: /note="Description of Artificial Sequence: Synthetic oligonucleotide"
  source: /note="RNA"
  source: /note="5' tri-ethylene glycol (TEG)"
  modified_base (7)..(7): 5-methyl modified nucleotide
agauggcauuu

SEQ ID NO: 2261 - RNA, 10 nt, Artificial Sequence
  source: /note="Description of Artificial Sequence: Synthetic oligonucleotide"
  source: /note="RNA"
  source: /note="5' tri-ethylene glycol (TEG)"
  modified_base (7)..(7): 5-methyl modified nucleotide
agauggcauu

SEQ ID NO: 2262 - RNA, 9 nt, Artificial Sequence
  source: /note="Description of Artificial Sequence: Synthetic oligonucleotide"
  source: /note="RNA"
  source: /note="5' tri-ethylene glycol (TEG)"
  modified_base (7)..(7): 5-methyl modified nucleotide
agauggcau

SEQ ID NO: 2263 - RNA, 8 nt, Artificial Sequence
  source: /note="Description of Artificial Sequence: Synthetic oligonucleotide"
  source: /note="RNA"
  source: /note="5' tri-ethylene glycol (TEG)"
  modified_base (7)..(7): 5-methyl modified nucleotide
agauggca

SEQ ID NO: 2264 - RNA, 30 nt, Artificial Sequence; identical to SEQ ID NO: 284
  source: /note="Description of Artificial Sequence: Synthetic oligonucleotide"
  source: /note="RNA"
  source: /note="5' tri-ethylene glycol (TEG)"
  modified_base (1)..(1): 5-methyl modified nucleotide
  modified_base (3)..(3): 5-methyl modified nucleotide
  modified_base (4)..(4): 5-methyl modified nucleotide
  modified_base (7)..(7): 5-methyl modified nucleotide
  modified_base (10)..(10): 5-methyl modified nucleotide
  modified_base (22)..(22): 5-methyl modified nucleotide
  modified_base (27)..(27): 5-methyl modified nucleotide

SEQ ID NO: 2265 - RNA, 29 nt, Artificial Sequence
  source: /note="Description of Artificial Sequence: Synthetic oligonucleotide"
  source: /note="RNA"
  source: /note="5' tri-ethylene glycol (TEG)"
  modified_base (1)..(1): 5-methyl modified nucleotide
  modified_base (3)..(3): 5-methyl modified nucleotide
  modified_base (4)..(4): 5-methyl modified nucleotide
  modified_base (7)..(7): 5-methyl modified nucleotide
  modified_base (10)..(10): 5-methyl modified nucleotide
  modified_base (22)..(22): 5-methyl modified nucleotide
  modified_base (27)..(27): 5-methyl modified nucleotide
cuccaacaucaaggaagauggcauuucua

SEQ ID NO: 2266 - RNA, 28 nt, Artificial Sequence
  source: /note="Description of Artificial Sequence: Synthetic oligonucleotide"
  source: /note="RNA"
  source: /note="5' tri-ethylene glycol (TEG)"
  modified_base (1)..(1): 5-methyl modified nucleotide
  modified_base (3)..(3): 5-methyl modified nucleotide
  modified_base (4)..(4): 5-methyl modified nucleotide
  modified_base (7)..(7): 5-methyl modified nucleotide
  modified_base (10)..(10): 5-methyl modified nucleotide
  modified_base (22)..(22): 5-methyl modified nucleotide
  modified_base (27)..(27): 5-methyl modified nucleotide
cuccaacaucaaggaagauggcauuucu

SEQ ID NO: 2267 - RNA, 27 nt, Artificial Sequence
  source: /note="Description of Artificial Sequence: Synthetic oligonucleotide"
  source: /note="RNA"
  source: /note="5' tri-ethylene glycol (TEG)"
  modified_base (1)..(1): 5-methyl modified nucleotide
  modified_base (3)..(3): 5-methyl modified nucleotide
  modified_base (4)..(4): 5-methyl modified nucleotide
  modified_base (7)..(7): 5-methyl modified nucleotide
  modified_base (10)..(10): 5-methyl modified nucleotide
  modified_base (22)..(22): 5-methyl modified nucleotide
  modified_base (27)..(27): 5-methyl modified nucleotide
cuccaacaucaaggaagauggcauuuc

SEQ ID NO: 2268 - RNA, 26 nt, Artificial Sequence
  source: /note="Description of Artificial Sequence: Synthetic oligonucleotide"
  source: /note="RNA"
  source: /note="5' tri-ethylene glycol (TEG)"
  modified_base (1)..(1): 5-methyl modified nucleotide
  modified_base (3)..(3): 5-methyl modified nucleotide
  modified_base (4)..(4): 5-methyl modified nucleotide
  modified_base (7)..(7): 5-methyl modified nucleotide
  modified_base (10)..(10): 5-methyl modified nucleotide
  modified_base (22)..(22): 5-methyl modified nucleotide
cuccaacaucaaggaagauggcauuu

SEQ ID NO: 2269 - RNA, 25 nt, Artificial Sequence
  source: /note="Description of Artificial Sequence: Synthetic oligonucleotide"
  source: /note="RNA"
  source: /note="5' tri-ethylene glycol (TEG)"
  modified_base (1)..(1): 5-methyl modified nucleotide
  modified_base (3)..(3): 5-methyl modified nucleotide
  modified_base (4)..(4): 5-methyl modified nucleotide
  modified_base (7)..(7): 5-methyl modified nucleotide
  modified_base (10)..(10): 5-methyl modified nucleotide
  modified_base (22)..(22): 5-methyl modified nucleotide
cuccaacaucaaggaagauggcauu

SEQ ID NO: 2270 - RNA, 24 nt, Artificial Sequence
  source: /note="Description of Artificial Sequence: Synthetic oligonucleotide"
  source: /note="RNA"
  source: /note="5' tri-ethylene glycol (TEG)"
  modified_base (1)..(1): 5-methyl modified nucleotide
  modified_base (3)..(3): 5-methyl modified nucleotide
  modified_base (4)..(4): 5-methyl modified nucleotide
  modified_base (7)..(7): 5-methyl modified nucleotide
  modified_base (10)..(10): 5-methyl modified nucleotide
  modified_base (22)..(22): 5-methyl modified nucleotide
cuccaacaucaaggaagauggcau

SEQ ID NO: 2271 - RNA, 23 nt, Artificial Sequence
  source: /note="Description of Artificial Sequence: Synthetic oligonucleotide"
  source: /note="RNA"
  source: /note="5' tri-ethylene glycol (TEG)"
  modified_base (1)..(1): 5-methyl modified nucleotide
  modified_base (3)..(3): 5-methyl modified nucleotide
  modified_base (4)..(4): 5-methyl modified nucleotide
  modified_base (7)..(7): 5-methyl modified nucleotide
  modified_base (10)..(10): 5-methyl modified nucleotide
  modified_base (22)..(22): 5-methyl modified nucleotide
cuccaacaucaaggaagauggca

SEQ ID NO: 2272 - RNA, 22 nt, Artificial Sequence
  source: /note="Description of Artificial Sequence: Synthetic oligonucleotide"
  source: /note="RNA"
  source: /note="5' tri-ethylene glycol (TEG)"
  modified_base (1)..(1): 5-methyl modified nucleotide
  modified_base (3)..(3): 5-methyl modified nucleotide
  modified_base (4)..(4): 5-methyl modified nucleotide
  modified_base (7)..(7): 5-methyl modified nucleotide
  modified_base (10)..(10): 5-methyl modified nucleotide
  modified_base (22)..(22): 5-methyl modified nucleotide
cuccaacaucaaggaagauggc

SEQ ID NO: 2273 - RNA, 21 nt, Artificial Sequence
  source: /note="Description of Artificial Sequence: Synthetic oligonucleotide"
  source: /note="RNA"
  source: /note="5' tri-ethylene glycol (TEG)"
  modified_base (1)..(1): 5-methyl modified nucleotide
  modified_base (3)..(3): 5-methyl modified nucleotide
  modified_base (4)..(4): 5-methyl modified nucleotide
  modified_base (7)..(7): 5-methyl modified nucleotide
  modified_base (10)..(10): 5-methyl modified nucleotide
cuccaacaucaaggaagaugg

SEQ ID NO: 2274 - RNA, 20 nt, Artificial Sequence
  source: /note="Description of Artificial Sequence: Synthetic oligonucleotide"
  source: /note="RNA"
  source: /note="5' tri-ethylene glycol (TEG)"
  modified_base (1)..(1): 5-methyl modified nucleotide
  modified_base (3)..(3): 5-methyl modified nucleotide
  modified_base (4)..(4): 5-methyl modified nucleotide
  modified_base (7)..(7): 5-methyl modified nucleotide
  modified_base (10)..(10): 5-methyl modified nucleotide
cuccaacaucaaggaagaug

SEQ ID NO: 2275 - RNA, 19 nt, Artificial Sequence
  source: /note="Description of Artificial Sequence: Synthetic oligonucleotide"
  source: /note="RNA"
  source: /note="5' tri-ethylene glycol (TEG)"
  modified_base (1)..(1): 5-methyl modified nucleotide
  modified_base (3)..(3): 5-methyl modified nucleotide
  modified_base (4)..(4): 5-methyl modified nucleotide
  modified_base (7)..(7): 5-methyl modified nucleotide
  modified_base (10)..(10): 5-methyl modified nucleotide
cuccaacaucaaggaagau

SEQ ID NO: 2276 - RNA, 18 nt, Artificial Sequence
  source: /note="Description of Artificial Sequence: Synthetic oligonucleotide"
  source: /note="RNA"
  source: /note="5' tri-ethylene glycol (TEG)"
  modified_base (1)..(1): 5-methyl modified nucleotide
  modified_base (3)..(3): 5-methyl modified nucleotide
  modified_base (4)..(4): 5-methyl modified nucleotide
  modified_base (7)..(7): 5-methyl modified nucleotide
  modified_base (10)..(10): 5-methyl modified nucleotide
cuccaacaucaaggaaga

SEQ ID NO: 2277 - RNA, 17 nt, Artificial Sequence
  source: /note="Description of Artificial Sequence: Synthetic oligonucleotide"
  source: /note="RNA"
  source: /note="5' tri-ethylene glycol (TEG)"
  modified_base (1)..(1): 5-methyl modified nucleotide
  modified_base (3)..(3): 5-methyl modified nucleotide
  modified_base (4)..(4): 5-methyl modified nucleotide
  modified_base (7)..(7): 5-methyl modified nucleotide
  modified_base (10)..(10): 5-methyl modified nucleotide
cuccaacaucaaggaag

SEQ ID NO: 2278 - RNA, 29 nt, Artificial Sequence
  source: /note="Description of Artificial Sequence: Synthetic oligonucleotide"
  source: /note="RNA"
  source: /note="5' tri-ethylene glycol (TEG)"
  modified_base (2)..(2): 5-methyl modified nucleotide
  modified_base (3)..(3): 5-methyl modified nucleotide
  modified_base (6)..(6): 5-methyl modified nucleotide
  modified_base (9)..(9): 5-methyl modified nucleotide
  modified_base (21)..(21): 5-methyl modified nucleotide
  modified_base (26)..(26): 5-methyl modified nucleotide
uccaacaucaaggaagauggcauuucuag

SEQ ID NO: 2279 - RNA, 28 nt, Artificial Sequence
  source: /note="Description of Artificial Sequence: Synthetic oligonucleotide"
  source: /note="RNA"
  source: /note="5' tri-ethylene glycol (TEG)"
  modified_base (2)..(2): 5-methyl modified nucleotide
  modified_base (3)..(3): 5-methyl modified nucleotide
  modified_base (6)..(6): 5-methyl modified nucleotide
  modified_base (9)..(9): 5-methyl modified nucleotide
  modified_base (21)..(21): 5-methyl modified nucleotide
  modified_base (26)..(26): 5-methyl modified nucleotide
uccaacaucaaggaagauggcauuucua

SEQ ID NO: 2280 - RNA, 27 nt, Artificial Sequence
  source: /note="Description of Artificial Sequence: Synthetic oligonucleotide"
  source: /note="RNA"
  source: /note="5' tri-ethylene glycol (TEG)"
  modified_base (2)..(2): 5-methyl modified nucleotide
  modified_base (3)..(3): 5-methyl modified nucleotide
  modified_base (6)..(6): 5-methyl modified nucleotide
  modified_base (9)..(9): 5-methyl modified nucleotide
  modified_base (21)..(21): 5-methyl modified nucleotide
  modified_base (26)..(26): 5-methyl modified nucleotide
uccaacaucaaggaagauggcauuucu

SEQ ID NO: 2281 - RNA, 26 nt, Artificial Sequence
  source: /note="Description of Artificial Sequence: Synthetic oligonucleotide"
  source: /note="RNA"
  source: /note="5' tri-ethylene glycol (TEG)"
  modified_base (2)..(2): 5-methyl modified nucleotide
  modified_base (3)..(3): 5-methyl modified nucleotide
  modified_base (6)..(6): 5-methyl modified nucleotide
  modified_base (9)..(9): 5-methyl modified nucleotide
  modified_base (21)..(21): 5-methyl modified nucleotide
  modified_base (26)..(26): 5-methyl modified nucleotide
uccaacaucaaggaagauggcauuuc

SEQ ID NO: 2282 - RNA, 25 nt, Artificial Sequence
  source: /note="Description of Artificial Sequence: Synthetic oligonucleotide"
  source: /note="RNA"
  source: /note="5' tri-ethylene glycol (TEG)"
  modified_base (2)..(2): 5-methyl modified nucleotide
  modified_base (3)..(3): 5-methyl modified nucleotide
  modified_base (6)..(6): 5-methyl modified nucleotide
  modified_base (9)..(9): 5-methyl modified nucleotide
  modified_base (21)..(21): 5-methyl modified nucleotide
uccaacaucaaggaagauggcauuu

SEQ ID NO: 2283 - RNA, 24 nt, Artificial Sequence
  source: /note="Description of Artificial Sequence: Synthetic oligonucleotide"
  source: /note="RNA"
  source: /note="5' tri-ethylene glycol (TEG)"
  modified_base (2)..(2): 5-methyl modified nucleotide
  modified_base (3)..(3): 5-methyl modified nucleotide
  modified_base (6)..(6): 5-methyl modified nucleotide
  modified_base (9)..(9): 5-methyl modified nucleotide
  modified_base (21)..(21): 5-methyl modified nucleotide
uccaacaucaaggaagauggcauu

SEQ ID NO: 2284 - RNA, 23 nt, Artificial Sequence
  source: /note="Description of Artificial Sequence: Synthetic oligonucleotide"
  source: /note="RNA"
  source: /note="5' tri-ethylene glycol (TEG)"
  modified_base (2)..(2): 5-methyl modified nucleotide
  modified_base (3)..(3): 5-methyl modified nucleotide
  modified_base (6)..(6): 5-methyl modified nucleotide
  modified_base (9)..(9): 5-methyl modified nucleotide
  modified_base (21)..(21): 5-methyl modified nucleotide
uccaacaucaaggaagauggcau

SEQ ID NO: 2285 - RNA, 22 nt, Artificial Sequence
  source: /note="Description of Artificial Sequence: Synthetic oligonucleotide"
  source: /note="RNA"
  source: /note="5' tri-ethylene glycol (TEG)"
  modified_base (2)..(2): 5-methyl modified nucleotide
  modified_base (3)..(3): 5-methyl modified nucleotide
  modified_base (6)..(6): 5-methyl modified nucleotide
  modified_base (9)..(9): 5-methyl modified nucleotide
  modified_base (21)..(21): 5-methyl modified nucleotide
uccaacaucaaggaagauggca

SEQ ID NO: 2286 - RNA, 21 nt, Artificial Sequence
  source: /note="Description of Artificial Sequence: Synthetic oligonucleotide"
  source: /note="RNA"
  source: /note="5' tri-ethylene glycol (TEG)"
  modified_base (2)..(2): 5-methyl modified nucleotide
  modified_base (3)..(3): 5-methyl modified nucleotide
  modified_base (6)..(6): 5-methyl modified nucleotide
  modified_base (9)..(9): 5-methyl modified nucleotide
  modified_base (21)..(21): 5-methyl modified nucleotide
uccaacaucaaggaagauggc

SEQ ID NO: 2287 - RNA, 20 nt, Artificial Sequence
  source: /note="Description of Artificial Sequence: Synthetic oligonucleotide"
  source: /note="RNA"
  source: /note="5' tri-ethylene glycol (TEG)"
  modified_base (2)..(2): 5-methyl modified nucleotide
  modified_base (3)..(3): 5-methyl modified nucleotide
  modified_base (6)..(6): 5-methyl modified nucleotide
  modified_base (9)..(9): 5-methyl modified nucleotide
uccaacaucaaggaagaugg

SEQ ID NO: 2288 - RNA, 19 nt, Artificial Sequence
  source: /note="Description of Artificial Sequence: Synthetic oligonucleotide"
  source: /note="RNA"
  source: /note="5' tri-ethylene glycol (TEG)"
  modified_base (2)..(2): 5-methyl modified nucleotide
  modified_base (3)..(3): 5-methyl modified nucleotide
  modified_base (6)..(6): 5-methyl modified nucleotide
  modified_base (9)..(9): 5-methyl modified nucleotide
uccaacaucaaggaagaug

SEQ ID NO: 2289 - RNA, 18 nt, Artificial Sequence
  source: /note="Description of Artificial Sequence: Synthetic oligonucleotide"
  source: /note="RNA"
  source: /note="5' tri-ethylene glycol (TEG)"
  modified_base (2)..(2): 5-methyl modified nucleotide
  modified_base (3)..(3): 5-methyl modified nucleotide
  modified_base (6)..(6): 5-methyl modified nucleotide
  modified_base (9)..(9): 5-methyl modified nucleotide
uccaacaucaaggaagau

SEQ ID NO: 2290 - RNA, 17 nt, Artificial Sequence
  source: /note="Description of Artificial Sequence: Synthetic oligonucleotide"
  source: /note="RNA"
  source: /note="5' tri-ethylene glycol (TEG)"
  modified_base (2)..(2): 5-methyl modified nucleotide
  modified_base (3)..(3): 5-methyl modified nucleotide
  modified_base (6)..(6): 5-methyl modified nucleotide
  modified_base (9)..(9): 5-methyl modified nucleotide
uccaacaucaaggaaga

SEQ ID NO: 2291 - RNA, 16 nt, Artificial Sequence
  source: /note="Description of Artificial Sequence: Synthetic oligonucleotide"
  source: /note="RNA"
  source: /note="5' tri-ethylene glycol (TEG)"
  modified_base (2)..(2): 5-methyl modified nucleotide
  modified_base (3)..(3): 5-methyl modified nucleotide
  modified_base (6)..(6): 5-methyl modified nucleotide
  modified_base (9)..(9): 5-methyl modified nucleotide
uccaacaucaaggaag

SEQ ID NO: 2292 - RNA, 28 nt, Artificial Sequence
  source: /note="Description of Artificial Sequence: Synthetic oligonucleotide"
  source: /note="RNA"
  source: /note="5' tri-ethylene glycol (TEG)"
  modified_base (1)..(1): 5-methyl modified nucleotide
  modified_base (2)..(2): 5-methyl modified nucleotide
  modified_base (5)..(5): 5-methyl modified nucleotide
  modified_base (8)..(8): 5-methyl modified nucleotide
  modified_base (20)..(20): 5-methyl modified nucleotide
  modified_base (25)..(25): 5-methyl modified nucleotide
ccaacaucaaggaagauggcauuucuag

SEQ ID NO: 2293 - RNA, 27 nt, Artificial Sequence
  source: /note="Description of Artificial Sequence: Synthetic oligonucleotide"
  source: /note="RNA"
  source: /note="5' tri-ethylene glycol (TEG)"
  modified_base (1)..(1): 5-methyl modified nucleotide
  modified_base (2)..(2): 5-methyl modified nucleotide
  modified_base (5)..(5): 5-methyl modified nucleotide
  modified_base (8)..(8): 5-methyl modified nucleotide
  modified_base (20)..(20): 5-methyl modified nucleotide
  modified_base (25)..(25): 5-methyl modified nucleotide
ccaacaucaaggaagauggcauuucua

SEQ ID NO: 2294 - RNA, 26 nt, Artificial Sequence
  source: /note="Description of Artificial Sequence: Synthetic oligonucleotide"
  source: /note="RNA"
  source: /note="5' tri-ethylene glycol (TEG)"
  modified_base (1)..(1): 5-methyl modified nucleotide
  modified_base (2)..(2): 5-methyl modified nucleotide
  modified_base (5)..(5): 5-methyl modified nucleotide
  modified_base (8)..(8): 5-methyl modified nucleotide
  modified_base (20)..(20): 5-methyl modified nucleotide
  modified_base (25)..(25): 5-methyl modified nucleotide
ccaacaucaaggaagauggcauuucu

SEQ ID NO: 2295 - RNA, 25 nt, Artificial Sequence
  source: /note="Description of Artificial Sequence: Synthetic oligonucleotide"
  source: /note="RNA"
  source: /note="5' tri-ethylene glycol (TEG)"
  modified_base (1)..(1): 5-methyl modified nucleotide
  modified_base (2)..(2): 5-methyl modified nucleotide
  modified_base (5)..(5): 5-methyl modified nucleotide
  modified_base (8)..(8): 5-methyl modified nucleotide
  modified_base (20)..(20): 5-methyl modified nucleotide
  modified_base (25)..(25): 5-methyl modified nucleotide
ccaacaucaaggaagauggcauuuc

SEQ ID NO: 2296 - RNA, 24 nt, Artificial Sequence
  source: /note="Description of Artificial Sequence: Synthetic oligonucleotide"
  source: /note="RNA"
  source: /note="5' tri-ethylene glycol (TEG)"
  modified_base (1)..(1): 5-methyl modified nucleotide
  modified_base (2)..(2): 5-methyl modified nucleotide
  modified_base (5)..(5): 5-methyl modified nucleotide
  modified_base (8)..(8): 5-methyl modified nucleotide
  modified_base (20)..(20): 5-methyl modified nucleotide
ccaacaucaaggaagauggcauuu

SEQ ID NO: 2297 - RNA, 23 nt, Artificial Sequence
  source: /note="Description of Artificial Sequence: Synthetic oligonucleotide"
  source: /note="RNA"
  source: /note="5' tri-ethylene glycol (TEG)"
  modified_base (1)..(1): 5-methyl modified nucleotide
  modified_base (2)..(2): 5-methyl modified nucleotide
  modified_base (5)..(5): 5-methyl modified nucleotide
  modified_base (8)..(8): 5-methyl modified nucleotide
  modified_base (20)..(20): 5-methyl modified nucleotide
ccaacaucaaggaagauggcauu

SEQ ID NO: 2298 - RNA, 22 nt, Artificial Sequence
  source: /note="Description of Artificial Sequence: Synthetic oligonucleotide"
  source: /note="RNA"
  source: /note="5' tri-ethylene glycol (TEG)"
  modified_base (1)..(1): 5-methyl modified nucleotide
  modified_base (2)..(2): 5-methyl modified nucleotide
  modified_base (5)..(5): 5-methyl modified nucleotide
  modified_base (8)..(8): 5-methyl modified nucleotide
  modified_base (20)..(20): 5-methyl modified nucleotide
ccaacaucaaggaagauggcau

SEQ ID NO: 2299 - RNA, 21 nt, Artificial Sequence
  source: /note="Description of Artificial Sequence: Synthetic oligonucleotide"
  source: /note="RNA"
  source: /note="5' tri-ethylene glycol (TEG)"
  modified_base (1)..(1): 5-methyl modified nucleotide
  modified_base (2)..(2): 5-methyl modified nucleotide
  modified_base (5)..(5): 5-methyl modified nucleotide
  modified_base (8)..(8): 5-methyl modified nucleotide
  modified_base (20)..(20): 5-methyl modified nucleotide
ccaacaucaaggaagauggca

SEQ ID NO: 2300 - RNA, 20 nt, Artificial Sequence
  source: /note="Description of Artificial Sequence: Synthetic oligonucleotide"
  source: /note="RNA"
  source: /note="5' tri-ethylene glycol (TEG)"
  modified_base (1)..(1): 5-methyl modified nucleotide
  modified_base (2)..(2): 5-methyl modified nucleotide
  modified_base (5)..(5): 5-methyl modified nucleotide
  modified_base (8)..(8): 5-methyl modified nucleotide
  modified_base (20)..(20): 5-methyl modified nucleotide
ccaacaucaaggaagauggc

SEQ ID NO: 2301 - RNA, 19 nt, Artificial Sequence
  source: /note="Description of Artificial Sequence: Synthetic oligonucleotide"
  source: /note="RNA"
  source: /note="5' tri-ethylene glycol (TEG)"
  modified_base (1)..(1): 5-methyl modified nucleotide
  modified_base (2)..(2): 5-methyl modified nucleotide
  modified_base (5)..(5): 5-methyl modified nucleotide
  modified_base (8)..(8): 5-methyl modified nucleotide
ccaacaucaaggaagaugg

SEQ ID NO: 2302 - RNA, 18 nt, Artificial Sequence
  source: /note="Description of Artificial Sequence: Synthetic oligonucleotide"
  source: /note="RNA"
  source: /note="5' tri-ethylene glycol (TEG)"
  modified_base (1)..(1): 5-methyl modified nucleotide
  modified_base (2)..(2): 5-methyl modified nucleotide
  modified_base (5)..(5): 5-methyl modified nucleotide
  modified_base (8)..(8): 5-methyl modified nucleotide
ccaacaucaaggaagaug

SEQ ID NO: 2303 - RNA, 17 nt, Artificial Sequence
  source: /note="Description of Artificial Sequence: Synthetic oligonucleotide"
  source: /note="RNA"
  source: /note="5' tri-ethylene glycol (TEG)"
  modified_base (1)..(1): 5-methyl modified nucleotide
  modified_base (2)..(2): 5-methyl modified nucleotide
  modified_base (5)..(5): 5-methyl modified nucleotide
  modified_base (8)..(8): 5-methyl modified nucleotide
ccaacaucaaggaagau

SEQ ID NO: 2304 - RNA, 16 nt, Artificial Sequence
  source: /note="Description of Artificial Sequence: Synthetic oligonucleotide"
  source: /note="RNA"
  source: /note="5' tri-ethylene glycol (TEG)"
  modified_base (1)..(1): 5-methyl modified nucleotide
  modified_base (2)..(2): 5-methyl modified nucleotide
  modified_base (5)..(5): 5-methyl modified nucleotide
  modified_base (8)..(8): 5-methyl modified nucleotide
ccaacaucaaggaaga

SEQ ID NO: 2305 - RNA, 15 nt, Artificial Sequence
  source: /note="Description of Artificial Sequence: Synthetic oligonucleotide"
  source: /note="RNA"
  source: /note="5' tri-ethylene glycol (TEG)"
  modified_base (1)..(1): 5-methyl modified nucleotide
  modified_base (2)..(2): 5-methyl modified nucleotide
  modified_base (5)..(5): 5-methyl modified nucleotide
  modified_base (8)..(8): 5-methyl modified nucleotide
ccaacaucaaggaag

SEQ ID NO: 2306 - RNA, 27 nt, Artificial Sequence
  source: /note="Description of Artificial Sequence: Synthetic oligonucleotide"
  source: /note="RNA"
  source: /note="5' tri-ethylene glycol (TEG)"
  modified_base (1)..(1): 5-methyl modified nucleotide
  modified_base (4)..(4): 5-methyl modified nucleotide
  modified_base (7)..(7): 5-methyl modified nucleotide
  modified_base (19)..(19): 5-methyl modified nucleotide
  modified_base (24)..(24): 5-methyl modified nucleotide
caacaucaaggaagauggcauuucuag

SEQ ID NO: 2307 - RNA, 26 nt, Artificial Sequence
  source: /note="Description of Artificial Sequence: Synthetic oligonucleotide"
  source: /note="RNA"
  source: /note="5' tri-ethylene glycol (TEG)"
  modified_base (1)..(1): 5-methyl modified nucleotide
  modified_base (4)..(4): 5-methyl modified nucleotide
  modified_base (7)..(7): 5-methyl modified nucleotide
  modified_base (19)..(19): 5-methyl modified nucleotide
  modified_base (24)..(24): 5-methyl modified nucleotide
caacaucaaggaagauggcauuucua

SEQ ID NO: 2308 - RNA, 25 nt, Artificial Sequence
  source: /note="Description of Artificial Sequence: Synthetic oligonucleotide"
  source: /note="RNA"
  source: /note="5' tri-ethylene glycol (TEG)"
  modified_base (1)..(1): 5-methyl modified nucleotide
  modified_base (4)..(4): 5-methyl modified nucleotide
  modified_base (7)..(7): 5-methyl modified nucleotide
  modified_base (19)..(19): 5-methyl modified nucleotide
  modified_base (24)..(24): 5-methyl modified nucleotide
caacaucaaggaagauggcauuucu

SEQ ID NO: 2309 - RNA, 24 nt, Artificial Sequence
  source: /note="Description of Artificial Sequence: Synthetic oligonucleotide"
  source: /note="RNA"
  source: /note="5' tri-ethylene glycol (TEG)"
  modified_base (1)..(1): 5-methyl modified nucleotide
  modified_base (4)..(4): 5-methyl modified nucleotide
  modified_base (7)..(7): 5-methyl modified nucleotide
  modified_base (19)..(19): 5-methyl modified nucleotide
  modified_base (24)..(24): 5-methyl modified nucleotide
caacaucaaggaagauggcauuuc

SEQ ID NO: 2310 - RNA, 23 nt, Artificial Sequence
  source: /note="Description of Artificial Sequence: Synthetic oligonucleotide"
  source: /note="RNA"
  source: /note="5' tri-ethylene glycol (TEG)"
  modified_base (1)..(1): 5-methyl modified nucleotide
  modified_base (4)..(4): 5-methyl modified nucleotide
  modified_base (7)..(7): 5-methyl modified nucleotide
  modified_base (19)..(19): 5-methyl modified nucleotide
caacaucaaggaagauggcauuu

SEQ ID NO: 2311 - RNA, 22 nt, Artificial Sequence
  source: /note="Description of Artificial Sequence: Synthetic oligonucleotide"
  source: /note="RNA"
  source: /note="5' tri-ethylene glycol (TEG)"
  modified_base (1)..(1): 5-methyl modified nucleotide
  modified_base (4)..(4): 5-methyl modified nucleotide
  modified_base (7)..(7): 5-methyl modified nucleotide
  modified_base (19)..(19): 5-methyl modified nucleotide
caacaucaaggaagauggcauu

SEQ ID NO: 2312 - RNA, 21 nt, Artificial Sequence
  source: /note="Description of Artificial Sequence: Synthetic oligonucleotide"
  source: /note="RNA"
  source: /note="5' tri-ethylene glycol (TEG)"
  modified_base (1)..(1): 5-methyl modified nucleotide
  modified_base (4)..(4): 5-methyl modified nucleotide
  modified_base (7)..(7): 5-methyl modified nucleotide
  modified_base (19)..(19): 5-methyl modified nucleotide
caacaucaaggaagauggcau

SEQ ID NO: 2313 - RNA, 20 nt, Artificial Sequence
  source: /note="Description of Artificial Sequence: Synthetic oligonucleotide"
  source: /note="Antisense Oligonucleotide"
  source: /note="5' tri-ethylene glycol (TEG)"
  modified_base (1)..(1): 5-methyl modified nucleotide
  modified_base (4)..(4): 5-methyl modified nucleotide
  modified_base (7)..(7): 5-methyl modified nucleotide
  modified_base (19)..(19): 5-methyl modified nucleotide
caacaucaaggaagauggca

SEQ ID NO: 2314 - RNA, 19 nt, Artificial Sequence
  source: /note="Description of Artificial Sequence: Synthetic oligonucleotide"
  source: /note="Antisense Oligonucleotide"
  source: /note="5' tri-ethylene glycol (TEG)"
  modified_base (1)..(1): 5-methyl modified nucleotide
  modified_base (4)..(4): 5-methyl modified nucleotide
  modified_base (7)..(7): 5-methyl modified nucleotide
  modified_base (19)..(19): 5-methyl modified nucleotide
caacaucaaggaagauggc

SEQ ID NO: 2315 - RNA, 18 nt, Artificial Sequence
  source: /note="Description of Artificial Sequence: Synthetic oligonucleotide"
  source: /note="Antisense Oligonucleotide"
  source: /note="5' tri-ethylene glycol (TEG)"
  modified_base (1)..(1): 5-methyl modified nucleotide
  modified_base (4)..(4): 5-methyl modified nucleotide
  modified_base (7)..(7): 5-methyl modified nucleotide
caacaucaaggaagaugg

SEQ ID NO: 2316 - RNA, 17 nt, Artificial Sequence
  source: /note="Description of Artificial Sequence: Synthetic oligonucleotide"
  source: /note="Antisense Oligonucleotide"
  source: /note="5' tri-ethylene glycol (TEG)"
  modified_base (1)..(1): 5-methyl modified nucleotide
  modified_base (4)..(4): 5-methyl modified nucleotide
  modified_base (7)..(7): 5-methyl modified nucleotide
caacaucaaggaagaug

SEQ ID NO: 2317 - RNA, 16 nt, Artificial Sequence
  source: /note="Description of Artificial Sequence: Synthetic oligonucleotide"
  source: /note="RNA"
  source: /note="5' tri-ethylene glycol (TEG)"
  modified_base (1)..(1): 5-methyl modified nucleotide
  modified_base (4)..(4): 5-methyl modified nucleotide
  modified_base (7)..(7): 5-methyl modified nucleotide
caacaucaaggaagau

SEQ ID NO: 2318 - RNA, 15 nt, Artificial Sequence
  source: /note="Description of Artificial Sequence: Synthetic oligonucleotide"
  source: /note="RNA"
  source: /note="5' tri-ethylene glycol (TEG)"
  modified_base (1)..(1): 5-methyl modified nucleotide
  modified_base (4)..(4): 5-methyl modified nucleotide
  modified_base (7)..(7): 5-methyl modified nucleotide
caacaucaaggaaga

SEQ ID NO: 2319 - RNA, 14 nt, Artificial Sequence
  source: /note="Description of Artificial Sequence: Synthetic oligonucleotide"
  source: /note="RNA"
  source: /note="5' tri-ethylene glycol (TEG)"
  modified_base (1)..(1): 5-methyl modified nucleotide
  modified_base (4)..(4): 5-methyl modified nucleotide
  modified_base (7)..(7): 5-methyl modified nucleotide
caacaucaaggaag

SEQ ID NO: 2320 - RNA, 26 nt, Artificial Sequence
  source: /note="Description of Artificial Sequence: Synthetic oligonucleotide"
  source: /note="RNA"
  source: /note="5' tri-ethylene glycol (TEG)"
  modified_base (3)..(3): 5-methyl modified nucleotide
  modified_base (6)..(6): 5-methyl modified nucleotide
  modified_base (18)..(18): 5-methyl modified nucleotide
  modified_base (23)..(23): 5-methyl modified nucleotide
aacaucaaggaagauggcauuucuag

SEQ ID NO: 2321 - RNA, 25 nt, Artificial Sequence
  source: /note="Description of Artificial Sequence: Synthetic oligonucleotide"
  source: /note="RNA"
  source: /note="5' tri-ethylene glycol (TEG)"
  modified_base (3)..(3): 5-methyl modified nucleotide
  modified_base (6)..(6): 5-methyl modified nucleotide
  modified_base (18)..(18): 5-methyl modified nucleotide
  modified_base (23)..(23): 5-methyl modified nucleotide
aacaucaaggaagauggcauuucua

SEQ ID NO: 2322 - RNA, 24 nt, Artificial Sequence
  source: /note="Description of Artificial Sequence: Synthetic oligonucleotide"
  source: /note="RNA"
  source: /note="5' tri-ethylene glycol (TEG)"
  modified_base (3)..(3): 5-methyl modified nucleotide
  modified_base (6)..(6): 5-methyl modified nucleotide
  modified_base (18)..(18): 5-methyl modified nucleotide
  modified_base (23)..(23): 5-methyl modified nucleotide
aacaucaaggaagauggcauuucu

SEQ ID NO: 2323 - RNA, 23 nt, Artificial Sequence
  source: /note="Description of Artificial Sequence: Synthetic oligonucleotide"
  source: /note="RNA"
  source: /note="5' tri-ethylene glycol (TEG)"
  modified_base (3)..(3): 5-methyl modified nucleotide
  modified_base (6)..(6): 5-methyl modified nucleotide
  modified_base (18)..(18): 5-methyl modified nucleotide
  modified_base (23)..(23): 5-methyl modified nucleotide
aacaucaaggaagauggcauuuc

SEQ ID NO: 2324 - RNA, 22 nt, Artificial Sequence
  source: /note="Description of Artificial Sequence: Synthetic oligonucleotide"
  source: /note="RNA"
  source: /note="5' tri-ethylene glycol (TEG)"
  modified_base (3)..(3): 5-methyl modified nucleotide
  modified_base (6)..(6): 5-methyl modified nucleotide
  modified_base (18)..(18): 5-methyl modified nucleotide
aacaucaaggaagauggcauuu

SEQ ID NO: 2325 - RNA, 21 nt, Artificial Sequence
  source: /note="Description of Artificial Sequence: Synthetic oligonucleotide"
  source: /note="Antisense Oligonucleotide"
  source: /note="5' tri-ethylene glycol (TEG)"
  modified_base (3)..(3): 5-methyl modified nucleotide
  modified_base (6)..(6): 5-methyl modified nucleotide
  modified_base (18)..(18): 5-methyl modified nucleotide
aacaucaaggaagauggcauu

SEQ ID NO: 2326 - RNA, 20 nt, Artificial Sequence
  source: /note="Description of Artificial Sequence: Synthetic oligonucleotide"
  source: /note="Antisense Oligonucleotide"
  source: /note="5' tri-ethylene glycol (TEG)"
  modified_base (3)..(3): 5-methyl modified nucleotide
  modified_base (6)..(6): 5-methyl modified nucleotide
  modified_base (18)..(18): 5-methyl modified nucleotide
aacaucaaggaagauggcau

SEQ ID NO: 2327 - RNA, 19 nt, Artificial Sequence
  source: /note="Description of Artificial Sequence: Synthetic oligonucleotide"
  source: /note="Antisense Oligonucleotide"
  source: /note="5' tri-ethylene glycol (TEG)"
  modified_base (3)..(3): 5-methyl modified nucleotide
  modified_base (6)..(6): 5-methyl modified nucleotide
  modified_base (18)..(18): 5-methyl modified nucleotide
aacaucaaggaagauggca

SEQ ID NO: 2328 - RNA, 18 nt, Artificial Sequence
  source: /note="Description of Artificial Sequence: Synthetic oligonucleotide"
  source: /note="RNA"
  source: /note="5' tri-ethylene glycol (TEG)"
  modified_base (3)..(3): 5-methyl modified nucleotide
  modified_base (6)..(6): 5-methyl modified nucleotide
  modified_base (18)..(18): 5-methyl modified nucleotide
aacaucaaggaagauggc

SEQ ID NO: 2329 - RNA, 17 nt, Artificial Sequence
  source: /note="Description of Artificial Sequence: Synthetic oligonucleotide"
  source: /note="RNA"
  source: /note="5' tri-ethylene glycol (TEG)"
  modified_base (3)..(3): 5-methyl modified nucleotide
  modified_base (6)..(6): 5-methyl modified nucleotide
aacaucaaggaagaugg

SEQ ID NO: 2330 - RNA, 16 nt, Artificial Sequence
  source: /note="Description of Artificial Sequence: Synthetic oligonucleotide"
  source: /note="RNA"
  source: /note="5' tri-ethylene glycol (TEG)"
  modified_base (3)..(3): 5-methyl modified nucleotide
  modified_base (6)..(6): 5-methyl modified nucleotide
aacaucaaggaagaug

SEQ ID NO: 2331 - RNA, 15 nt, Artificial Sequence
  source: /note="Description of Artificial Sequence: Synthetic oligonucleotide"
  source: /note="RNA"
  source: /note="5' tri-ethylene glycol (TEG)"
  modified_base (3)..(3): 5-methyl modified nucleotide
  modified_base (6)..(6): 5-methyl modified nucleotide
aacaucaaggaagau

SEQ ID NO: 2332 - RNA, 14 nt, Artificial Sequence
  source: /note="Description of Artificial Sequence: Synthetic oligonucleotide"
  source: /note="RNA"
  source: /note="5' tri-ethylene glycol (TEG)"
  modified_base (3)..(3): 5-methyl modified nucleotide
  modified_base (6)..(6): 5-methyl modified nucleotide
aacaucaaggaaga

SEQ ID NO: 2333 - RNA, 13 nt, Artificial Sequence
  source: /note="Description of Artificial Sequence: Synthetic oligonucleotide"
  source: /note="RNA"
  source: /note="5' tri-ethylene glycol (TEG)"
  modified_base (3)..(3): 5-methyl modified nucleotide
  modified_base (6)..(6): 5-methyl modified nucleotide
aacaucaaggaag

SEQ ID NO: 2334 - RNA, 25 nt, Artificial Sequence
  source: /note="Description of Artificial Sequence: Synthetic oligonucleotide"
  source: /note="RNA"
  source: /note="5' tri-ethylene glycol (TEG)"
  modified_base (2)..(2): 5-methyl modified nucleotide
  modified_base (5)..(5): 5-methyl modified nucleotide
  modified_base (17)..(17): 5-methyl modified nucleotide
  modified_base (22)..(22): 5-methyl modified nucleotide
acaucaaggaagauggcauuucuag

SEQ ID NO: 2335 - RNA, 24 nt, Artificial Sequence
  source: /note="Description of Artificial Sequence: Synthetic oligonucleotide"
  source: /note="RNA"
  source: /note="5' tri-ethylene glycol (TEG)"
  modified_base (2)..(2): 5-methyl modified nucleotide
  modified_base (5)..(5): 5-methyl modified nucleotide
  modified_base (17)..(17): 5-methyl modified nucleotide
  modified_base (22)..(22): 5-methyl modified nucleotide
acaucaaggaagauggcauuucua

SEQ ID NO: 2336 - RNA, 23 nt, Artificial Sequence
  source: /note="Description of Artificial Sequence: Synthetic oligonucleotide"
  source: /note="RNA"
  source: /note="5' tri-ethylene glycol (TEG)"
  modified_base (2)..(2): 5-methyl modified nucleotide
  modified_base (5)..(5): 5-methyl modified nucleotide
  modified_base (17)..(17): 5-methyl modified nucleotide
  modified_base (22)..(22): 5-methyl modified nucleotide
acaucaaggaagauggcauuucu

SEQ ID NO: 2337 - RNA, 22 nt, Artificial Sequence
  source: /note="Description of Artificial Sequence: Synthetic oligonucleotide"
  source: /note="Antisense Oligonucleotide"
  source: /note="5' tri-ethylene glycol (TEG)"
  modified_base (2)..(2): 5-methyl modified nucleotide
  modified_base (5)..(5): 5-methyl modified nucleotide
  modified_base (17)..(17): 5-methyl modified nucleotide
  modified_base (22)..(22): 5-methyl modified nucleotide
acaucaaggaagauggcauuuc

SEQ ID NO: 2338 - RNA, 21 nt, Artificial Sequence
  source: /note="Description of Artificial Sequence: Synthetic oligonucleotide"
  source: /note="RNA"
  source: /note="5' tri-ethylene glycol (TEG)"
  modified_base (2)..(2): 5-methyl modified nucleotide
  modified_base (5)..(5): 5-methyl modified nucleotide
  modified_base (17)..(17): 5-methyl modified nucleotide
acaucaaggaagauggcauuu

SEQ ID NO: 2339 - RNA, 20 nt, Artificial Sequence
  source: /note="Description of Artificial Sequence: Synthetic oligonucleotide"
  source: /note="RNA"
  source: /note="5' tri-ethylene glycol (TEG)"
  modified_base (2)..(2): 5-methyl modified nucleotide
  modified_base (5)..(5): 5-methyl modified nucleotide
  modified_base (17)..(17): 5-methyl modified nucleotide
acaucaaggaagauggcauu

SEQ ID NO: 2340 - RNA, 19 nt, Artificial Sequence
  source: /note="Description of Artificial Sequence: Synthetic oligonucleotide"
  source: /note="RNA"
  source: /note="5' tri-ethylene glycol (TEG)"
  modified_base (2)..(2): 5-methyl modified nucleotide
  modified_base (5)..(5): 5-methyl modified nucleotide
  modified_base (17)..(17): 5-methyl modified nucleotide
acaucaaggaagauggcau

SEQ ID NO: 2341 - RNA, 18 nt, Artificial Sequence
  source: /note="Description of Artificial Sequence: Synthetic oligonucleotide"
  source: /note="RNA"
  source: /note="5' tri-ethylene glycol (TEG)"
  modified_base (2)..(2): 5-methyl modified nucleotide
  modified_base (5)..(5): 5-methyl modified nucleotide
  modified_base (17)..(17): 5-methyl modified nucleotide
acaucaaggaagauggca

SEQ ID NO: 2342 - RNA, 17 nt, Artificial Sequence
  source: /note="Description of Artificial Sequence: Synthetic oligonucleotide"
  source: /note="RNA"
  source: /note="5' tri-ethylene glycol (TEG)"
  modified_base (2)..(2): 5-methyl modified nucleotide
  modified_base (5)..(5): 5-methyl modified nucleotide
  modified_base (17)..(17): 5-methyl modified nucleotide
acaucaaggaagauggc

SEQ ID NO: 2343 - RNA, 16 nt, Artificial Sequence
  source: /note="Description of Artificial Sequence: Synthetic oligonucleotide"
  source: /note="RNA"
  source: /note="5' tri-ethylene glycol (TEG)"
  modified_base (2)..(2): 5-methyl modified nucleotide
  modified_base (5)..(5): 5-methyl modified nucleotide
acaucaaggaagaugg

SEQ ID NO: 2344 - RNA, 15 nt, Artificial Sequence
  source: /note="Description of Artificial Sequence: Synthetic oligonucleotide"
  source: /note="RNA"
  source: /note="5' tri-ethylene glycol (TEG)"
  modified_base (2)..(2): 5-methyl modified nucleotide
  modified_base (5)..(5): 5-methyl modified nucleotide
acaucaaggaagaug

SEQ ID NO: 2345 - RNA, 14 nt, Artificial Sequence
  source: /note="Description of Artificial Sequence: Synthetic oligonucleotide"
  source: /note="RNA"
  source: /note="5' tri-ethylene glycol (TEG)"
  modified_base (2)..(2): 5-methyl modified nucleotide
  modified_base (5)..(5): 5-methyl modified nucleotide
acaucaaggaagau

SEQ ID NO: 2346 - RNA, 13 nt, Artificial Sequence
  source: /note="Description of Artificial Sequence: Synthetic oligonucleotide"
  source: /note="Antisense Oligonucleotide"
  source: /note="5' tri-ethylene glycol (TEG)"
  modified_base (2)..(2): 5-methyl modified nucleotide
  modified_base (5)..(5): 5-methyl modified nucleotide
acaucaaggaaga

SEQ ID NO: 2347 - RNA, 12 nt, Artificial Sequence
  source: /note="Description of Artificial Sequence: Synthetic oligonucleotide"
  source: /note="RNA"
  source: /note="5' tri-ethylene glycol (TEG)"
  modified_base (2)..(2): 5-methyl modified nucleotide
  modified_base (5)..(5): 5-methyl modified nucleotide
acaucaaggaag

SEQ ID NO: 2348 - RNA, 24 nt, Artificial Sequence
  source: /note="Description of Artificial Sequence: Synthetic oligonucleotide"
  source: /note="RNA"
  source: /note="5' tri-ethylene glycol (TEG)"
  modified_base (1)..(1): 5-methyl modified nucleotide
  modified_base (4)..(4): 5-methyl modified nucleotide
  modified_base (16)..(16): 5-methyl modified nucleotide
  modified_base (21)..(21): 5-methyl modified nucleotide
caucaaggaagauggcauuucuag

SEQ ID NO: 2349 - RNA, 23 nt, Artificial Sequence
  source: /note="Description of Artificial Sequence: Synthetic oligonucleotide"
  source: /note="RNA"
  source: /note="5' tri-ethylene glycol (TEG)"
  modified_base (1)..(1): 5-methyl modified nucleotide
  modified_base (4)..(4): 5-methyl modified nucleotide
  modified_base (16)..(16): 5-methyl modified nucleotide
  modified_base (21)..(21): 5-methyl modified nucleotide
caucaaggaagauggcauuucua

SEQ ID NO: 2350 - RNA, 22 nt, Artificial Sequence
  source: /note="Description of Artificial Sequence: Synthetic oligonucleotide"
  source: /note="RNA"
  source: /note="5' tri-ethylene glycol (TEG)"
  modified_base (1)..(1): 5-methyl modified nucleotide
  modified_base (4)..(4): 5-methyl modified nucleotide
  modified_base (16)..(16): 5-methyl modified nucleotide
  modified_base (21)..(21): 5-methyl modified nucleotide
caucaaggaagauggcauuucu

SEQ ID NO: 2351 - RNA, 21 nt, Artificial Sequence
  source: /note="Description of Artificial Sequence: Synthetic oligonucleotide"
  source: /note="RNA"
  source: /note="5' tri-ethylene glycol (TEG)"
  modified_base (1)..(1): 5-methyl modified nucleotide
  modified_base (4)..(4): 5-methyl modified nucleotide
  modified_base (16)..(16): 5-methyl modified nucleotide
  modified_base (21)..(21): 5-methyl modified nucleotide
caucaaggaagauggcauuuc

SEQ ID NO: 2352 - RNA, 20 nt, Artificial Sequence
  source: /note="Description of Artificial Sequence: Synthetic oligonucleotide"
  source: /note="RNA"
  source: /note="5' tri-ethylene glycol (TEG)"
  modified_base (1)..(1): 5-methyl modified nucleotide
  modified_base (4)..(4): 5-methyl modified nucleotide
  modified_base (16)..(16): 5-methyl modified nucleotide
caucaaggaagauggcauuu

SEQ ID NO: 2353 - RNA, 19 nt, Artificial Sequence
  source: /note="Description of Artificial Sequence: Synthetic oligonucleotide"
  source: /note="RNA"
  source: /note="5' tri-ethylene glycol (TEG)"
  modified_base (1)..(1): 5-methyl modified nucleotide
  modified_base (4)..(4): 5-methyl modified nucleotide
  modified_base (16)..(16): 5-methyl modified nucleotide
caucaaggaagauggcauu

SEQ ID NO: 2354 - RNA, 18 nt, Artificial Sequence
  source: /note="Description of Artificial Sequence: Synthetic oligonucleotide"
  source: /note="RNA"
  source: /note="5' tri-ethylene glycol (TEG)"
  modified_base (1)..(1): 5-methyl modified nucleotide
  modified_base (4)..(4): 5-methyl modified nucleotide
  modified_base (16)..(16): 5-methyl modified nucleotide
caucaaggaagauggcau

SEQ ID NO: 2355 - RNA, 17 nt, Artificial Sequence
  source: /note="Description of Artificial Sequence: Synthetic oligonucleotide"
  source: /note="RNA"
  source: /note="5' tri-ethylene glycol (TEG)"
  modified_base (1)..(1): 5-methyl modified nucleotide
  modified_base (4)..(4): 5-methyl modified nucleotide
  modified_base (16)..(16): 5-methyl modified nucleotide
caucaaggaagauggca

SEQ ID NO: 2356 - RNA, 16 nt, Artificial Sequence
  source: /note="Description of Artificial Sequence: Synthetic oligonucleotide"
  source: /note="RNA"
  source: /note="5' tri-ethylene glycol (TEG)"
  modified_base (1)..(1): 5-methyl modified nucleotide
  modified_base (4)..(4): 5-methyl modified nucleotide
  modified_base (16)..(16): 5-methyl modified nucleotide
caucaaggaagauggc

SEQ ID NO: 2357 - RNA, 15 nt, Artificial Sequence
  source: /note="Description of Artificial Sequence: Synthetic oligonucleotide"
  source: /note="RNA"
  source: /note="5' tri-ethylene glycol (TEG)"
  modified_base (1)..(1): 5-methyl modified nucleotide
  modified_base (4)..(4): 5-methyl modified nucleotide
caucaaggaagaugg

SEQ ID NO: 2358 - RNA, 14 nt, Artificial Sequence
  source: /note="Description of Artificial Sequence: Synthetic oligonucleotide"
  source: /note="RNA"
  source: /note="5' tri-ethylene glycol (TEG)"
  modified_base (1)..(1): 5-methyl modified nucleotide
  modified_base (4)..(4): 5-methyl modified nucleotide
caucaaggaagaug

SEQ ID NO: 2359 - RNA, 13 nt, Artificial Sequence
  source: /note="Description of Artificial Sequence: Synthetic oligonucleotide"
  source: /note="RNA"
  source: /note="5' tri-ethylene glycol (TEG)"
  modified_base (1)..(1): 5-methyl modified nucleotide
  modified_base (4)..(4): 5-methyl modified nucleotide
caucaaggaagau

SEQ ID NO: 2360 - RNA, 12 nt, Artificial Sequence
  source: /note="Description of Artificial Sequence: Synthetic oligonucleotide"
  source: /note="RNA"
  source: /note="5' tri-ethylene glycol (TEG)"
  modified_base (1)..(1): 5-methyl modified nucleotide
  modified_base (4)..(4): 5-methyl modified nucleotide
caucaaggaaga

SEQ ID NO: 2361 - RNA, 11 nt, Artificial Sequence
  source: /note="Description of Artificial Sequence: Synthetic oligonucleotide"
  source: /note="RNA"
  source: /note="5' tri-ethylene glycol (TEG)"
  modified_base (1)..(1): 5-methyl modified nucleotide
  modified_base (4)..(4): 5-methyl modified nucleotide
caucaaggaag

SEQ ID NO: 2362 - RNA, 23 nt, Artificial Sequence
  source: /note="Description of Artificial Sequence: Synthetic oligonucleotide"
  source: /note="RNA"
  source: /note="5' tri-ethylene glycol (TEG)"
  modified_base (3)..(3): 5-methyl modified nucleotide
  modified_base (15)..(15): 5-methyl modified nucleotide
  modified_base (20)..(20): 5-methyl modified nucleotide
aucaaggaagauggcauuucuag

SEQ ID NO: 2363 - RNA, 22 nt, Artificial Sequence
  source: /note="Description of Artificial Sequence: Synthetic oligonucleotide"
  source: /note="RNA"
  source: /note="5' tri-ethylene glycol (TEG)"
  modified_base (3)..(3): 5-methyl modified nucleotide
  modified_base (15)..(15): 5-methyl modified nucleotide
  modified_base (20)..(20): 5-methyl modified nucleotide
aucaaggaagauggcauuucua

SEQ ID NO: 2364 - RNA, 21 nt, Artificial Sequence
  source: /note="Description of Artificial Sequence: Synthetic oligonucleotide"
  source: /note="RNA"
  source: /note="5' tri-ethylene glycol (TEG)"
  modified_base (3)..(3): 5-methyl modified nucleotide
  modified_base (15)..(15): 5-methyl modified nucleotide
  modified_base (20)..(20): 5-methyl modified nucleotide
aucaaggaagauggcauuucu

SEQ ID NO: 2365 - RNA, 20 nt, Artificial Sequence
  source: /note="Description of Artificial Sequence: Synthetic oligonucleotide"
  source: /note="RNA"
  source: /note="5' tri-ethylene glycol (TEG)"
  modified_base (3)..(3): 5-methyl modified nucleotide
  modified_base (15)..(15): 5-methyl modified nucleotide
  modified_base (20)..(20): 5-methyl modified nucleotide
aucaaggaagauggcauuuc

SEQ ID NO: 2366 - RNA, 19 nt, Artificial Sequence
  source: /note="Description of Artificial Sequence: Synthetic oligonucleotide"
  source: /note="RNA"
  source: /note="5' tri-ethylene glycol (TEG)"
  modified_base (3)..(3): 5-methyl modified nucleotide
  modified_base (15)..(15): 5-methyl modified nucleotide
aucaaggaagauggcauuu

SEQ ID NO: 2367 - RNA, 18 nt, Artificial Sequence
  source: /note="Description of Artificial Sequence: Synthetic oligonucleotide"
  source: /note="RNA"
  source: /note="5' tri-ethylene glycol (TEG)"
  modified_base (3)..(3): 5-methyl modified nucleotide
  modified_base (15)..(15): 5-methyl modified nucleotide
aucaaggaagauggcauu

SEQ ID NO: 2368 - RNA, 17 nt, Artificial Sequence
  source: /note="Description of Artificial Sequence: Synthetic oligonucleotide"
  source: /note="RNA"
  source: /note="5' tri-ethylene glycol (TEG)"
  modified_base (3)..(3): 5-methyl modified nucleotide
  modified_base (15)..(15): 5-methyl modified nucleotide
aucaaggaagauggcau

SEQ ID NO: 2369 - RNA, 16 nt, Artificial Sequence
  source: /note="Description of Artificial Sequence: Synthetic oligonucleotide"
  source: /note="RNA"
  source: /note="5' tri-ethylene glycol (TEG)"
  modified_base (3)..(3): 5-methyl modified nucleotide
  modified_base (15)..(15): 5-methyl modified nucleotide
aucaaggaagauggca

SEQ ID NO: 2370 - RNA, 15 nt, Artificial Sequence
  source: /note="Description of Artificial Sequence: Synthetic oligonucleotide"
  source: /note="RNA"
  source: /note="5' tri-ethylene glycol (TEG)"
  modified_base (3)..(3): 5-methyl modified nucleotide
  modified_base (15)..(15): 5-methyl modified nucleotide
aucaaggaagauggc

SEQ ID NO: 2371 - RNA, 14 nt, Artificial Sequence
  source: /note="Description of Artificial Sequence: Synthetic oligonucleotide"
  source: /note="RNA"
  source: /note="5' tri-ethylene glycol (TEG)"
  modified_base (3)..(3): 5-methyl modified nucleotide
aucaaggaagaugg

SEQ ID NO: 2372 - RNA, 13 nt, Artificial Sequence
  source: /note="Description of Artificial Sequence: Synthetic oligonucleotide"
  source: /note="RNA"
  source: /note="5' tri-ethylene glycol (TEG)"
  modified_base (3)..(3): 5-methyl modified nucleotide
aucaaggaagaug

SEQ ID NO: 2373 - RNA, 12 nt, Artificial Sequence
  source: /note="Description of Artificial Sequence: Synthetic oligonucleotide"
  source: /note="RNA"
  source: /note="5' tri-ethylene glycol (TEG)"
  modified_base (3)..(3): 5-methyl modified nucleotide
aucaaggaagau

SEQ ID NO: 2374 - RNA, 11 nt, Artificial Sequence
  source: /note="Description of Artificial Sequence: Synthetic oligonucleotide"
  source: /note="RNA"
  source: /note="5' tri-ethylene glycol (TEG)"
  modified_base (3)..(3): 5-methyl modified nucleotide
aucaaggaaga

SEQ ID NO: 2375 - RNA, 10 nt, Artificial Sequence
  source: /note="Description of Artificial Sequence: Synthetic oligonucleotide"
  source: /note="RNA"
  source: /note="5' tri-ethylene glycol (TEG)"
  modified_base (3)..(3): 5-methyl modified nucleotide
aucaaggaag

SEQ ID NO: 2376 - RNA, 23 nt, Artificial Sequence
  source: /note="Description of Artificial Sequence: Synthetic oligonucleotide"
  source: /note="RNA"
  source: /note="5' tri-ethylene glycol (TEG)"
  modified_base (1)..(1): 5-methyl modified nucleotide
  modified_base (2)..(2): 5-methyl modified nucleotide
  modified_base (7)..(7): 5-methyl modified nucleotide
  modified_base (13)..(13): 5-methyl modified nucleotide
  modified_base (14)..(14): 5-methyl modified nucleotide
  modified_base (16)..(16): 5-methyl modified nucleotide
  modified_base (17)..(17): 5-methyl modified nucleotide
  modified_base (20)..(20): 5-methyl modified nucleotide
  modified_base (23)..(23): 5-methyl modified nucleotide
ccagagcagguaccuccaacauc

SEQ ID NO: 2377 - RNA, 18 nt, Artificial Sequence
  source: /note="Description of Artificial Sequence: Synthetic oligonucleotide"
  source: /note="RNA"
  source: /note="5' tri-ethylene glycol (TEG)"
  modified_base (1)..(1): 5-methyl modified nucleotide
  modified_base (2)..(2): 5-methyl modified nucleotide
  modified_base (7)..(7): 5-methyl modified nucleotide
  modified_base (13)..(13): 5-methyl modified nucleotide
  modified_base (14)..(14): 5-methyl modified nucleotide
  modified_base (16)..(16): 5-methyl modified nucleotide
  modified_base (17)..(17): 5-methyl modified nucleotide
ccagagcagguaccucca

SEQ ID NO: 2378 - RNA, 23 nt, Artificial Sequence
  source: /note="Description of Artificial Sequence: Synthetic oligonucleotide"
  source: /note="RNA"
  source: /note="5' tri-ethylene glycol (TEG)"
  modified_base (1)..(1): 5-methyl modified nucleotide
  modified_base (2)..(2): 5-methyl modified nucleotide
  modified_base (4)..(4): 5-methyl modified nucleotide
  modified_base (18)..(18): 5-methyl modified nucleotide
ccucugugauuuuauaacuugau

SEQ ID NO: 2379 - RNA, 17 nt, Artificial Sequence
  source: /note="Description of Artificial Sequence: Synthetic oligonucleotide"
  source: /note="RNA"
  source: /note="5' tri-ethylene glycol (TEG)"
  modified_base (2)..(2): 5-methyl modified nucleotide
  modified_base (4)..(4): 5-methyl modified nucleotide
  modified_base (5)..(5): 5-methyl modified nucleotide
  modified_base (6)..(6): 5-methyl modified nucleotide
  modified_base (8)..(8): 5-methyl modified nucleotide
  modified_base (9)..(9): 5-methyl modified nucleotide
  modified_base (12)..(12): 5-methyl modified nucleotide
  modified_base (14)..(14): 5-methyl modified nucleotide
  modified_base (15)..(15): 5-methyl modified nucleotide
  modified_base (16)..(16): 5-methyl modified nucleotide
ucacccaccaucacccu

SEQ ID NO: 2380 - RNA, 20 nt, Artificial Sequence
  source: /note="Description of Artificial Sequence: Synthetic oligonucleotide"
  source: /note="RNA"
  source: /note="5' tri-ethylene glycol (TEG)"
  modified_base (7)..(7): 5-methyl modified nucleotide
  modified_base (8)..(8): 5-methyl modified nucleotide
  modified_base (10)..(10): 5-methyl modified nucleotide
  modified_base (16)..(16): 5-methyl modified nucleotide
  modified_base (18)..(18): 5-methyl modified nucleotide
  modified_base (19)..(19): 5-methyl modified nucleotide
  modified_base (20)..(20): 5-methyl modified nucleotide
ugauauccucaaggucaccc

SEQ ID NO: 2381 - RNA, 22 nt, Artificial Sequence
  source: /note="Description of Artificial Sequence: Synthetic oligonucleotide"
  source: /note="RNA"
  source: /note="5' tri-ethylene glycol (TEG)"
  modified_base (1)..(1): 5-methyl modified nucleotide
  modified_base (4)..(4): 5-methyl modified nucleotide
  modified_base (13)..(13): 5-methyl modified nucleotide
  modified_base (16)..(16): 5-methyl modified nucleotide
  modified_base (18)..(18): 5-methyl modified nucleotide
cugcuugaugaucaucucguug

SEQ ID NO: 2382 - RNA, 18 nt, Artificial Sequence
  source: /note="Description of Artificial Sequence: Synthetic oligonucleotide"
  source: /note="RNA"
  source: /note="5' tri-ethylene glycol (TEG)"
  modified_base (1)..(1): 5-methyl modified nucleotide
  modified_base (4)..(4): 5-methyl modified nucleotide
  modified_base (13)..(13): 5-methyl modified nucleotide
  modified_base (16)..(16): 5-methyl modified nucleotide
  modified_base (18)..(18): 5-methyl modified nucleotide
cugcuugaugaucaucuc

SEQ ID NO: 2383 - RNA, 19 nt, Artificial Sequence
  source: /note="Description of Artificial Sequence: Synthetic oligonucleotide"
  source: /note="RNA"
  source: /note="5' tri-ethylene glycol (TEG)"
  modified_base (5)..(5): 5-methyl modified nucleotide
  modified_base (6)..(6): 5-methyl modified nucleotide
  modified_base (14)..(14): 5-methyl modified nucleotide
  modified_base (15)..(15): 5-methyl modified nucleotide
  modified_base (17)..(17): 5-methyl modified nucleotide
guuuccuuaguaaccacag

SEQ ID NO: 2384 - RNA, 17 nt, Artificial Sequence
  source: /note="Description of Artificial Sequence: Synthetic oligonucleotide"
  source: /note="RNA"
  source: /note="5' tri-ethylene glycol (TEG)"
  modified_base (5)..(5): 5-methyl modified nucleotide
  modified_base (6)..(6): 5-methyl modified nucleotide
  modified_base (14)..(14): 5-methyl modified nucleotide
  modified_base (15)..(15): 5-methyl modified nucleotide
  modified_base (17)..(17): 5-methyl modified nucleotide
guuuccuuaguaaccac

SEQ ID NO: 2385 - RNA, 20 nt, Artificial Sequence
  source: /note="Description of Artificial Sequence: Synthetic oligonucleotide"
  source: /note="RNA"
  modified_base (2)..(2): 5-methyl modified nucleotide
  modified_base (14)..(14): 5-methyl modified nucleotide
  modified_base (19)..(19): 5-methyl modified nucleotide
  source: /note="3' tri-ethylene glycol (TEG)"
ucaaggaagauggcauuucu

SEQ ID NO: 2386 - RNA, 22 nt, Artificial Sequence
  source: /note="Description of Artificial Sequence: Synthetic oligonucleotide"
  source: /note="RNA"
  modified_base (2)..(2): 5-methyl modified nucleotide
  modified_base (14)..(14): 5-methyl modified nucleotide
  modified_base (19)..(19): 5-methyl modified nucleotide
  source: /note="3' tri-ethylene glycol (TEG)"
ucaaggaagauggcauuucuag

SEQ ID NO: 2387 - RNA, 18 nt, Artificial Sequence
  source: /note="Description of Artificial Sequence: Synthetic oligonucleotide"
  source: /note="RNA"
  modified_base (9)..(9): 5-methyl modified nucleotide
  modified_base (13)..(13): 5-methyl modified nucleotide
  modified_base (14)..(14): 5-methyl modified nucleotide
  modified_base (18)..(18): 5-methyl modified nucleotide
  source: /note="3' tri-ethylene glycol (TEG)"
gguaaguucuguccaagc

SEQ ID NO: 2388 - RNA, 18 nt, Artificial Sequence
  source: /note="Description of Artificial Sequence: Synthetic oligonucleotide"
  source: /note="RNA"
  modified_base (8)..(8): 5-methyl modified nucleotide
  modified_base (12)..(12): 5-methyl modified nucleotide
  modified_base (13)..(13): 5-methyl modified nucleotide
  modified_base (17)..(17): 5-methyl modified nucleotide
  modified_base (18)..(18): 5-methyl modified nucleotide
  source: /note="3' tri-ethylene glycol (TEG)"
guaaguucuguccaagcc

SEQ ID NO: 2389 - RNA, 18 nt, Artificial Sequence
  source: /note="Description of Artificial Sequence: Synthetic oligonucleotide"
  source: /note="RNA"
  modified_base (4)..(4): 5-methyl modified nucleotide
  modified_base (13)..(13): 5-methyl modified nucleotide
  modified_base (17)..(17): 5-methyl modified nucleotide
  modified_base (18)..(18): 5-methyl modified nucleotide
  source: /note="3' tri-ethylene glycol (TEG)"
agucgguaaguucugucc

SEQ ID NO: 2390 - RNA, 18 nt, Artificial Sequence
  source: /note="Description of Artificial Sequence: Synthetic oligonucleotide"
  source: /note="RNA"
  modified_base (1)..(1): 5-methyl modified nucleotide
  modified_base (5)..(5): 5-methyl modified nucleotide
  modified_base (6)..(6): 5-methyl modified nucleotide
  modified_base (10)..(10): 5-methyl modified nucleotide
  modified_base (11)..(11): 5-methyl modified nucleotide
  modified_base (12)..(12): 5-methyl modified nucleotide
  source: /note="3' tri-ethylene glycol (TEG)"
cuguccaagcccgguuga

SEQ ID NO: 2391 - RNA, 15 nt, Artificial Sequence
  source: /note="Description of Artificial Sequence: Synthetic oligonucleotide"
  source: /note="RNA"
  modified_base (7)..(7): 5-methyl modified nucleotide
  modified_base (11)..(11): 5-methyl modified nucleotide
  modified_base (12)..(12): 5-methyl modified nucleotide
  source: /note="3' tri-ethylene glycol (TEG)"
uaaguucuguccaag

SEQ ID NO: 2392 - RNA, 20 nt, Artificial Sequence
  source: /note="Description of Artificial Sequence: Synthetic oligonucleotide"
  source: /note="RNA"
  modified_base (3)..(3): 5-methyl modified nucleotide
  modified_base (7)..(7): 5-methyl modified nucleotide
  modified_base (8)..(8): 5-methyl modified nucleotide
  modified_base (12)..(12): 5-methyl modified nucleotide
  modified_base (13)..(13): 5-methyl modified nucleotide
  modified_base (14)..(14): 5-methyl modified nucleotide
  source: /note="3' tri-ethylene glycol (TEG)"
uucuguccaagcccgguuga

SEQ ID NO: 2393 - RNA, 19 nt, Artificial Sequence
  source: /note="Description of Artificial Sequence: Synthetic oligonucleotide"
  source: /note="RNA"
  modified_base (3)..(3): 5-methyl modified nucleotide
  modified_base (7)..(7): 5-methyl modified nucleotide
  modified_base (8)..(8): 5-methyl modified nucleotide
  modified_base (12)..(12): 5-methyl modified nucleotide
  modified_base (13)..(13): 5-methyl modified nucleotide
  modified_base (14)..(14): 5-methyl modified nucleotide
  source: /note="3' tri-ethylene glycol (TEG)"
uucuguccaagcccgguug

SEQ ID NO: 2394 - RNA, 18 nt, Artificial Sequence
  source: /note="Description of Artificial Sequence: Synthetic oligonucleotide"
  source: /note="RNA"
  modified_base (3)..(3): 5-methyl modified nucleotide
  modified_base (7)..(7): 5-methyl modified nucleotide
  modified_base (8)..(8): 5-methyl modified nucleotide
  modified_base (12)..(12): 5-methyl modified nucleotide
  modified_base (13)..(13): 5-methyl modified nucleotide
  modified_base (14)..(14): 5-methyl modified nucleotide
  source: /note="3' tri-ethylene glycol (TEG)"
uucuguccaagcccgguu

SEQ ID NO: 2395 - RNA, 17 nt, Artificial Sequence
  source: /note="Description of Artificial Sequence: Synthetic oligonucleotide"
  source: /note="RNA"
  modified_base (3)..(3): 5-methyl modified nucleotide
  modified_base (7)..(7): 5-methyl modified nucleotide
  modified_base (8)..(8): 5-methyl modified nucleotide
  modified_base (12)..(12): 5-methyl modified nucleotide
  modified_base (13)..(13): 5-methyl modified nucleotide
  modified_base (14)..(14): 5-methyl modified nucleotide
  source: /note="3' tri-ethylene glycol (TEG)"
uucuguccaagcccggu

SEQ ID NO: 2396 - RNA, 16 nt, Artificial Sequence
  source: /note="Description of Artificial Sequence: Synthetic oligonucleotide"
  source: /note="RNA"
  modified_base (3)..(3): 5-methyl modified nucleotide
  modified_base (7)..(7): 5-methyl modified nucleotide
  modified_base (8)..(8): 5-methyl modified nucleotide
  modified_base (12)..(12): 5-methyl modified nucleotide
  modified_base (13)..(13): 5-methyl modified nucleotide
  modified_base (14)..(14): 5-methyl modified nucleotide
  source: /note="3' tri-ethylene glycol (TEG)"
uucuguccaagcccgg

SEQ ID NO: 2397 - RNA, 15 nt, Artificial Sequence
  source: /note="Description of Artificial Sequence: Synthetic oligonucleotide"
  source: /note="RNA"
  modified_base (3)..(3): 5-methyl modified nucleotide
  modified_base (7)..(7): 5-methyl modified nucleotide
  modified_base (8)..(8): 5-methyl modified nucleotide
  modified_base (12)..(12): 5-methyl modified nucleotide
  modified_base (13)..(13): 5-methyl modified nucleotide
  modified_base (14)..(14): 5-methyl modified nucleotide
  source: /note="3' tri-ethylene glycol (TEG)"
uucuguccaagcccg

SEQ ID NO: 2398 - RNA, 14 nt, Artificial Sequence
  source: /note="Description of Artificial Sequence: Synthetic oligonucleotide"
  source: /note="RNA"
  modified_base (3)..(3): 5-methyl modified nucleotide
  modified_base (7)..(7): 5-methyl modified nucleotide
  modified_base (8)..(8): 5-methyl modified nucleotide
  modified_base (12)..(12): 5-methyl modified nucleotide
  modified_base (13)..(13): 5-methyl modified nucleotide
  modified_base (14)..(14): 5-methyl modified nucleotide
  source: /note="3' tri-ethylene glycol (TEG)"
uucuguccaagccc

SEQ ID NO: 2399 - RNA, 13 nt, Artificial Sequence
  source: /note="Description of Artificial Sequence: Synthetic oligonucleotide"
  source: /note="RNA"
  modified_base (3)..(3): 5-methyl modified nucleotide
  modified_base (7)..(7): 5-methyl modified nucleotide
  modified_base (8)..(8): 5-methyl modified nucleotide
  modified_base (12)..(12): 5-methyl modified nucleotide
  modified_base (13)..(13): 5-methyl modified nucleotide
  source: /note="3' tri-ethylene glycol (TEG)"
uucuguccaagcc

SEQ ID NO: 2400 - RNA, 12 nt, Artificial Sequence
  source: /note="Description of Artificial Sequence: Synthetic oligonucleotide"
  source: /note="RNA"
  modified_base (3)..(3): 5-methyl modified nucleotide
  modified_base (7)..(7): 5-methyl modified nucleotide
  modified_base (8)..(8): 5-methyl modified nucleotide
  modified_base (12)..(12): 5-methyl modified nucleotide
  source: /note="3' tri-ethylene glycol (TEG)"
uucuguccaagc

SEQ ID NO: 2401 - RNA, 11 nt, Artificial Sequence
  source: /note="Description of Artificial Sequence: Synthetic oligonucleotide"
  source: /note="RNA"
  modified_base (3)..(3): 5-methyl modified nucleotide
  modified_base (7)..(7): 5-methyl modified nucleotide
  modified_base (8)..(8): 5-methyl modified nucleotide
  source: /note="3' tri-ethylene glycol (TEG)"
uucuguccaag

SEQ ID NO: 2402 - RNA, 10 nt, Artificial Sequence
  source: /note="Description of Artificial Sequence: Synthetic oligonucleotide"
  source: /note="RNA"
  modified_base (3)..(3): 5-methyl modified nucleotide
  modified_base (7)..(7): 5-methyl modified nucleotide
  modified_base (8)..(8): 5-methyl modified nucleotide
  source: /note="3' tri-ethylene glycol (TEG)"
uucuguccaa

SEQ ID NO: 2403 - RNA, 9 nt, Artificial Sequence
  source: /note="Description of Artificial Sequence: Synthetic oligonucleotide"
  source: /note="RNA"
  modified_base (3)..(3): 5-methyl modified nucleotide
  modified_base (7)..(7): 5-methyl modified nucleotide
  modified_base (8)..(8): 5-methyl modified nucleotide
  source: /note="3' tri-ethylene glycol (TEG)"
uucugucca

SEQ ID NO: 2404 - RNA, 8 nt, Artificial Sequence
  source: /note="Description of Artificial Sequence: Synthetic oligonucleotide"
  source: /note="RNA"
  modified_base (3)..(3): 5-methyl modified nucleotide
  modified_base (7)..(7): 5-methyl modified nucleotide
  modified_base (8)..(8): 5-methyl modified nucleotide
  source: /note="3' tri-ethylene glycol (TEG)"
uucugucc

SEQ ID NO: 2405 - RNA, 19 nt, Artificial Sequence
  source: /note="Description of Artificial Sequence: Synthetic oligonucleotide"
  source: /note="RNA"
  modified_base (2)..(2): 5-methyl modified nucleotide
  modified_base (6)..(6): 5-methyl modified nucleotide
  modified_base (7)..(7): 5-methyl modified nucleotide
  modified_base (11)..(11): 5-methyl modified nucleotide
  modified_base (12)..(12): 5-methyl modified nucleotide
  modified_base (13)..(13): 5-methyl modified nucleotide
  source: /note="3' tri-ethylene glycol (TEG)"
ucuguccaagcccgguuga

SEQ ID NO: 2406 - RNA, 18 nt, Artificial Sequence
  source: /note="Description of Artificial Sequence: Synthetic oligonucleotide"
  source: /note="RNA"
  modified_base (2)..(2): 5-methyl modified nucleotide
  modified_base (6)..(6): 5-methyl modified nucleotide
  modified_base (7)..(7): 5-methyl modified nucleotide
  modified_base (11)..(11): 5-methyl modified nucleotide
  modified_base (12)..(12): 5-methyl modified nucleotide
  modified_base (13)..(13): 5-methyl modified nucleotide
  source: /note="3' tri-ethylene glycol (TEG)"
ucuguccaagcccgguug

SEQ ID NO: 2407 - RNA, 17 nt, Artificial Sequence
  source: /note="Description of Artificial Sequence: Synthetic oligonucleotide"
  source: /note="RNA"
  modified_base (2)..(2): 5-methyl modified nucleotide
  modified_base (6)..(6): 5-methyl modified nucleotide
  modified_base (7)..(7): 5-methyl modified nucleotide
  modified_base (11)..(11): 5-methyl modified nucleotide
  modified_base (12)..(12): 5-methyl modified nucleotide
  modified_base (13)..(13): 5-methyl modified nucleotide
  source: /note="3' tri-ethylene glycol (TEG)"
ucuguccaagcccgguu

SEQ ID NO: 2408 - RNA, 16 nt, Artificial Sequence
  source: /note="Description of Artificial Sequence: Synthetic oligonucleotide"
  source: /note="RNA"
  modified_base (2)..(2): 5-methyl modified nucleotide
  modified_base (6)..(6): 5-methyl modified nucleotide
  modified_base (7)..(7): 5-methyl modified nucleotide
  modified_base (11)..(11): 5-methyl modified nucleotide
  modified_base (12)..(12): 5-methyl modified nucleotide
  modified_base (13)..(13): 5-methyl modified nucleotide
  source: /note="3' tri-ethylene glycol (TEG)"
ucuguccaagcccggu

SEQ ID NO: 2409 - RNA, 15 nt, Artificial Sequence
  source: /note="Description of Artificial Sequence: Synthetic oligonucleotide"
  source: /note="RNA"
  modified_base (2)..(2): 5-methyl modified nucleotide
  modified_base (6)..(6): 5-methyl modified nucleotide
  modified_base (7)..(7): 5-methyl modified nucleotide
  modified_base (11)..(11): 5-methyl modified nucleotide
  modified_base (12)..(12): 5-methyl modified nucleotide
  modified_base (13)..(13): 5-methyl modified nucleotide
  source: /note="3' tri-ethylene glycol (TEG)"
ucuguccaagcccgg

SEQ ID NO: 2410 - RNA, 14 nt, Artificial Sequence
  source: /note="Description of Artificial Sequence: Synthetic oligonucleotide"
  source: /note="RNA"
  modified_base (2)..(2): 5-methyl modified nucleotide
  modified_base (6)..(6): 5-methyl modified nucleotide
  modified_base (7)..(7): 5-methyl modified nucleotide
  modified_base (11)..(11): 5-methyl modified nucleotide
  modified_base (12)..(12): 5-methyl modified nucleotide
  modified_base (13)..(13): 5-methyl modified nucleotide
  source: /note="3' tri-ethylene glycol (TEG)"
ucuguccaagcccg

SEQ ID NO: 2411 - RNA, 13 nt, Artificial Sequence
  source: /note="Description of Artificial Sequence: Synthetic oligonucleotide"
  source: /note="RNA"
  modified_base (2)..(2): 5-methyl modified nucleotide
  modified_base (6)..(6): 5-methyl modified nucleotide
  modified_base (7)..(7): 5-methyl modified nucleotide
  modified_base (11)..(11): 5-methyl modified nucleotide
  modified_base (12)..(12): 5-methyl modified nucleotide
  modified_base (13)..(13): 5-methyl modified nucleotide
  source: /note="3' tri-ethylene glycol (TEG)"
ucuguccaagccc

SEQ ID NO: 2412 - RNA, 12 nt, Artificial Sequence
  source: /note="Description of Artificial Sequence: Synthetic oligonucleotide"
  source: /note="RNA"
  modified_base (2)..(2): 5-methyl modified nucleotide
  modified_base (6)..(6): 5-methyl modified nucleotide
  modified_base (7)..(7): 5-methyl modified nucleotide
  modified_base (11)..(11): 5-methyl modified nucleotide
  modified_base (12)..(12): 5-methyl modified nucleotide
  source: /note="3' tri-ethylene glycol (TEG)"
ucuguccaagcc

SEQ ID NO: 2413 - RNA, 11 nt, Artificial Sequence
  source: /note="Description of Artificial Sequence: Synthetic oligonucleotide"
  source: /note="RNA"
  modified_base (2)..(2): 5-methyl modified nucleotide
  modified_base (6)..(6): 5-methyl modified nucleotide
  modified_base (7)..(7): 5-methyl modified nucleotide
  modified_base (11)..(11): 5-methyl modified nucleotide
  source: /note="3' tri-ethylene glycol (TEG)"
ucuguccaagc

SEQ ID NO: 2414 - RNA, 10 nt, Artificial Sequence
  source: /note="Description of Artificial Sequence: Synthetic oligonucleotide"
  source: /note="RNA"
  modified_base (2)..(2): 5-methyl modified nucleotide
  modified_base (6)..(6): 5-methyl modified nucleotide
  modified_base (7)..(7): 5-methyl modified nucleotide
  source: /note="3' tri-ethylene glycol (TEG)"
ucuguccaag

SEQ ID NO: 2415 - RNA, 9 nt, Artificial Sequence
  source: /note="Description of Artificial Sequence: Synthetic oligonucleotide"
  source: /note="RNA"
  modified_base (2)..(2): 5-methyl modified nucleotide
  modified_base (6)..(6): 5-methyl modified nucleotide
  modified_base (7)..(7): 5-methyl modified nucleotide
  source: /note="3' tri-ethylene glycol (TEG)"
ucuguccaa

SEQ ID NO: 2416 - RNA, 8 nt, Artificial Sequence
  source: /note="Description of Artificial Sequence: Synthetic oligonucleotide"
  source: /note="RNA"
  modified_base (2)..(2): 5-methyl modified nucleotide
  modified_base (6)..(6): 5-methyl modified nucleotide
  modified_base (7)..(7): 5-methyl modified nucleotide
  source: /note="3' tri-ethylene glycol (TEG)"
ucugucca

SEQ ID NO: 2417 - RNA, 17 nt, Artificial Sequence
  source: /note="Description of Artificial Sequence: Synthetic oligonucleotide"
  source: /note="RNA"
  modified_base (1)..(1): 5-methyl modified nucleotide
  modified_base (5)..(5): 5-methyl modified nucleotide
  modified_base (6)..(6): 5-methyl modified nucleotide
  modified_base (10)..(10): 5-methyl modified nucleotide
  modified_base (11)..(11): 5-methyl modified nucleotide
  modified_base (12)..(12): 5-methyl modified nucleotide
  source: /note="3' tri-ethylene glycol (TEG)"
cuguccaagcccgguug

SEQ ID NO: 2418 - RNA, 16 nt, Artificial Sequence
  source: /note="Description of Artificial Sequence: Synthetic oligonucleotide"
  source: /note="RNA"
  modified_base (1)..(1): 5-methyl modified nucleotide
  modified_base (5)..(5): 5-methyl modified nucleotide
  modified_base (6)..(6): 5-methyl modified nucleotide
  modified_base (10)..(10): 5-methyl modified nucleotide
  modified_base (11)..(11): 5-methyl modified nucleotide
  modified_base (12)..(12): 5-methyl modified nucleotide
  source: /note="3' tri-ethylene glycol (TEG)"
cuguccaagcccgguu

SEQ ID NO: 2419 - RNA, 15 nt, Artificial Sequence
  source: /note="Description of Artificial Sequence: Synthetic oligonucleotide"
  source: /note="RNA"
  modified_base (1)..(1): 5-methyl modified nucleotide
  modified_base (5)..(5): 5-methyl modified nucleotide
  modified_base (6)..(6): 5-methyl modified nucleotide
  modified_base (10)..(10): 5-methyl modified nucleotide
  modified_base (11)..(11): 5-methyl modified nucleotide
  modified_base (12)..(12): 5-methyl modified nucleotide
  source: /note="3' tri-ethylene glycol (TEG)"
cuguccaagcccggu

SEQ ID NO: 2420 - RNA, 14 nt, Artificial Sequence
  source: /note="Description of Artificial Sequence: Synthetic oligonucleotide"
  source: /note="RNA"
  modified_base (1)..(1): 5-methyl modified nucleotide
  modified_base (5)..(5): 5-methyl modified nucleotide
  modified_base (6)..(6): 5-methyl modified nucleotide
  modified_base (10)..(10): 5-methyl modified nucleotide
  modified_base (11)..(11): 5-methyl modified nucleotide
  modified_base (12)..(12): 5-methyl modified nucleotide
  source: /note="3' tri-ethylene glycol (TEG)"
cuguccaagcccgg

SEQ ID NO: 2421 - RNA, 13 nt, Artificial Sequence
  source: /note="Description of Artificial Sequence: Synthetic oligonucleotide"
  source: /note="RNA"
  modified_base (1)..(1): 5-methyl modified nucleotide
  modified_base (5)..(5): 5-methyl modified nucleotide
  modified_base (6)..(6): 5-methyl modified nucleotide
  modified_base (10)..(10): 5-methyl modified nucleotide
  modified_base (11)..(11): 5-methyl modified nucleotide
  modified_base (12)..(12): 5-methyl modified nucleotide
  source: /note="3' tri-ethylene glycol (TEG)"
cuguccaagcccg

SEQ ID NO: 2422 - RNA, 12 nt, Artificial Sequence
  source: /note="Description of Artificial Sequence: Synthetic oligonucleotide"
  source: /note="RNA"
  modified_base (1)..(1): 5-methyl modified nucleotide
  modified_base (5)..(5): 5-methyl modified nucleotide
  modified_base (6)..(6): 5-methyl modified nucleotide
  modified_base (10)..(10): 5-methyl modified nucleotide
  modified_base (11)..(11): 5-methyl modified nucleotide
  modified_base (12)..(12): 5-methyl modified nucleotide
  source: /note="3' tri-ethylene glycol (TEG)"
cuguccaagccc

SEQ ID NO: 2423 - RNA, 11 nt, Artificial Sequence
  source: /note="Description of Artificial Sequence: Synthetic oligonucleotide"
  source: /note="RNA"
  modified_base (1)..(1): 5-methyl modified nucleotide
  modified_base (5)..(5): 5-methyl modified nucleotide
  modified_base (6)..(6): 5-methyl modified nucleotide
  modified_base (10)..(10): 5-methyl modified nucleotide
  modified_base (11)..(11): 5-methyl modified nucleotide
  source: /note="3' tri-ethylene glycol (TEG)"
cuguccaagcc

SEQ ID NO: 2424 - RNA, 10 nt, Artificial Sequence
  source: /note="Description of Artificial Sequence: Synthetic oligonucleotide"
  source: /note="RNA"
  modified_base (1)..(1): 5-methyl modified nucleotide
  modified_base (5)..(5): 5-methyl modified nucleotide
  modified_base (6)..(6): 5-methyl modified nucleotide
  modified_base (10)..(10): 5-methyl modified nucleotide
  source: /note="3' tri-ethylene glycol (TEG)"
cuguccaagc

SEQ ID NO: 2425 - RNA, 9 nt, Artificial Sequence
  source: /note="Description of Artificial Sequence: Synthetic oligonucleotide"
  source: /note="RNA"
  modified_base (1)..(1): 5-methyl modified nucleotide
  modified_base (5)..(5): 5-methyl modified nucleotide
  modified_base (6)..(6): 5-methyl modified nucleotide
  source: /note="3' tri-ethylene glycol (TEG)"
cuguccaag

SEQ ID NO: 2426 - RNA, 8 nt, Artificial Sequence
  source: /note="Description of Artificial Sequence: Synthetic oligonucleotide"
  source: /note="RNA"
  modified_base (1)..(1): 5-methyl modified nucleotide
  modified_base (5)..(5): 5-methyl modified nucleotide
  modified_base (6)..(6): 5-methyl modified nucleotide
  source: /note="3' tri-ethylene glycol (TEG)"
cuguccaa

SEQ ID NO: 2427 - RNA, 20 nt, Artificial Sequence
  source: /note="Description of Artificial Sequence: Synthetic oligonucleotide"
  source: /note="RNA"
  modified_base (4)..(4): 5-methyl modified nucleotide
  modified_base (8)..(8): 5-methyl modified nucleotide
  modified_base (9)..(9): 5-methyl modified nucleotide
  modified_base (13)..(13): 5-methyl modified nucleotide
  modified_base (14)..(14): 5-methyl modified nucleotide
  modified_base (15)..(15): 5-methyl modified nucleotide
  source: /note="3' tri-ethylene glycol (TEG)"
guucuguccaagcccgguug

SEQ ID NO: 2428 - RNA, 19 nt, Artificial Sequence
  source: /note="Description of Artificial Sequence: Synthetic oligonucleotide"
  source: /note="RNA"
  modified_base (4)..(4): 5-methyl modified nucleotide
  modified_base (8)..(8): 5-methyl modified nucleotide
  modified_base (9)..(9): 5-methyl modified nucleotide
  modified_base (13)..(13): 5-methyl modified nucleotide
  modified_base (14)..(14): 5-methyl modified nucleotide
  modified_base (15)..(15): 5-methyl modified nucleotide
  source: /note="3' tri-ethylene glycol (TEG)"
guucuguccaagcccgguu

SEQ ID NO: 2429 - RNA, 18 nt, Artificial Sequence
  source: /note="Description of Artificial Sequence: Synthetic oligonucleotide"
  source: /note="RNA"
  modified_base (4)..(4): 5-methyl modified nucleotide
  modified_base (8)..(8): 5-methyl modified nucleotide
  modified_base (9)..(9): 5-methyl modified nucleotide
  modified_base (13)..(13): 5-methyl modified nucleotide
  modified_base (14)..(14): 5-methyl modified nucleotide
  modified_base (15)..(15): 5-methyl modified nucleotide
  source: /note="3' tri-ethylene glycol (TEG)"
guucuguccaagcccggu

SEQ ID NO: 2430 - RNA, 17 nt, Artificial Sequence
  source: /note="Description of Artificial Sequence: Synthetic oligonucleotide"
  source: /note="RNA"
  modified_base (4)..(4): 5-methyl modified nucleotide
  modified_base (8)..(8): 5-methyl modified nucleotide
  modified_base (9)..(9): 5-methyl modified nucleotide
  modified_base (13)..(13): 5-methyl modified nucleotide
  modified_base (14)..(14): 5-methyl modified nucleotide
  modified_base (15)..(15): 5-methyl modified nucleotide
  source: /note="3' tri-ethylene glycol (TEG)"
guucuguccaagcccgg

SEQ ID NO: 2431 - RNA, 16 nt, Artificial Sequence
  source: /note="Description of Artificial Sequence: Synthetic oligonucleotide"
  source: /note="RNA"
  modified_base (4)..(4): 5-methyl modified nucleotide
  modified_base (8)..(8): 5-methyl modified nucleotide
  modified_base (9)..(9): 5-methyl modified nucleotide
  modified_base (13)..(13): 5-methyl modified nucleotide
  modified_base (14)..(14): 5-methyl modified nucleotide
  modified_base (15)..(15): 5-methyl modified nucleotide
  source: /note="3' tri-ethylene glycol (TEG)"
guucuguccaagcccg

SEQ ID NO: 2432 - RNA, 15 nt, Artificial Sequence
  source: /note="Description of Artificial Sequence: Synthetic oligonucleotide"
  source: /note="RNA"
  modified_base (4)..(4): 5-methyl modified nucleotide
  modified_base (8)..(8): 5-methyl modified nucleotide
  modified_base (9)..(9): 5-methyl modified nucleotide
  modified_base (13)..(13): 5-methyl modified nucleotide
  modified_base (14)..(14): 5-methyl modified nucleotide
  modified_base (15)..(15): 5-methyl modified nucleotide
  source: /note="3' tri-ethylene glycol (TEG)"
guucuguccaagccc

SEQ ID NO: 2433 - RNA, 14 nt, Artificial Sequence
  source: /note="Description of Artificial Sequence: Synthetic oligonucleotide"
  source: /note="RNA"
  modified_base (4)..(4): 5-methyl modified nucleotide
  modified_base (8)..(8): 5-methyl modified nucleotide
  modified_base (9)..(9): 5-methyl modified nucleotide
  modified_base (13)..(13): 5-methyl modified nucleotide
  modified_base (14)..(14): 5-methyl modified nucleotide
  source: /note="3' tri-ethylene glycol (TEG)"
guucuguccaagcc

SEQ ID NO: 2434 - RNA, 13 nt, Artificial Sequence
  source: /note="Description of Artificial Sequence: Synthetic oligonucleotide"
  source: /note="RNA"
  modified_base (4)..(4): 5-methyl modified nucleotide
  modified_base (8)..(8): 5-methyl modified nucleotide
  modified_base (9)..(9): 5-methyl modified nucleotide
  modified_base (13)..(13): 5-methyl modified nucleotide
  source: /note="3' tri-ethylene glycol (TEG)"
guucuguccaagc

SEQ ID NO: 2435 - RNA, 12 nt, Artificial Sequence
  source: /note="Description of Artificial Sequence: Synthetic oligonucleotide"
  source: /note="RNA"
  modified_base (4)..(4): 5-methyl modified nucleotide
  modified_base (8)..(8): 5-methyl modified nucleotide
  modified_base (9)..(9): 5-methyl modified nucleotide
  source: /note="3' tri-ethylene glycol (TEG)"
guucuguccaag

SEQ ID NO: 2436 - RNA, 11 nt, Artificial Sequence
  source: /note="Description of Artificial Sequence: Synthetic oligonucleotide"
  source: /note="RNA"
  modified_base (4)..(4): 5-methyl modified nucleotide
  modified_base (8)..(8): 5-methyl modified nucleotide
  modified_base (9)..(9): 5-methyl modified nucleotide
  source: /note="3' tri-ethylene glycol (TEG)"
guucuguccaa

SEQ ID NO: 2437 - RNA, 10 nt, Artificial Sequence
  source: /note="Description of Artificial Sequence: Synthetic oligonucleotide"
  source: /note="RNA"
  modified_base (4)..(4): 5-methyl modified nucleotide
  modified_base (8)..(8): 5-methyl modified nucleotide
  modified_base (9)..(9): 5-methyl modified nucleotide
  source: /note="3' tri-ethylene glycol (TEG)"
guucugucca

SEQ ID NO: 2438 - RNA, 9 nt, Artificial Sequence
  source: /note="Description of Artificial Sequence: Synthetic oligonucleotide"
  source: /note="RNA"
  modified_base (4)..(4): 5-methyl modified nucleotide
  modified_base (8)..(8): 5-methyl modified nucleotide
  modified_base (9)..(9): 5-methyl modified nucleotide
  source: /note="3' tri-ethylene glycol (TEG)"
guucugucc

SEQ ID NO: 2439 - RNA, 8 nt, Artificial Sequence
  source: /note="Description of Artificial Sequence: Synthetic oligonucleotide"
  source: /note="RNA"
  modified_base (4)..(4): 5-methyl modified nucleotide
  modified_base (8)..(8): 5-methyl modified nucleotide
  source: /note="3' tri-ethylene glycol (TEG)"
guucuguc

SEQ ID NO: 2440 - RNA, 20 nt, Artificial Sequence
  source: /note="Description of Artificial Sequence: Synthetic oligonucleotide"
  source: /note="RNA"
  modified_base (5)..(5): 5-methyl modified nucleotide
  modified_base (9)..(9): 5-methyl modified nucleotide
  modified_base (10)..(10): 5-methyl modified nucleotide
  modified_base (14)..(14): 5-methyl modified nucleotide
  modified_base (15)..(15): 5-methyl modified nucleotide
  modified_base (16)..(16): 5-methyl modified nucleotide
  source: /note="3' tri-ethylene glycol (TEG)"
aguucuguccaagcccgguu

SEQ ID NO: 2441 - RNA, 19 nt, Artificial Sequence
  source: /note="Description of Artificial Sequence: Synthetic oligonucleotide"
  source: /note="RNA"
  modified_base (5)..(5): 5-methyl modified nucleotide
  modified_base (9)..(9): 5-methyl modified nucleotide
  modified_base (10)..(10): 5-methyl modified nucleotide
  modified_base (14)..(14): 5-methyl modified nucleotide
  modified_base (15)..(15): 5-methyl modified nucleotide
  modified_base (16)..(16): 5-methyl modified nucleotide
  source: /note="3' tri-ethylene glycol (TEG)"
aguucuguccaagcccggu

SEQ ID NO: 2442 - RNA, 18 nt, Artificial Sequence
  source: /note="Description of Artificial Sequence: Synthetic oligonucleotide"
  source: /note="RNA"
  modified_base (5)..(5): 5-methyl modified nucleotide
  modified_base (9)..(9): 5-methyl modified nucleotide
  modified_base (10)..(10): 5-methyl modified nucleotide
  modified_base (14)..(14): 5-methyl modified nucleotide
  modified_base (15)..(15): 5-methyl modified nucleotide
  modified_base (16)..(16): 5-methyl modified nucleotide
  source: /note="3' tri-ethylene glycol (TEG)"
aguucuguccaagcccgg

SEQ ID NO: 2443 - RNA, 17 nt, Artificial Sequence
  source: /note="Description of Artificial Sequence: Synthetic oligonucleotide"
  source: /note="RNA"
  modified_base (5)..(5): 5-methyl modified nucleotide
  modified_base (9)..(9): 5-methyl modified nucleotide
  modified_base (10)..(10): 5-methyl modified nucleotide
  modified_base (14)..(14): 5-methyl modified nucleotide
  modified_base (15)..(15): 5-methyl modified nucleotide
  modified_base (16)..(16): 5-methyl modified nucleotide
  source: /note="3' tri-ethylene glycol (TEG)"
aguucuguccaagcccg

SEQ ID NO: 2444 - RNA, 16 nt, Artificial Sequence
  source: /note="Description of Artificial Sequence: Synthetic oligonucleotide"
  source: /note="RNA"
  modified_base (5)..(5): 5-methyl modified nucleotide
  modified_base (9)..(9): 5-methyl modified nucleotide
  modified_base (10)..(10): 5-methyl modified nucleotide
  modified_base (14)..(14): 5-methyl modified nucleotide
  modified_base (15)..(15): 5-methyl modified nucleotide
  modified_base (16)..(16): 5-methyl modified nucleotide
  source: /note="3' tri-ethylene glycol (TEG)"
aguucuguccaagccc

SEQ ID NO: 2445 - RNA, 15 nt, Artificial Sequence
  source: /note="Description of Artificial Sequence: Synthetic oligonucleotide"
  source: /note="RNA"
  modified_base (5)..(5): 5-methyl modified nucleotide
  modified_base (9)..(9): 5-methyl modified nucleotide
  modified_base (10)..(10): 5-methyl modified nucleotide
  modified_base (14)..(14): 5-methyl modified nucleotide
  modified_base (15)..(15): 5-methyl modified nucleotide
  source: /note="3' tri-ethylene glycol (TEG)"
aguucuguccaagcc

SEQ ID NO: 2446 - RNA, 14 nt, Artificial Sequence
  source: /note="Description of Artificial Sequence: Synthetic oligonucleotide"
  source: /note="RNA"
  modified_base (5)..(5): 5-methyl modified nucleotide
  modified_base (9)..(9): 5-methyl modified nucleotide
  modified_base (10)..(10): 5-methyl modified nucleotide
  modified_base (14)..(14): 5-methyl modified nucleotide
  source: /note="3' tri-ethylene glycol (TEG)"
aguucuguccaagc

SEQ ID NO: 2447 - RNA, 13 nt, Artificial Sequence
  source: /note="Description of Artificial Sequence: Synthetic oligonucleotide"
  source: /note="RNA"
  modified_base (5)..(5): 5-methyl modified nucleotide
  modified_base (9)..(9): 5-methyl modified nucleotide
  modified_base (10)..(10): 5-methyl modified nucleotide
  source: /note="3' tri-ethylene glycol (TEG)"
aguucuguccaag

SEQ ID NO: 2448 - RNA, 12 nt, Artificial Sequence
  source: /note="Description of Artificial Sequence: Synthetic oligonucleotide"
  source: /note="RNA"
  modified_base (5)..(5): 5-methyl modified nucleotide
  modified_base (9)..(9): 5-methyl modified nucleotide
  modified_base (10)..(10): 5-methyl modified nucleotide
  source: /note="3' tri-ethylene glycol (TEG)"
aguucuguccaa

SEQ ID NO: 2449 - RNA, 11 nt, Artificial Sequence
  source: /note="Description of Artificial Sequence: Synthetic oligonucleotide"
  source: /note="RNA"
  modified_base (5)..(5): 5-methyl modified nucleotide
  modified_base (9)..(9): 5-methyl modified nucleotide
  modified_base (10)..(10): 5-methyl modified nucleotide
  source: /note="3' tri-ethylene glycol (TEG)"
aguucugucca

SEQ ID NO: 2450 - RNA, 10 nt, Artificial Sequence
  source: /note="Description of Artificial Sequence: Synthetic oligonucleotide"
  source: /note="RNA"
  modified_base (5)..(5): 5-methyl modified nucleotide
  modified_base (9)..(9): 5-methyl modified nucleotide
  modified_base (10)..(10): 5-methyl modified nucleotide
  source: /note="3' tri-ethylene glycol (TEG)"
aguucugucc

SEQ ID NO: 2451 - RNA, 9 nt, Artificial Sequence
  source: /note="Description of Artificial Sequence: Synthetic oligonucleotide"
  source: /note="RNA"
  modified_base (5)..(5): 5-methyl modified nucleotide
  modified_base (9)..(9): 5-methyl modified nucleotide
  source: /note="3' tri-ethylene glycol (TEG)"
aguucuguc

SEQ ID NO: 2452 - RNA, 8 nt, Artificial Sequence
  source: /note="Description of Artificial Sequence: Synthetic oligonucleotide"
  source: /note="RNA"
  modified_base (5)..(5): 5-methyl modified nucleotide
  source: /note="3' tri-ethylene glycol (TEG)"
aguucugu

SEQ ID NO: 2453 - RNA, 20 nt, Artificial Sequence
  source: /note="Description of Artificial Sequence: Synthetic oligonucleotide"
  source: /note="RNA"
  modified_base (6)..(6): 5-methyl modified nucleotide
  modified_base (10)..(10): 5-methyl modified nucleotide
  modified_base (11)..(11): 5-methyl modified nucleotide
  modified_base (15)..(15): 5-methyl modified nucleotide
  modified_base (16)..(16): 5-methyl modified nucleotide
  modified_base (17)..(17): 5-methyl modified nucleotide
  source: /note="3' tri-ethylene glycol (TEG)"
aaguucuguccaagcccggu

SEQ ID NO: 2454 - RNA, 19 nt, Artificial Sequence
  source: /note="Description of Artificial Sequence: Synthetic oligonucleotide"
  source: /note="RNA"
  modified_base (6)..(6): 5-methyl modified nucleotide
  modified_base (10)..(10): 5-methyl modified nucleotide
  modified_base (11)..(11): 5-methyl modified nucleotide
  modified_base (15)..(15): 5-methyl modified nucleotide
  modified_base (16)..(16): 5-methyl modified nucleotide
  modified_base (17)..(17): 5-methyl modified nucleotide
  source: /note="3' tri-ethylene glycol (TEG)"
aaguucuguccaagcccgg

SEQ ID NO: 2455 - RNA, 18 nt, Artificial Sequence
  source: /note="Description of Artificial Sequence: Synthetic oligonucleotide"
  source: /note="RNA"
  modified_base (6)..(6): 5-methyl modified nucleotide
  modified_base (10)..(10): 5-methyl modified nucleotide
  modified_base (11)..(11): 5-methyl modified nucleotide
  modified_base (15)..(15): 5-methyl modified nucleotide
  modified_base (16)..(16): 5-methyl modified nucleotide
  modified_base (17)..(17): 5-methyl modified nucleotide
  source: /note="3' tri-ethylene glycol (TEG)"
aaguucuguccaagcccg

SEQ ID NO: 2456 - RNA, 17 nt, Artificial Sequence
  source: /note="Description of Artificial Sequence: Synthetic oligonucleotide"
  source: /note="RNA"
  modified_base (6)..(6): 5-methyl modified nucleotide
  modified_base (10)..(10): 5-methyl modified nucleotide
  modified_base (11)..(11): 5-methyl modified nucleotide
  modified_base (15)..(15): 5-methyl modified nucleotide
  modified_base (16)..(16): 5-methyl modified nucleotide
  modified_base (17)..(17): 5-methyl modified nucleotide
  source: /note="3' tri-ethylene glycol (TEG)"
aaguucuguccaagccc

SEQ ID NO: 2457 - RNA, 16 nt, Artificial Sequence
  source: /note="Description of Artificial Sequence: Synthetic oligonucleotide"
  source: /note="RNA"
  modified_base (6)..(6): 5-methyl modified nucleotide
  modified_base (10)..(10): 5-methyl modified nucleotide
  modified_base (11)..(11): 5-methyl modified nucleotide
  modified_base (15)..(15): 5-methyl modified nucleotide
  modified_base (16)..(16): 5-methyl modified nucleotide
  source: /note="3' tri-ethylene glycol (TEG)"
aaguucuguccaagcc

SEQ ID NO: 2458 - RNA, 15 nt, Artificial Sequence
  source: /note="Description of Artificial Sequence: Synthetic oligonucleotide"
  source: /note="RNA"
  modified_base (6)..(6): 5-methyl modified nucleotide
  modified_base (10)..(10): 5-methyl modified nucleotide
  modified_base (11)..(11): 5-methyl modified nucleotide
  modified_base (15)..(15): 5-methyl modified nucleotide
  source: /note="3' tri-ethylene glycol (TEG)"
aaguucuguccaagc

SEQ ID NO: 2459 - RNA, 14 nt, Artificial Sequence
  source: /note="Description of Artificial Sequence: Synthetic oligonucleotide"
  source: /note="RNA"
  modified_base (6)..(6): 5-methyl modified nucleotide
  modified_base (10)..(10): 5-methyl modified nucleotide
  modified_base (11)..(11): 5-methyl modified nucleotide
  source: /note="3' tri-ethylene glycol (TEG)"
aaguucuguccaag

SEQ ID NO: 2460 - RNA, 13 nt, Artificial Sequence
  source: /note="Description of Artificial Sequence: Synthetic oligonucleotide"
  source: /note="RNA"
  modified_base (6)..(6): 5-methyl modified nucleotide
  modified_base (10)..(10): 5-methyl modified nucleotide
  modified_base (11)..(11): 5-methyl modified nucleotide
  source: /note="3' tri-ethylene glycol (TEG)"
aaguucuguccaa

SEQ ID NO: 2461 - RNA, 12 nt, Artificial Sequence
  source: /note="Description of Artificial Sequence: Synthetic oligonucleotide"
  source: /note="RNA"
  modified_base (6)..(6): 5-methyl modified nucleotide
  modified_base (10)..(10): 5-methyl modified nucleotide
  modified_base (11)..(11): 5-methyl modified nucleotide
  source: /note="3' tri-ethylene glycol (TEG)"
aaguucugucca

SEQ ID NO: 2462 - RNA, 11 nt, Artificial Sequence
  source: /note="Description of Artificial Sequence: Synthetic oligonucleotide"
  source: /note="RNA"
  modified_base (6)..(6): 5-methyl modified nucleotide
  modified_base (10)..(10): 5-methyl modified nucleotide
  modified_base (11)..(11): 5-methyl modified nucleotide
  source: /note="3' tri-ethylene glycol (TEG)"
aaguucugucc

SEQ ID NO: 2463 - RNA, 10 nt, Artificial Sequence
  source: /note="Description of Artificial Sequence: Synthetic oligonucleotide"
  source: /note="RNA"
  modified_base (6)..(6): 5-methyl modified nucleotide
  modified_base (10)..(10): 5-methyl modified nucleotide
  source: /note="3' tri-ethylene glycol (TEG)"
aaguucuguc

SEQ ID NO: 2464 - RNA, 9 nt, Artificial Sequence
  source: /note="Description of Artificial Sequence: Synthetic oligonucleotide"
  source: /note="RNA"
  modified_base (6)..(6): 5-methyl modified nucleotide
  source: /note="3' tri-ethylene glycol (TEG)"
aaguucugu

SEQ ID NO: 2465 - RNA, 8 nt, Artificial Sequence
  source: /note="Description of Artificial Sequence: Synthetic oligonucleotide"
  source: /note="RNA"
  modified_base (6)..(6): 5-methyl modified nucleotide
  source: /note="3' tri-ethylene glycol (TEG)"
aaguucug

SEQ ID NO: 2466 - RNA, 20 nt, Artificial Sequence
  source: /note="Description of Artificial Sequence: Synthetic oligonucleotide"
  source: /note="RNA"
  modified_base (7)..(7): 5-methyl modified nucleotide
  modified_base (11)..(11): 5-methyl modified nucleotide
  modified_base (12)..(12): 5-methyl modified nucleotide
  modified_base (16)..(16): 5-methyl modified nucleotide
  modified_base (17)..(17): 5-methyl modified nucleotide
  modified_base (18)..(18): 5-methyl modified nucleotide
  source: /note="3' tri-ethylene glycol (TEG)"
uaaguucuguccaagcccgg

SEQ ID NO: 2467 - RNA, 19 nt, Artificial Sequence
  source: /note="Description of Artificial Sequence: Synthetic oligonucleotide"
  source: /note="RNA"
  modified_base (7)..(7): 5-methyl modified nucleotide
  modified_base (11)..(11): 5-methyl modified nucleotide
  modified_base (12)..(12): 5-methyl modified nucleotide
  modified_base (16)..(16): 5-methyl modified nucleotide
  modified_base (17)..(17): 5-methyl modified nucleotide
  modified_base (18)..(18): 5-methyl modified nucleotide
  source: /note="3' tri-ethylene glycol (TEG)"
uaaguucuguccaagcccg

SEQ ID NO: 2468 - RNA, 18 nt, Artificial Sequence
  source: /note="Description of Artificial Sequence: Synthetic oligonucleotide"
  source: /note="RNA"
  modified_base (7)..(7): 5-methyl modified nucleotide
  modified_base (11)..(11): 5-methyl modified nucleotide
  modified_base (12)..(12): 5-methyl modified nucleotide
  modified_base (16)..(16): 5-methyl modified nucleotide
  modified_base (17)..(17): 5-methyl modified nucleotide
  modified_base (18)..(18): 5-methyl modified nucleotide
  source: /note="3' tri-ethylene glycol (TEG)"
uaaguucuguccaagccc

SEQ ID NO: 2469 - RNA, 17 nt, Artificial Sequence
  source: /note="Description of Artificial Sequence: Synthetic oligonucleotide"
  source: /note="RNA"
  modified_base (7)..(7): 5-methyl modified nucleotide
  modified_base (11)..(11): 5-methyl modified nucleotide
  modified_base (12)..(12): 5-methyl modified nucleotide
  modified_base (16)..(16): 5-methyl modified nucleotide
  modified_base (17)..(17): 5-methyl modified nucleotide
  source: /note="3' tri-ethylene glycol (TEG)"
uaaguucuguccaagcc

SEQ ID NO: 2470 - RNA, 16 nt, Artificial Sequence
  source: /note="Description of Artificial Sequence: Synthetic oligonucleotide"
  source: /note="RNA"
  modified_base (7)..(7): 5-methyl modified nucleotide
  modified_base (11)..(11): 5-methyl modified nucleotide
  modified_base (12)..(12): 5-methyl modified nucleotide
  modified_base (16)..(16): 5-methyl modified nucleotide
  source: /note="3' tri-ethylene glycol (TEG)"
uaaguucuguccaagc

SEQ ID NO: 2471 - RNA, 14 nt, Artificial Sequence
  source: /note="Description of Artificial Sequence: Synthetic oligonucleotide"
  source: /note="RNA"
  modified_base (7)..(7): 5-methyl modified nucleotide
  modified_base (11)..(11): 5-methyl modified nucleotide
  modified_base (12)..(12): 5-methyl modified nucleotide
  source: /note="3' tri-ethylene glycol (TEG)"
uaaguucuguccaa

SEQ ID NO: 2472 - RNA, 13 nt, Artificial Sequence
  source: /note="Description of Artificial Sequence: Synthetic oligonucleotide"
  source: /note="RNA"
  modified_base (7)..(7): 5-methyl modified nucleotide
  modified_base (11)..(11): 5-methyl modified nucleotide
  modified_base (12)..(12): 5-methyl modified nucleotide
  source: /note="3' tri-ethylene glycol (TEG)"
uaaguucugucca

SEQ ID NO: 2473 - RNA, 12 nt, Artificial Sequence
  source: /note="Description of Artificial Sequence: Synthetic oligonucleotide"
  source: /note="RNA"
  modified_base (7)..(7): 5-methyl modified nucleotide
  modified_base (11)..(11): 5-methyl modified nucleotide
  modified_base (12)..(12): 5-methyl modified nucleotide
  source: /note="3' tri-ethylene glycol (TEG)"
uaaguucugucc

SEQ ID NO: 2474 - RNA, 11 nt, Artificial Sequence
  source: /note="Description of Artificial Sequence: Synthetic oligonucleotide"
  source: /note="RNA"
  modified_base (7)..(7): 5-methyl modified nucleotide
  modified_base (11)..(11): 5-methyl modified nucleotide
  source: /note="3' tri-ethylene glycol (TEG)"
uaaguucuguc

SEQ ID NO: 2475 - RNA, 10 nt, Artificial Sequence
  source: /note="Description of Artificial Sequence: Synthetic oligonucleotide"
  source: /note="RNA"
  modified_base (7)..(7): 5-methyl modified nucleotide
  source: /note="3' tri-ethylene glycol (TEG)"
uaaguucugu

SEQ ID NO: 2476 - RNA, 9 nt, Artificial Sequence
  source: /note="Description of Artificial Sequence: Synthetic oligonucleotide"
  source: /note="RNA"
  modified_base (7)..(7): 5-methyl modified nucleotide
  source: /note="3' tri-ethylene glycol (TEG)"
uaaguucug

SEQ ID NO: 2477 - RNA, 8 nt, Artificial Sequence
  source: /note="Description of Artificial Sequence: Synthetic oligonucleotide"
  source: /note="RNA"
  modified_base (7)..(7): 5-methyl modified nucleotide
  source: /note="3' tri-ethylene glycol (TEG)"
uaaguucu

SEQ ID NO: 2478 - RNA, 20 nt, Artificial Sequence
  source: /note="Description of Artificial Sequence: Synthetic oligonucleotide"
  source: /note="RNA"
  modified_base (8)..(8): 5-methyl modified nucleotide
  modified_base (12)..(12): 5-methyl modified nucleotide
  modified_base (13)..(13): 5-methyl modified nucleotide
  modified_base (17)..(17): 5-methyl modified nucleotide
  modified_base (18)..(18): 5-methyl modified nucleotide
  modified_base (19)..(19): 5-methyl modified nucleotide
  source: /note="3' tri-ethylene glycol (TEG)"
guaaguucuguccaagcccg

SEQ ID NO: 2479 - RNA, 19 nt, Artificial Sequence
  source: /note="Description of Artificial Sequence: Synthetic oligonucleotide"
  source: /note="RNA"
  modified_base (8)..(8): 5-methyl modified nucleotide
  modified_base (12)..(12): 5-methyl modified nucleotide
  modified_base (13)..(13): 5-methyl modified nucleotide
  modified_base (17)..(17): 5-methyl modified nucleotide
  modified_base (18)..(18): 5-methyl modified nucleotide
  modified_base (19)..(19): 5-methyl modified nucleotide
  source: /note="3' tri-ethylene glycol (TEG)"
guaaguucuguccaagccc

SEQ ID NO: 2480 - RNA, 17 nt, Artificial Sequence
  source: /note="Description of Artificial Sequence: Synthetic oligonucleotide"
  source: /note="RNA"
  modified_base (8)..(8): 5-methyl modified nucleotide
  modified_base (12)..(12): 5-methyl modified nucleotide
  modified_base (13)..(13): 5-methyl modified nucleotide
  modified_base (17)..(17): 5-methyl modified nucleotide
  source: /note="3' tri-ethylene glycol (TEG)"
guaaguucuguccaagc

SEQ ID NO: 2481 - RNA, 16 nt, Artificial Sequence
  source: /note="Description of Artificial Sequence: Synthetic oligonucleotide"
  source: /note="RNA"
  modified_base (8)..(8): 5-methyl modified nucleotide
  modified_base (12)..(12): 5-methyl modified nucleotide
  modified_base (13)..(13): 5-methyl modified nucleotide
  source: /note="3' tri-ethylene glycol (TEG)"
guaaguucuguccaag

SEQ ID NO: 2482 - RNA, 15 nt, Artificial Sequence
  source: /note="Description of Artificial Sequence: Synthetic oligonucleotide"
  source: /note="RNA"
  modified_base (8)..(8): 5-methyl modified nucleotide
  modified_base (12)..(12): 5-methyl modified nucleotide
  modified_base (13)..(13): 5-methyl modified nucleotide
  source: /note="3' tri-ethylene glycol (TEG)"
guaaguucuguccaa

SEQ ID NO: 2483 - RNA, 14 nt, Artificial Sequence
  source: /note="Description of Artificial Sequence: Synthetic oligonucleotide"
  source: /note="RNA"
  modified_base (8)..(8): 5-methyl modified nucleotide
  modified_base (12)..(12): 5-methyl modified nucleotide
  modified_base (13)..(13): 5-methyl modified nucleotide
  source: /note="3' tri-ethylene glycol (TEG)"
guaaguucugucca

SEQ ID NO: 2484 - RNA, 13 nt, Artificial Sequence
  source: /note="Description of Artificial Sequence: Synthetic oligonucleotide"
  source: /note="RNA"
  modified_base (8)..(8): 5-methyl modified nucleotide
  modified_base (12)..(12): 5-methyl modified nucleotide
  modified_base (13)..(13): 5-methyl modified nucleotide
  source: /note="3' tri-ethylene glycol (TEG)"
guaaguucugucc

SEQ ID NO: 2485 - RNA, 12 nt, Artificial Sequence
  source: /note="Description of Artificial Sequence: Synthetic oligonucleotide"
  source: /note="RNA"
  modified_base (8)..(8): 5-methyl modified nucleotide
  modified_base (12)..(12): 5-methyl modified nucleotide
  source: /note="3' tri-ethylene glycol (TEG)"
guaaguucuguc

SEQ ID NO: 2486 - RNA, 11 nt, Artificial Sequence
  source: /note="Description of Artificial Sequence: Synthetic oligonucleotide"
  source: /note="RNA"
  modified_base (8)..(8): 5-methyl modified nucleotide
  source: /note="3' tri-ethylene glycol (TEG)"
guaaguucugu

SEQ ID NO: 2487 - RNA, 10 nt, Artificial Sequence
  source: /note="Description of Artificial Sequence: Synthetic oligonucleotide"
  source: /note="RNA"
  modified_base (8)..(8): 5-methyl modified nucleotide
  source: /note="3' tri-ethylene glycol (TEG)"
guaaguucug

SEQ ID NO: 2488 - RNA, 9 nt, Artificial Sequence
  source: /note="Description of Artificial Sequence: Synthetic oligonucleotide"
  source: /note="RNA"
  modified_base (8)..(8): 5-methyl modified nucleotide
  source: /note="3' tri-ethylene glycol (TEG)"
guaaguucu

SEQ ID NO: 2489 - RNA, 8 nt, Artificial Sequence
  source: /note="Description of Artificial Sequence: Synthetic oligonucleotide"
  source: /note="RNA"
  modified_base (8)..(8): 5-methyl modified nucleotide
  source: /note="3' tri-ethylene glycol (TEG)"
guaaguuc

SEQ ID NO: 2490 - RNA, 20 nt, Artificial Sequence
  source: /note="Description of Artificial Sequence: Synthetic oligonucleotide"
  source: /note="RNA"
  modified_base (9)..(9): 5-methyl modified nucleotide
  modified_base (13)..(13): 5-methyl modified nucleotide
  modified_base (14)..(14): 5-methyl modified nucleotide
  modified_base (18)..(18): 5-methyl modified nucleotide
  modified_base (19)..(19): 5-methyl modified nucleotide
  modified_base (20)..(20): 5-methyl modified nucleotide
  source: /note="3' tri-ethylene glycol (TEG)"
gguaaguucuguccaagccc

SEQ ID NO: 2491 - RNA, 19 nt, Artificial Sequence
  source: /note="Description of Artificial Sequence: Synthetic oligonucleotide"
  source: /note="RNA"
  modified_base (9)..(9): 5-methyl modified nucleotide
  modified_base (13)..(13): 5-methyl modified nucleotide
  modified_base (14)..(14): 5-methyl modified nucleotide
  modified_base (18)..(18): 5-methyl modified nucleotide
  modified_base (19)..(19): 5-methyl modified nucleotide
  source: /note="3' tri-ethylene glycol (TEG)"
gguaaguucuguccaagcc

SEQ ID NO: 2492 - RNA, 17 nt, Artificial Sequence
  source: /note="Description of Artificial Sequence: Synthetic oligonucleotide"
  source: /note="RNA"
  modified_base (9)..(9): 5-methyl modified nucleotide
  modified_base (13)..(13): 5-methyl modified nucleotide
  modified_base (14)..(14): 5-methyl modified nucleotide
  source: /note="3' tri-ethylene glycol (TEG)"
gguaaguucuguccaag

SEQ ID NO: 2493 - RNA, 16 nt, Artificial Sequence
  source: /note="Description of Artificial Sequence: Synthetic oligonucleotide"
  source: /note="RNA"
  modified_base (9)..(9): 5-methyl modified nucleotide
  modified_base (13)..(13): 5-methyl modified nucleotide
  modified_base (14)..(14): 5-methyl modified nucleotide
  source: /note="3' tri-ethylene glycol (TEG)"
gguaaguucuguccaa

SEQ ID NO: 2494 - RNA, 15 nt, Artificial Sequence
  source: /note="Description of Artificial Sequence: Synthetic oligonucleotide"
  source: /note="RNA"
  modified_base (9)..(9): 5-methyl modified nucleotide
  modified_base (13)..(13): 5-methyl modified nucleotide
  modified_base (14)..(14): 5-methyl modified nucleotide
  source: /note="3' tri-ethylene glycol (TEG)"
gguaaguucugucca

SEQ ID NO: 2495 - RNA, 14 nt, Artificial Sequence
  source: /note="Description of Artificial Sequence: Synthetic oligonucleotide"
  source: /note="RNA"
  modified_base (9)..(9): 5-methyl modified nucleotide
  modified_base (13)..(13): 5-methyl modified nucleotide
  modified_base (14)..(14): 5-methyl modified nucleotide
  source: /note="3' tri-ethylene glycol (TEG)"
gguaaguucugucc

SEQ ID NO: 2496 - RNA, 13 nt, Artificial Sequence
  source: /note="Description of Artificial Sequence: Synthetic oligonucleotide"
  source: /note="RNA"
  modified_base (9)..(9): 5-methyl modified nucleotide
  modified_base (13)..(13): 5-methyl modified nucleotide
  source: /note="3' tri-ethylene glycol (TEG)"
gguaaguucuguc

SEQ ID NO: 2497 - RNA, 12 nt, Artificial Sequence
  source: /note="Description of Artificial Sequence: Synthetic oligonucleotide"
  source: /note="RNA"
  modified_base (9)..(9): 5-methyl modified nucleotide
  source: /note="3' tri-ethylene glycol (TEG)"
gguaaguucugu

SEQ ID NO: 2498 - RNA, 11 nt, Artificial Sequence
  source: /note="Description of Artificial Sequence: Synthetic oligonucleotide"
  source: /note="RNA"
  modified_base (9)..(9): 5-methyl modified nucleotide
  source: /note="3' tri-ethylene glycol (TEG)"
gguaaguucug

SEQ ID NO: 2499 - RNA, 10 nt, Artificial Sequence
  source: /note="Description of Artificial Sequence: Synthetic oligonucleotide"
  source: /note="RNA"
  modified_base (9)..(9): 5-methyl modified nucleotide
  source: /note="3' tri-ethylene glycol (TEG)"
gguaaguucu

SEQ ID NO: 2500 - RNA, 9 nt, Artificial Sequence
  source: /note="Description of Artificial Sequence: Synthetic oligonucleotide"
  source: /note="RNA"
  modified_base (9)..(9): 5-methyl modified nucleotide
  source: /note="3' tri-ethylene glycol (TEG)"
gguaaguuc

SEQ ID NO: 2501 - RNA, 8 nt, Artificial Sequence
  source: /note="Description of Artificial Sequence: Synthetic oligonucleotide"
  source: /note="RNA"
  source: /note="3' tri-ethylene glycol (TEG)"
gguaaguu

SEQ ID NO: 2502 - RNA, 20 nt, Artificial Sequence
  source: /note="Description of Artificial Sequence: Synthetic oligonucleotide"
  source: /note="RNA"
  modified_base (1)..(1): 5-methyl modified nucleotide
  modified_base (10)..(10): 5-methyl modified nucleotide
  modified_base (14)..(14): 5-methyl modified nucleotide
  modified_base (15)..(15): 5-methyl modified nucleotide
  modified_base (19)..(19): 5-methyl modified nucleotide
  modified_base (20)..(20): 5-methyl modified nucleotide
  source: /note="3' tri-ethylene glycol (TEG)"
cgguaaguucuguccaagcc

SEQ ID NO: 2503 - RNA, 19 nt, Artificial Sequence
  source: /note="Description of Artificial Sequence: Synthetic oligonucleotide"
  source: /note="RNA"
  modified_base (1)..(1): 5-methyl modified nucleotide
  modified_base (10)..(10): 5-methyl modified nucleotide
  modified_base (14)..(14): 5-methyl modified nucleotide
  modified_base (15)..(15): 5-methyl modified nucleotide
  modified_base (19)..(19): 5-methyl modified nucleotide
  source: /note="3' tri-ethylene glycol (TEG)"
cgguaaguucuguccaagc

SEQ ID NO: 2504 - RNA, 18 nt, Artificial Sequence
  source: /note="Description of Artificial Sequence: Synthetic oligonucleotide"
  source: /note="RNA"
  modified_base (1)..(1): 5-methyl modified nucleotide
  modified_base (10)..(10): 5-methyl modified nucleotide
  modified_base (14)..(14): 5-methyl modified nucleotide
  modified_base (15)..(15): 5-methyl modified nucleotide
  source: /note="3' tri-ethylene glycol (TEG)"
cgguaaguucuguccaag

SEQ ID NO: 2505 - RNA, 17 nt, Artificial Sequence
  source: /note="Description of Artificial Sequence: Synthetic oligonucleotide"
  source: /note="RNA"
  modified_base (1)..(1): 5-methyl modified nucleotide
  modified_base (10)..(10): 5-methyl modified nucleotide
  modified_base (14)..(14): 5-methyl modified nucleotide
  modified_base (15)..(15): 5-methyl modified nucleotide
  source: /note="3' tri-ethylene glycol (TEG)"
cgguaaguucuguccaa

SEQ ID NO: 2506 - RNA, 16 nt, Artificial Sequence
  source: /note="Description of Artificial Sequence: Synthetic oligonucleotide"
  source: /note="RNA"
  modified_base (1)..(1): 5-methyl modified nucleotide
  modified_base (10)..(10): 5-methyl modified nucleotide
  modified_base (14)..(14): 5-methyl modified nucleotide
  modified_base (15)..(15): 5-methyl modified nucleotide
  source: /note="3' tri-ethylene glycol (TEG)"
cgguaaguucugucca

SEQ ID NO: 2507 - RNA, 15 nt, Artificial Sequence
  source: /note="Description of Artificial Sequence: Synthetic oligonucleotide"
  source: /note="RNA"
  modified_base (1)..(1): 5-methyl modified nucleotide
  modified_base (10)..(10): 5-methyl modified nucleotide
  modified_base (14)..(14): 5-methyl modified nucleotide
  modified_base (15)..(15): 5-methyl modified nucleotide
  source: /note="3' tri-ethylene glycol (TEG)"
cgguaaguucugucc

SEQ ID NO: 2508 - RNA, 14 nt, Artificial Sequence
  source: /note="Description of Artificial Sequence: Synthetic oligonucleotide"
  source: /note="RNA"
  modified_base (1)..(1): 5-methyl modified nucleotide
  modified_base (10)..(10): 5-methyl modified nucleotide
  modified_base (14)..(14): 5-methyl modified nucleotide
  source: /note="3' tri-ethylene glycol (TEG)"
cgguaaguucuguc

SEQ ID NO: 2509 - RNA, 13 nt, Artificial Sequence
  source: /note="Description of Artificial Sequence: Synthetic oligonucleotide"
  source: /note="RNA"
  modified_base (1)..(1): 5-methyl modified nucleotide
  modified_base (10)..(10): 5-methyl modified nucleotide
  source: /note="3' tri-ethylene glycol (TEG)"
cgguaaguucugu

SEQ ID NO: 2510 - RNA, 12 nt, Artificial Sequence
  source: /note="Description of Artificial Sequence: Synthetic oligonucleotide"
  source: /note="RNA"
  modified_base (1)..(1): 5-methyl modified nucleotide
  modified_base (10)..(10): 5-methyl modified nucleotide
  source: /note="3' tri-ethylene glycol (TEG)"
cgguaaguucug

SEQ ID NO: 2511 - RNA, 11 nt, Artificial Sequence
  source: /note="Description of Artificial Sequence: Synthetic oligonucleotide"
  source: /note="RNA"
  modified_base (1)..(1): 5-methyl modified nucleotide
  modified_base (10)..(10): 5-methyl modified nucleotide
  source: /note="3' tri-ethylene glycol (TEG)"
cgguaaguucu

SEQ ID NO: 2512 - RNA, 10 nt, Artificial Sequence
  source: /note="Description of Artificial Sequence: Synthetic oligonucleotide"
  source: /note="RNA"
  modified_base (1)..(1): 5-methyl modified nucleotide
  modified_base (10)..(10): 5-methyl modified nucleotide
  source: /note="3' tri-ethylene glycol (TEG)"
cgguaaguuc

SEQ ID NO: 2513 - RNA, 9 nt, Artificial Sequence
  source: /note="Description of Artificial Sequence: Synthetic oligonucleotide"
  source: /note="RNA"
  modified_base (1)..(1): 5-methyl modified nucleotide
  source: /note="3' tri-ethylene glycol (TEG)"
cgguaaguu

SEQ ID NO: 2514 - RNA, 8 nt, Artificial Sequence
  source: /note="Description of Artificial Sequence: Synthetic oligonucleotide"
  source: /note="RNA"
  modified_base (1)..(1): 5-methyl modified nucleotide
  source: /note="3' tri-ethylene glycol (TEG)"
cgguaagu

SEQ ID NO: 2515 - RNA, 20 nt, Artificial Sequence
  source: /note="Description of Artificial Sequence: Synthetic oligonucleotide"
  source: /note="RNA"
  modified_base (2)..(2): 5-methyl modified nucleotide
  modified_base (11)..(11): 5-methyl modified nucleotide
  modified_base (15)..(15): 5-methyl modified nucleotide
  modified_base (16)..(16): 5-methyl modified nucleotide
  modified_base (20)..(20): 5-methyl modified nucleotide
  source: /note="3' tri-ethylene glycol (TEG)"
ucgguaaguucuguccaagc

SEQ ID NO: 2516 - RNA, 19 nt, Artificial Sequence
  source: /note="Description of Artificial Sequence: Synthetic oligonucleotide"
  source: /note="RNA"
  modified_base (2)..(2): 5-methyl modified nucleotide
  modified_base (11)..(11): 5-methyl modified nucleotide
  modified_base (15)..(15): 5-methyl modified nucleotide
  modified_base (16)..(16): 5-methyl modified nucleotide
  source: /note="3' tri-ethylene glycol (TEG)"
ucgguaaguucuguccaag

SEQ ID NO: 2517 - RNA, 18 nt, Artificial Sequence
  source: /note="Description of Artificial Sequence: Synthetic oligonucleotide"
  source: /note="RNA"
  modified_base (2)..(2): 5-methyl modified nucleotide
  modified_base (11)..(11): 5-methyl modified nucleotide
  modified_base (15)..(15): 5-methyl modified nucleotide
  modified_base (16)..(16): 5-methyl modified nucleotide
  source: /note="3' tri-ethylene glycol (TEG)"
ucgguaaguucuguccaa

SEQ ID NO: 2518 - RNA, 17 nt, Artificial Sequence
  source: /note="Description of Artificial Sequence: Synthetic oligonucleotide"
  source: /note="RNA"
  modified_base (2)..(2): 5-methyl modified nucleotide
  modified_base (11)..(11): 5-methyl modified nucleotide
  modified_base (15)..(15): 5-methyl modified nucleotide
  modified_base (16)..(16): 5-methyl modified nucleotide
  source: /note="3' tri-ethylene glycol (TEG)"
ucgguaaguucugucca

SEQ ID NO: 2519 - RNA, 16 nt, Artificial Sequence
  source: /note="Description of Artificial Sequence: Synthetic oligonucleotide"
  source: /note="RNA"
  modified_base (2)..(2): 5-methyl modified nucleotide
  modified_base (11)..(11): 5-methyl modified nucleotide
  modified_base (15)..(15): 5-methyl modified nucleotide
  modified_base (16)..(16): 5-methyl modified nucleotide
  source: /note="3' tri-ethylene glycol (TEG)"
ucgguaaguucugucc

SEQ ID NO: 2520 - RNA, 15 nt, Artificial Sequence
  source: /note="Description of Artificial Sequence: Synthetic oligonucleotide"
  source: /note="RNA"
  modified_base (2)..(2): 5-methyl modified nucleotide
  modified_base (11)..(11): 5-methyl modified nucleotide
  modified_base (15)..(15): 5-methyl modified nucleotide
  source: /note="3' tri-ethylene glycol (TEG)"
ucgguaaguucuguc

SEQ ID NO: 2521 - RNA, 14 nt, Artificial Sequence
  source: /note="Description of Artificial Sequence: Synthetic oligonucleotide"
  source: /note="RNA"
  modified_base (2)..(2): 5-methyl modified nucleotide
  modified_base (11)..(11): 5-methyl modified nucleotide
  source: /note="3' tri-ethylene glycol (TEG)"
ucgguaaguucugu

SEQ ID NO: 2522 - RNA, 13 nt, Artificial Sequence
  source: /note="Description of Artificial Sequence: Synthetic oligonucleotide"
  source: /note="RNA"
  modified_base (2)..(2): 5-methyl modified nucleotide
  modified_base (11)..(11): 5-methyl modified nucleotide
  source: /note="3' tri-ethylene glycol (TEG)"
ucgguaaguucug

SEQ ID NO: 2523 - RNA, 12 nt, Artificial Sequence
  source: /note="Description of Artificial Sequence: Synthetic oligonucleotide"
  source: /note="RNA"
  modified_base (2)..(2): 5-methyl modified nucleotide
  modified_base (11)..(11): 5-methyl modified nucleotide
  source: /note="3' tri-ethylene glycol (TEG)"
ucgguaaguucu

SEQ ID NO: 2524 - RNA, 11 nt, Artificial Sequence
  source: /note="Description of Artificial Sequence: Synthetic oligonucleotide"
  source: /note="RNA"
  modified_base (2)..(2): 5-methyl modified nucleotide
  modified_base (11)..(11): 5-methyl modified nucleotide
  source: /note="3' tri-ethylene glycol (TEG)"
ucgguaaguuc

SEQ ID NO: 2525 - RNA, 10 nt, Artificial Sequence
  source: /note="Description of Artificial Sequence: Synthetic oligonucleotide"
  source: /note="RNA"
  modified_base (2)..(2): 5-methyl modified nucleotide
  source: /note="3' tri-ethylene glycol (TEG)"
ucgguaaguu

SEQ ID NO: 2526 - RNA, 9 nt, Artificial Sequence
  source: /note="Description of Artificial Sequence: Synthetic oligonucleotide"
  source: /note="RNA"
  modified_base (2)..(2): 5-methyl modified nucleotide
  source: /note="3' tri-ethylene glycol (TEG)"
ucgguaagu

SEQ ID NO: 2527 - RNA, 20 nt, Artificial Sequence
  source: /note="Description of Artificial Sequence: Synthetic oligonucleotide"
  source: /note="RNA"
  modified_base (3)..(3): 5-methyl modified nucleotide
  modified_base (12)..(12): 5-methyl modified nucleotide
  modified_base (16)..(16): 5-methyl modified nucleotide
  modified_base (17)..(17): 5-methyl modified nucleotide
  source: /note="3' tri-ethylene glycol (TEG)"
gucgguaaguucuguccaag

SEQ ID NO: 2528 - RNA, 19 nt, Artificial Sequence
  source: /note="Description of Artificial Sequence: Synthetic oligonucleotide"
  source: /note="RNA"
  modified_base (3)..(3): 5-methyl modified nucleotide
  modified_base (12)..(12): 5-methyl modified nucleotide
  modified_base (16)..(16): 5-methyl modified nucleotide
  modified_base (17)..(17): 5-methyl modified nucleotide
  source: /note="3' tri-ethylene glycol (TEG)"
gucgguaaguucuguccaa

SEQ ID NO: 2529 - RNA, 18 nt, Artificial Sequence
  source: /note="Description of Artificial Sequence: Synthetic oligonucleotide"
  source: /note="RNA"
  modified_base (3)..(3): 5-methyl modified nucleotide
  modified_base (12)..(12): 5-methyl modified nucleotide
  modified_base (16)..(16): 5-methyl modified nucleotide
  modified_base (17)..(17): 5-methyl modified nucleotide
  source: /note="3' tri-ethylene glycol (TEG)"
gucgguaaguucugucca

SEQ ID NO: 2530 - RNA, 17 nt, Artificial Sequence
  source: /note="Description of Artificial Sequence: Synthetic oligonucleotide"
  source: /note="RNA"
  modified_base (3)..(3): 5-methyl modified nucleotide
  modified_base (12)..(12): 5-methyl modified nucleotide
  modified_base (16)..(16): 5-methyl modified nucleotide
  modified_base (17)..(17): 5-methyl modified nucleotide
  source: /note="3' tri-ethylene glycol (TEG)"
gucgguaaguucugucc

SEQ ID NO: 2531 - RNA, 16 nt, Artificial Sequence
  source: /note="Description of Artificial Sequence: Synthetic oligonucleotide"
  source: /note="RNA"
  modified_base (3)..(3): 5-methyl modified nucleotide
  modified_base (12)..(12): 5-methyl modified nucleotide
  modified_base (16)..(16): 5-methyl modified nucleotide
  source: /note="3' tri-ethylene glycol (TEG)"
gucgguaaguucuguc

SEQ ID NO: 2532 - RNA, 15 nt, Artificial Sequence
  source: /note="Description of Artificial Sequence: Synthetic oligonucleotide"
  source: /note="RNA"
  modified_base (3)..(3): 5-methyl modified nucleotide
  modified_base (12)..(12): 5-methyl modified nucleotide
  source: /note="3' tri-ethylene glycol (TEG)"
gucgguaaguucugu

SEQ ID NO: 2533 - RNA, 14 nt, Artificial Sequence
  source: /note="Description of Artificial Sequence: Synthetic oligonucleotide"
  source: /note="RNA"
  modified_base (3)..(3): 5-methyl modified nucleotide
  modified_base (12)..(12): 5-methyl modified nucleotide
  source: /note="3' tri-ethylene glycol (TEG)"
gucgguaaguucug

SEQ ID NO: 2534 - RNA, 13 nt, Artificial Sequence
  source: /note="Description of Artificial Sequence: Synthetic oligonucleotide"
  source: /note="RNA"
  modified_base (3)..(3): 5-methyl modified nucleotide
  modified_base (12)..(12): 5-methyl modified nucleotide
  source: /note="3' tri-ethylene glycol (TEG)"
gucgguaaguucu

SEQ ID NO: 2535 - RNA, 12 nt, Artificial Sequence
  source: /note="Description of Artificial Sequence: Synthetic oligonucleotide"
  source: /note="RNA"
  modified_base (3)..(3): 5-methyl modified nucleotide
  modified_base (12)..(12): 5-methyl modified nucleotide
  source: /note="3' tri-ethylene glycol (TEG)"
gucgguaaguuc

SEQ ID NO: 2536 - RNA, 11 nt, Artificial Sequence
  source: /note="Description of Artificial Sequence: Synthetic oligonucleotide"
  source: /note="RNA"
  modified_base (3)..(3): 5-methyl modified nucleotide
  source: /note="3' tri-ethylene glycol (TEG)"
gucgguaaguu

SEQ ID NO: 2537 - RNA, 10 nt, Artificial Sequence
  source: /note="Description of Artificial Sequence: Synthetic oligonucleotide"
  source: /note="RNA"
  modified_base (3)..(3): 5-methyl modified nucleotide
  source: /note="3' tri-ethylene glycol (TEG)"
gucgguaagu

SEQ ID NO: 2538 - RNA, 20 nt, Artificial Sequence
  source: /note="Description of Artificial Sequence: Synthetic oligonucleotide"
  source: /note="RNA"
  modified_base (4)..(4): 5-methyl modified nucleotide
  modified_base (13)..(13): 5-methyl modified nucleotide
  modified_base (17)..(17): 5-methyl modified nucleotide
  modified_base (18)..(18): 5-methyl modified nucleotide
  source: /note="3' tri-ethylene glycol (TEG)"
agucgguaaguucuguccaa

SEQ ID NO: 2539 - RNA, 19 nt, Artificial Sequence
  source: /note="Description of Artificial Sequence: Synthetic oligonucleotide"
  source: /note="RNA"
  modified_base (4)..(4): 5-methyl modified nucleotide
  modified_base (13)..(13): 5-methyl modified nucleotide
  modified_base (17)..(17): 5-methyl modified nucleotide
  modified_base (18)..(18): 5-methyl modified nucleotide
  source: /note="3' tri-ethylene glycol (TEG)"
agucgguaaguucugucca

SEQ ID NO: 2540 - RNA, 17 nt, Artificial Sequence
  source: /note="Description of Artificial Sequence: Synthetic oligonucleotide"
  source: /note="RNA"
  modified_base (4)..(4): 5-methyl modified nucleotide
  modified_base (13)..(13): 5-methyl modified nucleotide
  modified_base (17)..(17): 5-methyl modified nucleotide
  source: /note="3' tri-ethylene glycol (TEG)"
agucgguaaguucuguc

SEQ ID NO: 2541 - RNA, 16 nt, Artificial Sequence
  source: /note="Description of Artificial Sequence: Synthetic oligonucleotide"
  source: /note="RNA"
  modified_base (4)..(4): 5-methyl modified nucleotide
  modified_base (13)..(13): 5-methyl modified nucleotide
  source: /note="3' tri-ethylene glycol (TEG)"
agucgguaaguucugu

SEQ ID NO: 2542 - RNA, 15 nt, Artificial Sequence
  source: /note="Description of Artificial Sequence: Synthetic oligonucleotide"
  source: /note="RNA"
  modified_base (4)..(4): 5-methyl modified nucleotide
  modified_base (13)..(13): 5-methyl modified nucleotide
  source: /note="3' tri-ethylene glycol (TEG)"
agucgguaaguucug

SEQ ID NO: 2543 - RNA, 14 nt, Artificial Sequence
  source: /note="Description of Artificial Sequence: Synthetic oligonucleotide"
  source: /note="RNA"
  modified_base (4)..(4): 5-methyl modified nucleotide
  modified_base (13)..(13): 5-methyl modified nucleotide
  source: /note="3' tri-ethylene glycol (TEG)"
agucgguaaguucu

SEQ ID NO: 2544 - RNA, 13 nt, Artificial Sequence
  source: /note="Description of Artificial Sequence: Synthetic oligonucleotide"
  source: /note="RNA"
  modified_base (4)..(4): 5-methyl modified nucleotide
  modified_base (13)..(13): 5-methyl modified nucleotide
  source: /note="3' tri-ethylene glycol (TEG)"
agucgguaaguuc

SEQ ID NO: 2545 - RNA, 12 nt, Artificial Sequence
  source: /note="Description of Artificial Sequence: Synthetic oligonucleotide"
  source: /note="RNA"
  modified_base (4)..(4): 5-methyl modified nucleotide
  source: /note="3' tri-ethylene glycol (TEG)"
agucgguaaguu

SEQ ID NO: 2546 - RNA, 11 nt, Artificial Sequence
  source: /note="Description of Artificial Sequence: Synthetic oligonucleotide"
  source: /note="RNA"
  modified_base (4)..(4): 5-methyl modified nucleotide
  source: /note="3' tri-ethylene glycol (TEG)"
agucgguaagu

SEQ ID NO: 2547 - RNA, 20 nt, Artificial Sequence
  source: /note="Description of Artificial Sequence: Synthetic oligonucleotide"
  source: /note="RNA"
  modified_base (1)..(1): 5-methyl modified nucleotide
  modified_base (5)..(5): 5-methyl modified nucleotide
  modified_base (14)..(14): 5-methyl modified nucleotide
  modified_base (18)..(18): 5-methyl modified nucleotide
  modified_base (19)..(19): 5-methyl modified nucleotide
  source: /note="3' tri-ethylene glycol (TEG)"
cagucgguaaguucugucca

SEQ ID NO: 2548 - RNA, 19 nt, Artificial Sequence
  source: /note="Description of Artificial Sequence: Synthetic oligonucleotide"
  source: /note="RNA"
  modified_base (1)..(1): 5-methyl modified nucleotide
  modified_base (5)..(5): 5-methyl modified nucleotide
  modified_base (14)..(14): 5-methyl modified nucleotide
  modified_base (18)..(18): 5-methyl modified nucleotide
  modified_base (19)..(19): 5-methyl modified nucleotide
  source: /note="3' tri-ethylene glycol (TEG)"
cagucgguaaguucugucc

SEQ ID NO: 2549 - RNA, 18 nt, Artificial Sequence
  source: /note="Description of Artificial Sequence: Synthetic oligonucleotide"
  source: /note="RNA"
  modified_base (1)..(1): 5-methyl modified nucleotide
  modified_base (5)..(5): 5-methyl modified nucleotide
  modified_base (14)..(14): 5-methyl modified nucleotide
  modified_base (18)..(18): 5-methyl modified nucleotide
  source: /note="3' tri-ethylene glycol (TEG)"
cagucgguaaguucuguc

SEQ ID NO: 2550 - RNA, 17 nt, Artificial Sequence
  source: /note="Description of Artificial Sequence: Synthetic oligonucleotide"
  source: /note="RNA"
  modified_base (1)..(1): 5-methyl modified nucleotide
  modified_base (5)..(5): 5-methyl modified nucleotide
  modified_base (14)..(14): 5-methyl modified nucleotide
  source: /note="3' tri-ethylene glycol (TEG)"
cagucgguaaguucugu

SEQ ID NO: 2551 - RNA, 16 nt, Artificial Sequence
  source: /note="Description of Artificial Sequence: Synthetic oligonucleotide"
  source: /note="RNA"
  modified_base (1)..(1): 5-methyl modified nucleotide
  modified_base (5)..(5): 5-methyl modified nucleotide
  modified_base (14)..(14): 5-methyl modified nucleotide
  source: /note="3' tri-ethylene glycol (TEG)"
cagucgguaaguucug

SEQ ID NO: 2552 - RNA, 15 nt, Artificial Sequence
  source: /note="Description of Artificial Sequence: Synthetic oligonucleotide"
  source: /note="RNA"
  modified_base (1)..(1): 5-methyl modified nucleotide
  modified_base (5)..(5): 5-methyl modified nucleotide
  modified_base (14)..(14): 5-methyl modified nucleotide
  source: /note="3' tri-ethylene glycol (TEG)"
cagucgguaaguucu

SEQ ID NO: 2553 - RNA, 14 nt, Artificial Sequence
  source: /note="Description of Artificial Sequence: Synthetic oligonucleotide"
  source: /note="RNA"
  modified_base (1)..(1): 5-methyl modified nucleotide
  modified_base (5)..(5): 5-methyl modified nucleotide
  modified_base (14)..(14): 5-methyl modified nucleotide
  source: /note="3' tri-ethylene glycol (TEG)"
cagucgguaaguuc

SEQ ID NO: 2554 - RNA, 13 nt, Artificial Sequence
  source: /note="Description of Artificial Sequence: Synthetic oligonucleotide"
  source: /note="RNA"
  modified_base (1)..(1): 5-methyl modified nucleotide
  modified_base (5)..(5): 5-methyl modified nucleotide
  source: /note="3' tri-ethylene glycol (TEG)"
cagucgguaaguu

SEQ ID NO: 2555 - RNA, 12 nt, Artificial Sequence
  source: /note="Description of Artificial Sequence: Synthetic oligonucleotide"
  source: /note="RNA"
  modified_base (1)..(1): 5-methyl modified nucleotide
  modified_base (5)..(5): 5-methyl modified nucleotide
  source: /note="3' tri-ethylene glycol (TEG)"
cagucgguaagu

SEQ ID NO: 2556 - RNA, 20 nt, Artificial Sequence
  source: /note="Description of Artificial Sequence: Synthetic oligonucleotide"
  source: /note="RNA"
  modified_base (1)..(1): 5-methyl modified nucleotide
  modified_base (2)..(2): 5-methyl modified nucleotide
  modified_base (6)..(6): 5-methyl modified nucleotide
  modified_base (15)..(15): 5-methyl modified nucleotide
  modified_base (19)..(19): 5-methyl modified nucleotide
  modified_base (20)..(20): 5-methyl modified nucleotide
  source: /note="3' tri-ethylene glycol (TEG)"
ccagucgguaaguucugucc

SEQ ID NO: 2557 - RNA, 19 nt, Artificial Sequence
  source: /note="Description of Artificial Sequence: Synthetic oligonucleotide"
  source: /note="RNA"
  modified_base (1)..(1): 5-methyl modified nucleotide
  modified_base (2)..(2): 5-methyl modified nucleotide
  modified_base (6)..(6): 5-methyl modified nucleotide
  modified_base (15)..(15): 5-methyl modified nucleotide
  modified_base (19)..(19): 5-methyl modified nucleotide
  source: /note="3' tri-ethylene glycol (TEG)"
ccagucgguaaguucuguc

SEQ ID NO: 2558 - RNA, 18 nt, Artificial Sequence
  source: /note="Description of Artificial Sequence: Synthetic oligonucleotide"
  source: /note="RNA"
  modified_base (1)..(1): 5-methyl modified nucleotide
  modified_base (2)..(2): 5-methyl modified nucleotide
  modified_base (6)..(6): 5-methyl modified nucleotide
  modified_base (15)..(15): 5-methyl modified nucleotide
  source: /note="3' tri-ethylene glycol (TEG)"
ccagucgguaaguucugu

SEQ ID NO: 2559 - RNA, 17 nt, Artificial Sequence
  source: /note="Description of Artificial Sequence: Synthetic oligonucleotide"
  source: /note="RNA"
  modified_base (1)..(1): 5-methyl modified nucleotide
  modified_base (2)..(2): 5-methyl modified nucleotide
  modified_base (6)..(6): 5-methyl modified nucleotide
  modified_base (15)..(15): 5-methyl modified nucleotide
  source: /note="3' tri-ethylene glycol (TEG)"
ccagucgguaaguucug

SEQ ID NO: 2560 - RNA, 16 nt, Artificial Sequence
  source: /note="Description of Artificial Sequence: Synthetic oligonucleotide"
  source: /note="RNA"
  modified_base (1)..(1): 5-methyl modified nucleotide
  modified_base (2)..(2): 5-methyl modified nucleotide
  modified_base (6)..(6): 5-methyl modified nucleotide
  modified_base (15)..(15): 5-methyl modified nucleotide
  source: /note="3' tri-ethylene glycol (TEG)"
ccagucgguaaguucu

SEQ ID NO: 2561 - RNA, 15 nt, Artificial Sequence
  source: /note="Description of Artificial Sequence: Synthetic oligonucleotide"
  source: /note="RNA"
  modified_base (1)..(1): 5-methyl modified nucleotide
  modified_base (2)..(2): 5-methyl modified nucleotide
  modified_base (6)..(6): 5-methyl modified nucleotide
  modified_base (15)..(15): 5-methyl modified nucleotide
  source: /note="3' tri-ethylene glycol (TEG)"
ccagucgguaaguuc

SEQ ID NO: 2562 - RNA, 14 nt, Artificial Sequence
  source: /note="Description of Artificial Sequence: Synthetic oligonucleotide"
  source: /note="RNA"
  modified_base (1)..(1): 5-methyl modified nucleotide
  modified_base (2)..(2): 5-methyl modified nucleotide
  modified_base (6)..(6): 5-methyl modified nucleotide
  source: /note="3' tri-ethylene glycol (TEG)"
ccagucgguaaguu

SEQ ID NO: 2563 - RNA, 13 nt, Artificial Sequence
  source: /note="Description of Artificial Sequence: Synthetic oligonucleotide"
  source: /note="RNA"
  modified_base (1)..(1): 5-methyl modified nucleotide
  modified_base (2)..(2): 5-methyl modified nucleotide
  modified_base (6)..(6): 5-methyl modified nucleotide
  source: /note="3' tri-ethylene glycol (TEG)"
ccagucgguaagu

SEQ ID NO: 2564 - RNA, 20 nt, Artificial Sequence
  source: /note="Description of Artificial Sequence: Synthetic oligonucleotide"
  source: /note="RNA"
  modified_base (2)..(2): 5-methyl modified nucleotide
  modified_base (3)..(3): 5-methyl modified nucleotide
  modified_base (7)..(7): 5-methyl modified nucleotide
  modified_base (16)..(16): 5-methyl modified nucleotide
  modified_base (20)..(20): 5-methyl modified nucleotide
  source: /note="3' tri-ethylene glycol (TEG)"
gccagucgguaaguucuguc

SEQ ID NO: 2565 - RNA, 19 nt, Artificial Sequence
  source: /note="Description of Artificial Sequence: Synthetic oligonucleotide"
  source: /note="RNA"
  modified_base (2)..(2): 5-methyl modified nucleotide
  modified_base (3)..(3): 5-methyl modified nucleotide
  modified_base (7)..(7): 5-methyl modified nucleotide
  modified_base (16)..(16): 5-methyl modified nucleotide
  source: /note="3' tri-ethylene glycol (TEG)"
gccagucgguaaguucugu

SEQ ID NO: 2566 - RNA, 18 nt, Artificial Sequence
  source: /note="Description of Artificial Sequence: Synthetic oligonucleotide"
  source: /note="RNA"
  modified_base (2)..(2): 5-methyl modified nucleotide
  modified_base (3)..(3): 5-methyl modified nucleotide
  modified_base (7)..(7): 5-methyl modified nucleotide
  modified_base (16)..(16): 5-methyl modified nucleotide
  source: /note="3' tri-ethylene glycol (TEG)"
gccagucgguaaguucug

SEQ ID NO: 2567 - RNA, 17 nt, Artificial Sequence
  source: /note="Description of Artificial Sequence: Synthetic oligonucleotide"
  source: /note="RNA"
  modified_base (2)..(2): 5-methyl modified nucleotide
  modified_base (3)..(3): 5-methyl modified nucleotide
  modified_base (7)..(7): 5-methyl modified nucleotide
  modified_base (16)..(16): 5-methyl modified nucleotide
  source: /note="3' tri-ethylene glycol (TEG)"
gccagucgguaaguucu

SEQ ID NO: 2568 - RNA, 16 nt, Artificial Sequence
  source: /note="Description of Artificial Sequence: Synthetic oligonucleotide"
  source: /note="RNA"
  modified_base (2)..(2): 5-methyl modified nucleotide
  modified_base (3)..(3): 5-methyl modified nucleotide
  modified_base (7)..(7): 5-methyl modified nucleotide
  modified_base (16)..(16): 5-methyl modified nucleotide
  source: /note="3' tri-ethylene glycol (TEG)"
gccagucgguaaguuc

SEQ ID NO: 2569 - RNA, 15 nt, Artificial Sequence
  source: /note="Description of Artificial Sequence: Synthetic oligonucleotide"
  source: /note="RNA"
  modified_base (2)..(2): 5-methyl modified nucleotide
  modified_base (3)..(3): 5-methyl modified nucleotide
  modified_base (7)..(7): 5-methyl modified nucleotide
  source: /note="3' tri-ethylene glycol (TEG)"
gccagucgguaaguu

SEQ ID NO: 2570 - RNA, 14 nt, Artificial Sequence
  source: /note="Description of Artificial Sequence: Synthetic oligonucleotide"
  source: /note="RNA"
  modified_base (2)..(2): 5-methyl modified nucleotide
  modified_base (3)..(3): 5-methyl modified nucleotide
  modified_base (7)..(7): 5-methyl modified nucleotide
  source: /note="3' tri-ethylene glycol (TEG)"
gccagucgguaagu

SEQ ID NO: 2571 - RNA, 20 nt, Artificial Sequence
  source: /note="Description of Artificial Sequence: Synthetic oligonucleotide"
  source: /note="RNA"
  modified_base (2)..(2): 5-methyl modified nucleotide
  modified_base (14)..(14): 5-methyl modified nucleotide
  modified_base (19)..(19): 5-methyl modified nucleotide
  source: /note="3' tri-ethylene glycol (TEG)"
ucaaggaagauggcauuucu

SEQ ID NO: 2572 - RNA, 22 nt, Artificial Sequence
  source: /note="Description of Artificial Sequence: Synthetic oligonucleotide"
  source: /note="RNA"
  modified_base (2)..(2): 5-methyl modified nucleotide
  modified_base (14)..(14): 5-methyl modified nucleotide
  modified_base (19)..(19): 5-methyl modified nucleotide
  source: /note="3' tri-ethylene glycol (TEG)"
ucaaggaagauggcauuucuag

SEQ ID NO: 2573 - RNA, 16 nt, Artificial Sequence
  source: /note="Description of Artificial Sequence: Synthetic oligonucleotide"
  source: /note="RNA"
  modified_base (2)..(2): 5-methyl modified nucleotide
  modified_base (14)..(14): 5-methyl modified nucleotide
  source: /note="3' tri-ethylene glycol (TEG)"
ucaaggaagauggcau

SEQ ID NO: 2574 - RNA, 15 nt, Artificial Sequence
  source: /note="Description of Artificial Sequence: Synthetic oligonucleotide"
  source: /note="RNA"
  modified_base (9)..(9): 5-methyl modified nucleotide
  modified_base (14)..(14): 5-methyl modified nucleotide
  source: /note="3' tri-ethylene glycol (TEG)"
gaagauggcauuucu

SEQ ID NO: 2575 - RNA, 21 nt, Artificial Sequence
  source: /note="Description of Artificial Sequence: Synthetic oligonucleotide"
  source: /note="RNA"
  modified_base (2)..(2): 5-methyl modified nucleotide
  modified_base (14)..(14): 5-methyl modified nucleotide
  modified_base (19)..(19): 5-methyl modified nucleotide
  source: /note="3' tri-ethylene glycol (TEG)"
ucaaggaagauggcauuucua

SEQ ID NO: 2576 - RNA, 19 nt, Artificial Sequence
  source: /note="Description of Artificial Sequence: Synthetic oligonucleotide"
  source: /note="RNA"
  modified_base (2)..(2): 5-methyl modified nucleotide
  modified_base (14)..(14): 5-methyl modified nucleotide
  modified_base (19)..(19): 5-methyl modified nucleotide
  source: /note="3' tri-ethylene glycol (TEG)"
ucaaggaagauggcauuuc

SEQ ID NO: 2577 - RNA, 18 nt, Artificial Sequence
  source: /note="Description of Artificial Sequence: Synthetic oligonucleotide"
  source: /note="RNA"
  modified_base (2)..(2): 5-methyl modified nucleotide
  modified_base (14)..(14): 5-methyl modified nucleotide
  source: /note="3' tri-ethylene glycol (TEG)"
ucaaggaagauggcauuu

SEQ ID NO: 2578 - RNA, 17 nt, Artificial Sequence
  source: /note="Description of Artificial Sequence: Synthetic oligonucleotide"
  source: /note="RNA"
  modified_base (2)..(2): 5-methyl modified nucleotide
  modified_base (14)..(14): 5-methyl modified nucleotide
  source: /note="3' tri-ethylene glycol (TEG)"
ucaaggaagauggcauu

SEQ ID NO: 2579 - RNA, 15 nt, Artificial Sequence
  source: /note="Description of Artificial Sequence: Synthetic oligonucleotide"
  source: /note="RNA"
  modified_base (2)..(2): 5-methyl modified nucleotide
  modified_base (14)..(14): 5-methyl modified nucleotide
  source: /note="3' tri-ethylene glycol (TEG)"
ucaaggaagauggca

SEQ ID NO: 2580 - RNA, 14 nt, Artificial Sequence
  source: /note="Description of Artificial Sequence: Synthetic oligonucleotide"
  source: /note="RNA"
  modified_base (2)..(2): 5-methyl modified nucleotide
  modified_base (14)..(14): 5-methyl modified nucleotide
  source: /note="3' tri-ethylene glycol (TEG)"
ucaaggaagauggc

SEQ ID NO: 2581 - RNA, 13 nt, Artificial Sequence
  source: /note="Description of Artificial Sequence: Synthetic oligonucleotide"
  source: /note="RNA"
  modified_base (2)..(2): 5-methyl modified nucleotide
  source: /note="3' tri-ethylene glycol (TEG)"
ucaaggaagaugg

SEQ ID NO: 2582 - RNA, 12 nt, Artificial Sequence
  source: /note="Description of Artificial Sequence: Synthetic oligonucleotide"
  source: /note="RNA"
  modified_base (2)..(2): 5-methyl modified nucleotide
  source: /note="3' tri-ethylene glycol (TEG)"
ucaaggaagaug

SEQ ID NO: 2583 - RNA, 11 nt, Artificial Sequence
  source: /note="Description of Artificial Sequence: Synthetic oligonucleotide"
  source: /note="RNA"
  modified_base (2)..(2): 5-methyl modified nucleotide
  source: /note="3' tri-ethylene glycol (TEG)"
ucaaggaagau

SEQ ID NO: 2584 - RNA, 10 nt, Artificial Sequence
  source: /note="Description of Artificial Sequence: Synthetic oligonucleotide"
  source: /note="RNA"
  modified_base (2)..(2): 5-methyl modified nucleotide
  source: /note="3' tri-ethylene glycol (TEG)"
ucaaggaaga

SEQ ID NO: 2585 - RNA, 9 nt, Artificial Sequence
  source: /note="Description of Artificial Sequence: Synthetic oligonucleotide"
  source: /note="RNA"
  modified_base (2)..(2): 5-methyl modified nucleotide
  source: /note="3' tri-ethylene glycol (TEG)"
ucaaggaag

SEQ ID NO: 2586 - RNA, 21 nt, Artificial Sequence
  source: /note="Description of Artificial Sequence: Synthetic oligonucleotide"
  source: /note="RNA"
  modified_base (1)..(1): 5-methyl modified nucleotide
  modified_base (13)..(13): 5-methyl modified nucleotide
  modified_base (18)..(18): 5-methyl modified nucleotide
  source: /note="3' tri-ethylene glycol (TEG)"
caaggaagauggcauuucuag

SEQ ID NO: 2587 - RNA, 20 nt, Artificial Sequence
  source: /note="Description of Artificial Sequence: Synthetic oligonucleotide"
  source: /note="RNA"
  modified_base (1)..(1): 5-methyl modified nucleotide
  modified_base (13)..(13): 5-methyl modified nucleotide
  modified_base (18)..(18): 5-methyl modified nucleotide
  source: /note="3' tri-ethylene glycol (TEG)"
caaggaagauggcauuucua

SEQ ID NO: 2588 - RNA, 19 nt, Artificial Sequence
  source: /note="Description of Artificial Sequence: Synthetic oligonucleotide"
  source: /note="RNA"
  modified_base (1)..(1): 5-methyl modified nucleotide
  modified_base (13)..(13): 5-methyl modified nucleotide
  modified_base (18)..(18): 5-methyl modified nucleotide
  source: /note="3' tri-ethylene glycol (TEG)"
caaggaagauggcauuucu

SEQ ID NO: 2589 - RNA, 18 nt, Artificial Sequence
  source: /note="Description of Artificial Sequence: Synthetic oligonucleotide"
  source: /note="RNA"
  modified_base (1)..(1): 5-methyl modified nucleotide
  modified_base (13)..(13): 5-methyl modified nucleotide
  modified_base (18)..(18): 5-methyl modified nucleotide
  source: /note="3' tri-ethylene glycol (TEG)"
caaggaagauggcauuuc

SEQ ID NO: 2590 - RNA, 17 nt, Artificial Sequence
  source: /note="Description of Artificial Sequence: Synthetic oligonucleotide"
  source: /note="RNA"
  modified_base (1)..(1): 5-methyl modified nucleotide
  modified_base (13)..(13): 5-methyl modified nucleotide
  source: /note="3' tri-ethylene glycol (TEG)"
caaggaagauggcauuu

SEQ ID NO: 2591 - RNA, 16 nt, Artificial Sequence
  source: /note="Description of Artificial Sequence: Synthetic oligonucleotide"
  source: /note="RNA"
  modified_base (1)..(1): 5-methyl modified nucleotide
  modified_base (13)..(13): 5-methyl modified nucleotide
  source: /note="3' tri-ethylene glycol (TEG)"
caaggaagauggcauu

SEQ ID NO: 2592 - RNA, 15 nt, Artificial Sequence
  source: /note="Description of Artificial Sequence: Synthetic oligonucleotide"
  source: /note="RNA"
  modified_base (1)..(1): 5-methyl modified nucleotide
  modified_base (13)..(13): 5-methyl modified nucleotide
  source: /note="3' tri-ethylene glycol (TEG)"
caaggaagauggcau

SEQ ID NO: 2593 - RNA, 14 nt, Artificial Sequence
  source: /note="Description of Artificial Sequence: Synthetic oligonucleotide"
  source: /note="RNA"
  modified_base (1)..(1): 5-methyl modified nucleotide
  modified_base (13)..(13): 5-methyl modified nucleotide
  source: /note="3' tri-ethylene glycol (TEG)"
caaggaagauggca

SEQ ID NO: 2594 - RNA, 13 nt, Artificial Sequence
  source: /note="Description of Artificial Sequence: Synthetic oligonucleotide"
  source: /note="RNA"
  modified_base (1)..(1): 5-methyl modified nucleotide
  modified_base (13)..(13): 5-methyl modified nucleotide
  source: /note="3' tri-ethylene glycol (TEG)"
caaggaagauggc

SEQ ID NO: 2595 - RNA, 12 nt, Artificial Sequence
  source: /note="Description of Artificial Sequence: Synthetic oligonucleotide"
  source: /note="RNA"
  modified_base (1)..(1): 5-methyl modified nucleotide
  source: /note="3' tri-ethylene glycol (TEG)"
caaggaagaugg

SEQ ID NO: 2596 - RNA, 11 nt, Artificial Sequence
  source: /note="Description of Artificial Sequence: Synthetic oligonucleotide"
  source: /note="RNA"
  modified_base (1)..(1): 5-methyl modified nucleotide
  source: /note="3' tri-ethylene glycol (TEG)"
caaggaagaug

SEQ ID NO: 2597 - RNA, 10 nt, Artificial Sequence
  source: /note="Description of Artificial Sequence: Synthetic oligonucleotide"
  source: /note="RNA"
  modified_base (1)..(1): 5-methyl modified nucleotide
  source: /note="3' tri-ethylene glycol (TEG)"
caaggaagau

SEQ ID NO: 2598 - RNA, 9 nt, Artificial Sequence
  source: /note="Description of Artificial Sequence: Synthetic oligonucleotide"
  source: /note="RNA/Antisense Oligonucleotide"
  modified_base (1)..(1): 5-methyl modified nucleotide
  source: /note="3' tri-ethylene glycol (TEG)"
caaggaaga

SEQ ID NO: 2599 - RNA, 8 nt, Artificial Sequence
  source: /note="Description of Artificial Sequence: Synthetic oligonucleotide"
  source: /note="RNA/Antisense Oligonucleotide"
  modified_base (1)..(1): 5-methyl modified nucleotide
  source: /note="3' tri-ethylene glycol (TEG)"
caaggaag

SEQ ID NO: 2600 - RNA, 20 nt, Artificial Sequence
  source: /note="Description of Artificial Sequence: Synthetic oligonucleotide"
  source: /note="RNA"
  modified_base (12)..(12): 5-methyl modified nucleotide
  modified_base (17)..(17): 5-methyl modified nucleotide
  source: /note="3' tri-ethylene glycol (TEG)"
aaggaagauggcauuucuag

SEQ ID NO: 2601 - RNA, 19 nt, Artificial Sequence
  source: /note="Description of Artificial Sequence: Synthetic oligonucleotide"
  source: /note="Antisense Oligonucleotide"
  modified_base (12)..(12): 5-methyl modified nucleotide
  modified_base (17)..(17): 5-methyl modified nucleotide
  source: /note="3' tri-ethylene glycol (TEG)"
aaggaagauggcauuucua

SEQ ID NO: 2602 - RNA, 18 nt, Artificial Sequence
  source: /note="Description of Artificial Sequence: Synthetic oligonucleotide"
  source: /note="RNA"
  modified_base (12)..(12): 5-methyl modified nucleotide
  modified_base (17)..(17): 5-methyl modified nucleotide
  source: /note="3' tri-ethylene glycol (TEG)"
aaggaagauggcauuucu

SEQ ID NO: 2603 - RNA, 17 nt, Artificial Sequence
  source: /note="Description of Artificial Sequence: Synthetic oligonucleotide"
  source: /note="RNA"
  modified_base (12)..(12): 5-methyl modified nucleotide
  modified_base (17)..(17): 5-methyl modified nucleotide
  source: /note="3' tri-ethylene glycol (TEG)"
aaggaagauggcauuuc

SEQ ID NO: 2604 - RNA, 16 nt, Artificial Sequence
  source: /note="Description of Artificial Sequence: Synthetic oligonucleotide"
  source: /note="RNA"
  modified_base (12)..(12): 5-methyl modified nucleotide
  source: /note="3' tri-ethylene glycol (TEG)"
aaggaagauggcauuu

SEQ ID NO: 2605 - RNA, 15 nt, Artificial Sequence
  source: /note="Description of Artificial Sequence: Synthetic oligonucleotide"
  source: /note="RNA"
  modified_base (12)..(12): 5-methyl modified nucleotide
  source: /note="3' tri-ethylene glycol (TEG)"
aaggaagauggcauu

SEQ ID NO: 2606 - RNA, 14 nt, Artificial Sequence
  source: /note="Description of Artificial Sequence: Synthetic oligonucleotide"
  source: /note="RNA"
  modified_base (12)..(12): 5-methyl modified nucleotide
  source: /note="3' tri-ethylene glycol (TEG)"
aaggaagauggcau

SEQ ID NO: 2607 - RNA, 13 nt, Artificial Sequence
  source: /note="Description of Artificial Sequence: Synthetic oligonucleotide"
  source: /note="RNA"
  modified_base (12)..(12): 5-methyl modified nucleotide
  source: /note="3' tri-ethylene glycol (TEG)"
aaggaagauggca

SEQ ID NO: 2608 - RNA, 12 nt, Artificial Sequence
  source: /note="Description of Artificial Sequence: Synthetic oligonucleotide"
  source: /note="RNA"
  modified_base (12)..(12): 5-methyl modified nucleotide
  source: /note="3' tri-ethylene glycol (TEG)"
aaggaagauggc

SEQ ID NO: 2609 - RNA, 11 nt, Artificial Sequence
  source: /note="Description of Artificial Sequence: Synthetic oligonucleotide"
  source: /note="Antisense Oligonucleotide"
  source: /note="3' tri-ethylene glycol (TEG)"
aaggaagaugg

SEQ ID NO: 2610 - RNA, 10 nt, Artificial Sequence
  source: /note="Description of Artificial Sequence: Synthetic oligonucleotide"
  source: /note="Antisense Oligonucleotide"
  source: /note="3' tri-ethylene glycol (TEG)"
aaggaagaug

SEQ ID NO: 2611 - RNA, 9 nt, Artificial Sequence
  source: /note="Description of Artificial Sequence: Synthetic oligonucleotide"
  source: /note="Antisense Oligonucleotide"
  source: /note="3' tri-ethylene glycol (TEG)"
aaggaagau

SEQ ID NO: 2612 - RNA, 8 nt, Artificial Sequence
  source: /note="Description of Artificial Sequence: Synthetic oligonucleotide"
  source: /note="RNA/Antisense Oligonucleotide"
  source: /note="3' tri-ethylene glycol (TEG)"
aaggaaga

SEQ ID NO: 2613 - RNA, 19 nt, Artificial Sequence
  source: /note="Description of Artificial Sequence: Synthetic oligonucleotide"
  source: /note="RNA"
  modified_base (11)..(11): 5-methyl modified nucleotide
  modified_base (16)..(16): 5-methyl modified nucleotide
  source: /note="3' tri-ethylene glycol (TEG)"
aggaagauggcauuucuag

SEQ ID NO: 2614 - RNA, 18 nt, Artificial Sequence
  source: /note="Description of Artificial Sequence: Synthetic oligonucleotide"
  source: /note="RNA"
  modified_base (11)..(11): 5-methyl modified nucleotide
  modified_base (16)..(16): 5-methyl modified nucleotide
  source: /note="3' tri-ethylene glycol (TEG)"
aggaagauggcauuucua

SEQ ID NO: 2615 - RNA, 17 nt, Artificial Sequence
  source: /note="Description of Artificial Sequence: Synthetic oligonucleotide"
  source: /note="RNA"
  modified_base (11)..(11): 5-methyl modified nucleotide
  modified_base (16)..(16): 5-methyl modified nucleotide
  source: /note="3' tri-ethylene glycol (TEG)"
aggaagauggcauuucu

SEQ ID NO: 2616 - RNA, 16 nt, Artificial Sequence
  source: /note="Description of Artificial Sequence: Synthetic oligonucleotide"
  source: /note="RNA"
  modified_base (11)..(11): 5-methyl modified nucleotide
  modified_base (16)..(16): 5-methyl modified nucleotide
  source: /note="3' tri-ethylene glycol (TEG)"
aggaagauggcauuuc

SEQ ID NO: 2617 - RNA, 15 nt, Artificial Sequence
  source: /note="Description of Artificial Sequence: Synthetic oligonucleotide"
  source: /note="RNA"
  modified_base (11)..(11): 5-methyl modified nucleotide
  source: /note="3' tri-ethylene glycol (TEG)"
aggaagauggcauuu

SEQ ID NO: 2618 - RNA, 14 nt, Artificial Sequence
  source: /note="Description of Artificial Sequence: Synthetic oligonucleotide"
  source: /note="RNA"
  modified_base (11)..(11): 5-methyl modified nucleotide
  source: /note="3' tri-ethylene glycol (TEG)"
aggaagauggcauu

SEQ ID NO: 2619 - RNA, 13 nt, Artificial Sequence
  source: /note="Description of Artificial Sequence: Synthetic oligonucleotide"
  source: /note="RNA"
  modified_base (11)..(11): 5-methyl modified nucleotide
  source: /note="3' tri-ethylene glycol (TEG)"
aggaagauggcau

SEQ ID NO: 2620 - RNA, 12 nt, Artificial Sequence
  source: /note="Description of Artificial Sequence: Synthetic oligonucleotide"
  source: /note="RNA"
  modified_base (11)..(11): 5-methyl modified nucleotide
  source: /note="3' tri-ethylene glycol (TEG)"
aggaagauggca

SEQ ID NO: 2621 - RNA, 10 nt, Artificial Sequence
  source: /note="Description of Artificial Sequence: Synthetic oligonucleotide"
  source: /note="Antisense Oligonucleotide"
  source: /note="3' tri-ethylene glycol (TEG)"
aggaagaugg

SEQ ID NO: 2622 - RNA, 9 nt, Artificial Sequence
  source: /note="Description of Artificial Sequence: Synthetic oligonucleotide"
  source: /note="Antisense Oligonucleotide"
  source: /note="3' tri-ethylene glycol (TEG)"
aggaagaug

SEQ ID NO: 2623 - RNA, 8 nt, Artificial Sequence
  source: /note="Description of Artificial Sequence: Synthetic oligonucleotide"
  source: /note="Antisense Oligonucleotide"
  source: /note="3' tri-ethylene glycol (TEG)"
aggaagau

SEQ ID NO: 2624 - RNA, 18 nt, Artificial Sequence
  source: /note="Description of Artificial Sequence: Synthetic oligonucleotide"
  source: /note="RNA"
  modified_base (10)..(10): 5-methyl modified nucleotide
  modified_base (15)..(15): 5-methyl modified nucleotide
  source: /note="3' tri-ethylene glycol (TEG)"
ggaagauggcauuucuag

SEQ ID NO: 2625 - RNA, 17 nt, Artificial Sequence
  source: /note="Description of Artificial Sequence: Synthetic oligonucleotide"
  source: /note="RNA"
  modified_base (10)..(10): 5-methyl modified nucleotide
  modified_base (15)..(15): 5-methyl modified nucleotide
  source: /note="3' tri-ethylene glycol (TEG)"
ggaagauggcauuucua

SEQ ID NO: 2626 - RNA, 16 nt, Artificial Sequence
  source: /note="Description of Artificial Sequence: Synthetic oligonucleotide"
  source: /note="RNA"
  modified_base (10)..(10): 5-methyl modified nucleotide
  modified_base (15)..(15): 5-methyl modified nucleotide
  source: /note="3' tri-ethylene glycol (TEG)"
ggaagauggcauuucu

SEQ ID NO: 2627 - RNA, 15 nt, Artificial Sequence
  source: /note="Description of Artificial Sequence: Synthetic oligonucleotide"
  source: /note="RNA"
  modified_base (10)..(10): 5-methyl modified nucleotide
  modified_base (15)..(15): 5-methyl modified nucleotide
  source: /note="3' tri-ethylene glycol (TEG)"
ggaagauggcauuuc

SEQ ID NO: 2628 - RNA, 14 nt, Artificial Sequence
  source: /note="Description of Artificial Sequence: Synthetic oligonucleotide"
  source: /note="RNA"
  modified_base (10)..(10): 5-methyl modified nucleotide
  source: /note="3' tri-ethylene glycol (TEG)"
ggaagauggcauuu

SEQ ID NO: 2629 - RNA, 13 nt, Artificial Sequence
  source: /note="Description of Artificial Sequence: Synthetic oligonucleotide"
  source: /note="RNA"
  modified_base (10)..(10): 5-methyl modified nucleotide
  source: /note="3' tri-ethylene glycol (TEG)"
ggaagauggcauu

SEQ ID NO: 2630 - RNA, 12 nt, Artificial Sequence
  source: /note="Description of Artificial Sequence: Synthetic oligonucleotide"
  source: /note="RNA"
  modified_base (10)..(10): 5-methyl modified nucleotide
  source: /note="3' tri-ethylene glycol (TEG)"
ggaagauggcau

SEQ ID NO: 2631 - RNA, 11 nt, Artificial Sequence
  source: /note="Description of Artificial Sequence: Synthetic oligonucleotide"
  source: /note="RNA"
  modified_base (10)..(10): 5-methyl modified nucleotide
  source: /note="3' tri-ethylene glycol (TEG)"
ggaagauggca

SEQ ID NO: 2632 - RNA, 10 nt, Artificial Sequence
  source: /note="Description of Artificial Sequence: Synthetic oligonucleotide"
  source: /note="RNA"
  modified_base (10)..(10): 5-methyl modified nucleotide
  source: /note="3' tri-ethylene glycol (TEG)"
ggaagauggc

SEQ ID NO: 2633 - RNA, 8 nt, Artificial Sequence
  source: /note="Description of Artificial Sequence: Synthetic oligonucleotide"
  source: /note="Antisense Oligonucleotide"
  source: /note="3' tri-ethylene glycol (TEG)"
ggaagaug

SEQ ID NO: 2634 - RNA, 17 nt, Artificial Sequence
  source: /note="Description of Artificial Sequence: Synthetic oligonucleotide"
  source: /note="RNA"
  modified_base (9)..(9): 5-methyl modified nucleotide
  modified_base (14)..(14): 5-methyl modified nucleotide
  source: /note="3' tri-ethylene glycol (TEG)"
gaagauggcauuucuag

SEQ ID NO: 2635 - RNA, 16 nt, Artificial Sequence
  source: /note="Description of Artificial Sequence: Synthetic oligonucleotide"
  source: /note="RNA"
  modified_base (9)..(9): 5-methyl modified nucleotide
  modified_base (14)..(14): 5-methyl modified nucleotide
  source: /note="3' tri-ethylene glycol (TEG)"
gaagauggcauuucua

SEQ ID NO: 2636 - RNA, 14 nt, Artificial Sequence
  source: /note="Description of Artificial Sequence: Synthetic oligonucleotide"
  source: /note="RNA"
  modified_base (9)..(9): 5-methyl modified nucleotide
  modified_base (14)..(14): 5-methyl modified nucleotide
  source: /note="3' tri-ethylene glycol (TEG)"
gaagauggcauuuc

SEQ ID NO: 2637 - RNA, 13 nt, Artificial Sequence
  source: /note="Description of Artificial Sequence: Synthetic oligonucleotide"
  source: /note="RNA"
  modified_base (9)..(9): 5-methyl modified nucleotide
  source: /note="3' tri-ethylene glycol (TEG)"
gaagauggcauuu

SEQ ID NO: 2638 - RNA, 12 nt, Artificial Sequence
  source: /note="Description of Artificial Sequence: Synthetic oligonucleotide"
  source: /note="RNA"
  modified_base (9)..(9): 5-methyl modified nucleotide
  source: /note="3' tri-ethylene glycol (TEG)"
gaagauggcauu

SEQ ID NO: 2639 - RNA, 11 nt, Artificial Sequence
  source: /note="Description of Artificial Sequence: Synthetic oligonucleotide"
  source: /note="RNA"
  modified_base (9)..(9): 5-methyl modified nucleotide
  source: /note="3' tri-ethylene glycol (TEG)"
gaagauggcau

SEQ ID NO: 2640 - RNA, 10 nt, Artificial Sequence
  source: /note="Description of Artificial Sequence: Synthetic oligonucleotide"
  source: /note="RNA"
  modified_base (9)..(9): 5-methyl modified nucleotide
  source: /note="3' tri-ethylene glycol (TEG)"
gaagauggca

SEQ ID NO: 2641 - RNA, 9 nt, Artificial Sequence
  source: /note="Description of Artificial Sequence: Synthetic oligonucleotide"
  source: /note="RNA"
  modified_base (9)..(9): 5-methyl modified nucleotide
  source: /note="3' tri-ethylene glycol (TEG)"
gaagauggc

SEQ ID NO: 2642 - RNA, 8 nt, Artificial Sequence
  source: /note="Description of Artificial Sequence: Synthetic oligonucleotide"
  source: /note="Antisense Oligonucleotide"
  source: /note="3' tri-ethylene glycol (TEG)"
gaagaugg

SEQ ID NO: 2643 - RNA, 16 nt, Artificial Sequence
  source: /note="Description of Artificial Sequence: Synthetic oligonucleotide"
  source: /note="RNA"
  modified_base (8)..(8): 5-methyl modified nucleotide
  modified_base (13)..(13): 5-methyl modified nucleotide
  source: /note="3' tri-ethylene glycol (TEG)"
aagauggcauuucuag

SEQ ID NO: 2644 - RNA, 15 nt, Artificial Sequence
  source: /note="Description of Artificial Sequence: Synthetic oligonucleotide"
  source: /note="RNA"
  modified_base (8)..(8): 5-methyl modified nucleotide
  modified_base (13)..(13): 5-methyl modified nucleotide
  source: /note="3' tri-ethylene glycol (TEG)"
aagauggcauuucua

SEQ ID NO: 2645 - RNA, 14 nt, Artificial Sequence
  source: /note="Description of Artificial Sequence: Synthetic oligonucleotide"
  source: /note="RNA"
  modified_base (8)..(8): 5-methyl modified nucleotide
  modified_base (13)..(13): 5-methyl modified nucleotide
  source: /note="3' tri-ethylene glycol (TEG)"
aagauggcauuucu

SEQ ID NO: 2646 - RNA, 13 nt, Artificial Sequence
  source: /note="Description of Artificial Sequence: Synthetic oligonucleotide"
  source: /note="RNA"
  modified_base (8)..(8): 5-methyl modified nucleotide
  modified_base (13)..(13): 5-methyl modified nucleotide
  source: /note="3' tri-ethylene glycol (TEG)"
aagauggcauuuc

SEQ ID NO: 2647 - RNA, 12 nt, Artificial Sequence
  source: /note="Description of Artificial Sequence: Synthetic oligonucleotide"
  source: /note="RNA"
  modified_base (8)..(8): 5-methyl modified nucleotide
  source: /note="3' tri-ethylene glycol (TEG)"
aagauggcauuu

SEQ ID NO: 2648 - RNA, 11 nt, Artificial Sequence
  source: /note="Description of Artificial Sequence: Synthetic oligonucleotide"
  source: /note="RNA"
  modified_base (8)..(8): 5-methyl modified nucleotide
  source: /note="3' tri-ethylene glycol (TEG)"
aagauggcauu

SEQ ID NO: 2649 - RNA, 10 nt, Artificial Sequence
  source: /note="Description of Artificial Sequence: Synthetic oligonucleotide"
  source: /note="RNA"
  modified_base (8)..(8): 5-methyl modified nucleotide
  source: /note="3' tri-ethylene glycol (TEG)"
aagauggcau

SEQ ID NO: 2650 - RNA, 9 nt, Artificial Sequence
  source: /note="Description of Artificial Sequence: Synthetic oligonucleotide"
  source: /note="RNA"
  modified_base (8)..(8): 5-methyl modified nucleotide
  source: /note="3' tri-ethylene glycol (TEG)"
aagauggca

SEQ ID NO: 2651 - RNA, 8 nt, Artificial Sequence
  source: /note="Description of Artificial Sequence: Synthetic oligonucleotide"
  source: /note="RNA"
  modified_base (8)..(8): 5-methyl modified nucleotide
  source: /note="3' tri-ethylene glycol (TEG)"
aagauggc

SEQ ID NO: 2652 - RNA, 15 nt, Artificial Sequence
  source: /note="Description of Artificial Sequence: Synthetic oligonucleotide"
  source: /note="RNA"
  modified_base (7)..(7): 5-methyl modified nucleotide
  modified_base (12)..(12): 5-methyl modified nucleotide
  source: /note="3' tri-ethylene glycol (TEG)"
agauggcauuucuag

SEQ ID NO: 2653 - RNA, 14 nt, Artificial Sequence
  source: /note="Description of Artificial Sequence: Synthetic oligonucleotide"
  source: /note="RNA"
  modified_base (7)..(7): 5-methyl modified nucleotide
  modified_base (12)..(12): 5-methyl modified nucleotide
  source: /note="3' tri-ethylene glycol (TEG)"
agauggcauuucua

SEQ ID NO: 2654 - RNA, 13 nt, Artificial Sequence
  source: /note="Description of Artificial Sequence: Synthetic oligonucleotide"
  source: /note="RNA"
  modified_base (7)..(7): 5-methyl modified nucleotide
  modified_base (12)..(12): 5-methyl modified nucleotide
  source: /note="3' tri-ethylene glycol (TEG)"
agauggcauuucu

SEQ ID NO: 2655 - RNA, 12 nt, Artificial Sequence
  source: /note="Description of Artificial Sequence: Synthetic oligonucleotide"
  source: /note="RNA"
  modified_base (7)..(7): 5-methyl modified nucleotide
  modified_base (12)..(12): 5-methyl modified nucleotide
  source: /note="3' tri-ethylene glycol (TEG)"
agauggcauuuc

SEQ ID NO: 2656 - RNA, 11 nt, Artificial Sequence
  source: /note="Description of Artificial Sequence: Synthetic oligonucleotide"
  source: /note="RNA"
  modified_base (7)..(7): 5-methyl modified nucleotide
  source: /note="3' tri-ethylene glycol (TEG)"
agauggcauuu

SEQ ID NO: 2657 - RNA, 10 nt, Artificial Sequence
  source: /note="Description of Artificial Sequence: Synthetic oligonucleotide"
  source: /note="RNA"
  modified_base (7)..(7): 5-methyl modified nucleotide
  source: /note="3' tri-ethylene glycol (TEG)"
agauggcauu

SEQ ID NO: 2658 - RNA, 9 nt, Artificial Sequence
  source: /note="Description of Artificial Sequence: Synthetic oligonucleotide"
  source: /note="RNA"
  modified_base (7)..(7): 5-methyl modified nucleotide
  source: /note="3' tri-ethylene glycol (TEG)"
agauggcau

SEQ ID NO: 2659 - RNA, 8 nt, Artificial Sequence
  source: /note="Description of Artificial Sequence: Synthetic oligonucleotide"
  source: /note="RNA"
  modified_base (7)..(7): 5-methyl modified nucleotide
  source: /note="3' tri-ethylene glycol (TEG)"
agauggca

SEQ ID NO: 2660 - RNA, 30 nt, Artificial Sequence; identical to SEQ ID NO: 284
  source: /note="Description of Artificial Sequence: Synthetic oligonucleotide"
  source: /note="RNA"
  modified_base (1)..(1): 5-methyl modified nucleotide
  modified_base (3)..(3): 5-methyl modified nucleotide
  modified_base (4)..(4): 5-methyl modified nucleotide
  modified_base (7)..(7): 5-methyl modified nucleotide
  modified_base (10)..(10): 5-methyl modified nucleotide
  modified_base (22)..(22): 5-methyl modified nucleotide
  modified_base (27)..(27): 5-methyl modified nucleotide
  source: /note="3' tri-ethylene glycol (TEG)"

SEQ ID NO: 2661 - RNA, 29 nt, Artificial Sequence
  source: /note="Description of Artificial Sequence: Synthetic oligonucleotide"
  source: /note="RNA"
  modified_base (1)..(1): 5-methyl modified nucleotide
  modified_base (3)..(3): 5-methyl modified nucleotide
  modified_base (4)..(4): 5-methyl modified nucleotide
  modified_base (7)..(7): 5-methyl modified nucleotide
  modified_base (10)..(10): 5-methyl modified nucleotide
  modified_base (22)..(22): 5-methyl modified nucleotide
  modified_base (27)..(27): 5-methyl modified nucleotide
  source: /note="3' tri-ethylene glycol (TEG)"
cuccaacaucaaggaagauggcauuucua

SEQ ID NO: 2662 - RNA, 28 nt, Artificial Sequence
  source: /note="Description of Artificial Sequence: Synthetic oligonucleotide"
  source: /note="RNA"
  modified_base (1)..(1): 5-methyl modified nucleotide
  modified_base (3)..(3): 5-methyl modified nucleotide
  modified_base (4)..(4): 5-methyl modified nucleotide
  modified_base (7)..(7): 5-methyl modified nucleotide
  modified_base (10)..(10): 5-methyl modified nucleotide
  modified_base (22)..(22): 5-methyl modified nucleotide
  modified_base (27)..(27): 5-methyl modified nucleotide
  source: /note="3' tri-ethylene glycol (TEG)"
cuccaacaucaaggaagauggcauuucu

SEQ ID NO: 2663 - RNA, 27 nt, Artificial Sequence
  source: /note="Description of Artificial Sequence: Synthetic oligonucleotide"
  source: /note="RNA"
  modified_base (1)..(1): 5-methyl modified nucleotide
  modified_base (3)..(3): 5-methyl modified nucleotide
  modified_base (4)..(4): 5-methyl modified nucleotide
  modified_base (7)..(7): 5-methyl modified nucleotide
  modified_base (10)..(10): 5-methyl modified nucleotide
  modified_base (22)..(22): 5-methyl modified nucleotide
  modified_base (27)..(27): 5-methyl modified nucleotide
  source: /note="3' tri-ethylene glycol (TEG)"
cuccaacaucaaggaagauggcauuuc

SEQ ID NO: 2664 - RNA, 26 nt, Artificial Sequence
  source: /note="Description of Artificial Sequence: Synthetic oligonucleotide"
  source: /note="RNA"
  modified_base (1)..(1): 5-methyl modified nucleotide
  modified_base (3)..(3): 5-methyl modified nucleotide
  modified_base (4)..(4): 5-methyl modified nucleotide
  modified_base (7)..(7): 5-methyl modified nucleotide
  modified_base (10)..(10): 5-methyl modified nucleotide
  modified_base (22)..(22): 5-methyl modified nucleotide
  source: /note="3' tri-ethylene glycol (TEG)"
cuccaacaucaaggaagauggcauuu

SEQ ID NO: 2665 - RNA, 25 nt, Artificial Sequence
  source: /note="Description of Artificial Sequence: Synthetic oligonucleotide"
  source: /note="RNA"
  modified_base (1)..(1): 5-methyl modified nucleotide
  modified_base (3)..(3): 5-methyl modified nucleotide
  modified_base (4)..(4): 5-methyl modified nucleotide
  modified_base (7)..(7): 5-methyl modified nucleotide
  modified_base (10)..(10): 5-methyl modified nucleotide
  modified_base (22)..(22): 5-methyl modified nucleotide
  source: /note="3' tri-ethylene glycol (TEG)"
cuccaacaucaaggaagauggcauu

SEQ ID NO: 2666 - RNA, 24 nt, Artificial Sequence
  source: /note="Description of Artificial Sequence: Synthetic oligonucleotide"
  source: /note="RNA"
  modified_base (1)..(1): 5-methyl modified nucleotide
  modified_base (3)..(3): 5-methyl modified nucleotide
  modified_base (4)..(4): 5-methyl modified nucleotide
  modified_base (7)..(7): 5-methyl modified nucleotide
  modified_base (10)..(10): 5-methyl modified nucleotide
  modified_base (22)..(22): 5-methyl modified nucleotide
  source: /note="3' tri-ethylene glycol (TEG)"
cuccaacaucaaggaagauggcau

SEQ ID NO: 2667 - RNA, 23 nt, Artificial Sequence
  source: /note="Description of Artificial Sequence: Synthetic oligonucleotide"
  source: /note="RNA"
  modified_base (1)..(1): 5-methyl modified nucleotide
  modified_base (3)..(3): 5-methyl modified nucleotide
  modified_base (4)..(4): 5-methyl modified nucleotide
  modified_base (7)..(7): 5-methyl modified nucleotide
  modified_base (10)..(10): 5-methyl modified nucleotide
  modified_base (22)..(22): 5-methyl modified nucleotide
  source: /note="3' tri-ethylene glycol (TEG)"
cuccaacaucaaggaagauggca

SEQ ID NO: 2668 - RNA, 22 nt, Artificial Sequence
  source: /note="Description of Artificial Sequence: Synthetic oligonucleotide"
  source: /note="RNA"
  modified_base (1)..(1): 5-methyl modified nucleotide
  modified_base (3)..(3): 5-methyl modified nucleotide
  modified_base (4)..(4): 5-methyl modified nucleotide
  modified_base (7)..(7): 5-methyl modified nucleotide
  modified_base (10)..(10): 5-methyl modified nucleotide
  modified_base (22)..(22): 5-methyl modified nucleotide
  source: /note="3' tri-ethylene glycol (TEG)"
cuccaacaucaaggaagauggc

SEQ ID NO: 2669 - RNA, 21 nt, Artificial Sequence
  source: /note="Description of Artificial Sequence: Synthetic oligonucleotide"
  source: /note="RNA"
  modified_base (1)..(1): 5-methyl modified nucleotide
  modified_base (3)..(3): 5-methyl modified nucleotide
  modified_base (4)..(4): 5-methyl modified nucleotide
  modified_base (7)..(7): 5-methyl modified nucleotide
  modified_base (10)..(10): 5-methyl modified nucleotide
  source: /note="3' tri-ethylene glycol (TEG)"
cuccaacaucaaggaagaugg

SEQ ID NO: 2670 - RNA, 20 nt, Artificial Sequence
  source: /note="Description of Artificial Sequence: Synthetic oligonucleotide"
  source: /note="RNA"
  modified_base (1)..(1): 5-methyl modified nucleotide
  modified_base (3)..(3): 5-methyl modified nucleotide
  modified_base (4)..(4): 5-methyl modified nucleotide
  modified_base (7)..(7): 5-methyl modified nucleotide
  modified_base (10)..(10): 5-methyl modified nucleotide
  source: /note="3' tri-ethylene glycol (TEG)"
cuccaacaucaaggaagaug

SEQ ID NO: 2671 - RNA, 19 nt, Artificial Sequence
  source: /note="Description of Artificial Sequence: Synthetic oligonucleotide"
  source: /note="RNA"
  modified_base (1)..(1): 5-methyl modified nucleotide
  modified_base (3)..(3): 5-methyl modified nucleotide
  modified_base (4)..(4): 5-methyl modified nucleotide
  modified_base (7)..(7): 5-methyl modified nucleotide
  modified_base (10)..(10): 5-methyl modified nucleotide
  source: /note="3' tri-ethylene glycol (TEG)"
cuccaacaucaaggaagau

SEQ ID NO: 2672 - RNA, 18 nt, Artificial Sequence
  source: /note="Description of Artificial Sequence: Synthetic oligonucleotide"
  source: /note="RNA"
  modified_base (1)..(1): 5-methyl modified nucleotide
  modified_base (3)..(3): 5-methyl modified nucleotide
  modified_base (4)..(4): 5-methyl modified nucleotide
  modified_base (7)..(7): 5-methyl modified nucleotide
  modified_base (10)..(10): 5-methyl modified nucleotide
  source: /note="3' tri-ethylene glycol (TEG)"
cuccaacaucaaggaaga

SEQ ID NO: 2673 - RNA, 17 nt, Artificial Sequence
  source: /note="Description of Artificial Sequence: Synthetic oligonucleotide"
  source: /note="RNA"
  modified_base (1)..(1): 5-methyl modified nucleotide
  modified_base (3)..(3): 5-methyl modified nucleotide
  modified_base (4)..(4): 5-methyl modified nucleotide
  modified_base (7)..(7): 5-methyl modified nucleotide
  modified_base (10)..(10): 5-methyl modified nucleotide
  source: /note="3' tri-ethylene glycol (TEG)"
cuccaacaucaaggaag

SEQ ID NO: 2674 - RNA, 29 nt, Artificial Sequence
  source: /note="Description of Artificial Sequence: Synthetic oligonucleotide"
  source: /note="RNA"
  modified_base (2)..(2): 5-methyl modified nucleotide
  modified_base (3)..(3): 5-methyl modified nucleotide
  modified_base (6)..(6): 5-methyl modified nucleotide
  modified_base (9)..(9): 5-methyl modified nucleotide
  modified_base (21)..(21): 5-methyl modified nucleotide
  modified_base (26)..(26): 5-methyl modified nucleotide
  source: /note="3' tri-ethylene glycol (TEG)"
uccaacaucaaggaagauggcauuucuag

SEQ ID NO: 2675 - RNA, 28 nt, Artificial Sequence
  source: /note="Description of Artificial Sequence: Synthetic oligonucleotide"
  source: /note="RNA"
  modified_base (2)..(2): 5-methyl modified nucleotide
  modified_base (3)..(3): 5-methyl modified nucleotide
  modified_base (6)..(6): 5-methyl modified nucleotide
  modified_base (9)..(9): 5-methyl modified nucleotide
  modified_base (21)..(21): 5-methyl modified nucleotide
  modified_base (26)..(26): 5-methyl modified nucleotide
  source: /note="3' tri-ethylene glycol (TEG)"
uccaacaucaaggaagauggcauuucua

SEQ ID NO: 2676 - RNA, 27 nt, Artificial Sequence
  source: /note="Description of Artificial Sequence: Synthetic oligonucleotide"
  source: /note="RNA"
  modified_base (2)..(2): 5-methyl modified nucleotide
  modified_base (3)..(3): 5-methyl modified nucleotide
  modified_base (6)..(6): 5-methyl modified nucleotide
  modified_base (9)..(9): 5-methyl modified nucleotide
  modified_base (21)..(21): 5-methyl modified nucleotide
  modified_base (26)..(26): 5-methyl modified nucleotide
  source: /note="3' tri-ethylene glycol (TEG)"
uccaacaucaaggaagauggcauuucu

SEQ ID NO: 2677 - RNA, 26 nt, Artificial Sequence
  source: /note="Description of Artificial Sequence: Synthetic oligonucleotide"
  source: /note="RNA"
  modified_base (2)..(2): 5-methyl modified nucleotide
  modified_base (3)..(3): 5-methyl modified nucleotide
  modified_base (6)..(6): 5-methyl modified nucleotide
  modified_base (9)..(9): 5-methyl modified nucleotide
  modified_base (21)..(21): 5-methyl modified nucleotide
  modified_base (26)..(26): 5-methyl modified nucleotide
  source: /note="3' tri-ethylene glycol (TEG)"
uccaacaucaaggaagauggcauuuc

SEQ ID NO: 2678 - RNA, 25 nt, Artificial Sequence
  source: /note="Description of Artificial Sequence: Synthetic oligonucleotide"
  source: /note="RNA"
  modified_base (2)..(2): 5-methyl modified nucleotide
  modified_base (3)..(3): 5-methyl modified nucleotide
  modified_base (6)..(6): 5-methyl modified nucleotide
  modified_base (9)..(9): 5-methyl modified nucleotide
  modified_base (21)..(21): 5-methyl modified nucleotide
  source: /note="3' tri-ethylene glycol (TEG)"
uccaacaucaaggaagauggcauuu

SEQ ID NO: 2679 - RNA, 24 nt, Artificial Sequence
  source: /note="Description of Artificial Sequence: Synthetic oligonucleotide"
  source: /note="RNA"
  modified_base (2)..(2): 5-methyl modified nucleotide
  modified_base (3)..(3): 5-methyl modified nucleotide
  modified_base (6)..(6): 5-methyl modified nucleotide
  modified_base (9)..(9): 5-methyl modified nucleotide
  modified_base (21)..(21): 5-methyl modified nucleotide
  source: /note="3' tri-ethylene glycol (TEG)"
uccaacaucaaggaagauggcauu

SEQ ID NO: 2680 - RNA, 23 nt, Artificial Sequence
  source: /note="Description of Artificial Sequence: Synthetic oligonucleotide"
  source: /note="RNA"
  modified_base (2)..(2): 5-methyl modified nucleotide
  modified_base (3)..(3): 5-methyl modified nucleotide
  modified_base (6)..(6): 5-methyl modified nucleotide
  modified_base (9)..(9): 5-methyl modified nucleotide
  modified_base (21)..(21): 5-methyl modified nucleotide
  source: /note="3' tri-ethylene glycol (TEG)"
uccaacaucaaggaagauggcau

SEQ ID NO: 2681 - RNA, 22 nt, Artificial Sequence
  source: /note="Description of Artificial Sequence: Synthetic oligonucleotide"
  source: /note="RNA"
  modified_base (2)..(2): 5-methyl modified nucleotide
  modified_base (3)..(3): 5-methyl modified nucleotide
  modified_base (6)..(6): 5-methyl modified nucleotide
  modified_base (9)..(9): 5-methyl modified nucleotide
  modified_base (21)..(21): 5-methyl modified nucleotide
  source: /note="3' tri-ethylene glycol (TEG)"
uccaacaucaaggaagauggca

SEQ ID NO: 2682 - RNA, 21 nt, Artificial Sequence
  source: /note="Description of Artificial Sequence: Synthetic oligonucleotide"
  source: /note="RNA"
  modified_base (2)..(2): 5-methyl modified nucleotide
  modified_base (3)..(3): 5-methyl modified nucleotide
  modified_base (6)..(6): 5-methyl modified nucleotide
  modified_base (9)..(9): 5-methyl modified nucleotide
  modified_base (21)..(21): 5-methyl modified nucleotide
  source: /note="3' tri-ethylene glycol (TEG)"
uccaacaucaaggaagauggc

SEQ ID NO: 2683 - RNA, 20 nt, Artificial Sequence
  source: /note="Description of Artificial Sequence: Synthetic oligonucleotide"
  source: /note="RNA"
  modified_base (2)..(2): 5-methyl modified nucleotide
  modified_base (3)..(3): 5-methyl modified nucleotide
  modified_base (6)..(6): 5-methyl modified nucleotide
  modified_base (9)..(9): 5-methyl modified nucleotide
  source: /note="3' tri-ethylene glycol (TEG)"
uccaacaucaaggaagaugg

SEQ ID NO: 2684 - RNA, 19 nt, Artificial Sequence
  source: /note="Description of Artificial Sequence: Synthetic oligonucleotide"
  source: /note="RNA"
  modified_base (2)..(2): 5-methyl modified nucleotide
  modified_base (3)..(3): 5-methyl modified nucleotide
  modified_base (6)..(6): 5-methyl modified nucleotide
  modified_base (9)..(9): 5-methyl modified nucleotide
  source: /note="3' tri-ethylene glycol (TEG)"
uccaacaucaaggaagaug

SEQ ID NO: 2685 - RNA, 18 nt, Artificial Sequence
  source: /note="Description of Artificial Sequence: Synthetic oligonucleotide"
  source: /note="RNA"
  modified_base (2)..(2): 5-methyl modified nucleotide
  modified_base (3)..(3): 5-methyl modified nucleotide
  modified_base (6)..(6): 5-methyl modified nucleotide
  modified_base (9)..(9): 5-methyl modified nucleotide
  source: /note="3' tri-ethylene glycol (TEG)"
uccaacaucaaggaagau

SEQ ID NO: 2686 - RNA, 17 nt, Artificial Sequence
  source: /note="Description of Artificial Sequence: Synthetic oligonucleotide"
  source: /note="RNA"
  modified_base (2)..(2): 5-methyl modified nucleotide
  modified_base (3)..(3): 5-methyl modified nucleotide
  modified_base (6)..(6): 5-methyl modified nucleotide
  modified_base (9)..(9): 5-methyl modified nucleotide
  source: /note="3' tri-ethylene glycol (TEG)"
uccaacaucaaggaaga

SEQ ID NO: 2687 - RNA, 16 nt, Artificial Sequence
  source: /note="Description of Artificial Sequence: Synthetic oligonucleotide"
  source: /note="RNA"
  modified_base (2)..(2): 5-methyl modified nucleotide
  modified_base (3)..(3): 5-methyl modified nucleotide
  modified_base (6)..(6): 5-methyl modified nucleotide
  modified_base (9)..(9): 5-methyl modified nucleotide
  source: /note="3' tri-ethylene glycol (TEG)"
uccaacaucaaggaag

SEQ ID NO: 2688 - RNA, 28 nt, Artificial Sequence
  source: /note="Description of Artificial Sequence: Synthetic oligonucleotide"
  source: /note="RNA"
  modified_base (1)..(1): 5-methyl modified nucleotide
  modified_base (2)..(2): 5-methyl modified nucleotide
  modified_base (5)..(5): 5-methyl modified nucleotide
  modified_base (8)..(8): 5-methyl modified nucleotide
  modified_base (20)..(20): 5-methyl modified nucleotide
  modified_base (25)..(25): 5-methyl modified nucleotide
  source: /note="3' tri-ethylene glycol (TEG)"
ccaacaucaaggaagauggcauuucuag

SEQ ID NO: 2689 - RNA, 27 nt, Artificial Sequence
  source: /note="Description of Artificial Sequence: Synthetic oligonucleotide"
  source: /note="RNA"
  modified_base (1)..(1): 5-methyl modified nucleotide
  modified_base (2)..(2): 5-methyl modified nucleotide
  modified_base (5)..(5): 5-methyl modified nucleotide
  modified_base (8)..(8): 5-methyl modified nucleotide
  modified_base (20)..(20): 5-methyl modified nucleotide
  modified_base (25)..(25): 5-methyl modified nucleotide
  source: /note="3' tri-ethylene glycol (TEG)"
ccaacaucaaggaagauggcauuucua

SEQ ID NO: 2690 - RNA, 26 nt, Artificial Sequence
  source: /note="Description of Artificial Sequence: Synthetic oligonucleotide"
  source: /note="RNA"
  modified_base (1)..(1): 5-methyl modified nucleotide
  modified_base (2)..(2): 5-methyl modified nucleotide
  modified_base (5)..(5): 5-methyl modified nucleotide
  modified_base (8)..(8): 5-methyl modified nucleotide
  modified_base (20)..(20): 5-methyl modified nucleotide
  modified_base (25)..(25): 5-methyl modified nucleotide
  source: /note="3' tri-ethylene glycol (TEG)"
ccaacaucaaggaagauggcauuucu

SEQ ID NO: 2691 - RNA, 25 nt, Artificial Sequence
  source: /note="Description of Artificial Sequence: Synthetic oligonucleotide"
  source: /note="RNA"
  modified_base (1)..(1): 5-methyl modified nucleotide
  modified_base (2)..(2): 5-methyl modified nucleotide
  modified_base (5)..(5): 5-methyl modified nucleotide
  modified_base (8)..(8): 5-methyl modified nucleotide
  modified_base (20)..(20): 5-methyl modified nucleotide
  modified_base (25)..(25): 5-methyl modified nucleotide
  source: /note="3' tri-ethylene glycol (TEG)"
ccaacaucaaggaagauggcauuuc

SEQ ID NO: 2692 - RNA, 24 nt, Artificial Sequence
  source: /note="Description of Artificial Sequence: Synthetic oligonucleotide"
  source: /note="RNA"
  modified_base (1)..(1): 5-methyl modified nucleotide
  modified_base (2)..(2): 5-methyl modified nucleotide
  modified_base (5)..(5): 5-methyl modified nucleotide
  modified_base (8)..(8): 5-methyl modified nucleotide
  modified_base (20)..(20): 5-methyl modified nucleotide
  source: /note="3' tri-ethylene glycol (TEG)"
ccaacaucaaggaagauggcauuu

SEQ ID NO: 2693 - RNA, 23 nt, Artificial Sequence
  source: /note="Description of Artificial Sequence: Synthetic oligonucleotide"
  source: /note="RNA"
  modified_base (1)..(1): 5-methyl modified nucleotide
  modified_base (2)..(2): 5-methyl modified nucleotide
  modified_base (5)..(5): 5-methyl modified nucleotide
  modified_base (8)..(8): 5-methyl modified nucleotide
  modified_base (20)..(20): 5-methyl modified nucleotide
  source: /note="3' tri-ethylene glycol (TEG)"
ccaacaucaaggaagauggcauu

SEQ ID NO: 2694 - RNA, 22 nt, Artificial Sequence
  source: /note="Description of Artificial Sequence: Synthetic oligonucleotide"
  source: /note="RNA"
  modified_base (1)..(1): 5-methyl modified nucleotide
  modified_base (2)..(2): 5-methyl modified nucleotide
  modified_base (5)..(5): 5-methyl modified nucleotide
  modified_base (8)..(8): 5-methyl modified nucleotide
  modified_base (20)..(20): 5-methyl modified nucleotide
  source: /note="3' tri-ethylene glycol (TEG)"
ccaacaucaaggaagauggcau

SEQ ID NO: 2695 - RNA, 21 nt, Artificial Sequence
  source: /note="Description of Artificial Sequence: Synthetic oligonucleotide"
  source: /note="RNA"
  modified_base (1)..(1): 5-methyl modified nucleotide
  modified_base (2)..(2): 5-methyl modified nucleotide
  modified_base (5)..(5): 5-methyl modified nucleotide
  modified_base (8)..(8): 5-methyl modified nucleotide
  modified_base (20)..(20): 5-methyl modified nucleotide
  source: /note="3' tri-ethylene glycol (TEG)"
ccaacaucaaggaagauggca

SEQ ID NO: 2696 - RNA, 20 nt, Artificial Sequence
  source: /note="Description of Artificial Sequence: Synthetic oligonucleotide"
  source: /note="RNA"
  modified_base (1)..(1): 5-methyl modified nucleotide
  modified_base (2)..(2): 5-methyl modified nucleotide
  modified_base (5)..(5): 5-methyl modified nucleotide
  modified_base (8)..(8): 5-methyl modified nucleotide
  modified_base (20)..(20): 5-methyl modified nucleotide
  source: /note="3' tri-ethylene glycol (TEG)"
ccaacaucaaggaagauggc

SEQ ID NO: 2697 - RNA, 19 nt, Artificial Sequence
  source: /note="Description of Artificial Sequence: Synthetic oligonucleotide"
  source: /note="RNA"
  modified_base (1)..(1): 5-methyl modified nucleotide
  modified_base (2)..(2): 5-methyl modified nucleotide
  modified_base (5)..(5): 5-methyl modified nucleotide
  modified_base (8)..(8): 5-methyl modified nucleotide
  source: /note="3' tri-ethylene glycol (TEG)"
ccaacaucaaggaagaugg

SEQ ID NO: 2698 - RNA, 18 nt, Artificial Sequence
  source: /note="Description of Artificial Sequence: Synthetic oligonucleotide"
  source: /note="RNA"
  modified_base (1)..(1): 5-methyl modified nucleotide
  modified_base (2)..(2): 5-methyl modified nucleotide
  modified_base (5)..(5): 5-methyl modified nucleotide
  modified_base (8)..(8): 5-methyl modified nucleotide
  source: /note="3' tri-ethylene glycol (TEG)"
ccaacaucaaggaagaug

SEQ ID NO: 2699 - RNA, 17 nt, Artificial Sequence
  source: /note="Description of Artificial Sequence: Synthetic oligonucleotide"
  source: /note="RNA"
  modified_base (1)..(1): 5-methyl modified nucleotide
  modified_base (2)..(2): 5-methyl modified nucleotide
  modified_base (5)..(5): 5-methyl modified nucleotide
  modified_base (8)..(8): 5-methyl modified nucleotide
  source: /note="3' tri-ethylene glycol (TEG)"
ccaacaucaaggaagau

SEQ ID NO: 2700 - RNA, 16 nt, Artificial Sequence
  source: /note="Description of Artificial Sequence: Synthetic oligonucleotide"
  source: /note="RNA"
  modified_base (1)..(1): 5-methyl modified nucleotide
  modified_base (2)..(2): 5-methyl modified nucleotide
  modified_base (5)..(5): 5-methyl modified nucleotide
  modified_base (8)..(8): 5-methyl modified nucleotide
  source: /note="3' tri-ethylene glycol (TEG)"
ccaacaucaaggaaga

SEQ ID NO: 2701 - RNA, 15 nt, Artificial Sequence
  source: /note="Description of Artificial Sequence: Synthetic oligonucleotide"
  source: /note="RNA"
  modified_base (1)..(1): 5-methyl modified nucleotide
  modified_base (2)..(2): 5-methyl modified nucleotide
  modified_base (5)..(5): 5-methyl modified nucleotide
  modified_base (8)..(8): 5-methyl modified nucleotide
  source: /note="3' tri-ethylene glycol (TEG)"
ccaacaucaaggaag

SEQ ID NO: 2702 - RNA, 27 nt, Artificial Sequence
  source: /note="Description of Artificial Sequence: Synthetic oligonucleotide"
  source: /note="RNA"
  modified_base (1)..(1): 5-methyl modified nucleotide
  modified_base (4)..(4): 5-methyl modified nucleotide
  modified_base (7)..(7): 5-methyl modified nucleotide
  modified_base (19)..(19): 5-methyl modified nucleotide
  modified_base (24)..(24): 5-methyl modified nucleotide
  source: /note="3' tri-ethylene glycol (TEG)"
caacaucaaggaagauggcauuucuag

SEQ ID NO: 2703 - RNA, 26 nt, Artificial Sequence
  source: /note="Description of Artificial Sequence: Synthetic oligonucleotide"
  source: /note="RNA"
  modified_base (1)..(1): 5-methyl modified nucleotide
  modified_base (4)..(4): 5-methyl modified nucleotide
  modified_base (7)..(7): 5-methyl modified nucleotide
  modified_base (19)..(19): 5-methyl modified nucleotide
  modified_base (24)..(24): 5-methyl modified nucleotide
  source: /note="3' tri-ethylene glycol (TEG)"
caacaucaaggaagauggcauuucua

SEQ ID NO: 2704 - RNA, 25 nt, Artificial Sequence
  source: /note="Description of Artificial Sequence: Synthetic oligonucleotide"
  source: /note="RNA"
  modified_base (1)..(1): 5-methyl modified nucleotide
  modified_base (4)..(4): 5-methyl modified nucleotide
  modified_base (7)..(7): 5-methyl modified nucleotide
  modified_base (19)..(19): 5-methyl modified nucleotide
  modified_base (24)..(24): 5-methyl modified nucleotide
  source: /note="3' tri-ethylene glycol (TEG)"
caacaucaaggaagauggcauuucu

SEQ ID NO: 2705 - RNA, 24 nt, Artificial Sequence
  source: /note="Description of Artificial Sequence: Synthetic oligonucleotide"
  source: /note="RNA"
  modified_base (1)..(1): 5-methyl modified nucleotide
  modified_base (4)..(4): 5-methyl modified nucleotide
  modified_base (7)..(7): 5-methyl modified nucleotide
  modified_base (19)..(19): 5-methyl modified nucleotide
  modified_base (24)..(24): 5-methyl modified nucleotide
  source: /note="3' tri-ethylene glycol (TEG)"
caacaucaaggaagauggcauuuc

SEQ ID NO: 2706 - RNA, 23 nt, Artificial Sequence
  source: /note="Description of Artificial Sequence: Synthetic oligonucleotide"
  source: /note="RNA"
  modified_base (1)..(1): 5-methyl modified nucleotide
  modified_base (4)..(4): 5-methyl modified nucleotide
  modified_base (7)..(7): 5-methyl modified nucleotide
  modified_base (19)..(19): 5-methyl modified nucleotide
  source: /note="3' tri-ethylene glycol (TEG)"
caacaucaaggaagauggcauuu

SEQ ID NO: 2707 - RNA, 22 nt, Artificial Sequence
  source: /note="Description of Artificial Sequence: Synthetic oligonucleotide"
  source: /note="RNA"
  modified_base (1)..(1): 5-methyl modified nucleotide
  modified_base (4)..(4): 5-methyl modified nucleotide
  modified_base (7)..(7): 5-methyl modified nucleotide
  modified_base (19)..(19): 5-methyl modified nucleotide
  source: /note="3' tri-ethylene glycol (TEG)"
caacaucaaggaagauggcauu

SEQ ID NO: 2708 - RNA, 21 nt, Artificial Sequence
  source: /note="Description of Artificial Sequence: Synthetic oligonucleotide"
  source: /note="RNA"
  modified_base (1)..(1): 5-methyl modified nucleotide
  modified_base (4)..(4): 5-methyl modified nucleotide
  modified_base (7)..(7): 5-methyl modified nucleotide
  modified_base (19)..(19): 5-methyl modified nucleotide
  source: /note="3' tri-ethylene glycol (TEG)"
caacaucaaggaagauggcau

SEQ ID NO: 2709 - RNA, 20 nt, Artificial Sequence
  source: /note="Description of Artificial Sequence: Synthetic oligonucleotide"
  source: /note="RNA"
  modified_base (1)..(1): 5-methyl modified nucleotide
  modified_base (4)..(4): 5-methyl modified nucleotide
  modified_base (7)..(7): 5-methyl modified nucleotide
  modified_base (19)..(19): 5-methyl modified nucleotide
  source: /note="3' tri-ethylene glycol (TEG)"
caacaucaaggaagauggca

SEQ ID NO: 2710 - RNA, 19 nt, Artificial Sequence
  source: /note="Description of Artificial Sequence: Synthetic oligonucleotide"
  source: /note="RNA"
  modified_base (1)..(1): 5-methyl modified nucleotide
  modified_base (4)..(4): 5-methyl modified nucleotide
  modified_base (7)..(7): 5-methyl modified nucleotide
  modified_base (19)..(19): 5-methyl modified nucleotide
  source: /note="3' tri-ethylene glycol (TEG)"
caacaucaaggaagauggc

SEQ ID NO: 2711 - RNA, 18 nt, Artificial Sequence
  source: /note="Description of Artificial Sequence: Synthetic oligonucleotide"
  source: /note="RNA"
  modified_base (1)..(1): 5-methyl modified nucleotide
  modified_base (4)..(4): 5-methyl modified nucleotide
  modified_base (7)..(7): 5-methyl modified nucleotide
  source: /note="3' tri-ethylene glycol (TEG)"
caacaucaaggaagaugg

SEQ ID NO: 2712 - RNA, 17 nt, Artificial Sequence
  source: /note="Description of Artificial Sequence: Synthetic oligonucleotide"
  source: /note="RNA"
  modified_base (1)..(1): 5-methyl modified nucleotide
  modified_base (4)..(4): 5-methyl modified nucleotide
  modified_base (7)..(7): 5-methyl modified nucleotide
  source: /note="3' tri-ethylene glycol (TEG)"
caacaucaaggaagaug

SEQ ID NO: 2713 - RNA, 16 nt, Artificial Sequence
  source: /note="Description of Artificial Sequence: Synthetic oligonucleotide"
  source: /note="RNA"
  modified_base (1)..(1): 5-methyl modified nucleotide
  modified_base (4)..(4): 5-methyl modified nucleotide
  modified_base (7)..(7): 5-methyl modified nucleotide
  source: /note="3' tri-ethylene glycol (TEG)"
caacaucaaggaagau

SEQ ID NO: 2714 - RNA, 15 nt, Artificial Sequence
  source: /note="Description of Artificial Sequence: Synthetic oligonucleotide"
  source: /note="RNA"
  modified_base (1)..(1): 5-methyl modified nucleotide
  modified_base (4)..(4): 5-methyl modified nucleotide
  modified_base (7)..(7): 5-methyl modified nucleotide
  source: /note="3' tri-ethylene glycol (TEG)"
caacaucaaggaaga

SEQ ID NO: 2715 - RNA, 14 nt, Artificial Sequence
  source: /note="Description of Artificial Sequence: Synthetic oligonucleotide"
  source: /note="RNA"
  modified_base (1)..(1): 5-methyl modified nucleotide
  modified_base (4)..(4): 5-methyl modified nucleotide
  modified_base (7)..(7): 5-methyl modified nucleotide
  source: /note="3' tri-ethylene glycol (TEG)"
caacaucaaggaag

SEQ ID NO: 2716 - RNA, 26 nt, Artificial Sequence
  source: /note="Description of Artificial Sequence: Synthetic oligonucleotide"
  source: /note="RNA"
  modified_base (3)..(3): 5-methyl modified nucleotide
  modified_base (6)..(6): 5-methyl modified nucleotide
  modified_base (18)..(18): 5-methyl modified nucleotide
  modified_base (23)..(23): 5-methyl modified nucleotide
  source: /note="3' tri-ethylene glycol (TEG)"
aacaucaaggaagauggcauuucuag

SEQ ID NO: 2717 - RNA, 25 nt, Artificial Sequence
  source: /note="Description of Artificial Sequence: Synthetic oligonucleotide"
  source: /note="RNA"
  modified_base (3)..(3): 5-methyl modified nucleotide
  modified_base (6)..(6): 5-methyl modified nucleotide
  modified_base (18)..(18): 5-methyl modified nucleotide
  modified_base (23)..(23): 5-methyl modified nucleotide
  source: /note="3' tri-ethylene glycol (TEG)"
aacaucaaggaagauggcauuucua

SEQ ID NO: 2718 - RNA, 24 nt, Artificial Sequence
  source: /note="Description of Artificial Sequence: Synthetic oligonucleotide"
  source: /note="RNA"
  modified_base (3)..(3): 5-methyl modified nucleotide
  modified_base (6)..(6): 5-methyl modified nucleotide
  modified_base (18)..(18): 5-methyl modified nucleotide
  modified_base (23)..(23): 5-methyl modified nucleotide
  source: /note="3' tri-ethylene glycol (TEG)"
aacaucaaggaagauggcauuucu

SEQ ID NO: 2719 - RNA, 23 nt, Artificial Sequence
  source: /note="Description of Artificial Sequence: Synthetic oligonucleotide"
  source: /note="RNA"
  modified_base (3)..(3): 5-methyl modified nucleotide
  modified_base (6)..(6): 5-methyl modified nucleotide
  modified_base (18)..(18): 5-methyl modified nucleotide
  modified_base (23)..(23): 5-methyl modified nucleotide
  source: /note="3' tri-ethylene glycol (TEG)"
aacaucaaggaagauggcauuuc

SEQ ID NO: 2720 - RNA, 22 nt, Artificial Sequence
  source: /note="Description of Artificial Sequence: Synthetic oligonucleotide"
  source: /note="RNA"
  modified_base (3)..(3): 5-methyl modified nucleotide
  modified_base (6)..(6): 5-methyl modified nucleotide
  modified_base (18)..(18): 5-methyl modified nucleotide
  source: /note="3' tri-ethylene glycol (TEG)"
aacaucaaggaagauggcauuu

SEQ ID NO: 2721 - RNA, 21 nt, Artificial Sequence
  source: /note="Description of Artificial Sequence: Synthetic oligonucleotide"
  source: /note="RNA"
  modified_base (3)..(3): 5-methyl modified nucleotide
  modified_base (6)..(6): 5-methyl modified nucleotide
  modified_base (18)..(18): 5-methyl modified nucleotide
  source: /note="3' tri-ethylene glycol (TEG)"
aacaucaaggaagauggcauu

SEQ ID NO: 2722 - RNA, 20 nt, Artificial Sequence
  source: /note="Description of Artificial Sequence: Synthetic oligonucleotide"
  source: /note="RNA"
  modified_base (3)..(3): 5-methyl modified nucleotide
  modified_base (6)..(6): 5-methyl modified nucleotide
  modified_base (18)..(18): 5-methyl modified nucleotide
  source: /note="3' tri-ethylene glycol (TEG)"
aacaucaaggaagauggcau

SEQ ID NO: 2723 - RNA, 19 nt, Artificial Sequence
  source: /note="Description of Artificial Sequence: Synthetic oligonucleotide"
  source: /note="RNA"
  modified_base (3)..(3): 5-methyl modified nucleotide
  modified_base (6)..(6): 5-methyl modified nucleotide
  modified_base (18)..(18): 5-methyl modified nucleotide
  source: /note="3' tri-ethylene glycol (TEG)"
aacaucaaggaagauggca

SEQ ID NO: 2724 - RNA, 18 nt, Artificial Sequence
  source: /note="Description of Artificial Sequence: Synthetic oligonucleotide"
  source: /note="RNA"
  modified_base (3)..(3): 5-methyl modified nucleotide
  modified_base (6)..(6): 5-methyl modified nucleotide
  modified_base (18)..(18): 5-methyl modified nucleotide
  source: /note="3' tri-ethylene glycol (TEG)"
aacaucaaggaagauggc

SEQ ID NO: 2725 - RNA, 17 nt, Artificial Sequence
  source: /note="Description of Artificial Sequence: Synthetic oligonucleotide"
  source: /note="RNA"
  modified_base (3)..(3): 5-methyl modified nucleotide
  modified_base (6)..(6): 5-methyl modified nucleotide
  source: /note="3' tri-ethylene glycol (TEG)"
aacaucaaggaagaugg

SEQ ID NO: 2726 - RNA, 16 nt, Artificial Sequence
  source: /note="Description of Artificial Sequence: Synthetic oligonucleotide"
  source: /note="RNA"
  modified_base (3)..(3): 5-methyl modified nucleotide
  modified_base (6)..(6): 5-methyl modified nucleotide
  source: /note="3' tri-ethylene glycol (TEG)"
aacaucaaggaagaug

SEQ ID NO: 2727 - RNA, 15 nt, Artificial Sequence
  source: /note="Description of Artificial Sequence: Synthetic oligonucleotide"
  source: /note="RNA"
  modified_base (3)..(3): 5-methyl modified nucleotide
  modified_base (6)..(6): 5-methyl modified nucleotide
  source: /note="3' tri-ethylene glycol (TEG)"
aacaucaaggaagau

SEQ ID NO: 2728 - RNA, 14 nt, Artificial Sequence
  source: /note="Description of Artificial Sequence: Synthetic oligonucleotide"
  source: /note="RNA"
  modified_base (3)..(3): 5-methyl modified nucleotide
  modified_base (6)..(6): 5-methyl modified nucleotide
  source: /note="3' tri-ethylene glycol (TEG)"
aacaucaaggaaga

SEQ ID NO: 2729 - RNA, 13 nt, Artificial Sequence
  source: /note="Description of Artificial Sequence: Synthetic oligonucleotide"
  source: /note="RNA"
  modified_base (3)..(3): 5-methyl modified nucleotide
  modified_base (6)..(6): 5-methyl modified nucleotide
  source: /note="3' tri-ethylene glycol (TEG)"
aacaucaaggaag

SEQ ID NO: 2730 - RNA, 25 nt, Artificial Sequence
  source: /note="Description of Artificial Sequence: Synthetic oligonucleotide"
  source: /note="RNA"
  modified_base (2)..(2): 5-methyl modified nucleotide
  modified_base (5)..(5): 5-methyl modified nucleotide
  modified_base (17)..(17): 5-methyl modified nucleotide
  modified_base (22)..(22): 5-methyl modified nucleotide
  source: /note="3' tri-ethylene glycol (TEG)"
acaucaaggaagauggcauuucuag

SEQ ID NO: 2731 - RNA, 24 nt, Artificial Sequence
  source: /note="Description of Artificial Sequence: Synthetic oligonucleotide"
  source: /note="RNA"
  modified_base (2)..(2): 5-methyl modified nucleotide
  modified_base (5)..(5): 5-methyl modified nucleotide
  modified_base (17)..(17): 5-methyl modified nucleotide
  modified_base (22)..(22): 5-methyl modified nucleotide
  source: /note="3' tri-ethylene glycol (TEG)"
acaucaaggaagauggcauuucua

SEQ ID NO: 2732 - RNA, 23 nt, Artificial Sequence
  source: /note="Description of Artificial Sequence: Synthetic oligonucleotide"
  source: /note="RNA"
  modified_base (2)..(2): 5-methyl modified nucleotide
  modified_base (5)..(5): 5-methyl modified nucleotide
  modified_base (17)..(17): 5-methyl modified nucleotide
  modified_base (22)..(22): 5-methyl modified nucleotide
  source: /note="3' tri-ethylene glycol (TEG)"
acaucaaggaagauggcauuucu

SEQ ID NO: 2733 - RNA, 22 nt, Artificial Sequence
  source: /note="Description of Artificial Sequence: Synthetic oligonucleotide"
  source: /note="RNA"
  modified_base (2)..(2): 5-methyl modified nucleotide
  modified_base (5)..(5): 5-methyl modified nucleotide
  modified_base (17)..(17): 5-methyl modified nucleotide
  modified_base (22)..(22): 5-methyl modified nucleotide
  source: /note="3' tri-ethylene glycol (TEG)"
acaucaaggaagauggcauuuc

SEQ ID NO: 2734 - RNA, 21 nt, Artificial Sequence
  source: /note="Description of Artificial Sequence: Synthetic oligonucleotide"
  source: /note="RNA"
  modified_base (2)..(2): 5-methyl modified nucleotide
  modified_base (5)..(5): 5-methyl modified nucleotide
  modified_base (17)..(17): 5-methyl modified nucleotide
  source: /note="3' tri-ethylene glycol (TEG)"
acaucaaggaagauggcauuu

SEQ ID NO: 2735 - RNA, 20 nt, Artificial Sequence
  source: /note="Description of Artificial Sequence: Synthetic oligonucleotide"
  source: /note="RNA"
  modified_base (2)..(2): 5-methyl modified nucleotide
  modified_base (5)..(5): 5-methyl modified nucleotide
  modified_base (17)..(17): 5-methyl modified nucleotide
  source: /note="3' tri-ethylene glycol (TEG)"
acaucaaggaagauggcauu

SEQ ID NO: 2736 - RNA, 19 nt, Artificial Sequence
  source: /note="Description of Artificial Sequence: Synthetic oligonucleotide"
  source: /note="RNA"
  modified_base (2)..(2): 5-methyl modified nucleotide
  modified_base (5)..(5): 5-methyl modified nucleotide
  modified_base (17)..(17): 5-methyl modified nucleotide
  source: /note="3' tri-ethylene glycol (TEG)"
acaucaaggaagauggcau

SEQ ID NO: 2737 - RNA, 18 nt, Artificial Sequence
  source: /note="Description of Artificial Sequence: Synthetic oligonucleotide"
  source: /note="RNA"
  modified_base (2)..(2): 5-methyl modified nucleotide
  modified_base (5)..(5): 5-methyl modified nucleotide
  modified_base (17)..(17): 5-methyl modified nucleotide
  source: /note="3' tri-ethylene glycol (TEG)"
acaucaaggaagauggca

SEQ ID NO: 2738 - RNA, 17 nt, Artificial Sequence
  source: /note="Description of Artificial Sequence: Synthetic oligonucleotide"
  source: /note="RNA"
  modified_base (2)..(2): 5-methyl modified nucleotide
  modified_base (5)..(5): 5-methyl modified nucleotide
  modified_base (17)..(17): 5-methyl modified nucleotide
  source: /note="3' tri-ethylene glycol (TEG)"
acaucaaggaagauggc

SEQ ID NO: 2739 - RNA, 16 nt, Artificial Sequence
  source: /note="Description of Artificial Sequence: Synthetic oligonucleotide"
  source: /note="RNA"
  modified_base (2)..(2): 5-methyl modified nucleotide
  modified_base (5)..(5): 5-methyl modified nucleotide
  source: /note="3' tri-ethylene glycol (TEG)"
acaucaaggaagaugg

SEQ ID NO: 2740 - RNA, 15 nt, Artificial Sequence
  source: /note="Description of Artificial Sequence: Synthetic oligonucleotide"
  source: /note="RNA"
  modified_base (2)..(2): 5-methyl modified nucleotide
  modified_base (5)..(5): 5-methyl modified nucleotide
  source: /note="3' tri-ethylene glycol (TEG)"
acaucaaggaagaug

SEQ ID NO: 2741 - RNA, 14 nt, Artificial Sequence
  source: /note="Description of Artificial Sequence: Synthetic oligonucleotide"
  source: /note="RNA"
  modified_base (2)..(2): 5-methyl modified nucleotide
  modified_base (5)..(5): 5-methyl modified nucleotide
  source: /note="3' tri-ethylene glycol (TEG)"
acaucaaggaagau

SEQ ID NO: 2742 - RNA, 13 nt, Artificial Sequence
  source: /note="Description of Artificial Sequence: Synthetic oligonucleotide"
  source: /note="RNA"
  modified_base (2)..(2): 5-methyl modified nucleotide
  modified_base (5)..(5): 5-methyl modified nucleotide
  source: /note="3' tri-ethylene glycol (TEG)"
acaucaaggaaga

SEQ ID NO: 2743 - RNA, 12 nt, Artificial Sequence
  source: /note="Description of Artificial Sequence: Synthetic oligonucleotide"
  source: /note="RNA"
  modified_base (2)..(2): 5-methyl modified nucleotide
  modified_base (5)..(5): 5-methyl modified nucleotide
  source: /note="3' tri-ethylene glycol (TEG)"
acaucaaggaag

SEQ ID NO: 2744 - RNA, 24 nt, Artificial Sequence
  source: /note="Description of Artificial Sequence: Synthetic oligonucleotide"
  source: /note="RNA"
  modified_base (1)..(1): 5-methyl modified nucleotide
  modified_base (4)..(4): 5-methyl modified nucleotide
  modified_base (16)..(16): 5-methyl modified nucleotide
  modified_base (21)..(21): 5-methyl modified nucleotide
  source: /note="3' tri-ethylene glycol (TEG)"
caucaaggaagauggcauuucuag

SEQ ID NO: 2745 - RNA, 23 nt, Artificial Sequence
  source: /note="Description of Artificial Sequence: Synthetic oligonucleotide"
  source: /note="RNA"
  modified_base (1)..(1): 5-methyl modified nucleotide
  modified_base (4)..(4): 5-methyl modified nucleotide
  modified_base (16)..(16): 5-methyl modified nucleotide
  modified_base (21)..(21): 5-methyl modified nucleotide
  source: /note="3' tri-ethylene glycol (TEG)"
caucaaggaagauggcauuucua

SEQ ID NO: 2746 - RNA, 22 nt, Artificial Sequence
  source: /note="Description of Artificial Sequence: Synthetic oligonucleotide"
  source: /note="RNA"
  modified_base (1)..(1): 5-methyl modified nucleotide
  modified_base (4)..(4): 5-methyl modified nucleotide
  modified_base (16)..(16): 5-methyl modified nucleotide
  modified_base (21)..(21): 5-methyl modified nucleotide
  source: /note="3' tri-ethylene glycol (TEG)"
caucaaggaagauggcauuucu

SEQ ID NO: 2747 - RNA, 21 nt, Artificial Sequence
  source: /note="Description of Artificial Sequence: Synthetic oligonucleotide"
  source: /note="RNA"
  modified_base (1)..(1): 5-methyl modified nucleotide
  modified_base (4)..(4): 5-methyl modified nucleotide
  modified_base (16)..(16): 5-methyl modified nucleotide
  modified_base (21)..(21): 5-methyl modified nucleotide
  source: /note="3' tri-ethylene glycol (TEG)"
caucaaggaagauggcauuuc

SEQ ID NO: 2748 - RNA, 20 nt, Artificial Sequence
  source: /note="Description of Artificial Sequence: Synthetic oligonucleotide"
  source: /note="RNA"
  modified_base (1)..(1): 5-methyl modified nucleotide
  modified_base (4)..(4): 5-methyl modified nucleotide
  modified_base (16)..(16): 5-methyl modified nucleotide
  source: /note="3' tri-ethylene glycol (TEG)"
caucaaggaagauggcauuu

SEQ ID NO: 2749 - RNA, 19 nt, Artificial Sequence
  source: /note="Description of Artificial Sequence: Synthetic oligonucleotide"
  source: /note="RNA"
  modified_base (1)..(1): 5-methyl modified nucleotide
  modified_base (4)..(4): 5-methyl modified nucleotide
  modified_base (16)..(16): 5-methyl modified nucleotide
  source: /note="3' tri-ethylene glycol (TEG)"
caucaaggaagauggcauu

SEQ ID NO: 2750 - RNA, 18 nt, Artificial Sequence
  source: /note="Description of Artificial Sequence: Synthetic oligonucleotide"
  source: /note="RNA"
  modified_base (1)..(1): 5-methyl modified nucleotide
  modified_base (4)..(4): 5-methyl modified nucleotide
  modified_base (16)..(16): 5-methyl modified nucleotide
  source: /note="3' tri-ethylene glycol (TEG)"
caucaaggaagauggcau

SEQ ID NO: 2751 - RNA, 17 nt, Artificial Sequence
  source: /note="Description of Artificial Sequence: Synthetic oligonucleotide"
  source: /note="RNA"
  modified_base (1)..(1): 5-methyl modified nucleotide
  modified_base (4)..(4): 5-methyl modified nucleotide
  modified_base (16)..(16): 5-methyl modified nucleotide
  source: /note="3' tri-ethylene glycol (TEG)"
caucaaggaagauggca

SEQ ID NO: 2752 - RNA, 16 nt, Artificial Sequence
  source: /note="Description of Artificial Sequence: Synthetic oligonucleotide"
  source: /note="RNA"
  modified_base (1)..(1): 5-methyl modified nucleotide
  modified_base (4)..(4): 5-methyl modified nucleotide
  modified_base (16)..(16): 5-methyl modified nucleotide
  source: /note="3' tri-ethylene glycol (TEG)"
caucaaggaagauggc

SEQ ID NO: 2753 - RNA, 15 nt, Artificial Sequence
  source: /note="Description of Artificial Sequence: Synthetic oligonucleotide"
  source: /note="RNA"
  modified_base (1)..(1): 5-methyl modified nucleotide
  modified_base (4)..(4): 5-methyl modified nucleotide
  source: /note="3' tri-ethylene glycol (TEG)"
caucaaggaagaugg

SEQ ID NO: 2754 - RNA, 14 nt, Artificial Sequence
  source: /note="Description of Artificial Sequence: Synthetic oligonucleotide"
  source: /note="RNA"
  modified_base (1)..(1): 5-methyl modified nucleotide
  modified_base (4)..(4): 5-methyl modified nucleotide
  source: /note="3' tri-ethylene glycol (TEG)"
caucaaggaagaug

SEQ ID NO: 2755 - RNA, 13 nt, Artificial Sequence
  source: /note="Description of Artificial Sequence: Synthetic oligonucleotide"
  source: /note="RNA"
  modified_base (1)..(1): 5-methyl modified nucleotide
  modified_base (4)..(4): 5-methyl modified nucleotide
  source: /note="3' tri-ethylene glycol (TEG)"
caucaaggaagau

SEQ ID NO: 2756 - RNA, 12 nt, Artificial Sequence
  source: /note="Description of Artificial Sequence: Synthetic oligonucleotide"
  source: /note="RNA"
  modified_base (1)..(1): 5-methyl modified nucleotide
  modified_base (4)..(4): 5-methyl modified nucleotide
  source: /note="3' tri-ethylene glycol (TEG)"
caucaaggaaga

SEQ ID NO: 2757 - RNA, 11 nt, Artificial Sequence
  source: /note="Description of Artificial Sequence: Synthetic oligonucleotide"
  source: /note="RNA"
  modified_base (1)..(1): 5-methyl modified nucleotide
  modified_base (4)..(4): 5-methyl modified nucleotide
  source: /note="3' tri-ethylene glycol (TEG)"
caucaaggaag

SEQ ID NO: 2758 - RNA, 23 nt, Artificial Sequence
  source: /note="Description of Artificial Sequence: Synthetic oligonucleotide"
  source: /note="RNA"
  modified_base (3)..(3): 5-methyl modified nucleotide
  modified_base (15)..(15): 5-methyl modified nucleotide
  modified_base (20)..(20): 5-methyl modified nucleotide
  source: /note="3' tri-ethylene glycol (TEG)"
aucaaggaagauggcauuucuag

SEQ ID NO: 2759 - RNA, 22 nt, Artificial Sequence
  source: /note="Description of Artificial Sequence: Synthetic oligonucleotide"
  source: /note="RNA"
  modified_base (3)..(3): 5-methyl modified nucleotide
  modified_base (15)..(15): 5-methyl modified nucleotide
  modified_base (20)..(20): 5-methyl modified nucleotide
  source: /note="3' tri-ethylene glycol (TEG)"
aucaaggaagauggcauuucua

SEQ ID NO: 2760 - RNA, 21 nt, Artificial Sequence
  source: /note="Description of Artificial Sequence: Synthetic oligonucleotide"
  source: /note="RNA"
  modified_base (3)..(3): 5-methyl modified nucleotide
  modified_base (15)..(15): 5-methyl modified nucleotide
  modified_base (20)..(20): 5-methyl modified nucleotide
  source: /note="3' tri-ethylene glycol (TEG)"
aucaaggaagauggcauuucu

SEQ ID NO: 2761 - RNA, 20 nt, Artificial Sequence
  source: /note="Description of Artificial Sequence: Synthetic oligonucleotide"
  source: /note="RNA"
  modified_base (3)..(3): 5-methyl modified nucleotide
  modified_base (15)..(15): 5-methyl modified nucleotide
  modified_base (20)..(20): 5-methyl modified nucleotide
  source: /note="3' tri-ethylene glycol (TEG)"
aucaaggaagauggcauuuc

SEQ ID NO: 2762 - RNA, 19 nt, Artificial Sequence
  source: /note="Description of Artificial Sequence: Synthetic oligonucleotide"
  source: /note="RNA"
  modified_base (3)..(3): 5-methyl modified nucleotide
  modified_base (15)..(15): 5-methyl modified nucleotide
  source: /note="3' tri-ethylene glycol (TEG)"
aucaaggaagauggcauuu

SEQ ID NO: 2763 - RNA, 18 nt, Artificial Sequence
  source: /note="Description of Artificial Sequence: Synthetic oligonucleotide"
  source: /note="RNA"
  modified_base (3)..(3): 5-methyl modified nucleotide
  modified_base (15)..(15): 5-methyl modified nucleotide
  source: /note="3' tri-ethylene glycol (TEG)"
aucaaggaagauggcauu

SEQ ID NO: 2764 - RNA, 17 nt, Artificial Sequence
  source: /note="Description of Artificial Sequence: Synthetic oligonucleotide"
  source: /note="RNA"
  modified_base (3)..(3): 5-methyl modified nucleotide
  modified_base (15)..(15): 5-methyl modified nucleotide
  source: /note="3' tri-ethylene glycol (TEG)"
aucaaggaagauggcau

SEQ ID NO: 2765 - RNA, 16 nt, Artificial Sequence
  source: /note="Description of Artificial Sequence: Synthetic oligonucleotide"
  source: /note="RNA"
  modified_base (3)..(3): 5-methyl modified nucleotide
  modified_base (15)..(15): 5-methyl modified nucleotide
  source: /note="3' tri-ethylene glycol (TEG)"
aucaaggaagauggca

SEQ ID NO: 2766 - RNA, 15 nt, Artificial Sequence
  source: /note="Description of Artificial Sequence: Synthetic oligonucleotide"
  source: /note="RNA"
  modified_base (3)..(3): 5-methyl modified nucleotide
  modified_base (15)..(15): 5-methyl modified nucleotide
  source: /note="3' tri-ethylene glycol (TEG)"
aucaaggaagauggc

SEQ ID NO: 2767 - RNA, 14 nt, Artificial Sequence
  source: /note="Description of Artificial Sequence: Synthetic oligonucleotide"
  source: /note="RNA"
  modified_base (3)..(3): 5-methyl modified nucleotide
  source: /note="3' tri-ethylene glycol (TEG)"
aucaaggaagaugg

SEQ ID NO: 2768 - RNA, 13 nt, Artificial Sequence
  source: /note="Description of Artificial Sequence: Synthetic oligonucleotide"
  source: /note="RNA"
  modified_base (3)..(3): 5-methyl modified nucleotide
  source: /note="3' tri-ethylene glycol (TEG)"
aucaaggaagaug

SEQ ID NO: 2769 - RNA, 12 nt, Artificial Sequence
  source: /note="Description of Artificial Sequence: Synthetic oligonucleotide"
  source: /note="RNA"
  modified_base (3)..(3): 5-methyl modified nucleotide
  source: /note="3' tri-ethylene glycol (TEG)"
aucaaggaagau

SEQ ID NO: 2770 - RNA, 11 nt, Artificial Sequence
  source: /note="Description of Artificial Sequence: Synthetic oligonucleotide"
  source: /note="RNA"
  modified_base (3)..(3): 5-methyl modified nucleotide
  source: /note="3' tri-ethylene glycol (TEG)"
aucaaggaaga

SEQ ID NO: 2771 - RNA, 10 nt, Artificial Sequence
  source: /note="Description of Artificial Sequence: Synthetic oligonucleotide"
  source: /note="RNA"
  modified_base (3)..(3): 5-methyl modified nucleotide
  source: /note="3' tri-ethylene glycol (TEG)"
aucaaggaag

SEQ ID NO: 2772 - RNA, 23 nt, Artificial Sequence
  source: /note="Description of Artificial Sequence: Synthetic oligonucleotide"
  source: /note="RNA"
  modified_base (1)..(1): 5-methyl modified nucleotide
  modified_base (2)..(2): 5-methyl modified nucleotide
  modified_base (7)..(7): 5-methyl modified nucleotide
  modified_base (13)..(13): 5-methyl modified nucleotide
  modified_base (14)..(14): 5-methyl modified nucleotide
  modified_base (16)..(16): 5-methyl modified nucleotide
  modified_base (17)..(17): 5-methyl modified nucleotide
  modified_base (20)..(20): 5-methyl modified nucleotide
  modified_base (23)..(23): 5-methyl modified nucleotide
  source: /note="3' tri-ethylene glycol (TEG)"
ccagagcagguaccuccaacauc

SEQ ID NO: 2773 - RNA, 18 nt, Artificial Sequence
  source: /note="Description of Artificial Sequence: Synthetic oligonucleotide"
  source: /note="RNA"
  modified_base (1)..(1): 5-methyl modified nucleotide
  modified_base (2)..(2): 5-methyl modified nucleotide
  modified_base (7)..(7): 5-methyl modified nucleotide
  modified_base (13)..(13): 5-methyl modified nucleotide
  modified_base (14)..(14): 5-methyl modified nucleotide
  modified_base (16)..(16): 5-methyl modified nucleotide
  modified_base (17)..(17): 5-methyl modified nucleotide
  source: /note="3' tri-ethylene glycol (TEG)"
ccagagcagguaccucca

SEQ ID NO: 2774 - RNA, 23 nt, Artificial Sequence
  source: /note="Description of Artificial Sequence: Synthetic oligonucleotide"
  source: /note="RNA"
  modified_base (1)..(1): 5-methyl modified nucleotide
  modified_base (2)..(2): 5-methyl modified nucleotide
  modified_base (4)..(4): 5-methyl modified nucleotide
  modified_base (18)..(18): 5-methyl modified nucleotide
  source: /note="3' tri-ethylene glycol (TEG)"
ccucugugauuuuauaacuugau

SEQ ID NO: 2775 - RNA, 17 nt, Artificial Sequence
  source: /note="Description of Artificial Sequence: Synthetic oligonucleotide"
  source: /note="RNA"
  modified_base (2)..(2): 5-methyl modified nucleotide
  modified_base (4)..(4): 5-methyl modified nucleotide
  modified_base (5)..(5): 5-methyl modified nucleotide
  modified_base (6)..(6): 5-methyl modified nucleotide
  modified_base (8)..(8): 5-methyl modified nucleotide
  modified_base (9)..(9): 5-methyl modified nucleotide
  modified_base (12)..(12): 5-methyl modified nucleotide
  modified_base (14)..(14): 5-methyl modified nucleotide
  modified_base (15)..(15): 5-methyl modified nucleotide
  modified_base (16)..(16): 5-methyl modified nucleotide
  source: /note="3' tri-ethylene glycol (TEG)"
ucacccaccaucacccu

SEQ ID NO: 2776 - RNA, 20 nt, Artificial Sequence
  source: /note="Description of Artificial Sequence: Synthetic oligonucleotide"
  source: /note="RNA"
  modified_base (7)..(7): 5-methyl modified nucleotide
  modified_base (8)..(8): 5-methyl modified nucleotide
  modified_base (10)..(10): 5-methyl modified nucleotide
  modified_base (16)..(16): 5-methyl modified nucleotide
  modified_base (18)..(18): 5-methyl modified nucleotide
  modified_base (19)..(19): 5-methyl modified nucleotide
  modified_base (20)..(20): 5-methyl modified nucleotide
  source: /note="3' tri-ethylene glycol (TEG)"
ugauauccucaaggucaccc

SEQ ID NO: 2777 - RNA, 22 nt, Artificial Sequence
  source: /note="Description of Artificial Sequence: Synthetic oligonucleotide"
  source: /note="RNA"
  modified_base (1)..(1): 5-methyl modified nucleotide
  modified_base (4)..(4): 5-methyl modified nucleotide
  modified_base (13)..(13): 5-methyl modified nucleotide
  modified_base (16)..(16): 5-methyl modified nucleotide
  modified_base (18)..(18): 5-methyl modified nucleotide
  source: /note="3' tri-ethylene glycol (TEG)"
cugcuugaugaucaucucguug

SEQ ID NO: 2778 - RNA, 18 nt, Artificial Sequence
  source: /note="Description of Artificial Sequence: Synthetic oligonucleotide"
  source: /note="RNA"
  modified_base (1)..(1): 5-methyl modified nucleotide
  modified_base (4)..(4): 5-methyl modified nucleotide
  modified_base (13)..(13): 5-methyl modified nucleotide
  modified_base (16)..(16): 5-methyl modified nucleotide
  modified_base (18)..(18): 5-methyl modified nucleotide
  source: /note="3' tri-ethylene glycol (TEG)"
cugcuugaugaucaucuc

SEQ ID NO: 2779 - RNA, 19 nt, Artificial Sequence
  source: /note="Description of Artificial Sequence: Synthetic oligonucleotide"
  source: /note="RNA"
  modified_base (5)..(5): 5-methyl modified nucleotide
  modified_base (6)..(6): 5-methyl modified nucleotide
  modified_base (14)..(14): 5-methyl modified nucleotide
  modified_base (15)..(15): 5-methyl modified nucleotide
  modified_base (17)..(17): 5-methyl modified nucleotide
  source: /note="3' tri-ethylene glycol (TEG)"
guuuccuuaguaaccacag

SEQ ID NO: 2780 - RNA, 17 nt, Artificial Sequence
  source: /note="Description of Artificial Sequence: Synthetic oligonucleotide"
  source: /note="RNA"
  modified_base (5)..(5): 5-methyl modified nucleotide
  modified_base (6)..(6): 5-methyl modified nucleotide
  modified_base (14)..(14): 5-methyl modified nucleotide
  modified_base (15)..(15): 5-methyl modified nucleotide
  modified_base (17)..(17): 5-methyl modified nucleotide
  source: /note="3' tri-ethylene glycol (TEG)"
guuuccuuaguaaccac

SEQ ID NO: 2781 - RNA, 20 nt, Artificial Sequence
  source: /note="Description of Artificial Sequence: Synthetic oligonucleotide"
  source: /note="RNA"
  source: /note="5' tri-ethylene glycol (TEG)"
  modified_base (2)..(2): 5-methyl modified nucleotide
  modified_base (14)..(14): 5-methyl modified nucleotide
  modified_base (19)..(19): 5-methyl modified nucleotide
  source: /note="3' tri-ethylene glycol (TEG)"
ucaaggaagauggcauuucu

SEQ ID NO: 2782 - RNA, 22 nt, Artificial Sequence
  source: /note="Description of Artificial Sequence: Synthetic oligonucleotide"
  source: /note="RNA"
  source: /note="5' tri-ethylene glycol (TEG)"
  modified_base (2)..(2): 5-methyl modified nucleotide
  modified_base (14)..(14): 5-methyl modified nucleotide
  modified_base (19)..(19): 5-methyl modified nucleotide
  source: /note="3' tri-ethylene glycol (TEG)"
ucaaggaagauggcauuucuag

SEQ ID NO: 2783 - RNA, 18 nt, Artificial Sequence
  source: /note="Description of Artificial Sequence: Synthetic oligonucleotide"
  source: /note="RNA"
  source: /note="5' tri-ethylene glycol (TEG)"
  modified_base (9)..(9): 5-methyl modified nucleotide
  modified_base (13)..(13): 5-methyl modified nucleotide
  modified_base (14)..(14): 5-methyl modified nucleotide
  modified_base (18)..(18): 5-methyl modified nucleotide
  source: /note="3' tri-ethylene glycol (TEG)"
gguaaguucuguccaagc

SEQ ID NO: 2784 - RNA, 18 nt, Artificial Sequence
  source: /note="Description of Artificial Sequence: Synthetic oligonucleotide"
  source: /note="RNA"
  source: /note="5' tri-ethylene glycol (TEG)"
  modified_base (8)..(8): 5-methyl modified nucleotide
  modified_base (12)..(12): 5-methyl modified nucleotide
  modified_base (13)..(13): 5-methyl modified nucleotide
  modified_base (17)..(17): 5-methyl modified nucleotide
  modified_base (18)..(18): 5-methyl modified nucleotide
  source: /note="3' tri-ethylene glycol (TEG)"
guaaguucuguccaagcc

SEQ ID NO: 2785 - RNA, 18 nt, Artificial Sequence
  source: /note="Description of Artificial Sequence: Synthetic oligonucleotide"
  source: /note="RNA"
  source: /note="5' tri-ethylene glycol (TEG)"
  modified_base (4)..(4): 5-methyl modified nucleotide
  modified_base (13)..(13): 5-methyl modified nucleotide
  modified_base (17)..(17): 5-methyl modified nucleotide
  modified_base (18)..(18): 5-methyl modified nucleotide
  source: /note="3' tri-ethylene glycol (TEG)"
agucgguaaguucugucc

SEQ ID NO: 2786 - RNA, 18 nt, Artificial Sequence
  source: /note="Description of Artificial Sequence: Synthetic oligonucleotide"
  source: /note="RNA"
  source: /note="5' tri-ethylene glycol (TEG)"
  modified_base (1)..(1): 5-methyl modified nucleotide
  modified_base (5)..(5): 5-methyl modified nucleotide
  modified_base (6)..(6): 5-methyl modified nucleotide
  modified_base (10)..(10): 5-methyl modified nucleotide
  modified_base (11)..(11): 5-methyl modified nucleotide
  modified_base (12)..(12): 5-methyl modified nucleotide
  source: /note="3' tri-ethylene glycol (TEG)"
cuguccaagcccgguuga

SEQ ID NO: 2787 - RNA, 15 nt, Artificial Sequence
  source: /note="Description of Artificial Sequence: Synthetic oligonucleotide"
  source: /note="RNA"
  source: /note="5' tri-ethylene glycol (TEG)"
  modified_base (7)..(7): 5-methyl modified nucleotide
  modified_base (11)..(11): 5-methyl modified nucleotide
  modified_base (12)..(12): 5-methyl modified nucleotide
  source: /note="3' tri-ethylene glycol (TEG)"
uaaguucuguccaag

SEQ ID NO: 2788 - RNA, 20 nt, Artificial Sequence
  source: /note="Description of Artificial Sequence: Synthetic oligonucleotide"
  source: /note="RNA"
  source: /note="5' tri-ethylene glycol (TEG)"
  modified_base (3)..(3): 5-methyl modified nucleotide
  modified_base (7)..(7): 5-methyl modified nucleotide
  modified_base (8)..(8): 5-methyl modified nucleotide
  modified_base (12)..(12): 5-methyl modified nucleotide
  modified_base (13)..(13): 5-methyl modified nucleotide
  modified_base (14)..(14): 5-methyl modified nucleotide
  source: /note="3' tri-ethylene glycol (TEG)"
uucuguccaagcccgguuga

SEQ ID NO: 2789 - RNA, 19 nt, Artificial Sequence
  source: /note="Description of Artificial Sequence: Synthetic oligonucleotide"
  source: /note="RNA"
  source: /note="5' tri-ethylene glycol (TEG)"
  modified_base (3)..(3): 5-methyl modified nucleotide
  modified_base (7)..(7): 5-methyl modified nucleotide
  modified_base (8)..(8): 5-methyl modified nucleotide
  modified_base (12)..(12): 5-methyl modified nucleotide
  modified_base (13)..(13): 5-methyl modified nucleotide
  modified_base (14)..(14): 5-methyl modified nucleotide
  source: /note="3' tri-ethylene glycol (TEG)"
uucuguccaagcccgguug

SEQ ID NO: 2790 - RNA, 18 nt, Artificial Sequence
  source: /note="Description of Artificial Sequence: Synthetic oligonucleotide"
  source: /note="RNA"
  source: /note="5' tri-ethylene glycol (TEG)"
  modified_base (3)..(3): 5-methyl modified nucleotide
  modified_base (7)..(7): 5-methyl modified nucleotide
  modified_base (8)..(8): 5-methyl modified nucleotide
  modified_base (12)..(12): 5-methyl modified nucleotide
  modified_base (13)..(13): 5-methyl modified nucleotide
  modified_base (14)..(14): 5-methyl modified nucleotide
  source: /note="3' tri-ethylene glycol (TEG)"
uucuguccaagcccgguu

SEQ ID NO: 2791 - RNA, 17 nt, Artificial Sequence
  source: /note="Description of Artificial Sequence: Synthetic oligonucleotide"
  source: /note="RNA"
  source: /note="5' tri-ethylene glycol (TEG)"
  modified_base (3)..(3): 5-methyl modified nucleotide
  modified_base (7)..(7): 5-methyl modified nucleotide
  modified_base (8)..(8): 5-methyl modified nucleotide
  modified_base (12)..(12): 5-methyl modified nucleotide
  modified_base (13)..(13): 5-methyl modified nucleotide
  modified_base (14)..(14): 5-methyl modified nucleotide
  source: /note="3' tri-ethylene glycol (TEG)"
uucuguccaagcccggu

SEQ ID NO: 2792 - RNA, 16 nt, Artificial Sequence
  source: /note="Description of Artificial Sequence: Synthetic oligonucleotide"
  source: /note="RNA"
  source: /note="5' tri-ethylene glycol (TEG)"
  modified_base (3)..(3): 5-methyl modified nucleotide
  modified_base (7)..(7): 5-methyl modified nucleotide
  modified_base (8)..(8): 5-methyl modified nucleotide
  modified_base (12)..(12): 5-methyl modified nucleotide
  modified_base (13)..(13): 5-methyl modified nucleotide
  modified_base (14)..(14): 5-methyl modified nucleotide
  source: /note="3' tri-ethylene glycol (TEG)"
uucuguccaagcccgg

SEQ ID NO: 2793 - RNA, 15 nt, Artificial Sequence
  source: /note="Description of Artificial Sequence: Synthetic oligonucleotide"
  source: /note="RNA"
  source: /note="5' tri-ethylene glycol (TEG)"
  modified_base (3)..(3): 5-methyl modified nucleotide
  modified_base (7)..(7): 5-methyl modified nucleotide
  modified_base (8)..(8): 5-methyl modified nucleotide
  modified_base (12)..(12): 5-methyl modified nucleotide
  modified_base (13)..(13): 5-methyl modified nucleotide
  modified_base (14)..(14): 5-methyl modified nucleotide
  source: /note="3' tri-ethylene glycol (TEG)"
uucuguccaagcccg

SEQ ID NO: 2794 - RNA, 14 nt, Artificial Sequence
  source: /note="Description of Artificial Sequence: Synthetic oligonucleotide"
  source: /note="RNA"
  source: /note="5' tri-ethylene glycol (TEG)"
  modified_base (3)..(3): 5-methyl modified nucleotide
  modified_base (7)..(7): 5-methyl modified nucleotide
  modified_base (8)..(8): 5-methyl modified nucleotide
  modified_base (12)..(12): 5-methyl modified nucleotide
  modified_base (13)..(13): 5-methyl modified nucleotide
  modified_base (14)..(14): 5-methyl modified nucleotide
  source: /note="3' tri-ethylene glycol (TEG)"
uucuguccaagccc

SEQ ID NO: 2795 - RNA, 13 nt, Artificial Sequence
  source: /note="Description of Artificial Sequence: Synthetic oligonucleotide"
  source: /note="RNA"
  source: /note="5' tri-ethylene glycol (TEG)"
  modified_base (3)..(3): 5-methyl modified nucleotide
  modified_base (7)..(7): 5-methyl modified nucleotide
  modified_base (8)..(8): 5-methyl modified nucleotide
  modified_base (12)..(12): 5-methyl modified nucleotide
  modified_base (13)..(13): 5-methyl modified nucleotide
  source: /note="3' tri-ethylene glycol (TEG)"
uucuguccaagcc

SEQ ID NO: 2796 - RNA, 12 nt, Artificial Sequence
  source: /note="Description of Artificial Sequence: Synthetic oligonucleotide"
  source: /note="RNA"
  source: /note="5' tri-ethylene glycol (TEG)"
  modified_base (3)..(3): 5-methyl modified nucleotide
  modified_base (7)..(7): 5-methyl modified nucleotide
  modified_base (8)..(8): 5-methyl modified nucleotide
  modified_base (12)..(12): 5-methyl modified nucleotide
  source: /note="3' tri-ethylene glycol (TEG)"
uucuguccaagc

SEQ ID NO: 2797 - RNA, 11 nt, Artificial Sequence
  source: /note="Description of Artificial Sequence: Synthetic oligonucleotide"
  source: /note="RNA"
  source: /note="5' tri-ethylene glycol (TEG)"
  modified_base (3)..(3): 5-methyl modified nucleotide
  modified_base (7)..(7): 5-methyl modified nucleotide
  modified_base (8)..(8): 5-methyl modified nucleotide
  source: /note="3' tri-ethylene glycol (TEG)"
uucuguccaag

SEQ ID NO: 2798 - RNA, 10 nt, Artificial Sequence
  source: /note="Description of Artificial Sequence: Synthetic oligonucleotide"
  source: /note="RNA"
  source: /note="5' tri-ethylene glycol (TEG)"
  modified_base (3)..(3): 5-methyl modified nucleotide
  modified_base (7)..(7): 5-methyl modified nucleotide
  modified_base (8)..(8): 5-methyl modified nucleotide
  source: /note="3' tri-ethylene glycol (TEG)"
uucuguccaa

SEQ ID NO: 2799 - RNA, 9 nt, Artificial Sequence
  source: /note="Description of Artificial Sequence: Synthetic oligonucleotide"
  source: /note="RNA"
  source: /note="5' tri-ethylene glycol (TEG)"
  modified_base (3)..(3): 5-methyl modified nucleotide
  modified_base (7)..(7): 5-methyl modified nucleotide
  modified_base (8)..(8): 5-methyl modified nucleotide
  source: /note="3' tri-ethylene glycol (TEG)"
uucugucca

SEQ ID NO: 2800 - RNA, 8 nt, Artificial Sequence
  source: /note="Description of Artificial Sequence: Synthetic oligonucleotide"
  source: /note="RNA"
  source: /note="5' tri-ethylene glycol (TEG)"
  modified_base (3)..(3): 5-methyl modified nucleotide
  modified_base (7)..(7): 5-methyl modified nucleotide
  modified_base (8)..(8): 5-methyl modified nucleotide
  source: /note="3' tri-ethylene glycol (TEG)"
uucugucc

SEQ ID NO: 2801 - RNA, 19 nt, Artificial Sequence
  source: /note="Description of Artificial Sequence: Synthetic oligonucleotide"
  source: /note="RNA"
  source: /note="5' tri-ethylene glycol (TEG)"
  modified_base (2)..(2): 5-methyl modified nucleotide
  modified_base (6)..(6): 5-methyl modified nucleotide
  modified_base (7)..(7): 5-methyl modified nucleotide
  modified_base (11)..(11): 5-methyl modified nucleotide
  modified_base (12)..(12): 5-methyl modified nucleotide
  modified_base (13)..(13): 5-methyl modified nucleotide
  source: /note="3' tri-ethylene glycol (TEG)"
ucuguccaagcccgguuga

SEQ ID NO: 2802 - RNA, 18 nt, Artificial Sequence
  source: /note="Description of Artificial Sequence: Synthetic oligonucleotide"
  source: /note="RNA"
  source: /note="5' tri-ethylene glycol (TEG)"
  modified_base (2)..(2): 5-methyl modified nucleotide
  modified_base (6)..(6): 5-methyl modified nucleotide
  modified_base (7)..(7): 5-methyl modified nucleotide
  modified_base (11)..(11): 5-methyl modified nucleotide
  modified_base (12)..(12): 5-methyl modified nucleotide
  modified_base (13)..(13): 5-methyl modified nucleotide
  source: /note="3' tri-ethylene glycol (TEG)"
ucuguccaagcccgguug

SEQ ID NO: 2803 - RNA, 17 nt, Artificial Sequence
  source: /note="Description of Artificial Sequence: Synthetic oligonucleotide"
  source: /note="RNA"
  source: /note="5' tri-ethylene glycol (TEG)"
  modified_base (2)..(2): 5-methyl modified nucleotide
  modified_base (6)..(6): 5-methyl modified nucleotide
  modified_base (7)..(7): 5-methyl modified nucleotide
  modified_base (11)..(11): 5-methyl modified nucleotide
  modified_base (12)..(12): 5-methyl modified nucleotide
  modified_base (13)..(13): 5-methyl modified nucleotide
  source: /note="3' tri-ethylene glycol (TEG)"
ucuguccaagcccgguu

SEQ ID NO: 2804 - RNA, 16 nt, Artificial Sequence
  source: /note="Description of Artificial Sequence: Synthetic oligonucleotide"
  source: /note="RNA"
  source: /note="5' tri-ethylene glycol (TEG)"
  modified_base (2)..(2): 5-methyl modified nucleotide
  modified_base (6)..(6): 5-methyl modified nucleotide
  modified_base (7)..(7): 5-methyl modified nucleotide
  modified_base (11)..(11): 5-methyl modified nucleotide
  modified_base (12)..(12): 5-methyl modified nucleotide
  modified_base (13)..(13): 5-methyl modified nucleotide
  source: /note="3' tri-ethylene glycol (TEG)"
ucuguccaagcccggu

SEQ ID NO: 2805 - RNA, 15 nt, Artificial Sequence
  source: /note="Description of Artificial Sequence: Synthetic oligonucleotide"
  source: /note="RNA"
  source: /note="5' tri-ethylene glycol (TEG)"
  modified_base (2)..(2): 5-methyl modified nucleotide
  modified_base (6)..(6): 5-methyl modified nucleotide
  modified_base (7)..(7): 5-methyl modified nucleotide
  modified_base (11)..(11): 5-methyl modified nucleotide
  modified_base (12)..(12): 5-methyl modified nucleotide
  modified_base (13)..(13): 5-methyl modified nucleotide
  source: /note="3' tri-ethylene glycol (TEG)"
ucuguccaagcccgg

SEQ ID NO: 2806 - RNA, 14 nt, Artificial Sequence
  source: /note="Description of Artificial Sequence: Synthetic oligonucleotide"
  source: /note="RNA"
  source: /note="5' tri-ethylene glycol (TEG)"
  modified_base (2)..(2): 5-methyl modified nucleotide
  modified_base (6)..(6): 5-methyl modified nucleotide
  modified_base (7)..(7): 5-methyl modified nucleotide
  modified_base (11)..(11): 5-methyl modified nucleotide
  modified_base (12)..(12): 5-methyl modified nucleotide
  modified_base (13)..(13): 5-methyl modified nucleotide
  source: /note="3' tri-ethylene glycol (TEG)"
ucuguccaagcccg

SEQ ID NO: 2807 - RNA, 13 nt, Artificial Sequence
  source: /note="Description of Artificial Sequence: Synthetic oligonucleotide"
  source: /note="RNA"
  source: /note="5' tri-ethylene glycol (TEG)"
  modified_base (2)..(2): 5-methyl modified nucleotide
  modified_base (6)..(6): 5-methyl modified nucleotide
  modified_base (7)..(7): 5-methyl modified nucleotide
  modified_base (11)..(11): 5-methyl modified nucleotide
  modified_base (12)..(12): 5-methyl modified nucleotide
  modified_base (13)..(13): 5-methyl modified nucleotide
  source: /note="3' tri-ethylene glycol (TEG)"
ucuguccaagccc

SEQ ID NO: 2808 - RNA, 12 nt, Artificial Sequence
  source: /note="Description of Artificial Sequence: Synthetic oligonucleotide"
  source: /note="RNA"
  source: /note="5' tri-ethylene glycol (TEG)"
  modified_base (2)..(2): 5-methyl modified nucleotide
  modified_base (6)..(6): 5-methyl modified nucleotide
  modified_base (7)..(7): 5-methyl modified nucleotide
  modified_base (11)..(11): 5-methyl modified nucleotide
  modified_base (12)..(12): 5-methyl modified nucleotide
  source: /note="3' tri-ethylene glycol (TEG)"
ucuguccaagcc

SEQ ID NO: 2809 - RNA, 11 nt, Artificial Sequence
  source: /note="Description of Artificial Sequence: Synthetic oligonucleotide"
  source: /note="RNA"
  source: /note="5' tri-ethylene glycol (TEG)"
  modified_base (2)..(2): 5-methyl modified nucleotide
  modified_base (6)..(6): 5-methyl modified nucleotide
  modified_base (7)..(7): 5-methyl modified nucleotide
  modified_base (11)..(11): 5-methyl modified nucleotide
  source: /note="3' tri-ethylene glycol (TEG)"
ucuguccaagc

SEQ ID NO: 2810 - RNA, 10 nt, Artificial Sequence
  source: /note="Description of Artificial Sequence: Synthetic oligonucleotide"
  source: /note="RNA"
  source: /note="5' tri-ethylene glycol (TEG)"
  modified_base (2)..(2): 5-methyl modified nucleotide
  modified_base (6)..(6): 5-methyl modified nucleotide
  modified_base (7)..(7): 5-methyl modified nucleotide
  source: /note="3' tri-ethylene glycol (TEG)"
ucuguccaag

SEQ ID NO: 2811 - RNA, 9 nt, Artificial Sequence
  source: /note="Description of Artificial Sequence: Synthetic oligonucleotide"
  source: /note="RNA"
  source: /note="5' tri-ethylene glycol (TEG)"
  modified_base (2)..(2): 5-methyl modified nucleotide
  modified_base (6)..(6): 5-methyl modified nucleotide
  modified_base (7)..(7): 5-methyl modified nucleotide
  source: /note="3' tri-ethylene glycol (TEG)"
ucuguccaa

SEQ ID NO: 2812 - RNA, 8 nt, Artificial Sequence
  source: /note="Description of Artificial Sequence: Synthetic oligonucleotide"
  source: /note="RNA"
  source: /note="5' tri-ethylene glycol (TEG)"
  modified_base (2)..(2): 5-methyl modified nucleotide
  modified_base (6)..(6): 5-methyl modified nucleotide
  modified_base (7)..(7): 5-methyl modified nucleotide
  source: /note="3' tri-ethylene glycol (TEG)"
ucugucca

SEQ ID NO: 2813 - RNA, 17 nt, Artificial Sequence
  source: /note="Description of Artificial Sequence: Synthetic oligonucleotide"
  source: /note="RNA"
  source: /note="5' tri-ethylene glycol (TEG)"
  modified_base (1)..(1): 5-methyl modified nucleotide
  modified_base (5)..(5): 5-methyl modified nucleotide
  modified_base (6)..(6): 5-methyl modified nucleotide
  modified_base (10)..(10): 5-methyl modified nucleotide
  modified_base (11)..(11): 5-methyl modified nucleotide
  modified_base (12)..(12): 5-methyl modified nucleotide
  source: /note="3' tri-ethylene glycol (TEG)"
cuguccaagcccgguug

SEQ ID NO: 2814 - RNA, 16 nt, Artificial Sequence
  source: /note="Description of Artificial Sequence: Synthetic oligonucleotide"
  source: /note="RNA"
  source: /note="5' tri-ethylene glycol (TEG)"
  modified_base (1)..(1): 5-methyl modified nucleotide
  modified_base (5)..(5): 5-methyl modified nucleotide
  modified_base (6)..(6): 5-methyl modified nucleotide
  modified_base (10)..(10): 5-methyl modified nucleotide
  modified_base (11)..(11): 5-methyl modified nucleotide
  modified_base (12)..(12): 5-methyl modified nucleotide
  source: /note="3' tri-ethylene glycol (TEG)"
cuguccaagcccgguu

SEQ ID NO: 2815 - RNA, 15 nt, Artificial Sequence
  source: /note="Description of Artificial Sequence: Synthetic oligonucleotide"
  source: /note="RNA"
  source: /note="5' tri-ethylene glycol (TEG)"
  modified_base (1)..(1): 5-methyl modified nucleotide
  modified_base (5)..(5): 5-methyl modified nucleotide
  modified_base (6)..(6): 5-methyl modified nucleotide
  modified_base (10)..(10): 5-methyl modified nucleotide
  modified_base (11)..(11): 5-methyl modified nucleotide
  modified_base (12)..(12): 5-methyl modified nucleotide
  source: /note="3' tri-ethylene glycol (TEG)"
cuguccaagcccggu

SEQ ID NO: 2816 - RNA, 14 nt, Artificial Sequence
  source: /note="Description of Artificial Sequence: Synthetic oligonucleotide"
  source: /note="RNA"
  source: /note="5' tri-ethylene glycol (TEG)"
  modified_base (1)..(1): 5-methyl modified nucleotide
  modified_base (5)..(5): 5-methyl modified nucleotide
  modified_base (6)..(6): 5-methyl modified nucleotide
  modified_base (10)..(10): 5-methyl modified nucleotide
  modified_base (11)..(11): 5-methyl modified nucleotide
  modified_base (12)..(12): 5-methyl modified nucleotide
  source: /note="3' tri-ethylene glycol (TEG)"
cuguccaagcccgg

SEQ ID NO: 2817 - RNA, 13 nt, Artificial Sequence
  source: /note="Description of Artificial Sequence: Synthetic oligonucleotide"
  source: /note="RNA"
  source: /note="5' tri-ethylene glycol (TEG)"
  modified_base (1)..(1): 5-methyl modified nucleotide
  modified_base (5)..(5): 5-methyl modified nucleotide
  modified_base (6)..(6): 5-methyl modified nucleotide
  modified_base (10)..(10): 5-methyl modified nucleotide
  modified_base (11)..(11): 5-methyl modified nucleotide
  modified_base (12)..(12): 5-methyl modified nucleotide
  source: /note="3' tri-ethylene glycol (TEG)"
cuguccaagcccg

SEQ ID NO: 2818 - RNA, 12 nt, Artificial Sequence
  source: /note="Description of Artificial Sequence: Synthetic oligonucleotide"
  source: /note="RNA"
  source: /note="5' tri-ethylene glycol (TEG)"
  modified_base (1)..(1): 5-methyl modified nucleotide
  modified_base (5)..(5): 5-methyl modified nucleotide
  modified_base (6)..(6): 5-methyl modified nucleotide
  modified_base (10)..(10): 5-methyl modified nucleotide
  modified_base (11)..(11): 5-methyl modified nucleotide
  modified_base (12)..(12): 5-methyl modified nucleotide
  source: /note="3' tri-ethylene glycol (TEG)"
cuguccaagccc

SEQ ID NO: 2819 - RNA, 11 nt, Artificial Sequence
  source: /note="Description of Artificial Sequence: Synthetic oligonucleotide"
  source: /note="RNA"
  source: /note="5' tri-ethylene glycol (TEG)"
  modified_base (1)..(1): 5-methyl modified nucleotide
  modified_base (5)..(5): 5-methyl modified nucleotide
  modified_base (6)..(6): 5-methyl modified nucleotide
  modified_base (10)..(10): 5-methyl modified nucleotide
  modified_base (11)..(11): 5-methyl modified nucleotide
  source: /note="3' tri-ethylene glycol (TEG)"
cuguccaagcc

SEQ ID NO: 2820 - RNA, 10 nt, Artificial Sequence
  source: /note="Description of Artificial Sequence: Synthetic oligonucleotide"
  source: /note="RNA"
  source: /note="5' tri-ethylene glycol (TEG)"
  modified_base (1)..(1): 5-methyl modified nucleotide
  modified_base (5)..(5): 5-methyl modified nucleotide
  modified_base (6)..(6): 5-methyl modified nucleotide
  modified_base (10)..(10): 5-methyl modified nucleotide
  source: /note="3' tri-ethylene glycol (TEG)"
cuguccaagc

SEQ ID NO: 2821 - RNA, 9 nt, Artificial Sequence
  source: /note="Description of Artificial Sequence: Synthetic oligonucleotide"
  source: /note="RNA"
  source: /note="5' tri-ethylene glycol (TEG)"
  modified_base (1)..(1): 5-methyl modified nucleotide
  modified_base (5)..(5): 5-methyl modified nucleotide
  modified_base (6)..(6): 5-methyl modified nucleotide
  source: /note="3' tri-ethylene glycol (TEG)"
cuguccaag

SEQ ID NO: 2822 - RNA, 8 nt, Artificial Sequence
  source: /note="Description of Artificial Sequence: Synthetic oligonucleotide"
  source: /note="RNA"
  source: /note="5' tri-ethylene glycol (TEG)"
  modified_base (1)..(1): 5-methyl modified nucleotide
  modified_base (5)..(5): 5-methyl modified nucleotide
  modified_base (6)..(6): 5-methyl modified nucleotide
  source: /note="3' tri-ethylene glycol (TEG)"
cuguccaa

SEQ ID NO: 2823 - RNA, 20 nt, Artificial Sequence
  source: /note="Description of Artificial Sequence: Synthetic oligonucleotide"
  source: /note="RNA"
  source: /note="5' tri-ethylene glycol (TEG)"
  modified_base (4)..(4): 5-methyl modified nucleotide
  modified_base (8)..(8): 5-methyl modified nucleotide
  modified_base (9)..(9): 5-methyl modified nucleotide
  modified_base (13)..(13): 5-methyl modified nucleotide
  modified_base (14)..(14): 5-methyl modified nucleotide
  modified_base (15)..(15): 5-methyl modified nucleotide
  source: /note="3' tri-ethylene glycol (TEG)"
guucuguccaagcccgguug

SEQ ID NO: 2824 - RNA, 19 nt, Artificial Sequence
  source: /note="Description of Artificial Sequence: Synthetic oligonucleotide"
  source: /note="RNA"
  source: /note="5' tri-ethylene glycol (TEG)"
  modified_base (4)..(4): 5-methyl modified nucleotide
  modified_base (8)..(8): 5-methyl modified nucleotide
  modified_base (9)..(9): 5-methyl modified nucleotide
  modified_base (13)..(13): 5-methyl modified nucleotide
  modified_base (14)..(14): 5-methyl modified nucleotide
  modified_base (15)..(15): 5-methyl modified nucleotide
  source: /note="3' tri-ethylene glycol (TEG)"
guucuguccaagcccgguu

SEQ ID NO: 2825 - RNA, 18 nt, Artificial Sequence
  source: /note="Description of Artificial Sequence: Synthetic oligonucleotide"
  source: /note="RNA"
  source: /note="5' tri-ethylene glycol (TEG)"
  modified_base (4)..(4): 5-methyl modified nucleotide
  modified_base (8)..(8): 5-methyl modified nucleotide
  modified_base (9)..(9): 5-methyl modified nucleotide
  modified_base (13)..(13): 5-methyl modified nucleotide
  modified_base (14)..(14): 5-methyl modified nucleotide
  modified_base (15)..(15): 5-methyl modified nucleotide
  source: /note="3' tri-ethylene glycol (TEG)"
guucuguccaagcccggu

SEQ ID NO: 2826 - RNA, 17 nt, Artificial Sequence
  source: /note="Description of Artificial Sequence: Synthetic oligonucleotide"
  source: /note="RNA"
  source: /note="5' tri-ethylene glycol (TEG)"
  modified_base (4)..(4): 5-methyl modified nucleotide
  modified_base (8)..(8): 5-methyl modified nucleotide
  modified_base (9)..(9): 5-methyl modified nucleotide
  modified_base (13)..(13): 5-methyl modified nucleotide
  modified_base (14)..(14): 5-methyl modified nucleotide
  modified_base (15)..(15): 5-methyl modified nucleotide
  source: /note="3' tri-ethylene glycol (TEG)"
guucuguccaagcccgg

SEQ ID NO: 2827 - RNA, 16 nt, Artificial Sequence
  source: /note="Description of Artificial Sequence: Synthetic oligonucleotide"
  source: /note="RNA"
  source: /note="5' tri-ethylene glycol (TEG)"
  modified_base (4)..(4): 5-methyl modified nucleotide
  modified_base (8)..(8): 5-methyl modified nucleotide
  modified_base (9)..(9): 5-methyl modified nucleotide
  modified_base (13)..(13): 5-methyl modified nucleotide
  modified_base (14)..(14): 5-methyl modified nucleotide
  modified_base (15)..(15): 5-methyl modified nucleotide
  source: /note="3' tri-ethylene glycol (TEG)"
guucuguccaagcccg

SEQ ID NO: 2828 - RNA, 15 nt, Artificial Sequence
  source: /note="Description of Artificial Sequence: Synthetic oligonucleotide"
  source: /note="RNA"
  source: /note="5' tri-ethylene glycol (TEG)"
  modified_base (4)..(4): 5-methyl modified nucleotide
  modified_base (8)..(8): 5-methyl modified nucleotide
  modified_base (9)..(9): 5-methyl modified nucleotide
  modified_base (13)..(13): 5-methyl modified nucleotide
  modified_base (14)..(14): 5-methyl modified nucleotide
  modified_base (15)..(15): 5-methyl modified nucleotide
  source: /note="3' tri-ethylene glycol (TEG)"
guucuguccaagccc

SEQ ID NO: 2829 - RNA, 14 nt, Artificial Sequence
  source: /note="Description of Artificial Sequence: Synthetic oligonucleotide"
  source: /note="RNA"
  source: /note="5' tri-ethylene glycol (TEG)"
  modified_base (4)..(4): 5-methyl modified nucleotide
  modified_base (8)..(8): 5-methyl modified nucleotide
  modified_base (9)..(9): 5-methyl modified nucleotide
  modified_base (13)..(13): 5-methyl modified nucleotide
  modified_base (14)..(14): 5-methyl modified nucleotide
  source: /note="3' tri-ethylene glycol (TEG)"
guucuguccaagcc

SEQ ID NO: 2830 - RNA, 13 nt, Artificial Sequence
  source: /note="Description of Artificial Sequence: Synthetic oligonucleotide"
  source: /note="RNA"
  source: /note="5' tri-ethylene glycol (TEG)"
  modified_base (4)..(4): 5-methyl modified nucleotide
  modified_base (8)..(8): 5-methyl modified nucleotide
  modified_base (9)..(9): 5-methyl modified nucleotide
  modified_base (13)..(13): 5-methyl modified nucleotide
  source: /note="3' tri-ethylene glycol (TEG)"
guucuguccaagc

SEQ ID NO: 2831 - RNA, 12 nt, Artificial Sequence
  source: /note="Description of Artificial Sequence: Synthetic oligonucleotide"
  source: /note="RNA"
  source: /note="5' tri-ethylene glycol (TEG)"
  modified_base (4)..(4): 5-methyl modified nucleotide
  modified_base (8)..(8): 5-methyl modified nucleotide
  modified_base (9)..(9): 5-methyl modified nucleotide
  source: /note="3' tri-ethylene glycol (TEG)"
guucuguccaag

SEQ ID NO: 2832 - RNA, 11 nt, Artificial Sequence
  source: /note="Description of Artificial Sequence: Synthetic oligonucleotide"
  source: /note="RNA"
  source: /note="5' tri-ethylene glycol (TEG)"
  modified_base (4)..(4): 5-methyl modified nucleotide
  modified_base (8)..(8): 5-methyl modified nucleotide
  modified_base (9)..(9): 5-methyl modified nucleotide
  source: /note="3' tri-ethylene glycol (TEG)"
guucuguccaa

SEQ ID NO: 2833 - RNA, 10 nt, Artificial Sequence
  source: /note="Description of Artificial Sequence: Synthetic oligonucleotide"
  source: /note="RNA"
  source: /note="5' tri-ethylene glycol (TEG)"
  modified_base (4)..(4): 5-methyl modified nucleotide
  modified_base (8)..(8): 5-methyl modified nucleotide
  modified_base (9)..(9): 5-methyl modified nucleotide
  source: /note="3' tri-ethylene glycol (TEG)"
guucugucca

SEQ ID NO: 2834 - RNA, 9 nt, Artificial Sequence
  source: /note="Description of Artificial Sequence: Synthetic oligonucleotide"
  source: /note="RNA"
  source: /note="5' tri-ethylene glycol (TEG)"
  modified_base (4)..(4): 5-methyl modified nucleotide
  modified_base (8)..(8): 5-methyl modified nucleotide
  modified_base (9)..(9): 5-methyl modified nucleotide
  source: /note="3' tri-ethylene glycol (TEG)"
guucugucc

SEQ ID NO: 2835 - RNA, 8 nt, Artificial Sequence
  source: /note="Description of Artificial Sequence: Synthetic oligonucleotide"
  source: /note="RNA"
  source: /note="5' tri-ethylene glycol (TEG)"
  modified_base (4)..(4): 5-methyl modified nucleotide
  modified_base (8)..(8): 5-methyl modified nucleotide
  source: /note="3' tri-ethylene glycol (TEG)"
guucuguc

SEQ ID NO: 2836 - RNA, 20 nt, Artificial Sequence
  source: /note="Description of Artificial Sequence: Synthetic oligonucleotide"
  source: /note="RNA"
  source: /note="5' tri-ethylene glycol (TEG)"
  modified_base (5)..(5): 5-methyl modified nucleotide
  modified_base (9)..(9): 5-methyl modified nucleotide
  modified_base (10)..(10): 5-methyl modified nucleotide
  modified_base (14)..(14): 5-methyl modified nucleotide
  modified_base (15)..(15): 5-methyl modified nucleotide
  modified_base (16)..(16): 5-methyl modified nucleotide
  source: /note="3' tri-ethylene glycol (TEG)"
aguucuguccaagcccgguu

SEQ ID NO: 2837 - RNA, 19 nt, Artificial Sequence
  source: /note="Description of Artificial Sequence: Synthetic oligonucleotide"
  source: /note="RNA"
  source: /note="5' tri-ethylene glycol (TEG)"
  modified_base (5)..(5): 5-methyl modified nucleotide
  modified_base (9)..(9): 5-methyl modified nucleotide
  modified_base (10)..(10): 5-methyl modified nucleotide
  modified_base (14)..(14): 5-methyl modified nucleotide
  modified_base (15)..(15): 5-methyl modified nucleotide
  modified_base (16)..(16): 5-methyl modified nucleotide
  source: /note="3' tri-ethylene glycol (TEG)"
aguucuguccaagcccggu

SEQ ID NO: 2838 - RNA, 18 nt, Artificial Sequence
  source: /note="Description of Artificial Sequence: Synthetic oligonucleotide"
  source: /note="RNA"
  source: /note="5' tri-ethylene glycol (TEG)"
  modified_base (5)..(5): 5-methyl modified nucleotide
  modified_base (9)..(9): 5-methyl modified nucleotide
  modified_base (10)..(10): 5-methyl modified nucleotide
  modified_base (14)..(14): 5-methyl modified nucleotide
  modified_base (15)..(15): 5-methyl modified nucleotide
  modified_base (16)..(16): 5-methyl modified nucleotide
  source: /note="3' tri-ethylene glycol (TEG)"
aguucuguccaagcccgg

SEQ ID NO: 2839 - RNA, 17 nt, Artificial Sequence
  source: /note="Description of Artificial Sequence: Synthetic oligonucleotide"
  source: /note="RNA"
  source: /note="5' tri-ethylene glycol (TEG)"
  modified_base (5)..(5): 5-methyl modified nucleotide
  modified_base (9)..(9): 5-methyl modified nucleotide
  modified_base (10)..(10): 5-methyl modified nucleotide
  modified_base (14)..(14): 5-methyl modified nucleotide
  modified_base (15)..(15): 5-methyl modified nucleotide
  modified_base (16)..(16): 5-methyl modified nucleotide
  source: /note="3' tri-ethylene glycol (TEG)"
aguucuguccaagcccg

SEQ ID NO: 2840 - RNA, 16 nt, Artificial Sequence
  source: /note="Description of Artificial Sequence: Synthetic oligonucleotide"
  source: /note="RNA"
  source: /note="5' tri-ethylene glycol (TEG)"
  modified_base (5)..(5): 5-methyl modified nucleotide
  modified_base (9)..(9): 5-methyl modified nucleotide
  modified_base (10)..(10): 5-methyl modified nucleotide
  modified_base (14)..(14): 5-methyl modified nucleotide
  modified_base (15)..(15): 5-methyl modified nucleotide
  modified_base (16)..(16): 5-methyl modified nucleotide
  source: /note="3' tri-ethylene glycol (TEG)"
aguucuguccaagccc

SEQ ID NO: 2841 - RNA, 15 nt, Artificial Sequence
  source: /note="Description of Artificial Sequence: Synthetic oligonucleotide"
  source: /note="RNA"
  source: /note="5' tri-ethylene glycol (TEG)"
  modified_base (5)..(5): 5-methyl modified nucleotide
  modified_base (9)..(9): 5-methyl modified nucleotide
  modified_base (10)..(10): 5-methyl modified nucleotide
  modified_base (14)..(14): 5-methyl modified nucleotide
  modified_base (15)..(15): 5-methyl modified nucleotide
  source: /note="3' tri-ethylene glycol (TEG)"
aguucuguccaagcc

SEQ ID NO: 2842 - RNA, 14 nt, Artificial Sequence
  source: /note="Description of Artificial Sequence: Synthetic oligonucleotide"
  source: /note="RNA"
  source: /note="5' tri-ethylene glycol (TEG)"
  modified_base (5)..(5): 5-methyl modified nucleotide
  modified_base (9)..(9): 5-methyl modified nucleotide
  modified_base (10)..(10): 5-methyl modified nucleotide
  modified_base (14)..(14): 5-methyl modified nucleotide
  source: /note="3' tri-ethylene glycol (TEG)"
aguucuguccaagc

SEQ ID NO: 2843 - RNA, 13 nt, Artificial Sequence
  source: /note="Description of Artificial Sequence: Synthetic oligonucleotide"
  source: /note="RNA"
  source: /note="5' tri-ethylene glycol (TEG)"
  modified_base (5)..(5): 5-methyl modified nucleotide
  modified_base (9)..(9): 5-methyl modified nucleotide
  modified_base (10)..(10): 5-methyl modified nucleotide
  source: /note="3' tri-ethylene glycol (TEG)"
aguucuguccaag

SEQ ID NO: 2844 - RNA, 12 nt, Artificial Sequence
  source: /note="Description of Artificial Sequence: Synthetic oligonucleotide"
  source: /note="RNA"
  source: /note="5' tri-ethylene glycol (TEG)"
  modified_base (5)..(5): 5-methyl modified nucleotide
  modified_base (9)..(9): 5-methyl modified nucleotide
  modified_base (10)..(10): 5-methyl modified nucleotide
  source: /note="3' tri-ethylene glycol (TEG)"
aguucuguccaa

SEQ ID NO: 2845 - RNA, 11 nt, Artificial Sequence
  source: /note="Description of Artificial Sequence: Synthetic oligonucleotide"
  source: /note="RNA"
  source: /note="5' tri-ethylene glycol (TEG)"
  modified_base (5)..(5): 5-methyl modified nucleotide
  modified_base (9)..(9): 5-methyl modified nucleotide
  modified_base (10)..(10): 5-methyl modified nucleotide
  source: /note="3' tri-ethylene glycol (TEG)"
aguucugucca

SEQ ID NO: 2846 - RNA, 10 nt, Artificial Sequence
  source: /note="Description of Artificial Sequence: Synthetic oligonucleotide"
  source: /note="RNA"
  source: /note="5' tri-ethylene glycol (TEG)"
  modified_base (5)..(5): 5-methyl modified nucleotide
  modified_base (9)..(9): 5-methyl modified nucleotide
  modified_base (10)..(10): 5-methyl modified nucleotide
  source: /note="3' tri-ethylene glycol (TEG)"
aguucugucc

SEQ ID NO: 2847 - RNA, 9 nt, Artificial Sequence
  source: /note="Description of Artificial Sequence: Synthetic oligonucleotide"
  source: /note="RNA"
  source: /note="5' tri-ethylene glycol (TEG)"
  modified_base (5)..(5): 5-methyl modified nucleotide
  modified_base (9)..(9): 5-methyl modified nucleotide
  source: /note="3' tri-ethylene glycol (TEG)"
aguucuguc

SEQ ID NO: 2848 - RNA, 8 nt, Artificial Sequence
  source: /note="Description of Artificial Sequence: Synthetic oligonucleotide"
  source: /note="RNA"
  source: /note="5' tri-ethylene glycol (TEG)"
  modified_base (5)..(5): 5-methyl modified nucleotide
  source: /note="3' tri-ethylene glycol (TEG)"
aguucugu

SEQ ID NO: 2849 - RNA, 20 nt, Artificial Sequence
  source: /note="Description of Artificial Sequence: Synthetic oligonucleotide"
  source: /note="RNA"
  source: /note="5' tri-ethylene glycol (TEG)"
  modified_base (6)..(6): 5-methyl modified nucleotide
  modified_base (10)..(10): 5-methyl modified nucleotide
  modified_base (11)..(11): 5-methyl modified nucleotide
  modified_base (15)..(15): 5-methyl modified nucleotide
  modified_base (16)..(16): 5-methyl modified nucleotide
  modified_base (17)..(17): 5-methyl modified nucleotide
  source: /note="3' tri-ethylene glycol (TEG)"
aaguucuguccaagcccggu

SEQ ID NO: 2850 - RNA, 19 nt, Artificial Sequence
  source: /note="Description of Artificial Sequence: Synthetic oligonucleotide"
  source: /note="RNA"
  source: /note="5' tri-ethylene glycol (TEG)"
  modified_base (6)..(6): 5-methyl modified nucleotide
  modified_base (10)..(10): 5-methyl modified nucleotide
  modified_base (11)..(11): 5-methyl modified nucleotide
  modified_base (15)..(15): 5-methyl modified nucleotide
  modified_base (16)..(16): 5-methyl modified nucleotide
  modified_base (17)..(17): 5-methyl modified nucleotide
  source: /note="3' tri-ethylene glycol (TEG)"
aaguucuguccaagcccgg

SEQ ID NO: 2851 - RNA, 18 nt, Artificial Sequence
  source: /note="Description of Artificial Sequence: Synthetic oligonucleotide"
  source: /note="RNA"
  source: /note="5' tri-ethylene glycol (TEG)"
  modified_base (6)..(6): 5-methyl modified nucleotide
  modified_base (10)..(10): 5-methyl modified nucleotide
  modified_base (11)..(11): 5-methyl modified nucleotide
  modified_base (15)..(15): 5-methyl modified nucleotide
  modified_base (16)..(16): 5-methyl modified nucleotide
  modified_base (17)..(17): 5-methyl modified nucleotide
  source: /note="3' tri-ethylene glycol (TEG)"
aaguucuguccaagcccg

SEQ ID NO: 2852 - RNA, 17 nt, Artificial Sequence
  source: /note="Description of Artificial Sequence: Synthetic oligonucleotide"
  source: /note="RNA"
  source: /note="5' tri-ethylene glycol (TEG)"
  modified_base (6)..(6): 5-methyl modified nucleotide
  modified_base (10)..(10): 5-methyl modified nucleotide
  modified_base (11)..(11): 5-methyl modified nucleotide
  modified_base (15)..(15): 5-methyl modified nucleotide
  modified_base (16)..(16): 5-methyl modified nucleotide
  modified_base (17)..(17): 5-methyl modified nucleotide
  source: /note="3' tri-ethylene glycol (TEG)"
aaguucuguccaagccc

SEQ ID NO: 2853 - RNA, 16 nt, Artificial Sequence
  source: /note="Description of Artificial Sequence: Synthetic oligonucleotide"
  source: /note="RNA"
  source: /note="5' tri-ethylene glycol (TEG)"
  modified_base (6)..(6): 5-methyl modified nucleotide
  modified_base (10)..(10): 5-methyl modified nucleotide
  modified_base (11)..(11): 5-methyl modified nucleotide
  modified_base (15)..(15): 5-methyl modified nucleotide
  modified_base (16)..(16): 5-methyl modified nucleotide
  source: /note="3' tri-ethylene glycol (TEG)"
aaguucuguccaagcc

SEQ ID NO: 2854 - RNA, 15 nt, Artificial Sequence
  source: /note="Description of Artificial Sequence: Synthetic oligonucleotide"
  source: /note="RNA"
  source: /note="5' tri-ethylene glycol (TEG)"
  modified_base (6)..(6): 5-methyl modified nucleotide
  modified_base (10)..(10): 5-methyl modified nucleotide
  modified_base (11)..(11): 5-methyl modified nucleotide
  modified_base (15)..(15): 5-methyl modified nucleotide
  source: /note="3' tri-ethylene glycol (TEG)"
aaguucuguccaagc

SEQ ID NO: 2855 - RNA, 14 nt, Artificial Sequence
  source: /note="Description of Artificial Sequence: Synthetic oligonucleotide"
  source: /note="RNA"
  source: /note="5' tri-ethylene glycol (TEG)"
  modified_base (6)..(6): 5-methyl modified nucleotide
  modified_base (10)..(10): 5-methyl modified nucleotide
  modified_base (11)..(11): 5-methyl modified nucleotide
  source: /note="3' tri-ethylene glycol (TEG)"
aaguucuguccaag

SEQ ID NO: 2856 - RNA, 13 nt, Artificial Sequence
  source: /note="Description of Artificial Sequence: Synthetic oligonucleotide"
  source: /note="RNA"
  source: /note="5' tri-ethylene glycol (TEG)"
  modified_base (6)..(6): 5-methyl modified nucleotide
  modified_base (10)..(10): 5-methyl modified nucleotide
  modified_base (11)..(11): 5-methyl modified nucleotide
  source: /note="3' tri-ethylene glycol (TEG)"
aaguucuguccaa

SEQ ID NO: 2857 - RNA, 12 nt, Artificial Sequence
  source: /note="Description of Artificial Sequence: Synthetic oligonucleotide"
  source: /note="RNA"
  source: /note="5' tri-ethylene glycol (TEG)"
  modified_base (6)..(6): 5-methyl modified nucleotide
  modified_base (10)..(10): 5-methyl modified nucleotide
  modified_base (11)..(11): 5-methyl modified nucleotide
  source: /note="3' tri-ethylene glycol (TEG)"
aaguucugucca

SEQ ID NO: 2858 - RNA, 11 nt, Artificial Sequence
  source: /note="Description of Artificial Sequence: Synthetic oligonucleotide"
  source: /note="RNA"
  source: /note="5' tri-ethylene glycol (TEG)"
  modified_base (6)..(6): 5-methyl modified nucleotide
  modified_base (10)..(10): 5-methyl modified nucleotide
  modified_base (11)..(11): 5-methyl modified nucleotide
  source: /note="3' tri-ethylene glycol (TEG)"
aaguucugucc

SEQ ID NO: 2859 - RNA, 10 nt, Artificial Sequence
  source: /note="Description of Artificial Sequence: Synthetic oligonucleotide"
  source: /note="RNA"
  source: /note="5' tri-ethylene glycol (TEG)"
  modified_base (6)..(6): 5-methyl modified nucleotide
  modified_base (10)..(10): 5-methyl modified nucleotide
  source: /note="3' tri-ethylene glycol (TEG)"
aaguucuguc

SEQ ID NO: 2860 - RNA, 9 nt, Artificial Sequence
  source: /note="Description of Artificial Sequence: Synthetic oligonucleotide"
  source: /note="RNA"
  source: /note="5' tri-ethylene glycol (TEG)"
  modified_base (6)..(6): 5-methyl modified nucleotide
  source: /note="3' tri-ethylene glycol (TEG)"
aaguucugu

SEQ ID NO: 2861 - RNA, 8 nt, Artificial Sequence
  source: /note="Description of Artificial Sequence: Synthetic oligonucleotide"
  source: /note="RNA"
  source: /note="5' tri-ethylene glycol (TEG)"
  modified_base (6)..(6): 5-methyl modified nucleotide
  source: /note="3' tri-ethylene glycol (TEG)"
aaguucug

SEQ ID NO: 2862 - RNA, 20 nt, Artificial Sequence
  source: /note="Description of Artificial Sequence: Synthetic oligonucleotide"
  source: /note="RNA"
  source: /note="5' tri-ethylene glycol (TEG)"
  modified_base (7)..(7): 5-methyl modified nucleotide
  modified_base (11)..(11): 5-methyl modified nucleotide
  modified_base (12)..(12): 5-methyl modified nucleotide
  modified_base (16)..(16): 5-methyl modified nucleotide
  modified_base (17)..(17): 5-methyl modified nucleotide
  modified_base (18)..(18): 5-methyl modified nucleotide
  source: /note="3' tri-ethylene glycol (TEG)"
uaaguucuguccaagcccgg

SEQ ID NO: 2863 - RNA, 19 nt, Artificial Sequence
  source: /note="Description of Artificial Sequence: Synthetic oligonucleotide"
  source: /note="RNA"
  source: /note="5' tri-ethylene glycol (TEG)"
  modified_base (7)..(7): 5-methyl modified nucleotide
  modified_base (11)..(11): 5-methyl modified nucleotide
  modified_base (12)..(12): 5-methyl modified nucleotide
  modified_base (16)..(16): 5-methyl modified nucleotide
  modified_base (17)..(17): 5-methyl modified nucleotide
  modified_base (18)..(18): 5-methyl modified nucleotide
  source: /note="3' tri-ethylene glycol (TEG)"
uaaguucuguccaagcccg

SEQ ID NO: 2864 - RNA, 18 nt, Artificial Sequence
  source: /note="Description of Artificial Sequence: Synthetic oligonucleotide"
  source: /note="RNA"
  source: /note="5' tri-ethylene glycol (TEG)"
  modified_base (7)..(7): 5-methyl modified nucleotide
  modified_base (11)..(11): 5-methyl modified nucleotide
  modified_base (12)..(12): 5-methyl modified nucleotide
  modified_base (16)..(16): 5-methyl modified nucleotide
  modified_base (17)..(17): 5-methyl modified nucleotide
  modified_base (18)..(18): 5-methyl modified nucleotide
  source: /note="3' tri-ethylene glycol (TEG)"
uaaguucuguccaagccc

SEQ ID NO: 2865 - RNA, 17 nt, Artificial Sequence
  source: /note="Description of Artificial Sequence: Synthetic oligonucleotide"
  source: /note="RNA"
  source: /note="5' tri-ethylene glycol (TEG)"
  modified_base (7)..(7): 5-methyl modified nucleotide
  modified_base (11)..(11): 5-methyl modified nucleotide
  modified_base (12)..(12): 5-methyl modified nucleotide
  modified_base (16)..(16): 5-methyl modified nucleotide
  modified_base (17)..(17): 5-methyl modified nucleotide
  source: /note="3' tri-ethylene glycol (TEG)"
uaaguucuguccaagcc

SEQ ID NO: 2866 - RNA, 16 nt, Artificial Sequence
  source: /note="Description of Artificial Sequence: Synthetic oligonucleotide"
  source: /note="RNA"
  source: /note="5' tri-ethylene glycol (TEG)"
  modified_base (7)..(7): 5-methyl modified nucleotide
  modified_base (11)..(11): 5-methyl modified nucleotide
  modified_base (12)..(12): 5-methyl modified nucleotide
  modified_base (16)..(16): 5-methyl modified nucleotide
  source: /note="3' tri-ethylene glycol (TEG)"
uaaguucuguccaagc

SEQ ID NO: 2867 - RNA, 14 nt, Artificial Sequence
  source: /note="Description of Artificial Sequence: Synthetic oligonucleotide"
  source: /note="RNA"
  source: /note="5' tri-ethylene glycol (TEG)"
  modified_base (7)..(7): 5-methyl modified nucleotide
  modified_base (11)..(11): 5-methyl modified nucleotide
  modified_base (12)..(12): 5-methyl modified nucleotide
  source: /note="3' tri-ethylene glycol (TEG)"
uaaguucuguccaa

SEQ ID NO: 2868 - RNA, 13 nt, Artificial Sequence
  source: /note="Description of Artificial Sequence: Synthetic oligonucleotide"
  source: /note="RNA"
  source: /note="5' tri-ethylene glycol (TEG)"
  modified_base (7)..(7): 5-methyl modified nucleotide
  modified_base (11)..(11): 5-methyl modified nucleotide
  modified_base (12)..(12): 5-methyl modified nucleotide
  source: /note="3' tri-ethylene glycol (TEG)"
uaaguucugucca

SEQ ID NO: 2869 - RNA, 12 nt, Artificial Sequence
  source: /note="Description of Artificial Sequence: Synthetic oligonucleotide"
  source: /note="RNA"
  source: /note="5' tri-ethylene glycol (TEG)"
  modified_base (7)..(7): 5-methyl modified nucleotide
  modified_base (11)..(11): 5-methyl modified nucleotide
  modified_base (12)..(12): 5-methyl modified nucleotide
  source: /note="3' tri-ethylene glycol (TEG)"
uaaguucugucc

SEQ ID NO: 2870 - RNA, 11 nt, Artificial Sequence
  source: /note="Description of Artificial Sequence: Synthetic oligonucleotide"
  source: /note="RNA"
  source: /note="5' tri-ethylene glycol (TEG)"
  modified_base (7)..(7): 5-methyl modified nucleotide
  modified_base (11)..(11): 5-methyl modified nucleotide
  source: /note="3' tri-ethylene glycol (TEG)"
uaaguucuguc

SEQ ID NO: 2871 - RNA, 10 nt, Artificial Sequence
  source: /note="Description of Artificial Sequence: Synthetic oligonucleotide"
  source: /note="RNA"
  source: /note="5' tri-ethylene glycol (TEG)"
  modified_base (7)..(7): 5-methyl modified nucleotide
  source: /note="3' tri-ethylene glycol (TEG)"
uaaguucugu

SEQ ID NO: 2872 - RNA, 9 nt, Artificial Sequence
  source: /note="Description of Artificial Sequence: Synthetic oligonucleotide"
  source: /note="RNA"
  source: /note="5' tri-ethylene glycol (TEG)"
  modified_base (7)..(7): 5-methyl modified nucleotide
  source: /note="3' tri-ethylene glycol (TEG)"
uaaguucug

SEQ ID NO: 2873 - RNA, 8 nt, Artificial Sequence
  source: /note="Description of Artificial Sequence: Synthetic oligonucleotide"
  source: /note="RNA"
  source: /note="5' tri-ethylene glycol (TEG)"
  modified_base (7)..(7): 5-methyl modified nucleotide
  source: /note="3' tri-ethylene glycol (TEG)"
uaaguucu

SEQ ID NO: 2874 - RNA, 20 nt, Artificial Sequence
  source: /note="Description of Artificial Sequence: Synthetic oligonucleotide"
  source: /note="RNA"
  source: /note="5' tri-ethylene glycol (TEG)"
  modified_base (8)..(8): 5-methyl modified nucleotide
  modified_base (12)..(12): 5-methyl modified nucleotide
  modified_base (13)..(13): 5-methyl modified nucleotide
  modified_base (17)..(17): 5-methyl modified nucleotide
  modified_base (18)..(18): 5-methyl modified nucleotide
  modified_base (19)..(19): 5-methyl modified nucleotide
  source: /note="3' tri-ethylene glycol (TEG)"
guaaguucuguccaagcccg

SEQ ID NO: 2875 - RNA, 19 nt, Artificial Sequence
  source: /note="Description of Artificial Sequence: Synthetic oligonucleotide"
  source: /note="RNA"
  source: /note="5' tri-ethylene glycol (TEG)"
  modified_base (8)..(8): 5-methyl modified nucleotide
  modified_base (12)..(12): 5-methyl modified nucleotide
  modified_base (13)..(13): 5-methyl modified nucleotide
  modified_base (17)..(17): 5-methyl modified nucleotide
  modified_base (18)..(18): 5-methyl modified nucleotide
  modified_base (19)..(19): 5-methyl modified nucleotide
  source: /note="3' tri-ethylene glycol (TEG)"
guaaguucuguccaagccc

SEQ ID NO: 2876 - RNA, 17 nt, Artificial Sequence
  source: /note="Description of Artificial Sequence: Synthetic oligonucleotide"
  source: /note="RNA"
  source: /note="5' tri-ethylene glycol (TEG)"
  modified_base (8)..(8): 5-methyl modified nucleotide
  modified_base (12)..(12): 5-methyl modified nucleotide
  modified_base (13)..(13): 5-methyl modified nucleotide
  modified_base (17)..(17): 5-methyl modified nucleotide
  source: /note="3' tri-ethylene glycol (TEG)"
guaaguucuguccaagc

SEQ ID NO: 2877 - RNA, 16 nt, Artificial Sequence
  source: /note="Description of Artificial Sequence: Synthetic oligonucleotide"
  source: /note="RNA"
  source: /note="5' tri-ethylene glycol (TEG)"
  modified_base (8)..(8): 5-methyl modified nucleotide
  modified_base (12)..(12): 5-methyl modified nucleotide
  modified_base (13)..(13): 5-methyl modified nucleotide
  source: /note="3' tri-ethylene glycol (TEG)"
guaaguucuguccaag

SEQ ID NO: 2878 - RNA, 15 nt, Artificial Sequence
  source: /note="Description of Artificial Sequence: Synthetic oligonucleotide"
  source: /note="RNA"
  source: /note="5' tri-ethylene glycol (TEG)"
  modified_base (8)..(8): 5-methyl modified nucleotide
  modified_base (12)..(12): 5-methyl modified nucleotide
  modified_base (13)..(13): 5-methyl modified nucleotide
  source: /note="3' tri-ethylene glycol (TEG)"
guaaguucuguccaa

SEQ ID NO: 2879 - RNA, 14 nt, Artificial Sequence
  source: /note="Description of Artificial Sequence: Synthetic oligonucleotide"
  source: /note="RNA"
  source: /note="5' tri-ethylene glycol (TEG)"
  modified_base (8)..(8): 5-methyl modified nucleotide
  modified_base (12)..(12): 5-methyl modified nucleotide
  modified_base (13)..(13): 5-methyl modified nucleotide
  source: /note="3' tri-ethylene glycol (TEG)"
guaaguucugucca

SEQ ID NO: 2880 - RNA, 13 nt, Artificial Sequence
  source: /note="Description of Artificial Sequence: Synthetic oligonucleotide"
  source: /note="RNA"
  source: /note="5' tri-ethylene glycol (TEG)"
  modified_base (8)..(8): 5-methyl modified nucleotide
  modified_base (12)..(12): 5-methyl modified nucleotide
  modified_base (13)..(13): 5-methyl modified nucleotide
  source: /note="3' tri-ethylene glycol (TEG)"
guaaguucugucc

SEQ ID NO: 2881 - RNA, 12 nt, Artificial Sequence
  source: /note="Description of Artificial Sequence: Synthetic oligonucleotide"
  source: /note="RNA"
  source: /note="5' tri-ethylene glycol (TEG)"
  modified_base (8)..(8): 5-methyl modified nucleotide
  modified_base (12)..(12): 5-methyl modified nucleotide
  source: /note="3' tri-ethylene glycol (TEG)"
guaaguucuguc

SEQ ID NO: 2882 - RNA, 11 nt, Artificial Sequence
  source: /note="Description of Artificial Sequence: Synthetic oligonucleotide"
  source: /note="RNA"
  source: /note="5' tri-ethylene glycol (TEG)"
  modified_base (8)..(8): 5-methyl modified nucleotide
  source: /note="3' tri-ethylene glycol (TEG)"
guaaguucugu

SEQ ID NO: 2883 - RNA, 10 nt, Artificial Sequence
  source: /note="Description of Artificial Sequence: Synthetic oligonucleotide"
  source: /note="RNA"
  source: /note="5' tri-ethylene glycol (TEG)"
  modified_base (8)..(8): 5-methyl modified nucleotide
  source: /note="3' tri-ethylene glycol (TEG)"
guaaguucug

SEQ ID NO: 2884 - RNA, 9 nt, Artificial Sequence
  source: /note="Description of Artificial Sequence: Synthetic oligonucleotide"
  source: /note="RNA"
  source: /note="5' tri-ethylene glycol (TEG)"
  modified_base (8)..(8): 5-methyl modified nucleotide
  source: /note="3' tri-ethylene glycol (TEG)"
guaaguucu

SEQ ID NO: 2885 - RNA, 8 nt, Artificial Sequence
  source: /note="Description of Artificial Sequence: Synthetic oligonucleotide"
  source: /note="RNA"
  source: /note="5' tri-ethylene glycol (TEG)"
  modified_base (8)..(8): 5-methyl modified nucleotide
  source: /note="3' tri-ethylene glycol (TEG)"
guaaguuc

SEQ ID NO: 2886 - RNA, 20 nt, Artificial Sequence
  source: /note="Description of Artificial Sequence: Synthetic oligonucleotide"
  source: /note="RNA"
  source: /note="5' tri-ethylene glycol (TEG)"
  modified_base (9)..(9): 5-methyl modified nucleotide
  modified_base (13)..(13): 5-methyl modified nucleotide
  modified_base (14)..(14): 5-methyl modified nucleotide
  modified_base (18)..(18): 5-methyl modified nucleotide
  modified_base (19)..(19): 5-methyl modified nucleotide
  modified_base (20)..(20): 5-methyl modified nucleotide
  source: /note="3' tri-ethylene glycol (TEG)"
gguaaguucuguccaagccc

SEQ ID NO: 2887 - RNA, 19 nt, Artificial Sequence
  source: /note="Description of Artificial Sequence: Synthetic oligonucleotide"
  source: /note="RNA"
  source: /note="5' tri-ethylene glycol (TEG)"
  modified_base (9)..(9): 5-methyl modified nucleotide
  modified_base (13)..(13): 5-methyl modified nucleotide
  modified_base (14)..(14): 5-methyl modified nucleotide
  modified_base (18)..(18): 5-methyl modified nucleotide
  modified_base (19)..(19): 5-methyl modified nucleotide
  source: /note="3' tri-ethylene glycol (TEG)"
gguaaguucuguccaagcc

SEQ ID NO: 2888 - RNA, 17 nt, Artificial Sequence
  source: /note="Description of Artificial Sequence: Synthetic oligonucleotide"
  source: /note="RNA"
  source: /note="5' tri-ethylene glycol (TEG)"
  modified_base (9)..(9): 5-methyl modified nucleotide
  modified_base (13)..(13): 5-methyl modified nucleotide
  modified_base (14)..(14): 5-methyl modified nucleotide
  source: /note="3' tri-ethylene glycol (TEG)"
gguaaguucuguccaag

SEQ ID NO: 2889 - RNA, 16 nt, Artificial Sequence
  source: /note="Description of Artificial Sequence: Synthetic oligonucleotide"
  source: /note="RNA"
  source: /note="5' tri-ethylene glycol (TEG)"
  modified_base (9)..(9): 5-methyl modified nucleotide
  modified_base (13)..(13): 5-methyl modified nucleotide
  modified_base (14)..(14): 5-methyl modified nucleotide
  source: /note="3' tri-ethylene glycol (TEG)"
gguaaguucuguccaa

SEQ ID NO: 2890 - RNA, 15 nt, Artificial Sequence
  source: /note="Description of Artificial Sequence: Synthetic oligonucleotide"
  source: /note="RNA"
  source: /note="5' tri-ethylene glycol (TEG)"
  modified_base (9)..(9): 5-methyl modified nucleotide
  modified_base (13)..(13): 5-methyl modified nucleotide
  modified_base (14)..(14): 5-methyl modified nucleotide
  source: /note="3' tri-ethylene glycol (TEG)"
gguaaguucugucca

SEQ ID NO: 2891 - RNA, 14 nt, Artificial Sequence
  source: /note="Description of Artificial Sequence: Synthetic oligonucleotide"
  source: /note="RNA"
  source: /note="5' tri-ethylene glycol (TEG)"
  modified_base (9)..(9): 5-methyl modified nucleotide
  modified_base (13)..(13): 5-methyl modified nucleotide
  modified_base (14)..(14): 5-methyl modified nucleotide
  source: /note="3' tri-ethylene glycol (TEG)"
gguaaguucugucc

SEQ ID NO: 2892 - RNA, 13 nt, Artificial Sequence
  source: /note="Description of Artificial Sequence: Synthetic oligonucleotide"
  source: /note="RNA"
  source: /note="5' tri-ethylene glycol (TEG)"
  modified_base (9)..(9): 5-methyl modified nucleotide
  modified_base (13)..(13): 5-methyl modified nucleotide
  source: /note="3' tri-ethylene glycol (TEG)"
gguaaguucuguc

SEQ ID NO: 2893 - RNA, 12 nt, Artificial Sequence
  source: /note="Description of Artificial Sequence: Synthetic oligonucleotide"
  source: /note="RNA"
  source: /note="5' tri-ethylene glycol (TEG)"
  modified_base (9)..(9): 5-methyl modified nucleotide
  source: /note="3' tri-ethylene glycol (TEG)"
gguaaguucugu

SEQ ID NO: 2894 - RNA, 11 nt, Artificial Sequence
  source: /note="Description of Artificial Sequence: Synthetic oligonucleotide"
  source: /note="RNA"
  source: /note="5' tri-ethylene glycol (TEG)"
  modified_base (9)..(9): 5-methyl modified nucleotide
  source: /note="3' tri-ethylene glycol (TEG)"
gguaaguucug

SEQ ID NO: 2895 - RNA, 10 nt, Artificial Sequence
  source: /note="Description of Artificial Sequence: Synthetic oligonucleotide"
  source: /note="RNA"
  source: /note="5' tri-ethylene glycol (TEG)"
  modified_base (9)..(9): 5-methyl modified nucleotide
  source: /note="3' tri-ethylene glycol (TEG)"
gguaaguucu

SEQ ID NO: 2896 - RNA, 9 nt, Artificial Sequence
  source: /note="Description of Artificial Sequence: Synthetic oligonucleotide"
  source: /note="RNA"
  source: /note="5' tri-ethylene glycol (TEG)"
  modified_base (9)..(9): 5-methyl modified nucleotide
  source: /note="3' tri-ethylene glycol (TEG)"
gguaaguuc

SEQ ID NO: 2897 - RNA, 8 nt, Artificial Sequence
  source: /note="Description of Artificial Sequence: Synthetic oligonucleotide"
  source: /note="Antisense Oligonucleotide"
  source: /note="5' tri-ethylene glycol (TEG)"
  source: /note="3' tri-ethylene glycol (TEG)"
gguaaguu

SEQ ID NO: 2898 - RNA, 20 nt, Artificial Sequence
  source: /note="Description of Artificial Sequence: Synthetic oligonucleotide"
  source: /note="RNA"
  source: /note="5' tri-ethylene glycol (TEG)"
  modified_base (1)..(1): 5-methyl modified nucleotide
  modified_base (10)..(10): 5-methyl modified nucleotide
  modified_base (14)..(14): 5-methyl modified nucleotide
  modified_base (15)..(15): 5-methyl modified nucleotide
  modified_base (19)..(19): 5-methyl modified nucleotide
  modified_base (20)..(20): 5-methyl modified nucleotide
  source: /note="3' tri-ethylene glycol (TEG)"
cgguaaguucuguccaagcc

SEQ ID NO: 2899 - RNA, 19 nt, Artificial Sequence
  source: /note="Description of Artificial Sequence: Synthetic oligonucleotide"
  source: /note="RNA"
  source: /note="5' tri-ethylene glycol (TEG)"
  modified_base (1)..(1): 5-methyl modified nucleotide
  modified_base (10)..(10): 5-methyl modified nucleotide
  modified_base (14)..(14): 5-methyl modified nucleotide
  modified_base (15)..(15): 5-methyl modified nucleotide
  modified_base (19)..(19): 5-methyl modified nucleotide
  source: /note="3' tri-ethylene glycol (TEG)"
cgguaaguucuguccaagc

SEQ ID NO: 2900 - RNA, 18 nt, Artificial Sequence
  source: /note="Description of Artificial Sequence: Synthetic oligonucleotide"
  source: /note="RNA"
  source: /note="5' tri-ethylene glycol (TEG)"
  modified_base (1)..(1): 5-methyl modified nucleotide
  modified_base (10)..(10): 5-methyl modified nucleotide
  modified_base (14)..(14): 5-methyl modified nucleotide
  modified_base (15)..(15): 5-methyl modified nucleotide
  source: /note="3' tri-ethylene glycol (TEG)"
cgguaaguucuguccaag

SEQ ID NO: 2901 - RNA, 17 nt, Artificial Sequence
  source: /note="Description of Artificial Sequence: Synthetic oligonucleotide"
  source: /note="RNA"
  source: /note="5' tri-ethylene glycol (TEG)"
  modified_base (1)..(1): 5-methyl modified nucleotide
  modified_base (10)..(10): 5-methyl modified nucleotide
  modified_base (14)..(14): 5-methyl modified nucleotide
  modified_base (15)..(15): 5-methyl modified nucleotide
  source: /note="3' tri-ethylene glycol (TEG)"
cgguaaguucuguccaa

SEQ ID NO: 2902 - RNA, 16 nt, Artificial Sequence
  source: /note="Description of Artificial Sequence: Synthetic oligonucleotide"
  source: /note="RNA"
  source: /note="5' tri-ethylene glycol (TEG)"
  modified_base (1)..(1): 5-methyl modified nucleotide
  modified_base (10)..(10): 5-methyl modified nucleotide
  modified_base (14)..(14): 5-methyl modified nucleotide
  modified_base (15)..(15): 5-methyl modified nucleotide
  source: /note="3' tri-ethylene glycol (TEG)"
cgguaaguucugucca

SEQ ID NO: 2903 - RNA, 15 nt, Artificial Sequence
  source: /note="Description of Artificial Sequence: Synthetic oligonucleotide"
  source: /note="RNA"
  source: /note="5' tri-ethylene glycol (TEG)"
  modified_base (1)..(1): 5-methyl modified nucleotide
  modified_base (10)..(10): 5-methyl modified nucleotide
  modified_base (14)..(14): 5-methyl modified nucleotide
  modified_base (15)..(15): 5-methyl modified nucleotide
  source: /note="3' tri-ethylene glycol (TEG)"
cgguaaguucugucc

SEQ ID NO: 2904 - RNA, 14 nt, Artificial Sequence
  source: /note="Description of Artificial Sequence: Synthetic oligonucleotide"
  source: /note="RNA"
  source: /note="5' tri-ethylene glycol (TEG)"
  modified_base (1)..(1): 5-methyl modified nucleotide
  modified_base (10)..(10): 5-methyl modified nucleotide
  modified_base (14)..(14): 5-methyl modified nucleotide
  source: /note="3' tri-ethylene glycol (TEG)"
cgguaaguucuguc

SEQ ID NO: 2905 - RNA, 13 nt, Artificial Sequence
  source: /note="Description of Artificial Sequence: Synthetic oligonucleotide"
  source: /note="RNA"
  source: /note="5' tri-ethylene glycol (TEG)"
  modified_base (1)..(1): 5-methyl modified nucleotide
  modified_base (10)..(10): 5-methyl modified nucleotide
  source: /note="3' tri-ethylene glycol (TEG)"
cgguaaguucugu

SEQ ID NO: 2906 - RNA, 12 nt, Artificial Sequence
  source: /note="Description of Artificial Sequence: Synthetic oligonucleotide"
  source: /note="RNA"
  source: /note="5' tri-ethylene glycol (TEG)"
  modified_base (1)..(1): 5-methyl modified nucleotide
  modified_base (10)..(10): 5-methyl modified nucleotide
  source: /note="3' tri-ethylene glycol (TEG)"
cgguaaguucug

SEQ ID NO: 2907 - RNA, 11 nt, Artificial Sequence
  source: /note="Description of Artificial Sequence: Synthetic oligonucleotide"
  source: /note="RNA"
  source: /note="5' tri-ethylene glycol (TEG)"
  modified_base (1)..(1): 5-methyl modified nucleotide
  modified_base (10)..(10): 5-methyl modified nucleotide
  source: /note="3' tri-ethylene glycol (TEG)"
cgguaaguucu

SEQ ID NO: 2908 - RNA, 10 nt, Artificial Sequence
  source: /note="Description of Artificial Sequence: Synthetic oligonucleotide"
  source: /note="RNA"
  source: /note="5' tri-ethylene glycol (TEG)"
  modified_base (1)..(1): 5-methyl modified nucleotide
  modified_base (10)..(10): 5-methyl modified nucleotide
  source: /note="3' tri-ethylene glycol (TEG)"
cgguaaguuc

SEQ ID NO: 2909 - RNA, 9 nt, Artificial Sequence
  source: /note="Description of Artificial Sequence: Synthetic oligonucleotide"
  source: /note="RNA"
  source: /note="5' tri-ethylene glycol (TEG)"
  modified_base (1)..(1): 5-methyl modified nucleotide
  source: /note="3' tri-ethylene glycol (TEG)"
cgguaaguu

SEQ ID NO: 2910 - RNA, 8 nt, Artificial Sequence
  source: /note="Description of Artificial Sequence: Synthetic oligonucleotide"
  source: /note="RNA"
  source: /note="5' tri-ethylene glycol (TEG)"
  modified_base (1)..(1): 5-methyl modified nucleotide
  source: /note="3' tri-ethylene glycol (TEG)"
cgguaagu

SEQ ID NO: 2911 - RNA, 20 nt, Artificial Sequence
  source: /note="Description of Artificial Sequence: Synthetic oligonucleotide"
  source: /note="RNA"
  source: /note="5' tri-ethylene glycol (TEG)"
  modified_base (2)..(2): 5-methyl modified nucleotide
  modified_base (11)..(11): 5-methyl modified nucleotide
  modified_base (15)..(15): 5-methyl modified nucleotide
  modified_base (16)..(16): 5-methyl modified nucleotide
  modified_base (20)..(20): 5-methyl modified nucleotide
  source: /note="3' tri-ethylene glycol (TEG)"
ucgguaaguucuguccaagc

SEQ ID NO: 2912 - RNA, 19 nt, Artificial Sequence
  source: /note="Description of Artificial Sequence: Synthetic oligonucleotide"
  source: /note="RNA"
  source: /note="5' tri-ethylene glycol (TEG)"
  modified_base (2)..(2): 5-methyl modified nucleotide
  modified_base (11)..(11): 5-methyl modified nucleotide
  modified_base (15)..(15): 5-methyl modified nucleotide
  modified_base (16)..(16): 5-methyl modified nucleotide
  source: /note="3' tri-ethylene glycol (TEG)"
ucgguaaguucuguccaag

SEQ ID NO: 2913 - RNA, 18 nt, Artificial Sequence
  source: /note="Description of Artificial Sequence: Synthetic oligonucleotide"
  source: /note="RNA"
  source: /note="5' tri-ethylene glycol (TEG)"
  modified_base (2)..(2): 5-methyl modified nucleotide
  modified_base (11)..(11): 5-methyl modified nucleotide
  modified_base (15)..(15): 5-methyl modified nucleotide
  modified_base (16)..(16): 5-methyl modified nucleotide
  source: /note="3' tri-ethylene glycol (TEG)"
ucgguaaguucuguccaa

SEQ ID NO: 2914 - RNA, 17 nt, Artificial Sequence
  source: /note="Description of Artificial Sequence: Synthetic oligonucleotide"
  source: /note="RNA"
  source: /note="5' tri-ethylene glycol (TEG)"
  modified_base (2)..(2): 5-methyl modified nucleotide
  modified_base (11)..(11): 5-methyl modified nucleotide
  modified_base (15)..(15): 5-methyl modified nucleotide
  modified_base (16)..(16): 5-methyl modified nucleotide
  source: /note="3' tri-ethylene glycol (TEG)"
ucgguaaguucugucca

SEQ ID NO: 2915 - RNA, 16 nt, Artificial Sequence
  source: /note="Description of Artificial Sequence: Synthetic oligonucleotide"
  source: /note="RNA"
  source: /note="5' tri-ethylene glycol (TEG)"
  modified_base (2)..(2): 5-methyl modified nucleotide
  modified_base (11)..(11): 5-methyl modified nucleotide
  modified_base (15)..(15): 5-methyl modified nucleotide
  modified_base (16)..(16): 5-methyl modified nucleotide
  source: /note="3' tri-ethylene glycol (TEG)"
ucgguaaguucugucc

SEQ ID NO: 2916 - RNA, 15 nt, Artificial Sequence
  source: /note="Description of Artificial Sequence: Synthetic oligonucleotide"
  source: /note="RNA"
  source: /note="5' tri-ethylene glycol (TEG)"
  modified_base (2)..(2): 5-methyl modified nucleotide
  modified_base (11)..(11): 5-methyl modified nucleotide
  modified_base (15)..(15): 5-methyl modified nucleotide
  source: /note="3' tri-ethylene glycol (TEG)"
ucgguaaguucuguc

SEQ ID NO: 2917 - RNA, 14 nt, Artificial Sequence
  source: /note="Description of Artificial Sequence: Synthetic oligonucleotide"
  source: /note="RNA"
  source: /note="5' tri-ethylene glycol (TEG)"
  modified_base (2)..(2): 5-methyl modified nucleotide
  modified_base (11)..(11): 5-methyl modified nucleotide
  source: /note="3' tri-ethylene glycol (TEG)"
ucgguaaguucugu

SEQ ID NO: 2918 - RNA, 13 nt, Artificial Sequence
  source: /note="Description of Artificial Sequence: Synthetic oligonucleotide"
  source: /note="RNA"
  source: /note="5' tri-ethylene glycol (TEG)"
  modified_base (2)..(2): 5-methyl modified nucleotide
  modified_base (11)..(11): 5-methyl modified nucleotide
  source: /note="3' tri-ethylene glycol (TEG)"
ucgguaaguucug

SEQ ID NO: 2919 - RNA, 12 nt, Artificial Sequence
  source: /note="Description of Artificial Sequence: Synthetic oligonucleotide"
  source: /note="RNA"
  source: /note="5' tri-ethylene glycol (TEG)"
  modified_base (2)..(2): 5-methyl modified nucleotide
  modified_base (11)..(11): 5-methyl modified nucleotide
  source: /note="3' tri-ethylene glycol (TEG)"
ucgguaaguucu

SEQ ID NO: 2920 - RNA, 11 nt, Artificial Sequence
  source: /note="Description of Artificial Sequence: Synthetic oligonucleotide"
  source: /note="RNA"
  source: /note="5' tri-ethylene glycol (TEG)"
  modified_base (2)..(2): 5-methyl modified nucleotide
  modified_base (11)..(11): 5-methyl modified nucleotide
  source: /note="3' tri-ethylene glycol (TEG)"
ucgguaaguuc

SEQ ID NO: 2921 - RNA, 10 nt, Artificial Sequence
  source: /note="Description of Artificial Sequence: Synthetic oligonucleotide"
  source: /note="RNA"
  source: /note="5' tri-ethylene glycol (TEG)"
  modified_base (2)..(2): 5-methyl modified nucleotide
  source: /note="3' tri-ethylene glycol (TEG)"
ucgguaaguu

SEQ ID NO: 2922 - RNA, 9 nt, Artificial Sequence
  source: /note="Description of Artificial Sequence: Synthetic oligonucleotide"
  source: /note="RNA"
  source: /note="5' tri-ethylene glycol (TEG)"
  modified_base (2)..(2): 5-methyl modified nucleotide
  source: /note="3' tri-ethylene glycol (TEG)"
ucgguaagu

SEQ ID NO: 2923 - RNA, 20 nt, Artificial Sequence
  source: /note="Description of Artificial Sequence: Synthetic oligonucleotide"
  source: /note="RNA"
  source: /note="5' tri-ethylene glycol (TEG)"
  modified_base (3)..(3): 5-methyl modified nucleotide
  modified_base (12)..(12): 5-methyl modified nucleotide
  modified_base (16)..(16): 5-methyl modified nucleotide
  modified_base (17)..(17): 5-methyl modified nucleotide
  source: /note="3' tri-ethylene glycol (TEG)"
gucgguaaguucuguccaag

SEQ ID NO: 2924 - RNA, 19 nt, Artificial Sequence
  source: /note="Description of Artificial Sequence: Synthetic oligonucleotide"
  source: /note="RNA"
  source: /note="5' tri-ethylene glycol (TEG)"
  modified_base (3)..(3): 5-methyl modified nucleotide
  modified_base (12)..(12): 5-methyl modified nucleotide
  modified_base (16)..(16): 5-methyl modified nucleotide
  modified_base (17)..(17): 5-methyl modified nucleotide
  source: /note="3' tri-ethylene glycol (TEG)"
gucgguaaguucuguccaa

SEQ ID NO: 2925 - RNA, 18 nt, Artificial Sequence
  source: /note="Description of Artificial Sequence: Synthetic oligonucleotide"
  source: /note="RNA"
  source: /note="5' tri-ethylene glycol (TEG)"
  modified_base (3)..(3): 5-methyl modified nucleotide
  modified_base (12)..(12): 5-methyl modified nucleotide
  modified_base (16)..(16): 5-methyl modified nucleotide
  modified_base (17)..(17): 5-methyl modified nucleotide
  source: /note="3' tri-ethylene glycol (TEG)"
gucgguaaguucugucca

SEQ ID NO: 2926 - RNA, 17 nt, Artificial Sequence
  source: /note="Description of Artificial Sequence: Synthetic oligonucleotide"
  source: /note="RNA"
  source: /note="5' tri-ethylene glycol (TEG)"
  modified_base (3)..(3): 5-methyl modified nucleotide
  modified_base (12)..(12): 5-methyl modified nucleotide
  modified_base (16)..(16): 5-methyl modified nucleotide
  modified_base (17)..(17): 5-methyl modified nucleotide
  source: /note="3' tri-ethylene glycol (TEG)"
gucgguaaguucugucc

SEQ ID NO: 2927 - RNA, 16 nt, Artificial Sequence
  source: /note="Description of Artificial Sequence: Synthetic oligonucleotide"
  source: /note="RNA"
  source: /note="5' tri-ethylene glycol (TEG)"
  modified_base (3)..(3): 5-methyl modified nucleotide
  modified_base (12)..(12): 5-methyl modified nucleotide
  modified_base (16)..(16): 5-methyl modified nucleotide
  source: /note="3' tri-ethylene glycol (TEG)"
gucgguaaguucuguc

SEQ ID NO: 2928 - RNA, 15 nt, Artificial Sequence
  source: /note="Description of Artificial Sequence: Synthetic oligonucleotide"
  source: /note="RNA"
  source: /note="5' tri-ethylene glycol (TEG)"
  modified_base (3)..(3): 5-methyl modified nucleotide
  modified_base (12)..(12): 5-methyl modified nucleotide
  source: /note="3' tri-ethylene glycol (TEG)"
gucgguaaguucugu

SEQ ID NO: 2929 - RNA, 14 nt, Artificial Sequence
  source: /note="Description of Artificial Sequence: Synthetic oligonucleotide"
  source: /note="RNA"
  source: /note="5' tri-ethylene glycol (TEG)"
  modified_base (3)..(3): 5-methyl modified nucleotide
  modified_base (12)..(12): 5-methyl modified nucleotide
  source: /note="3' tri-ethylene glycol (TEG)"
gucgguaaguucug

SEQ ID NO: 2930 - RNA, 13 nt, Artificial Sequence
  source: /note="Description of Artificial Sequence: Synthetic oligonucleotide"
  source: /note="RNA"
  source: /note="5' tri-ethylene glycol (TEG)"
  modified_base (3)..(3): 5-methyl modified nucleotide
  modified_base (12)..(12): 5-methyl modified nucleotide
  source: /note="3' tri-ethylene glycol (TEG)"
gucgguaaguucu

SEQ ID NO: 2931 - RNA, 12 nt, Artificial Sequence
  source: /note="Description of Artificial Sequence: Synthetic oligonucleotide"
  source: /note="RNA"
  source: /note="5' tri-ethylene glycol (TEG)"
  modified_base (3)..(3): 5-methyl modified nucleotide
  modified_base (12)..(12): 5-methyl modified nucleotide
  source: /note="3' tri-ethylene glycol (TEG)"
gucgguaaguuc

SEQ ID NO: 2932 - RNA, 11 nt, Artificial Sequence
  source: /note="Description of Artificial Sequence: Synthetic oligonucleotide"
  source: /note="RNA"
  source: /note="5' tri-ethylene glycol (TEG)"
  modified_base (3)..(3): 5-methyl modified nucleotide
  source: /note="3' tri-ethylene glycol (TEG)"
gucgguaaguu

SEQ ID NO: 2933 - RNA, 10 nt, Artificial Sequence
  source: /note="Description of Artificial Sequence: Synthetic oligonucleotide"
  source: /note="RNA"
  source: /note="5' tri-ethylene glycol (TEG)"
  modified_base (3)..(3): 5-methyl modified nucleotide
  source: /note="3' tri-ethylene glycol (TEG)"
gucgguaagu

SEQ ID NO: 2934 - RNA, 20 nt, Artificial Sequence
  source: /note="Description of Artificial Sequence: Synthetic oligonucleotide"
  source: /note="RNA"
  source: /note="5' tri-ethylene glycol (TEG)"
  modified_base (4)..(4): 5-methyl modified nucleotide
  modified_base (13)..(13): 5-methyl modified nucleotide
  modified_base (17)..(17): 5-methyl modified nucleotide
  modified_base (18)..(18): 5-methyl modified nucleotide
  source: /note="3' tri-ethylene glycol (TEG)"
agucgguaaguucuguccaa

SEQ ID NO: 2935 - RNA, 19 nt, Artificial Sequence
  source: /note="Description of Artificial Sequence: Synthetic oligonucleotide"
  source: /note="RNA"
  source: /note="5' tri-ethylene glycol (TEG)"
  modified_base (4)..(4): 5-methyl modified nucleotide
  modified_base (13)..(13): 5-methyl modified nucleotide
  modified_base (17)..(17): 5-methyl modified nucleotide
  modified_base (18)..(18): 5-methyl modified nucleotide
  source: /note="3' tri-ethylene glycol (TEG)"
agucgguaaguucugucca

SEQ ID NO: 2936 - RNA, 17 nt, Artificial Sequence
  source: /note="Description of Artificial Sequence: Synthetic oligonucleotide"
  source: /note="RNA"
  source: /note="5' tri-ethylene glycol (TEG)"
  modified_base (4)..(4): 5-methyl modified nucleotide
  modified_base (13)..(13): 5-methyl modified nucleotide
  modified_base (17)..(17): 5-methyl modified nucleotide
  source: /note="3' tri-ethylene glycol (TEG)"
agucgguaaguucuguc

SEQ ID NO: 2937 - RNA, 16 nt, Artificial Sequence
  source: /note="Description of Artificial Sequence: Synthetic oligonucleotide"
  source: /note="RNA"
  source: /note="5' tri-ethylene glycol (TEG)"
  modified_base (4)..(4): 5-methyl modified nucleotide
  modified_base (13)..(13): 5-methyl modified nucleotide
  source: /note="3' tri-ethylene glycol (TEG)"
agucgguaaguucugu

SEQ ID NO: 2938 - RNA, 15 nt, Artificial Sequence
  source: /note="Description of Artificial Sequence: Synthetic oligonucleotide"
  source: /note="RNA"
  source: /note="5' tri-ethylene glycol (TEG)"
  modified_base (4)..(4): 5-methyl modified nucleotide
  modified_base (13)..(13): 5-methyl modified nucleotide
  source: /note="3' tri-ethylene glycol (TEG)"
agucgguaaguucug

SEQ ID NO: 2939 - RNA, 14 nt, Artificial Sequence
  source: /note="Description of Artificial Sequence: Synthetic oligonucleotide"
  source: /note="RNA"
  source: /note="5' tri-ethylene glycol (TEG)"
  modified_base (4)..(4): 5-methyl modified nucleotide
  modified_base (13)..(13): 5-methyl modified nucleotide
  source: /note="3' tri-ethylene glycol (TEG)"
agucgguaaguucu

SEQ ID NO: 2940 - RNA, 13 nt, Artificial Sequence
  source: /note="Description of Artificial Sequence: Synthetic oligonucleotide"
  source: /note="RNA"
  source: /note="5' tri-ethylene glycol (TEG)"
  modified_base (4)..(4): 5-methyl modified nucleotide
  modified_base (13)..(13): 5-methyl modified nucleotide
  source: /note="3' tri-ethylene glycol (TEG)"
agucgguaaguuc

SEQ ID NO: 2941 - RNA, 12 nt, Artificial Sequence
  source: /note="Description of Artificial Sequence: Synthetic oligonucleotide"
  source: /note="RNA"
  source: /note="5' tri-ethylene glycol (TEG)"
  modified_base (4)..(4): 5-methyl modified nucleotide
  source: /note="3' tri-ethylene glycol (TEG)"
agucgguaaguu

SEQ ID NO: 2942 - RNA, 11 nt, Artificial Sequence
  source: /note="Description of Artificial Sequence: Synthetic oligonucleotide"
  source: /note="RNA"
  source: /note="5' tri-ethylene glycol (TEG)"
  modified_base (4)..(4): 5-methyl modified nucleotide
  source: /note="3' tri-ethylene glycol (TEG)"
agucgguaagu

SEQ ID NO: 2943 - RNA, 20 nt, Artificial Sequence
  source: /note="Description of Artificial Sequence: Synthetic oligonucleotide"
  source: /note="RNA"
  source: /note="5' tri-ethylene glycol (TEG)"
  modified_base (1)..(1): 5-methyl modified nucleotide
  modified_base (5)..(5): 5-methyl modified nucleotide
  modified_base (14)..(14): 5-methyl modified nucleotide
  modified_base (18)..(18): 5-methyl modified nucleotide
  modified_base (19)..(19): 5-methyl modified nucleotide
  source: /note="3' tri-ethylene glycol (TEG)"
cagucgguaaguucugucca

SEQ ID NO: 2944 - RNA, 19 nt, Artificial Sequence
  source: /note="Description of Artificial Sequence: Synthetic oligonucleotide"
  source: /note="RNA"
  source: /note="5' tri-ethylene glycol (TEG)"
  modified_base (1)..(1): 5-methyl modified nucleotide
  modified_base (5)..(5): 5-methyl modified nucleotide
  modified_base (14)..(14): 5-methyl modified nucleotide
  modified_base (18)..(18): 5-methyl modified nucleotide
  modified_base (19)..(19): 5-methyl modified nucleotide
  source: /note="3' tri-ethylene glycol (TEG)"
cagucgguaaguucugucc

SEQ ID NO: 2945 - RNA, 18 nt, Artificial Sequence
  source: /note="Description of Artificial Sequence: Synthetic oligonucleotide"
  source: /note="RNA"
  source: /note="5' tri-ethylene glycol (TEG)"
  modified_base (1)..(1): 5-methyl modified nucleotide
  modified_base (5)..(5): 5-methyl modified nucleotide
  modified_base (14)..(14): 5-methyl modified nucleotide
  modified_base (18)..(18): 5-methyl modified nucleotide
  source: /note="3' tri-ethylene glycol (TEG)"
cagucgguaaguucuguc

SEQ ID NO: 2946 - RNA, 17 nt, Artificial Sequence
  source: /note="Description of Artificial Sequence: Synthetic oligonucleotide"
  source: /note="RNA"
  source: /note="5' tri-ethylene glycol (TEG)"
  modified_base (1)..(1): 5-methyl modified nucleotide
  modified_base (5)..(5): 5-methyl modified nucleotide
  modified_base (14)..(14): 5-methyl modified nucleotide
  source: /note="3' tri-ethylene glycol (TEG)"
cagucgguaaguucugu

SEQ ID NO: 2947 - RNA, 16 nt, Artificial Sequence
  source: /note="Description of Artificial Sequence: Synthetic oligonucleotide"
  source: /note="RNA"
  source: /note="5' tri-ethylene glycol (TEG)"
  modified_base (1)..(1): 5-methyl modified nucleotide
  modified_base (5)..(5): 5-methyl modified nucleotide
  modified_base (14)..(14): 5-methyl modified nucleotide
  source: /note="3' tri-ethylene glycol (TEG)"
cagucgguaaguucug

SEQ ID NO: 2948 - RNA, 15 nt, Artificial Sequence
  source: /note="Description of Artificial Sequence: Synthetic oligonucleotide"
  source: /note="RNA"
  source: /note="5' tri-ethylene glycol (TEG)"
  modified_base (1)..(1): 5-methyl modified nucleotide
  modified_base (5)..(5): 5-methyl modified nucleotide
  modified_base (14)..(14): 5-methyl modified nucleotide
  source: /note="3' tri-ethylene glycol (TEG)"
cagucgguaaguucu

SEQ ID NO: 2949 - RNA, 14 nt, Artificial Sequence
  source: /note="Description of Artificial Sequence: Synthetic oligonucleotide"
  source: /note="RNA"
  source: /note="5' tri-ethylene glycol (TEG)"
  modified_base (1)..(1): 5-methyl modified nucleotide
  modified_base (5)..(5): 5-methyl modified nucleotide
  modified_base (14)..(14): 5-methyl modified nucleotide
  source: /note="3' tri-ethylene glycol (TEG)"
cagucgguaaguuc

SEQ ID NO: 2950 - RNA, 13 nt, Artificial Sequence
  source: /note="Description of Artificial Sequence: Synthetic oligonucleotide"
  source: /note="RNA"
  source: /note="5' tri-ethylene glycol (TEG)"
  modified_base (1)..(1): 5-methyl modified nucleotide
  modified_base (5)..(5): 5-methyl modified nucleotide
  source: /note="3' tri-ethylene glycol (TEG)"
cagucgguaaguu

SEQ ID NO: 2951 - RNA, 12 nt, Artificial Sequence
  source: /note="Description of Artificial Sequence: Synthetic oligonucleotide"
  source: /note="RNA"
  source: /note="5' tri-ethylene glycol (TEG)"
  modified_base (1)..(1): 5-methyl modified nucleotide
  modified_base (5)..(5): 5-methyl modified nucleotide
  source: /note="3' tri-ethylene glycol (TEG)"
cagucgguaagu

SEQ ID NO: 2952 - RNA, 20 nt, Artificial Sequence
  source: /note="Description of Artificial Sequence: Synthetic oligonucleotide"
  source: /note="RNA"
  source: /note="5' tri-ethylene glycol (TEG)"
  modified_base (1)..(1): 5-methyl modified nucleotide
  modified_base (2)..(2): 5-methyl modified nucleotide
  modified_base (6)..(6): 5-methyl modified nucleotide
  modified_base (15)..(15): 5-methyl modified nucleotide
  modified_base (19)..(19): 5-methyl modified nucleotide
  modified_base (20)..(20): 5-methyl modified nucleotide
  source: /note="3' tri-ethylene glycol (TEG)"
ccagucgguaaguucugucc

SEQ ID NO: 2953 - RNA, 19 nt, Artificial Sequence
  source: /note="Description of Artificial Sequence: Synthetic oligonucleotide"
  source: /note="RNA"
  source: /note="5' tri-ethylene glycol (TEG)"
  modified_base (1)..(1): 5-methyl modified nucleotide
  modified_base (2)..(2): 5-methyl modified nucleotide
  modified_base (6)..(6): 5-methyl modified nucleotide
  modified_base (15)..(15): 5-methyl modified nucleotide
  modified_base (19)..(19): 5-methyl modified nucleotide
  source: /note="3' tri-ethylene glycol (TEG)"
ccagucgguaaguucuguc

SEQ ID NO: 2954 - RNA, 18 nt, Artificial Sequence
  source: /note="Description of Artificial Sequence: Synthetic oligonucleotide"
  source: /note="RNA"
  source: /note="5' tri-ethylene glycol (TEG)"
  modified_base (1)..(1): 5-methyl modified nucleotide
  modified_base (2)..(2): 5-methyl modified nucleotide
  modified_base (6)..(6): 5-methyl modified nucleotide
  modified_base (15)..(15): 5-methyl modified nucleotide
  source: /note="3' tri-ethylene glycol (TEG)"
ccagucgguaaguucugu

SEQ ID NO: 2955 - RNA, 17 nt, Artificial Sequence
  source: /note="Description of Artificial Sequence: Synthetic oligonucleotide"
  source: /note="RNA"
  source: /note="5' tri-ethylene glycol (TEG)"
  modified_base (1)..(1): 5-methyl modified nucleotide
  modified_base (2)..(2): 5-methyl modified nucleotide
  modified_base (6)..(6): 5-methyl modified nucleotide
  modified_base (15)..(15): 5-methyl modified nucleotide
  source: /note="3' tri-ethylene glycol (TEG)"
ccagucgguaaguucug

SEQ ID NO: 2956 - RNA, 16 nt, Artificial Sequence
  source: /note="Description of Artificial Sequence: Synthetic oligonucleotide"
  source: /note="RNA"
  source: /note="5' tri-ethylene glycol (TEG)"
  modified_base (1)..(1): 5-methyl modified nucleotide
  modified_base (2)..(2): 5-methyl modified nucleotide
  modified_base (6)..(6): 5-methyl modified nucleotide
  modified_base (15)..(15): 5-methyl modified nucleotide
  source: /note="3' tri-ethylene glycol (TEG)"
ccagucgguaaguucu

SEQ ID NO: 2957 - RNA, 15 nt, Artificial Sequence
  source: /note="Description of Artificial Sequence: Synthetic oligonucleotide"
  source: /note="RNA"
  source: /note="5' tri-ethylene glycol (TEG)"
  modified_base (1)..(1): 5-methyl modified nucleotide
  modified_base (2)..(2): 5-methyl modified nucleotide
  modified_base (6)..(6): 5-methyl modified nucleotide
  modified_base (15)..(15): 5-methyl modified nucleotide
  source: /note="3' tri-ethylene glycol (TEG)"
ccagucgguaaguuc

SEQ ID NO: 2958 - RNA, 14 nt, Artificial Sequence
  source: /note="Description of Artificial Sequence: Synthetic oligonucleotide"
  source: /note="RNA"
  source: /note="5' tri-ethylene glycol (TEG)"
  modified_base (1)..(1): 5-methyl modified nucleotide
  modified_base (2)..(2): 5-methyl modified nucleotide
  modified_base (6)..(6): 5-methyl modified nucleotide
  source: /note="3' tri-ethylene glycol (TEG)"
ccagucgguaaguu

SEQ ID NO: 2959 - RNA, 13 nt, Artificial Sequence
  source: /note="Description of Artificial Sequence: Synthetic oligonucleotide"
  source: /note="RNA"
  source: /note="5' tri-ethylene glycol (TEG)"
  modified_base (1)..(1): 5-methyl modified nucleotide
  modified_base (2)..(2): 5-methyl modified nucleotide
  modified_base (6)..(6): 5-methyl modified nucleotide
  source: /note="3' tri-ethylene glycol (TEG)"
ccagucgguaagu

SEQ ID NO: 2960 - RNA, 20 nt, Artificial Sequence
  source: /note="Description of Artificial Sequence: Synthetic oligonucleotide"
  source: /note="RNA"
  source: /note="5' tri-ethylene glycol (TEG)"
  modified_base (2)..(2): 5-methyl modified nucleotide
  modified_base (3)..(3): 5-methyl modified nucleotide
  modified_base (7)..(7): 5-methyl modified nucleotide
  modified_base (16)..(16): 5-methyl modified nucleotide
  modified_base (20)..(20): 5-methyl modified nucleotide
  source: /note="3' tri-ethylene glycol (TEG)"
gccagucgguaaguucuguc

SEQ ID NO: 2961 - RNA, 19 nt, Artificial Sequence
  source: /note="Description of Artificial Sequence: Synthetic oligonucleotide"
  source: /note="RNA"
  source: /note="5' tri-ethylene glycol (TEG)"
  modified_base (2)..(2): 5-methyl modified nucleotide
  modified_base (3)..(3): 5-methyl modified nucleotide
  modified_base (7)..(7): 5-methyl modified nucleotide
  modified_base (16)..(16): 5-methyl modified nucleotide
  source: /note="3' tri-ethylene glycol (TEG)"
gccagucgguaaguucugu

SEQ ID NO: 2962 - RNA, 18 nt, Artificial Sequence
  source: /note="Description of Artificial Sequence: Synthetic oligonucleotide"
  source: /note="RNA"
  source: /note="5' tri-ethylene glycol (TEG)"
  modified_base (2)..(2): 5-methyl modified nucleotide
  modified_base (3)..(3): 5-methyl modified nucleotide
  modified_base (7)..(7): 5-methyl modified nucleotide
  modified_base (16)..(16): 5-methyl modified nucleotide
  source: /note="3' tri-ethylene glycol (TEG)"
gccagucgguaaguucug

SEQ ID NO: 2963 - RNA, 17 nt, Artificial Sequence
  source: /note="Description of Artificial Sequence: Synthetic oligonucleotide"
  source: /note="RNA"
  source: /note="5' tri-ethylene glycol (TEG)"
  modified_base (2)..(2): 5-methyl modified nucleotide
  modified_base (3)..(3): 5-methyl modified nucleotide
  modified_base (7)..(7): 5-methyl modified nucleotide
  modified_base (16)..(16): 5-methyl modified nucleotide
  source: /note="3' tri-ethylene glycol (TEG)"
gccagucgguaaguucu

SEQ ID NO: 2964 - RNA, 16 nt, Artificial Sequence
  source: /note="Description of Artificial Sequence: Synthetic oligonucleotide"
  source: /note="RNA"
  source: /note="5' tri-ethylene glycol (TEG)"
  modified_base (2)..(2): 5-methyl modified nucleotide
  modified_base (3)..(3): 5-methyl modified nucleotide
  modified_base (7)..(7): 5-methyl modified nucleotide
  modified_base (16)..(16): 5-methyl modified nucleotide
  source: /note="3' tri-ethylene glycol (TEG)"
gccagucgguaaguuc

SEQ ID NO: 2965 - RNA, 15 nt, Artificial Sequence
  source: /note="Description of Artificial Sequence: Synthetic oligonucleotide"
  source: /note="RNA"
  source: /note="5' tri-ethylene glycol (TEG)"
  modified_base (2)..(2): 5-methyl modified nucleotide
  modified_base (3)..(3): 5-methyl modified nucleotide
  modified_base (7)..(7): 5-methyl modified nucleotide
  source: /note="3' tri-ethylene glycol (TEG)"
gccagucgguaaguu

SEQ ID NO: 2966 - RNA, 14 nt, Artificial Sequence
  source: /note="Description of Artificial Sequence: Synthetic oligonucleotide"
  source: /note="RNA"
  source: /note="5' tri-ethylene glycol (TEG)"
  modified_base (2)..(2): 5-methyl modified nucleotide
  modified_base (3)..(3): 5-methyl modified nucleotide
  modified_base (7)..(7): 5-methyl modified nucleotide
  source: /note="3' tri-ethylene glycol (TEG)"
gccagucgguaagu

SEQ ID NO: 2967 - RNA, 20 nt, Artificial Sequence
  source: /note="Description of Artificial Sequence: Synthetic oligonucleotide"
  source: /note="RNA"
  source: /note="5' tri-ethylene glycol (TEG)"
  modified_base (2)..(2): 5-methyl modified nucleotide
  modified_base (14)..(14): 5-methyl modified nucleotide
  modified_base (19)..(19): 5-methyl modified nucleotide
  source: /note="3' tri-ethylene glycol (TEG)"
ucaaggaagauggcauuucu

SEQ ID NO: 2968 - RNA, 22 nt, Artificial Sequence
  source: /note="Description of Artificial Sequence: Synthetic oligonucleotide"
  source: /note="RNA"
  source: /note="5' tri-ethylene glycol (TEG)"
  modified_base (2)..(2): 5-methyl modified nucleotide
  modified_base (14)..(14): 5-methyl modified nucleotide
  modified_base (19)..(19): 5-methyl modified nucleotide
  source: /note="3' tri-ethylene glycol (TEG)"
ucaaggaagauggcauuucuag

SEQ ID NO: 2969 - RNA, 16 nt, Artificial Sequence
  source: /note="Description of Artificial Sequence: Synthetic oligonucleotide"
  source: /note="RNA"
  source: /note="5' tri-ethylene glycol (TEG)"
  modified_base (2)..(2): 5-methyl modified nucleotide
  modified_base (14)..(14): 5-methyl modified nucleotide
  source: /note="3' tri-ethylene glycol (TEG)"
ucaaggaagauggcau

SEQ ID NO: 2970 - RNA, 15 nt, Artificial Sequence
  source: /note="Description of Artificial Sequence: Synthetic oligonucleotide"
  source: /note="RNA"
  source: /note="5' tri-ethylene glycol (TEG)"
  modified_base (9)..(9): 5-methyl modified nucleotide
  modified_base (14)..(14): 5-methyl modified nucleotide
  source: /note="3' tri-ethylene glycol (TEG)"
gaagauggcauuucu

SEQ ID NO: 2971 - RNA, 21 nt, Artificial Sequence
  source: /note="Description of Artificial Sequence: Synthetic oligonucleotide"
  source: /note="RNA"
  source: /note="5' tri-ethylene glycol (TEG)"
  modified_base (2)..(2): 5-methyl modified nucleotide
  modified_base (14)..(14): 5-methyl modified nucleotide
  modified_base (19)..(19): 5-methyl modified nucleotide
  source: /note="3' tri-ethylene glycol (TEG)"
ucaaggaagauggcauuucua

SEQ ID NO: 2972 - RNA, 19 nt, Artificial Sequence
  source: /note="Description of Artificial Sequence: Synthetic oligonucleotide"
  source: /note="RNA"
  source: /note="5' tri-ethylene glycol (TEG)"
  modified_base (2)..(2): 5-methyl modified nucleotide
  modified_base (14)..(14): 5-methyl modified nucleotide
  modified_base (19)..(19): 5-methyl modified nucleotide
  source: /note="3' tri-ethylene glycol (TEG)"
ucaaggaagauggcauuuc

SEQ ID NO: 2973 - RNA, 18 nt, Artificial Sequence
  source: /note="Description of Artificial Sequence: Synthetic oligonucleotide"
  source: /note="RNA"
  source: /note="5' tri-ethylene glycol (TEG)"
  modified_base (2)..(2): 5-methyl modified nucleotide
  modified_base (14)..(14): 5-methyl modified nucleotide
  source: /note="3' tri-ethylene glycol (TEG)"
ucaaggaagauggcauuu

SEQ ID NO: 2974 - RNA, 17 nt, Artificial Sequence
  source: /note="Description of Artificial Sequence: Synthetic oligonucleotide"
  source: /note="RNA"
  source: /note="5' tri-ethylene glycol (TEG)"
  modified_base (2)..(2): 5-methyl modified nucleotide
  modified_base (14)..(14): 5-methyl modified nucleotide
  source: /note="3' tri-ethylene glycol (TEG)"
ucaaggaagauggcauu

SEQ ID NO: 2975 - RNA, 15 nt, Artificial Sequence
  source: /note="Description of Artificial Sequence: Synthetic oligonucleotide"
  source: /note="RNA"
  source: /note="5' tri-ethylene glycol (TEG)"
  modified_base (2)..(2): 5-methyl modified nucleotide
  modified_base (14)..(14): 5-methyl modified nucleotide
  source: /note="3' tri-ethylene glycol (TEG)"
ucaaggaagauggca

SEQ ID NO: 2976 - RNA, 14 nt, Artificial Sequence
  source: /note="Description of Artificial Sequence: Synthetic oligonucleotide"
  source: /note="RNA"
  source: /note="5' tri-ethylene glycol (TEG)"
  modified_base (2)..(2): 5-methyl modified nucleotide
  modified_base (14)..(14): 5-methyl modified nucleotide
  source: /note="3' tri-ethylene glycol (TEG)"
ucaaggaagauggc

SEQ ID NO: 2977 - RNA, 13 nt, Artificial Sequence
  source: /note="Description of Artificial Sequence: Synthetic oligonucleotide"
  source: /note="RNA"
  source: /note="5' tri-ethylene glycol (TEG)"
  modified_base (2)..(2): 5-methyl modified nucleotide
  source: /note="3' tri-ethylene glycol (TEG)"
ucaaggaagaugg

SEQ ID NO: 2978 - RNA, 12 nt, Artificial Sequence
  source: /note="Description of Artificial Sequence: Synthetic oligonucleotide"
  source: /note="RNA"
  source: /note="5' tri-ethylene glycol (TEG)"
  modified_base (2)..(2): 5-methyl modified nucleotide
  source: /note="3' tri-ethylene glycol (TEG)"
ucaaggaagaug

SEQ ID NO: 2979 - RNA, 11 nt, Artificial Sequence
  source: /note="Description of Artificial Sequence: Synthetic oligonucleotide"
  source: /note="RNA"
  source: /note="5' tri-ethylene glycol (TEG)"
  modified_base (2)..(2): 5-methyl modified nucleotide
  source: /note="3' tri-ethylene glycol (TEG)"
ucaaggaagau

SEQ ID NO: 2980 - RNA, 10 nt, Artificial Sequence
  source: /note="Description of Artificial Sequence: Synthetic oligonucleotide"
  source: /note="RNA"
  source: /note="5' tri-ethylene glycol (TEG)"
  modified_base (2)..(2): 5-methyl modified nucleotide
  source: /note="3' tri-ethylene glycol (TEG)"
ucaaggaaga

SEQ ID NO: 2981 - RNA, 9 nt, Artificial Sequence
  source: /note="Description of Artificial Sequence: Synthetic oligonucleotide"
  source: /note="RNA"
  source: /note="5' tri-ethylene glycol (TEG)"
  modified_base (2)..(2): 5-methyl modified nucleotide
  source: /note="3' tri-ethylene glycol (TEG)"
ucaaggaag

SEQ ID NO: 2982 - RNA, 21 nt, Artificial Sequence
  source: /note="Description of Artificial Sequence: Synthetic oligonucleotide"
  source: /note="RNA"
  source: /note="5' tri-ethylene glycol (TEG)"
  modified_base (1)..(1): 5-methyl modified nucleotide
  modified_base (13)..(13): 5-methyl modified nucleotide
  modified_base (18)..(18): 5-methyl modified nucleotide
  source: /note="3' tri-ethylene glycol (TEG)"
caaggaagauggcauuucuag

SEQ ID NO: 2983 - RNA, 20 nt, Artificial Sequence
  source: /note="Description of Artificial Sequence: Synthetic oligonucleotide"
  source: /note="RNA"
  source: /note="5' tri-ethylene glycol (TEG)"
  modified_base (1)..(1): 5-methyl modified nucleotide
  modified_base (13)..(13): 5-methyl modified nucleotide
  modified_base (18)..(18): 5-methyl modified nucleotide
  source: /note="3' tri-ethylene glycol (TEG)"
caaggaagauggcauuucua

SEQ ID NO: 2984 - RNA, 19 nt, Artificial Sequence
  source: /note="Description of Artificial Sequence: Synthetic oligonucleotide"
  source: /note="RNA"
  source: /note="5' tri-ethylene glycol (TEG)"
  modified_base (1)..(1): 5-methyl modified nucleotide
  modified_base (13)..(13): 5-methyl modified nucleotide
  modified_base (18)..(18): 5-methyl modified nucleotide
  source: /note="3' tri-ethylene glycol (TEG)"
caaggaagauggcauuucu

SEQ ID NO: 2985 - RNA, 18 nt, Artificial Sequence
  source: /note="Description of Artificial Sequence: Synthetic oligonucleotide"
  source: /note="RNA"
  source: /note="5' tri-ethylene glycol (TEG)"
  modified_base (1)..(1): 5-methyl modified nucleotide
  modified_base (13)..(13): 5-methyl modified nucleotide
  modified_base (18)..(18): 5-methyl modified nucleotide
  source: /note="3' tri-ethylene glycol (TEG)"
caaggaagauggcauuuc

SEQ ID NO: 2986 - RNA, 17 nt, Artificial Sequence
  source: /note="Description of Artificial Sequence: Synthetic oligonucleotide"
  source: /note="RNA"
  source: /note="5' tri-ethylene glycol (TEG)"
  modified_base (1)..(1): 5-methyl modified nucleotide
  modified_base (13)..(13): 5-methyl modified nucleotide
  source: /note="3' tri-ethylene glycol (TEG)"
caaggaagauggcauuu

SEQ ID NO: 2987 - RNA, 16 nt, Artificial Sequence
  source: /note="Description of Artificial Sequence: Synthetic oligonucleotide"
  source: /note="RNA"
  source: /note="5' tri-ethylene glycol (TEG)"
  modified_base (1)..(1): 5-methyl modified nucleotide
  modified_base (13)..(13): 5-methyl modified nucleotide
  source: /note="3' tri-ethylene glycol (TEG)"
caaggaagauggcauu

SEQ ID NO: 2988 - RNA, 15 nt, Artificial Sequence
  source: /note="Description of Artificial Sequence: Synthetic oligonucleotide"
  source: /note="RNA"
  source: /note="5' tri-ethylene glycol (TEG)"
  modified_base (1)..(1): 5-methyl modified nucleotide
  modified_base (13)..(13): 5-methyl modified nucleotide
  source: /note="3' tri-ethylene glycol (TEG)"
caaggaagauggcau

SEQ ID NO: 2989 - RNA, 14 nt, Artificial Sequence
  source: /note="Description of Artificial Sequence: Synthetic oligonucleotide"
  source: /note="RNA"
  source: /note="5' tri-ethylene glycol (TEG)"
  modified_base (1)..(1): 5-methyl modified nucleotide
  modified_base (13)..(13): 5-methyl modified nucleotide
  source: /note="3' tri-ethylene glycol (TEG)"
caaggaagauggca

SEQ ID NO: 2990 - RNA, 13 nt, Artificial Sequence
  source: /note="Description of Artificial Sequence: Synthetic oligonucleotide"
  source: /note="RNA"
  source: /note="5' tri-ethylene glycol (TEG)"
  modified_base (1)..(1): 5-methyl modified nucleotide
  modified_base (13)..(13): 5-methyl modified nucleotide
  source: /note="3' tri-ethylene glycol (TEG)"
caaggaagauggc

SEQ ID NO: 2991 - RNA, 12 nt, Artificial Sequence
  source: /note="Description of Artificial Sequence: Synthetic oligonucleotide"
  source: /note="RNA"
  source: /note="5' tri-ethylene glycol (TEG)"
  modified_base (1)..(1): 5-methyl modified nucleotide
  source: /note="3' tri-ethylene glycol (TEG)"
caaggaagaugg

SEQ ID NO: 2992 - RNA, 11 nt, Artificial Sequence
  source: /note="Description of Artificial Sequence: Synthetic oligonucleotide"
  source: /note="RNA"
  source: /note="5' tri-ethylene glycol (TEG)"
  modified_base (1)..(1): 5-methyl modified nucleotide
  source: /note="3' tri-ethylene glycol (TEG)"
caaggaagaug

SEQ ID NO: 2993 - RNA, 10 nt, Artificial Sequence
  source: /note="Description of Artificial Sequence: Synthetic oligonucleotide"
  source: /note="RNA"
  source: /note="5' tri-ethylene glycol (TEG)"
  modified_base (1)..(1): 5-methyl modified nucleotide
  source: /note="3' tri-ethylene glycol (TEG)"
caaggaagau

SEQ ID NO: 2994 - RNA, 9 nt, Artificial Sequence
  source: /note="Description of Artificial Sequence: Synthetic oligonucleotide"
  source: /note="RNA/Antisense Oligonucleotide"
  source: /note="5' tri-ethylene glycol (TEG)"
  modified_base (1)..(1): 5-methyl modified nucleotide
  source: /note="3' tri-ethylene glycol (TEG)"
caaggaaga

SEQ ID NO: 2995 - RNA, 8 nt, Artificial Sequence
  source: /note="Description of Artificial Sequence: Synthetic oligonucleotide"
  source: /note="RNA/Antisense Oligonucleotide"
  source: /note="5' tri-ethylene glycol (TEG)"
  modified_base (1)..(1): 5-methyl modified nucleotide
  source: /note="3' tri-ethylene glycol (TEG)"
caaggaag

SEQ ID NO: 2996 - RNA, 20 nt, Artificial Sequence
  source: /note="Description of Artificial Sequence: Synthetic oligonucleotide"
  source: /note="RNA"
  source: /note="5' tri-ethylene glycol (TEG)"
  modified_base (12)..(12): 5-methyl modified nucleotide
  modified_base (17)..(17): 5-methyl modified nucleotide
  source: /note="3' tri-ethylene glycol (TEG)"
aaggaagauggcauuucuag

SEQ ID NO: 2997 - RNA, 19 nt, Artificial Sequence
  source: /note="Description of Artificial Sequence: Synthetic oligonucleotide"
  source: /note="RNA"
  source: /note="5' tri-ethylene glycol (TEG)"
  modified_base (12)..(12): 5-methyl modified nucleotide
  modified_base (17)..(17): 5-methyl modified nucleotide
  source: /note="3' tri-ethylene glycol (TEG)"
aaggaagauggcauuucua

SEQ ID NO: 2998 - RNA, 18 nt, Artificial Sequence
  source: /note="Description of Artificial Sequence: Synthetic oligonucleotide"
  source: /note="RNA"
  source: /note="5' tri-ethylene glycol (TEG)"
  modified_base (12)..(12): 5-methyl modified nucleotide
  modified_base (17)..(17): 5-methyl modified nucleotide
  source: /note="3' tri-ethylene glycol (TEG)"
aaggaagauggcauuucu

SEQ ID NO: 2999 - RNA, 17 nt, Artificial Sequence
  source: /note="Description of Artificial Sequence: Synthetic oligonucleotide"
  source: /note="RNA"
  source: /note="5' tri-ethylene glycol (TEG)"
  modified_base (12)..(12): 5-methyl modified nucleotide
  modified_base (17)..(17): 5-methyl modified nucleotide
  source: /note="3' tri-ethylene glycol (TEG)"
aaggaagauggcauuuc

SEQ ID NO: 3000 - RNA, 16 nt, Artificial Sequence
  source: /note="Description of Artificial Sequence: Synthetic oligonucleotide"
  source: /note="RNA"
  source: /note="5' tri-ethylene glycol (TEG)"
  modified_base (12)..(12): 5-methyl modified nucleotide
  source: /note="3' tri-ethylene glycol (TEG)"
aaggaagauggcauuu

SEQ ID NO: 3001 - RNA, 15 nt, Artificial Sequence
  source: /note="Description of Artificial Sequence: Synthetic oligonucleotide"
  source: /note="RNA"
  source: /note="5' tri-ethylene glycol (TEG)"
  modified_base (12)..(12): 5-methyl modified nucleotide
  source: /note="3' tri-ethylene glycol (TEG)"
aaggaagauggcauu

SEQ ID NO: 3002 - RNA, 14 nt, Artificial Sequence
  source: /note="Description of Artificial Sequence: Synthetic oligonucleotide"
  source: /note="RNA"
  source: /note="5' tri-ethylene glycol (TEG)"
  modified_base (12)..(12): 5-methyl modified nucleotide
  source: /note="3' tri-ethylene glycol (TEG)"
aaggaagauggcau

SEQ ID NO: 3003 - RNA, 13 nt, Artificial Sequence
  source: /note="Description of Artificial Sequence: Synthetic oligonucleotide"
  source: /note="RNA"
  source: /note="5' tri-ethylene glycol (TEG)"
  modified_base (12)..(12): 5-methyl modified nucleotide
  source: /note="3' tri-ethylene glycol (TEG)"
aaggaagauggca

SEQ ID NO: 3004 - RNA, 12 nt, Artificial Sequence
  source: /note="Description of Artificial Sequence: Synthetic oligonucleotide"
  source: /note="RNA"
  source: /note="5' tri-ethylene glycol (TEG)"
  modified_base (12)..(12): 5-methyl modified nucleotide
  source: /note="3' tri-ethylene glycol (TEG)"
aaggaagauggc

SEQ ID NO: 3005 - RNA, 11 nt, Artificial Sequence
  source: /note="Description of Artificial Sequence: Synthetic oligonucleotide"
  source: /note="Antisense Oligonucleotide"
  source: /note="5' tri-ethylene glycol (TEG)"
  source: /note="3' tri-ethylene glycol (TEG)"
aaggaagaugg

SEQ ID NO: 3006 - RNA, 10 nt, Artificial Sequence
  source: /note="Description of Artificial Sequence: Synthetic oligonucleotide"
  source: /note="Antisense Oligonucleotide"
  source: /note="5' tri-ethylene glycol (TEG)"
  source: /note="3' tri-ethylene glycol (TEG)"
aaggaagaug

SEQ ID NO: 3007 - RNA, 9 nt, Artificial Sequence
  source: /note="Description of Artificial Sequence: Synthetic oligonucleotide"
  source: /note="Antisense Oligonucleotide"
  source: /note="5' tri-ethylene glycol (TEG)"
  source: /note="3' tri-ethylene glycol (TEG)"
aaggaagau

SEQ ID NO: 3008 - RNA, 8 nt, Artificial Sequence
  source: /note="Description of Artificial Sequence: Synthetic oligonucleotide"
  source: /note="RNA/Antisense Oligonucleotide"
  source: /note="5' tri-ethylene glycol (TEG)"
  source: /note="3' tri-ethylene glycol (TEG)"
aaggaaga

SEQ ID NO: 3009 - RNA, 19 nt, Artificial Sequence
  source: /note="Description of Artificial Sequence: Synthetic oligonucleotide"
  source: /note="RNA"
  source: /note="5' tri-ethylene glycol (TEG)"
  modified_base (11)..(11): 5-methyl modified nucleotide
  modified_base (16)..(16): 5-methyl modified nucleotide
  source: /note="3' tri-ethylene glycol (TEG)"
aggaagauggcauuucuag

SEQ ID NO: 3010 - RNA, 18 nt, Artificial Sequence
  source: /note="Description of Artificial Sequence: Synthetic oligonucleotide"
  source: /note="RNA"
  source: /note="5' tri-ethylene glycol (TEG)"
  modified_base (11)..(11): 5-methyl modified nucleotide
  modified_base (16)..(16): 5-methyl modified nucleotide
  source: /note="3' tri-ethylene glycol (TEG)"
aggaagauggcauuucua

SEQ ID NO: 3011 - RNA, 17 nt, Artificial Sequence
  source: /note="Description of Artificial Sequence: Synthetic oligonucleotide"
  source: /note="RNA"
  source: /note="5' tri-ethylene glycol (TEG)"
  modified_base (11)..(11): 5-methyl modified nucleotide
  modified_base (16)..(16): 5-methyl modified nucleotide
  source: /note="3' tri-ethylene glycol (TEG)"
aggaagauggcauuucu

SEQ ID NO: 3012 - RNA, 16 nt, Artificial Sequence
  source: /note="Description of Artificial Sequence: Synthetic oligonucleotide"
  source: /note="RNA"
  source: /note="5' tri-ethylene glycol (TEG)"
  modified_base (11)..(11): 5-methyl modified nucleotide
  modified_base (16)..(16): 5-methyl modified nucleotide
  source: /note="3' tri-ethylene glycol (TEG)"
aggaagauggcauuuc

SEQ ID NO: 3013 - RNA, 15 nt, Artificial Sequence
  source: /note="Description of Artificial Sequence: Synthetic oligonucleotide"
  source: /note="RNA"
  source: /note="5' tri-ethylene glycol (TEG)"
  modified_base (11)..(11): 5-methyl modified nucleotide
  source: /note="3' tri-ethylene glycol (TEG)"
aggaagauggcauuu

SEQ ID NO: 3014 - RNA, 14 nt, Artificial Sequence
  source: /note="Description of Artificial Sequence: Synthetic oligonucleotide"
  source: /note="RNA"
  source: /note="5' tri-ethylene glycol (TEG)"
  modified_base (11)..(11): 5-methyl modified nucleotide
  source: /note="3' tri-ethylene glycol (TEG)"
aggaagauggcauu

SEQ ID NO: 3015 - RNA, 13 nt, Artificial Sequence
  source: /note="Description of Artificial Sequence: Synthetic oligonucleotide"
  source: /note="RNA"
  source: /note="5' tri-ethylene glycol (TEG)"
  modified_base (11)..(11): 5-methyl modified nucleotide
  source: /note="3' tri-ethylene glycol (TEG)"
aggaagauggcau

SEQ ID NO: 3016 - RNA, 12 nt, Artificial Sequence
  source: /note="Description of Artificial Sequence: Synthetic oligonucleotide"
  source: /note="RNA"
  source: /note="5' tri-ethylene glycol (TEG)"
  modified_base (11)..(11): 5-methyl modified nucleotide
  source: /note="3' tri-ethylene glycol (TEG)"
aggaagauggca

SEQ ID NO: 3017 - RNA, 10 nt, Artificial Sequence
  source: /note="Description of Artificial Sequence: Synthetic oligonucleotide"
  source: /note="Antisense Oligonucleotide"
  source: /note="5' tri-ethylene glycol (TEG)"
  source: /note="3' tri-ethylene glycol (TEG)"
aggaagaugg

SEQ ID NO: 3018 - RNA, 9 nt, Artificial Sequence
  source: /note="Description of Artificial Sequence: Synthetic oligonucleotide"
  source: /note="Antisense Oligonucleotide"
  source: /note="5' tri-ethylene glycol (TEG)"
  source: /note="3' tri-ethylene glycol (TEG)"
aggaagaug

SEQ ID NO: 3019 - RNA, 8 nt, Artificial Sequence
  source: /note="Description of Artificial Sequence: Synthetic oligonucleotide"
  source: /note="Antisense Oligonucleotide"
  source: /note="5' tri-ethylene glycol (TEG)"
  source: /note="3' tri-ethylene glycol (TEG)"
aggaagau

SEQ ID NO: 3020 - RNA, 18 nt, Artificial Sequence
  source: /note="Description of Artificial Sequence: Synthetic oligonucleotide"
  source: /note="RNA"
  source: /note="5' tri-ethylene glycol (TEG)"
  modified_base (10)..(10): 5-methyl modified nucleotide
  modified_base (15)..(15): 5-methyl modified nucleotide
  source: /note="3' tri-ethylene glycol (TEG)"
ggaagauggcauuucuag

SEQ ID NO: 3021 - RNA, 17 nt, Artificial Sequence
  source: /note="Description of Artificial Sequence: Synthetic oligonucleotide"
  source: /note="RNA"
  source: /note="5' tri-ethylene glycol (TEG)"
  modified_base (10)..(10): 5-methyl modified nucleotide
  modified_base (15)..(15): 5-methyl modified nucleotide
  source: /note="3' tri-ethylene glycol (TEG)"
ggaagauggcauuucua

SEQ ID NO: 3022 - RNA, 16 nt, Artificial Sequence
  source: /note="Description of Artificial Sequence: Synthetic oligonucleotide"
  source: /note="RNA"
  source: /note="5' tri-ethylene glycol (TEG)"
  modified_base (10)..(10): 5-methyl modified nucleotide
  modified_base (15)..(15): 5-methyl modified nucleotide
  source: /note="3' tri-ethylene glycol (TEG)"
ggaagauggcauuucu

SEQ ID NO: 3023 - RNA, 15 nt, Artificial Sequence
  source: /note="Description of Artificial Sequence: Synthetic oligonucleotide"
  source: /note="RNA"
  source: /note="5' tri-ethylene glycol (TEG)"
  modified_base (10)..(10): 5-methyl modified nucleotide
  modified_base (15)..(15): 5-methyl modified nucleotide
  source: /note="3' tri-ethylene glycol (TEG)"
ggaagauggcauuuc

SEQ ID NO: 3024 - RNA, 14 nt, Artificial Sequence
  source: /note="Description of Artificial Sequence: Synthetic oligonucleotide"
  source: /note="RNA"
  source: /note="5' tri-ethylene glycol (TEG)"
  modified_base (10)..(10): 5-methyl modified nucleotide
  source: /note="3' tri-ethylene glycol (TEG)"
ggaagauggcauuu

SEQ ID NO: 3025 - RNA, 13 nt, Artificial Sequence
  source: /note="Description of Artificial Sequence: Synthetic oligonucleotide"
  source: /note="RNA"
  source: /note="5' tri-ethylene glycol (TEG)"
  modified_base (10)..(10): 5-methyl modified nucleotide
  source: /note="3' tri-ethylene glycol (TEG)"
ggaagauggcauu

SEQ ID NO: 3026 - RNA, 12 nt, Artificial Sequence
  source: /note="Description of Artificial Sequence: Synthetic oligonucleotide"
  source: /note="RNA"
  source: /note="5' tri-ethylene glycol (TEG)"
  modified_base (10)..(10): 5-methyl modified nucleotide
  source: /note="3' tri-ethylene glycol (TEG)"
ggaagauggcau

SEQ ID NO: 3027 - RNA, 11 nt, Artificial Sequence
  source: /note="Description of Artificial Sequence: Synthetic oligonucleotide"
  source: /note="RNA"
  source: /note="5' tri-ethylene glycol (TEG)"
  modified_base (10)..(10): 5-methyl modified nucleotide
  source: /note="3' tri-ethylene glycol (TEG)"
ggaagauggca

SEQ ID NO: 3028 - RNA, 10 nt, Artificial Sequence
  source: /note="Description of Artificial Sequence: Synthetic oligonucleotide"
  source: /note="RNA"
  source: /note="5' tri-ethylene glycol (TEG)"
  modified_base (10)..(10): 5-methyl modified nucleotide
  source: /note="3' tri-ethylene glycol (TEG)"
ggaagauggc

SEQ ID NO: 3029 - RNA, 8 nt, Artificial Sequence
  source: /note="Description of Artificial Sequence: Synthetic oligonucleotide"
  source: /note="Antisense Oligonucleotide"
  source: /note="5' tri-ethylene glycol (TEG)"
  source: /note="3' tri-ethylene glycol (TEG)"
ggaagaug

SEQ ID NO: 3030 - RNA, 17 nt, Artificial Sequence
  source: /note="Description of Artificial Sequence: Synthetic oligonucleotide"
  source: /note="RNA"
  source: /note="5' tri-ethylene glycol (TEG)"
  modified_base (9)..(9): 5-methyl modified nucleotide
  modified_base (14)..(14): 5-methyl modified nucleotide
  source: /note="3' tri-ethylene glycol (TEG)"
gaagauggcauuucuag

SEQ ID NO: 3031 - RNA, 16 nt, Artificial Sequence
  source: /note="Description of Artificial Sequence: Synthetic oligonucleotide"
  source: /note="RNA"
  source: /note="5' tri-ethylene glycol (TEG)"
  modified_base (9)..(9): 5-methyl modified nucleotide
  modified_base (14)..(14): 5-methyl modified nucleotide
  source: /note="3' tri-ethylene glycol (TEG)"
gaagauggcauuucua

SEQ ID NO: 3032 - RNA, 14 nt, Artificial Sequence
  source: /note="Description of Artificial Sequence: Synthetic oligonucleotide"
  source: /note="RNA"
  source: /note="5' tri-ethylene glycol (TEG)"
  modified_base (9)..(9): 5-methyl modified nucleotide
  modified_base (14)..(14): 5-methyl modified nucleotide
  source: /note="3' tri-ethylene glycol (TEG)"
gaagauggcauuuc

SEQ ID NO: 3033 - RNA, 13 nt, Artificial Sequence
  source: /note="Description of Artificial Sequence: Synthetic oligonucleotide"
  source: /note="RNA"
  source: /note="5' tri-ethylene glycol (TEG)"
  modified_base (9)..(9): 5-methyl modified nucleotide
  source: /note="3' tri-ethylene glycol (TEG)"
gaagauggcauuu

SEQ ID NO: 3034 - RNA, 12 nt, Artificial Sequence
  source: /note="Description of Artificial Sequence: Synthetic oligonucleotide"
  source: /note="RNA"
  source: /note="5' tri-ethylene glycol (TEG)"
  modified_base (9)..(9): 5-methyl modified nucleotide
  source: /note="3' tri-ethylene glycol (TEG)"
gaagauggcauu

SEQ ID NO: 3035 - RNA, 11 nt, Artificial Sequence
  source: /note="Description of Artificial Sequence: Synthetic oligonucleotide"
  source: /note="RNA"
  source: /note="5' tri-ethylene glycol (TEG)"
  modified_base (9)..(9): 5-methyl modified nucleotide
  source: /note="3' tri-ethylene glycol (TEG)"
gaagauggcau

SEQ ID NO: 3036 - RNA, 10 nt, Artificial Sequence
  source: /note="Description of Artificial Sequence: Synthetic oligonucleotide"
  source: /note="RNA"
  source: /note="5' tri-ethylene glycol (TEG)"
  modified_base (9)..(9): 5-methyl modified nucleotide
  source: /note="3' tri-ethylene glycol (TEG)"
gaagauggca

SEQ ID NO: 3037 - RNA, 9 nt, Artificial Sequence
  source: /note="Description of Artificial Sequence: Synthetic oligonucleotide"
  source: /note="RNA"
  source: /note="5' tri-ethylene glycol (TEG)"
  modified_base (9)..(9): 5-methyl modified nucleotide
  source: /note="3' tri-ethylene glycol (TEG)"
gaagauggc

SEQ ID NO: 3038 - RNA, 8 nt, Artificial Sequence
  source: /note="Description of Artificial Sequence: Synthetic oligonucleotide"
  source: /note="Antisense Oligonucleotide"
  source: /note="5' tri-ethylene glycol (TEG)"
  source: /note="3' tri-ethylene glycol (TEG)"
gaagaugg

SEQ ID NO: 3039 - RNA, 16 nt, Artificial Sequence
  source: /note="Description of Artificial Sequence: Synthetic oligonucleotide"
  source: /note="RNA"
  source: /note="5' tri-ethylene glycol (TEG)"
  modified_base (8)..(8): 5-methyl modified nucleotide
  modified_base (13)..(13): 5-methyl modified nucleotide
  source: /note="3' tri-ethylene glycol (TEG)"
aagauggcauuucuag

SEQ ID NO: 3040 - RNA, 15 nt, Artificial Sequence
  source: /note="Description of Artificial Sequence: Synthetic oligonucleotide"
  source: /note="RNA"
  source: /note="5' tri-ethylene glycol (TEG)"
  modified_base (8)..(8): 5-methyl modified nucleotide
  modified_base (13)..(13): 5-methyl modified nucleotide
  source: /note="3' tri-ethylene glycol (TEG)"
aagauggcauuucua

SEQ ID NO: 3041 - RNA, 14 nt, Artificial Sequence
  source: /note="Description of Artificial Sequence: Synthetic oligonucleotide"
  source: /note="RNA"
  source: /note="5' tri-ethylene glycol (TEG)"
  modified_base (8)..(8): 5-methyl modified nucleotide
  modified_base (13)..(13): 5-methyl modified nucleotide
  source: /note="3' tri-ethylene glycol (TEG)"
aagauggcauuucu

SEQ ID NO: 3042 - RNA, 13 nt, Artificial Sequence
  source: /note="Description of Artificial Sequence: Synthetic oligonucleotide"
  source: /note="RNA"
  source: /note="5' tri-ethylene glycol (TEG)"
  modified_base (8)..(8): 5-methyl modified nucleotide
  modified_base (13)..(13): 5-methyl modified nucleotide
  source: /note="3' tri-ethylene glycol (TEG)"
aagauggcauuuc

SEQ ID NO: 3043 - RNA, 12 nt, Artificial Sequence
  source: /note="Description of Artificial Sequence: Synthetic oligonucleotide"
  source: /note="RNA"
  source: /note="5' tri-ethylene glycol (TEG)"
  modified_base (8)..(8): 5-methyl modified nucleotide
  source: /note="3' tri-ethylene glycol (TEG)"
aagauggcauuu

SEQ ID NO: 3044 - RNA, 11 nt, Artificial Sequence
  source: /note="Description of Artificial Sequence: Synthetic oligonucleotide"
  source: /note="RNA"
  source: /note="5' tri-ethylene glycol (TEG)"
  modified_base (8)..(8): 5-methyl modified nucleotide
  source: /note="3' tri-ethylene glycol (TEG)"
aagauggcauu

SEQ ID NO: 3045 - RNA, 10 nt, Artificial Sequence
  source: /note="Description of Artificial Sequence: Synthetic oligonucleotide"
  source: /note="RNA"
  source: /note="5' tri-ethylene glycol (TEG)"
  modified_base (8)..(8): 5-methyl modified nucleotide
  source: /note="3' tri-ethylene glycol (TEG)"
aagauggcau

SEQ ID NO: 3046 - RNA, 9 nt, Artificial Sequence
  source: /note="Description of Artificial Sequence: Synthetic oligonucleotide"
  source: /note="RNA"
  source: /note="5' tri-ethylene glycol (TEG)"
  modified_base (8)..(8): 5-methyl modified nucleotide
  source: /note="3' tri-ethylene glycol (TEG)"
aagauggca

SEQ ID NO: 3047 - RNA, 8 nt, Artificial Sequence
  source: /note="Description of Artificial Sequence: Synthetic oligonucleotide"
  source: /note="RNA"
  source: /note="5' tri-ethylene glycol (TEG)"
  modified_base (8)..(8): 5-methyl modified nucleotide
  source: /note="3' tri-ethylene glycol (TEG)"
aagauggc

SEQ ID NO: 3048 - RNA, 15 nt, Artificial Sequence
  source: /note="Description of Artificial Sequence: Synthetic oligonucleotide"
  source: /note="RNA"
  source: /note="5' tri-ethylene glycol (TEG)"
  modified_base (7)..(7): 5-methyl modified nucleotide
  modified_base (12)..(12): 5-methyl modified nucleotide
  source: /note="3' tri-ethylene glycol (TEG)"
agauggcauuucuag

SEQ ID NO: 3049 - RNA, 14 nt, Artificial Sequence
  source: /note="Description of Artificial Sequence: Synthetic oligonucleotide"
  source: /note="RNA"
  source: /note="5' tri-ethylene glycol (TEG)"
  modified_base (7)..(7): 5-methyl modified nucleotide
  modified_base (12)..(12): 5-methyl modified nucleotide
  source: /note="3' tri-ethylene glycol (TEG)"
agauggcauuucua

SEQ ID NO: 3050 - RNA, 13 nt, Artificial Sequence
  source: /note="Description of Artificial Sequence: Synthetic oligonucleotide"
  source: /note="RNA"
  source: /note="5' tri-ethylene glycol (TEG)"
  modified_base (7)..(7): 5-methyl modified nucleotide
  modified_base (12)..(12): 5-methyl modified nucleotide
  source: /note="3' tri-ethylene glycol (TEG)"
agauggcauuucu

SEQ ID NO: 3051 - RNA, 12 nt, Artificial Sequence
  source: /note="Description of Artificial Sequence: Synthetic oligonucleotide"
  source: /note="RNA"
  source: /note="5' tri-ethylene glycol (TEG)"
  modified_base (7)..(7): 5-methyl modified nucleotide
  modified_base (12)..(12): 5-methyl modified nucleotide
  source: /note="3' tri-ethylene glycol (TEG)"
agauggcauuuc

SEQ ID NO: 3052 - RNA, 11 nt, Artificial Sequence
  source: /note="Description of Artificial Sequence: Synthetic oligonucleotide"
  source: /note="RNA"
  source: /note="5' tri-ethylene glycol (TEG)"
  modified_base (7)..(7): 5-methyl modified nucleotide
  source: /note="3' tri-ethylene glycol (TEG)"
agauggcauuu

SEQ ID NO: 3053 - RNA, 10 nt, Artificial Sequence
  source: /note="Description of Artificial Sequence: Synthetic oligonucleotide"
  source: /note="RNA"
  source: /note="5' tri-ethylene glycol (TEG)"
  modified_base (7)..(7): 5-methyl modified nucleotide
  source: /note="3' tri-ethylene glycol (TEG)"
agauggcauu

SEQ ID NO: 3054 - RNA, 9 nt, Artificial Sequence
  source: /note="Description of Artificial Sequence: Synthetic oligonucleotide"
  source: /note="RNA"
  source: /note="5' tri-ethylene glycol (TEG)"
  modified_base (7)..(7): 5-methyl modified nucleotide
  source: /note="3' tri-ethylene glycol (TEG)"
agauggcau

SEQ ID NO: 3055 - RNA, 8 nt, Artificial Sequence
  source: /note="Description of Artificial Sequence: Synthetic oligonucleotide"
  source: /note="RNA"
  source: /note="5' tri-ethylene glycol (TEG)"
  modified_base (7)..(7): 5-methyl modified nucleotide
  source: /note="3' tri-ethylene glycol (TEG)"
agauggca

SEQ ID NO: 3056 - RNA, 30 nt, Artificial Sequence; identical to SEQ ID NO: 284
  source: /note="Description of Artificial Sequence: Synthetic oligonucleotide"
  source: /note="RNA"
  source: /note="5' tri-ethylene glycol (TEG)"
  modified_base (1)..(1): 5-methyl modified nucleotide
  modified_base (3)..(3): 5-methyl modified nucleotide
  modified_base (4)..(4): 5-methyl modified nucleotide
  modified_base (7)..(7): 5-methyl modified nucleotide
  modified_base (10)..(10): 5-methyl modified nucleotide
  modified_base (22)..(22): 5-methyl modified nucleotide
  modified_base (27)..(27): 5-methyl modified nucleotide
  source: /note="3' tri-ethylene glycol (TEG)"

SEQ ID NO: 3057 - RNA, 29 nt, Artificial Sequence
  source: /note="Description of Artificial Sequence: Synthetic oligonucleotide"
  source: /note="RNA"
  source: /note="5' tri-ethylene glycol (TEG)"
  modified_base (1)..(1): 5-methyl modified nucleotide
  modified_base (3)..(3): 5-methyl modified nucleotide
  modified_base (4)..(4): 5-methyl modified nucleotide
  modified_base (7)..(7): 5-methyl modified nucleotide
  modified_base (10)..(10): 5-methyl modified nucleotide
  modified_base (22)..(22): 5-methyl modified nucleotide
  modified_base (27)..(27): 5-methyl modified nucleotide
  source: /note="3' tri-ethylene glycol (TEG)"
cuccaacaucaaggaagauggcauuucua

SEQ ID NO: 3058 - RNA, 28 nt, Artificial Sequence
  source: /note="Description of Artificial Sequence: Synthetic oligonucleotide"
  source: /note="RNA"
  source: /note="5' tri-ethylene glycol (TEG)"
  modified_base (1)..(1): 5-methyl modified nucleotide
  modified_base (3)..(3): 5-methyl modified nucleotide
  modified_base (4)..(4): 5-methyl modified nucleotide
  modified_base (7)..(7): 5-methyl modified nucleotide
  modified_base (10)..(10): 5-methyl modified nucleotide
  modified_base (22)..(22): 5-methyl modified nucleotide
  modified_base (27)..(27): 5-methyl modified nucleotide
  source: /note="3' tri-ethylene glycol (TEG)"
cuccaacaucaaggaagauggcauuucu

SEQ ID NO: 3059 - RNA, 27 nt, Artificial Sequence
  source: /note="Description of Artificial Sequence: Synthetic oligonucleotide"
  source: /note="RNA"
  source: /note="5' tri-ethylene glycol (TEG)"
  modified_base (1)..(1): 5-methyl modified nucleotide
  modified_base (3)..(3): 5-methyl modified nucleotide
  modified_base (4)..(4): 5-methyl modified nucleotide
  modified_base (7)..(7): 5-methyl modified nucleotide
  modified_base (10)..(10): 5-methyl modified nucleotide
  modified_base (22)..(22): 5-methyl modified nucleotide
  modified_base (27)..(27): 5-methyl modified nucleotide
  source: /note="3' tri-ethylene glycol (TEG)"
cuccaacaucaaggaagauggcauuuc

SEQ ID NO: 3060 - RNA, 26 nt, Artificial Sequence
  source: /note="Description of Artificial Sequence: Synthetic oligonucleotide"
  source: /note="RNA"
  source: /note="5' tri-ethylene glycol (TEG)"
  modified_base (1)..(1): 5-methyl modified nucleotide
  modified_base (3)..(3): 5-methyl modified nucleotide
  modified_base (4)..(4): 5-methyl modified nucleotide
  modified_base (7)..(7): 5-methyl modified nucleotide
  modified_base (10)..(10): 5-methyl modified nucleotide
  modified_base (22)..(22): 5-methyl modified nucleotide
  source: /note="3' tri-ethylene glycol (TEG)"
cuccaacaucaaggaagauggcauuu

SEQ ID NO: 3061 - RNA, 25 nt, Artificial Sequence
  source: /note="Description of Artificial Sequence: Synthetic oligonucleotide"
  source: /note="RNA"
  source: /note="5' tri-ethylene glycol (TEG)"
  modified_base (1)..(1): 5-methyl modified nucleotide
  modified_base (3)..(3): 5-methyl modified nucleotide
  modified_base (4)..(4): 5-methyl modified nucleotide
  modified_base (7)..(7): 5-methyl modified nucleotide
  modified_base (10)..(10): 5-methyl modified nucleotide
  modified_base (22)..(22): 5-methyl modified nucleotide
  source: /note="3' tri-ethylene glycol (TEG)"
cuccaacaucaaggaagauggcauu

SEQ ID NO: 3062 - RNA, 24 nt, Artificial Sequence
  source: /note="Description of Artificial Sequence: Synthetic oligonucleotide"
  source: /note="RNA"
  source: /note="5' tri-ethylene glycol (TEG)"
  modified_base (1)..(1): 5-methyl modified nucleotide
  modified_base (3)..(3): 5-methyl modified nucleotide
  modified_base (4)..(4): 5-methyl modified nucleotide
  modified_base (7)..(7): 5-methyl modified nucleotide
  modified_base (10)..(10): 5-methyl modified nucleotide
  modified_base (22)..(22): 5-methyl modified nucleotide
  source: /note="3' tri-ethylene glycol (TEG)"
cuccaacaucaaggaagauggcau

SEQ ID NO: 3063 - RNA, 23 nt, Artificial Sequence
  source: /note="Description of Artificial Sequence: Synthetic oligonucleotide"
  source: /note="RNA"
  source: /note="5' tri-ethylene glycol (TEG)"
  modified_base (1)..(1): 5-methyl modified nucleotide
  modified_base (3)..(3): 5-methyl modified nucleotide
  modified_base (4)..(4): 5-methyl modified nucleotide
  modified_base (7)..(7): 5-methyl modified nucleotide
  modified_base (10)..(10): 5-methyl modified nucleotide
  modified_base (22)..(22): 5-methyl modified nucleotide
  source: /note="3' tri-ethylene glycol (TEG)"
cuccaacaucaaggaagauggca

SEQ ID NO: 3064 - RNA, 22 nt, Artificial Sequence
  source: /note="Description of Artificial Sequence: Synthetic oligonucleotide"
  source: /note="RNA"
  source: /note="5' tri-ethylene glycol (TEG)"
  modified_base (1)..(1): 5-methyl modified nucleotide
  modified_base (3)..(3): 5-methyl modified nucleotide
  modified_base (4)..(4): 5-methyl modified nucleotide
  modified_base (7)..(7): 5-methyl modified nucleotide
  modified_base (10)..(10): 5-methyl modified nucleotide
  modified_base (22)..(22): 5-methyl modified nucleotide
  source: /note="3' tri-ethylene glycol (TEG)"
cuccaacaucaaggaagauggc

SEQ ID NO: 3065 - RNA, 21 nt, Artificial Sequence
  source: /note="Description of Artificial Sequence: Synthetic oligonucleotide"
  source: /note="RNA"
  source: /note="5' tri-ethylene glycol (TEG)"
  modified_base (1)..(1): 5-methyl modified nucleotide
  modified_base (3)..(3): 5-methyl modified nucleotide
  modified_base (4)..(4): 5-methyl modified nucleotide
  modified_base (7)..(7): 5-methyl modified nucleotide
  modified_base (10)..(10): 5-methyl modified nucleotide
  source: /note="3' tri-ethylene glycol (TEG)"
cuccaacaucaaggaagaugg

SEQ ID NO: 3066 - RNA, 20 nt, Artificial Sequence
  source: /note="Description of Artificial Sequence: Synthetic oligonucleotide"
  source: /note="RNA"
  source: /note="5' tri-ethylene glycol (TEG)"
  modified_base (1)..(1): 5-methyl modified nucleotide
  modified_base (3)..(3): 5-methyl modified nucleotide
  modified_base (4)..(4): 5-methyl modified nucleotide
  modified_base (7)..(7): 5-methyl modified nucleotide
  modified_base (10)..(10): 5-methyl modified nucleotide
  source: /note="3' tri-ethylene glycol (TEG)"
cuccaacaucaaggaagaug

SEQ ID NO: 3067 - RNA, 19 nt, Artificial Sequence
  source: /note="Description of Artificial Sequence: Synthetic oligonucleotide"
  source: /note="RNA"
  source: /note="5' tri-ethylene glycol (TEG)"
  modified_base (1)..(1): 5-methyl modified nucleotide
  modified_base (3)..(3): 5-methyl modified nucleotide
  modified_base (4)..(4): 5-methyl modified nucleotide
  modified_base (7)..(7): 5-methyl modified nucleotide
  modified_base (10)..(10): 5-methyl modified nucleotide
  source: /note="3' tri-ethylene glycol (TEG)"
cuccaacaucaaggaagau

SEQ ID NO: 3068 - RNA, 18 nt, Artificial Sequence
  source: /note="Description of Artificial Sequence: Synthetic oligonucleotide"
  source: /note="RNA"
  source: /note="5' tri-ethylene glycol (TEG)"
  modified_base (1)..(1): 5-methyl modified nucleotide
  modified_base (3)..(3): 5-methyl modified nucleotide
  modified_base (4)..(4): 5-methyl modified nucleotide
  modified_base (7)..(7): 5-methyl modified nucleotide
  modified_base (10)..(10): 5-methyl modified nucleotide
  source: /note="3' tri-ethylene glycol (TEG)"
cuccaacaucaaggaaga

SEQ ID NO: 3069 - RNA, 17 nt, Artificial Sequence
  source: /note="Description of Artificial Sequence: Synthetic oligonucleotide"
  source: /note="RNA"
  source: /note="5' tri-ethylene glycol (TEG)"
  modified_base (1)..(1): 5-methyl modified nucleotide
  modified_base (3)..(3): 5-methyl modified nucleotide
  modified_base (4)..(4): 5-methyl modified nucleotide
  modified_base (7)..(7): 5-methyl modified nucleotide
  modified_base (10)..(10): 5-methyl modified nucleotide
  source: /note="3' tri-ethylene glycol (TEG)"
cuccaacaucaaggaag

SEQ ID NO: 3070 - RNA, 29 nt, Artificial Sequence
  source: /note="Description of Artificial Sequence: Synthetic oligonucleotide"
  source: /note="RNA"
  source: /note="5' tri-ethylene glycol (TEG)"
  modified_base (2)..(2): 5-methyl modified nucleotide
  modified_base (3)..(3): 5-methyl modified nucleotide
  modified_base (6)..(6): 5-methyl modified nucleotide
  modified_base (9)..(9): 5-methyl modified nucleotide
  modified_base (21)..(21): 5-methyl modified nucleotide
  modified_base (26)..(26): 5-methyl modified nucleotide
  source: /note="3' tri-ethylene glycol (TEG)"
uccaacaucaaggaagauggcauuucuag

SEQ ID NO: 3071 - RNA, 28 nt, Artificial Sequence
  source: /note="Description of Artificial Sequence: Synthetic oligonucleotide"
  source: /note="RNA"
  source: /note="5' tri-ethylene glycol (TEG)"
  modified_base (2)..(2): 5-methyl modified nucleotide
  modified_base (3)..(3): 5-methyl modified nucleotide
  modified_base (6)..(6): 5-methyl modified nucleotide
  modified_base (9)..(9): 5-methyl modified nucleotide
  modified_base (21)..(21): 5-methyl modified nucleotide
  modified_base (26)..(26): 5-methyl modified nucleotide
  source: /note="3' tri-ethylene glycol (TEG)"
uccaacaucaaggaagauggcauuucua

SEQ ID NO: 3072 - RNA, 27 nt, Artificial Sequence
  source: /note="Description of Artificial Sequence: Synthetic oligonucleotide"
  source: /note="RNA"
  source: /note="5' tri-ethylene glycol (TEG)"
  modified_base (2)..(2): 5-methyl modified nucleotide
  modified_base (3)..(3): 5-methyl modified nucleotide
  modified_base (6)..(6): 5-methyl modified nucleotide
  modified_base (9)..(9): 5-methyl modified nucleotide
  modified_base (21)..(21): 5-methyl modified nucleotide
  modified_base (26)..(26): 5-methyl modified nucleotide
  source: /note="3' tri-ethylene glycol (TEG)"
uccaacaucaaggaagauggcauuucu

SEQ ID NO: 3073 - RNA, 26 nt, Artificial Sequence
  source: /note="Description of Artificial Sequence: Synthetic oligonucleotide"
  source: /note="RNA"
  source: /note="5' tri-ethylene glycol (TEG)"
  modified_base (2)..(2): 5-methyl modified nucleotide
  modified_base (3)..(3): 5-methyl modified nucleotide
  modified_base (6)..(6): 5-methyl modified nucleotide
  modified_base (9)..(9): 5-methyl modified nucleotide
  modified_base (21)..(21): 5-methyl modified nucleotide
  modified_base (26)..(26): 5-methyl modified nucleotide
  source: /note="3' tri-ethylene glycol (TEG)"
uccaacaucaaggaagauggcauuuc

SEQ ID NO: 3074 - RNA, 25 nt, Artificial Sequence
  source: /note="Description of Artificial Sequence: Synthetic oligonucleotide"
  source: /note="RNA"
  source: /note="5' tri-ethylene glycol (TEG)"
  modified_base (2)..(2): 5-methyl modified nucleotide
  modified_base (3)..(3): 5-methyl modified nucleotide
  modified_base (6)..(6): 5-methyl modified nucleotide
  modified_base (9)..(9): 5-methyl modified nucleotide
  modified_base (21)..(21): 5-methyl modified nucleotide
  source: /note="3' tri-ethylene glycol (TEG)"
uccaacaucaaggaagauggcauuu

SEQ ID NO: 3075 - RNA, 24 nt, Artificial Sequence
  source: /note="Description of Artificial Sequence: Synthetic oligonucleotide"
  source: /note="RNA"
  source: /note="5' tri-ethylene glycol (TEG)"
  modified_base (2)..(2): 5-methyl modified nucleotide
  modified_base (3)..(3): 5-methyl modified nucleotide
  modified_base (6)..(6): 5-methyl modified nucleotide
  modified_base (9)..(9): 5-methyl modified nucleotide
  modified_base (21)..(21): 5-methyl modified nucleotide
  source: /note="3' tri-ethylene glycol (TEG)"
uccaacaucaaggaagauggcauu

SEQ ID NO: 3076 - RNA, 23 nt, Artificial Sequence
  source: /note="Description of Artificial Sequence: Synthetic oligonucleotide"
  source: /note="RNA"
  source: /note="5' tri-ethylene glycol (TEG)"
  modified_base (2)..(2): 5-methyl modified nucleotide
  modified_base (3)..(3): 5-methyl modified nucleotide
  modified_base (6)..(6): 5-methyl modified nucleotide
  modified_base (9)..(9): 5-methyl modified nucleotide
  modified_base (21)..(21): 5-methyl modified nucleotide
  source: /note="3' tri-ethylene glycol (TEG)"
uccaacaucaaggaagauggcau

SEQ ID NO: 3077 - RNA, 22 nt, Artificial Sequence
  source: /note="Description of Artificial Sequence: Synthetic oligonucleotide"
  source: /note="RNA"
  source: /note="5' tri-ethylene glycol (TEG)"
  modified_base (2)..(2): 5-methyl modified nucleotide
  modified_base (3)..(3): 5-methyl modified nucleotide
  modified_base (6)..(6): 5-methyl modified nucleotide
  modified_base (9)..(9): 5-methyl modified nucleotide
  modified_base (21)..(21): 5-methyl modified nucleotide
  source: /note="3' tri-ethylene glycol (TEG)"
uccaacaucaaggaagauggca

SEQ ID NO: 3078 - RNA, 21 nt, Artificial Sequence
  source: /note="Description of Artificial Sequence: Synthetic oligonucleotide"
  source: /note="RNA"
  source: /note="5' tri-ethylene glycol (TEG)"
  modified_base (2)..(2): 5-methyl modified nucleotide
  modified_base (3)..(3): 5-methyl modified nucleotide
  modified_base (6)..(6): 5-methyl modified nucleotide
  modified_base (9)..(9): 5-methyl modified nucleotide
  modified_base (21)..(21): 5-methyl modified nucleotide
  source: /note="3' tri-ethylene glycol (TEG)"
uccaacaucaaggaagauggc

SEQ ID NO: 3079 - RNA, 20 nt, Artificial Sequence
  source: /note="Description of Artificial Sequence: Synthetic oligonucleotide"
  source: /note="RNA"
  source: /note="5' tri-ethylene glycol (TEG)"
  modified_base (2)..(2): 5-methyl modified nucleotide
  modified_base (3)..(3): 5-methyl modified nucleotide
  modified_base (6)..(6): 5-methyl modified nucleotide
  modified_base (9)..(9): 5-methyl modified nucleotide
  source: /note="3' tri-ethylene glycol (TEG)"
uccaacaucaaggaagaugg

SEQ ID NO: 3080 - RNA, 19 nt, Artificial Sequence
  source: /note="Description of Artificial Sequence: Synthetic oligonucleotide"
  source: /note="RNA"
  source: /note="5' tri-ethylene glycol (TEG)"
  modified_base (2)..(2): 5-methyl modified nucleotide
  modified_base (3)..(3): 5-methyl modified nucleotide
  modified_base (6)..(6): 5-methyl modified nucleotide
  modified_base (9)..(9): 5-methyl modified nucleotide
  source: /note="3' tri-ethylene glycol (TEG)"
uccaacaucaaggaagaug

SEQ ID NO: 3081 - RNA, 18 nt, Artificial Sequence
  source: /note="Description of Artificial Sequence: Synthetic oligonucleotide"
  source: /note="RNA"
  source: /note="5' tri-ethylene glycol (TEG)"
  modified_base (2)..(2): 5-methyl modified nucleotide
  modified_base (3)..(3): 5-methyl modified nucleotide
  modified_base (6)..(6): 5-methyl modified nucleotide
  modified_base (9)..(9): 5-methyl modified nucleotide
  source: /note="3' tri-ethylene glycol (TEG)"
uccaacaucaaggaagau

SEQ ID NO: 3082 - RNA, 17 nt, Artificial Sequence
  source: /note="Description of Artificial Sequence: Synthetic oligonucleotide"
  source: /note="RNA"
  source: /note="5' tri-ethylene glycol (TEG)"
  modified_base (2)..(2): 5-methyl modified nucleotide
  modified_base (3)..(3): 5-methyl modified nucleotide
  modified_base (6)..(6): 5-methyl modified nucleotide
  modified_base (9)..(9): 5-methyl modified nucleotide
  source: /note="3' tri-ethylene glycol (TEG)"
uccaacaucaaggaaga

SEQ ID NO: 3083 - RNA, 16 nt, Artificial Sequence
  source: /note="Description of Artificial Sequence: Synthetic oligonucleotide"
  source: /note="RNA"
  source: /note="5' tri-ethylene glycol (TEG)"
  modified_base (2)..(2): 5-methyl modified nucleotide
  modified_base (3)..(3): 5-methyl modified nucleotide
  modified_base (6)..(6): 5-methyl modified nucleotide
  modified_base (9)..(9): 5-methyl modified nucleotide
  source: /note="3' tri-ethylene glycol (TEG)"
uccaacaucaaggaag

SEQ ID NO: 3084 - RNA, 28 nt, Artificial Sequence
  source: /note="Description of Artificial Sequence: Synthetic oligonucleotide"
  source: /note="RNA"
  source: /note="5' tri-ethylene glycol (TEG)"
  modified_base (1)..(1): 5-methyl modified nucleotide
  modified_base (2)..(2): 5-methyl modified nucleotide
  modified_base (5)..(5): 5-methyl modified nucleotide
  modified_base (8)..(8): 5-methyl modified nucleotide
  modified_base (20)..(20): 5-methyl modified nucleotide
  modified_base (25)..(25): 5-methyl modified nucleotide
  source: /note="3' tri-ethylene glycol (TEG)"
ccaacaucaaggaagauggcauuucuag

SEQ ID NO: 3085 - RNA, 27 nt, Artificial Sequence
  source: /note="Description of Artificial Sequence: Synthetic oligonucleotide"
  source: /note="RNA"
  source: /note="5' tri-ethylene glycol (TEG)"
  modified_base (1)..(1): 5-methyl modified nucleotide
  modified_base (2)..(2): 5-methyl modified nucleotide
  modified_base (5)..(5): 5-methyl modified nucleotide
  modified_base (8)..(8): 5-methyl modified nucleotide
  modified_base (20)..(20): 5-methyl modified nucleotide
  modified_base (25)..(25): 5-methyl modified nucleotide
  source: /note="3' tri-ethylene glycol (TEG)"
ccaacaucaaggaagauggcauuucua

SEQ ID NO: 3086 - RNA, 26 nt, Artificial Sequence
  source: /note="Description of Artificial Sequence: Synthetic oligonucleotide"
  source: /note="RNA"
  source: /note="5' tri-ethylene glycol (TEG)"
  modified_base (1)..(1): 5-methyl modified nucleotide
  modified_base (2)..(2): 5-methyl modified nucleotide
  modified_base (5)..(5): 5-methyl modified nucleotide
  modified_base (8)..(8): 5-methyl modified nucleotide
  modified_base (20)..(20): 5-methyl modified nucleotide
  modified_base (25)..(25): 5-methyl modified nucleotide
  source: /note="3' tri-ethylene glycol (TEG)"
ccaacaucaaggaagauggcauuucu

SEQ ID NO: 3087 - RNA, 25 nt, Artificial Sequence
  source: /note="Description of Artificial Sequence: Synthetic oligonucleotide"
  source: /note="RNA"
  source: /note="5' tri-ethylene glycol (TEG)"
  modified_base (1)..(1): 5-methyl modified nucleotide
  modified_base (2)..(2): 5-methyl modified nucleotide
  modified_base (5)..(5): 5-methyl modified nucleotide
  modified_base (8)..(8): 5-methyl modified nucleotide
  modified_base (20)..(20): 5-methyl modified nucleotide
  modified_base (25)..(25): 5-methyl modified nucleotide
  source: /note="3' tri-ethylene glycol (TEG)"
ccaacaucaaggaagauggcauuuc

SEQ ID NO: 3088 - RNA, 24 nt, Artificial Sequence
  source: /note="Description of Artificial Sequence: Synthetic oligonucleotide"
  source: /note="RNA"
  source: /note="5' tri-ethylene glycol (TEG)"
  modified_base (1)..(1): 5-methyl modified nucleotide
  modified_base (2)..(2): 5-methyl modified nucleotide
  modified_base (5)..(5): 5-methyl modified nucleotide
  modified_base (8)..(8): 5-methyl modified nucleotide
  modified_base (20)..(20): 5-methyl modified nucleotide
  source: /note="3' tri-ethylene glycol (TEG)"
ccaacaucaaggaagauggcauuu

SEQ ID NO: 3089 - RNA, 23 nt, Artificial Sequence
  source: /note="Description of Artificial Sequence: Synthetic oligonucleotide"
  source: /note="RNA"
  source: /note="5' tri-ethylene glycol (TEG)"
  modified_base (1)..(1): 5-methyl modified nucleotide
  modified_base (2)..(2): 5-methyl modified nucleotide
  modified_base (5)..(5): 5-methyl modified nucleotide
  modified_base (8)..(8): 5-methyl modified nucleotide
  modified_base (20)..(20): 5-methyl modified nucleotide
  source: /note="3' tri-ethylene glycol (TEG)"
ccaacaucaaggaagauggcauu

SEQ ID NO: 3090 - RNA, 22 nt, Artificial Sequence
  source: /note="Description of Artificial Sequence: Synthetic oligonucleotide"
  source: /note="RNA"
  source: /note="5' tri-ethylene glycol (TEG)"
  modified_base (1)..(1): 5-methyl modified nucleotide
  modified_base (2)..(2): 5-methyl modified nucleotide
  modified_base (5)..(5): 5-methyl modified nucleotide
  modified_base (8)..(8): 5-methyl modified nucleotide
  modified_base (20)..(20): 5-methyl modified nucleotide
  source: /note="3' tri-ethylene glycol (TEG)"
ccaacaucaaggaagauggcau

SEQ ID NO: 3091 - RNA, 21 nt, Artificial Sequence
  source: /note="Description of Artificial Sequence: Synthetic oligonucleotide"
  source: /note="RNA"
  source: /note="5' tri-ethylene glycol (TEG)"
  modified_base (1)..(1): 5-methyl modified nucleotide
  modified_base (2)..(2): 5-methyl modified nucleotide
  modified_base (5)..(5): 5-methyl modified nucleotide
  modified_base (8)..(8): 5-methyl modified nucleotide
  modified_base (20)..(20): 5-methyl modified nucleotide
  source: /note="3' tri-ethylene glycol (TEG)"
ccaacaucaaggaagauggca

SEQ ID NO: 3092 - RNA, 20 nt, Artificial Sequence
  source: /note="Description of Artificial Sequence: Synthetic oligonucleotide"
  source: /note="RNA"
  source: /note="5' tri-ethylene glycol (TEG)"
  modified_base (1)..(1): 5-methyl modified nucleotide
  modified_base (2)..(2): 5-methyl modified nucleotide
  modified_base (5)..(5): 5-methyl modified nucleotide
  modified_base (8)..(8): 5-methyl modified nucleotide
  modified_base (20)..(20): 5-methyl modified nucleotide
  source: /note="3' tri-ethylene glycol (TEG)"
ccaacaucaaggaagauggc

SEQ ID NO: 3093 - RNA, 19 nt, Artificial Sequence
  source: /note="Description of Artificial Sequence: Synthetic oligonucleotide"
  source: /note="RNA"
  source: /note="5' tri-ethylene glycol (TEG)"
  modified_base (1)..(1): 5-methyl modified nucleotide
  modified_base (2)..(2): 5-methyl modified nucleotide
  modified_base (5)..(5): 5-methyl modified nucleotide
  modified_base (8)..(8): 5-methyl modified nucleotide
  source: /note="3' tri-ethylene glycol (TEG)"
ccaacaucaaggaagaugg

SEQ ID NO: 3094 - RNA, 18 nt, Artificial Sequence
  source: /note="Description of Artificial Sequence: Synthetic oligonucleotide"
  source: /note="RNA"
  source: /note="5' tri-ethylene glycol (TEG)"
  modified_base (1)..(1): 5-methyl modified nucleotide
  modified_base (2)..(2): 5-methyl modified nucleotide
  modified_base (5)..(5): 5-methyl modified nucleotide
  modified_base (8)..(8): 5-methyl modified nucleotide
  source: /note="3' tri-ethylene glycol (TEG)"
ccaacaucaaggaagaug

SEQ ID NO: 3095 - RNA, 17 nt, Artificial Sequence
  source: /note="Description of Artificial Sequence: Synthetic oligonucleotide"
  source: /note="RNA"
  source: /note="5' tri-ethylene glycol (TEG)"
  modified_base (1)..(1): 5-methyl modified nucleotide
  modified_base (2)..(2): 5-methyl modified nucleotide
  modified_base (5)..(5): 5-methyl modified nucleotide
  modified_base (8)..(8): 5-methyl modified nucleotide
  source: /note="3' tri-ethylene glycol (TEG)"
ccaacaucaaggaagau

SEQ ID NO: 3096 - RNA, 16 nt, Artificial Sequence
  source: /note="Description of Artificial Sequence: Synthetic oligonucleotide"
  source: /note="RNA"
  source: /note="5' tri-ethylene glycol (TEG)"
  modified_base (1)..(1): 5-methyl modified nucleotide
  modified_base (2)..(2): 5-methyl modified nucleotide
  modified_base (5)..(5): 5-methyl modified nucleotide
  modified_base (8)..(8): 5-methyl modified nucleotide
  source: /note="3' tri-ethylene glycol (TEG)"
ccaacaucaaggaaga

SEQ ID NO: 3097 - RNA, 15 nt, Artificial Sequence
  source: /note="Description of Artificial Sequence: Synthetic oligonucleotide"
  source: /note="RNA"
  source: /note="5' tri-ethylene glycol (TEG)"
  modified_base (1)..(1): 5-methyl modified nucleotide
  modified_base (2)..(2): 5-methyl modified nucleotide
  modified_base (5)..(5): 5-methyl modified nucleotide
  modified_base (8)..(8): 5-methyl modified nucleotide
  source: /note="3' tri-ethylene glycol (TEG)"
ccaacaucaaggaag

SEQ ID NO: 3098 - RNA, 27 nt, Artificial Sequence
  source: /note="Description of Artificial Sequence: Synthetic oligonucleotide"
  source: /note="RNA"
  source: /note="5' tri-ethylene glycol (TEG)"
  modified_base (1)..(1): 5-methyl modified nucleotide
  modified_base (4)..(4): 5-methyl modified nucleotide
  modified_base (7)..(7): 5-methyl modified nucleotide
  modified_base (19)..(19): 5-methyl modified nucleotide
  modified_base (24)..(24): 5-methyl modified nucleotide
  source: /note="3' tri-ethylene glycol (TEG)"
caacaucaaggaagauggcauuucuag

SEQ ID NO: 3099 - RNA, 26 nt, Artificial Sequence
  source: /note="Description of Artificial Sequence: Synthetic oligonucleotide"
  source: /note="RNA"
  source: /note="5' tri-ethylene glycol (TEG)"
  modified_base (1)..(1): 5-methyl modified nucleotide
  modified_base (4)..(4): 5-methyl modified nucleotide
  modified_base (7)..(7): 5-methyl modified nucleotide
  modified_base (19)..(19): 5-methyl modified nucleotide
  modified_base (24)..(24): 5-methyl modified nucleotide
  source: /note="3' tri-ethylene glycol (TEG)"
caacaucaaggaagauggcauuucua

SEQ ID NO: 3100 - RNA, 25 nt, Artificial Sequence
  source: /note="Description of Artificial Sequence: Synthetic oligonucleotide"
  source: /note="RNA"
  source: /note="5' tri-ethylene glycol (TEG)"
  modified_base (1)..(1): 5-methyl modified nucleotide
  modified_base (4)..(4): 5-methyl modified nucleotide
  modified_base (7)..(7): 5-methyl modified nucleotide
  modified_base (19)..(19): 5-methyl modified nucleotide
  modified_base (24)..(24): 5-methyl modified nucleotide
  source: /note="3' tri-ethylene glycol (TEG)"
caacaucaaggaagauggcauuucu

SEQ ID NO: 3101 - RNA, 24 nt, Artificial Sequence
  source: /note="Description of Artificial Sequence: Synthetic oligonucleotide"
  source: /note="RNA"
  source: /note="5' tri-ethylene glycol (TEG)"
  modified_base (1)..(1): 5-methyl modified nucleotide
  modified_base (4)..(4): 5-methyl modified nucleotide
  modified_base (7)..(7): 5-methyl modified nucleotide
  modified_base (19)..(19): 5-methyl modified nucleotide
  modified_base (24)..(24): 5-methyl modified nucleotide
  source: /note="3' tri-ethylene glycol (TEG)"
caacaucaaggaagauggcauuuc

SEQ ID NO: 3102 - RNA, 23 nt, Artificial Sequence
  source: /note="Description of Artificial Sequence: Synthetic oligonucleotide"
  source: /note="RNA"
  source: /note="5' tri-ethylene glycol (TEG)"
  modified_base (1)..(1): 5-methyl modified nucleotide
  modified_base (4)..(4): 5-methyl modified nucleotide
  modified_base (7)..(7): 5-methyl modified nucleotide
  modified_base (19)..(19): 5-methyl modified nucleotide
  source: /note="3' tri-ethylene glycol (TEG)"
caacaucaaggaagauggcauuu

SEQ ID NO: 3103 - RNA, 22 nt, Artificial Sequence
  source: /note="Description of Artificial Sequence: Synthetic oligonucleotide"
  source: /note="RNA"
  source: /note="5' tri-ethylene glycol (TEG)"
  modified_base (1)..(1): 5-methyl modified nucleotide
  modified_base (4)..(4): 5-methyl modified nucleotide
  modified_base (7)..(7): 5-methyl modified nucleotide
  modified_base (19)..(19): 5-methyl modified nucleotide
  source: /note="3' tri-ethylene glycol (TEG)"
caacaucaaggaagauggcauu

SEQ ID NO: 3104 - RNA, 21 nt, Artificial Sequence
  source: /note="Description of Artificial Sequence: Synthetic oligonucleotide"
  source: /note="RNA"
  source: /note="5' tri-ethylene glycol (TEG)"
  modified_base (1)..(1): 5-methyl modified nucleotide
  modified_base (4)..(4): 5-methyl modified nucleotide
  modified_base (7)..(7): 5-methyl modified nucleotide
  modified_base (19)..(19): 5-methyl modified nucleotide
  source: /note="3' tri-ethylene glycol (TEG)"
caacaucaaggaagauggcau

SEQ ID NO: 3105 - RNA, 20 nt, Artificial Sequence
  source: /note="Description of Artificial Sequence: Synthetic oligonucleotide"
  source: /note="RNA"
  source: /note="5' tri-ethylene glycol (TEG)"
  modified_base (1)..(1): 5-methyl modified nucleotide
  modified_base (4)..(4): 5-methyl modified nucleotide
  modified_base (7)..(7): 5-methyl modified nucleotide
  modified_base (19)..(19): 5-methyl modified nucleotide
  source: /note="3' tri-ethylene glycol (TEG)"
caacaucaaggaagauggca

SEQ ID NO: 3106 - RNA, 19 nt, Artificial Sequence
  source: /note="Description of Artificial Sequence: Synthetic oligonucleotide"
  source: /note="RNA"
  source: /note="5' tri-ethylene glycol (TEG)"
  modified_base (1)..(1): 5-methyl modified nucleotide
  modified_base (4)..(4): 5-methyl modified nucleotide
  modified_base (7)..(7): 5-methyl modified nucleotide
  modified_base (19)..(19): 5-methyl modified nucleotide
  source: /note="3' tri-ethylene glycol (TEG)"
caacaucaaggaagauggc

SEQ ID NO: 3107 - RNA, 18 nt, Artificial Sequence
  source: /note="Description of Artificial Sequence: Synthetic oligonucleotide"
  source: /note="RNA"
  source: /note="5' tri-ethylene glycol (TEG)"
  modified_base (1)..(1): 5-methyl modified nucleotide
  modified_base (4)..(4): 5-methyl modified nucleotide
  modified_base (7)..(7): 5-methyl modified nucleotide
  source: /note="3' tri-ethylene glycol (TEG)"
caacaucaaggaagaugg

SEQ ID NO: 3108 - RNA, 17 nt, Artificial Sequence
  source: /note="Description of Artificial Sequence: Synthetic oligonucleotide"
  source: /note="RNA"
  source: /note="5' tri-ethylene glycol (TEG)"
  modified_base (1)..(1): 5-methyl modified nucleotide
  modified_base (4)..(4): 5-methyl modified nucleotide
  modified_base (7)..(7): 5-methyl modified nucleotide
  source: /note="3' tri-ethylene glycol (TEG)"
caacaucaaggaagaug

SEQ ID NO: 3109 - RNA, 16 nt, Artificial Sequence
  source: /note="Description of Artificial Sequence: Synthetic oligonucleotide"
  source: /note="RNA"
  source: /note="5' tri-ethylene glycol (TEG)"
  modified_base (1)..(1): 5-methyl modified nucleotide
  modified_base (4)..(4): 5-methyl modified nucleotide
  modified_base (7)..(7): 5-methyl modified nucleotide
  source: /note="3' tri-ethylene glycol (TEG)"
caacaucaaggaagau

SEQ ID NO: 3110 - RNA, 15 nt, Artificial Sequence
  source: /note="Description of Artificial Sequence: Synthetic oligonucleotide"
  source: /note="RNA"
  source: /note="5' tri-ethylene glycol (TEG)"
  modified_base (1)..(1): 5-methyl modified nucleotide
  modified_base (4)..(4): 5-methyl modified nucleotide
  modified_base (7)..(7): 5-methyl modified nucleotide
  source: /note="3' tri-ethylene glycol (TEG)"
caacaucaaggaaga

SEQ ID NO: 3111 - RNA, 14 nt, Artificial Sequence
  source: /note="Description of Artificial Sequence: Synthetic oligonucleotide"
  source: /note="RNA"
  source: /note="5' tri-ethylene glycol (TEG)"
  modified_base (1)..(1): 5-methyl modified nucleotide
  modified_base (4)..(4): 5-methyl modified nucleotide
  modified_base (7)..(7): 5-methyl modified nucleotide
  source: /note="3' tri-ethylene glycol (TEG)"
caacaucaaggaag

SEQ ID NO: 3112 - RNA, 26 nt, Artificial Sequence
  source: /note="Description of Artificial Sequence: Synthetic oligonucleotide"
  source: /note="RNA"
  source: /note="5' tri-ethylene glycol (TEG)"
  modified_base (3)..(3): 5-methyl modified nucleotide
  modified_base (6)..(6): 5-methyl modified nucleotide
  modified_base (18)..(18): 5-methyl modified nucleotide
  modified_base (23)..(23): 5-methyl modified nucleotide
  source: /note="3' tri-ethylene glycol (TEG)"
aacaucaaggaagauggcauuucuag

SEQ ID NO: 3113 - RNA, 25 nt, Artificial Sequence
  source: /note="Description of Artificial Sequence: Synthetic oligonucleotide"
  source: /note="RNA"
  source: /note="5' tri-ethylene glycol (TEG)"
  modified_base (3)..(3): 5-methyl modified nucleotide
  modified_base (6)..(6): 5-methyl modified nucleotide
  modified_base (18)..(18): 5-methyl modified nucleotide
  modified_base (23)..(23): 5-methyl modified nucleotide
  source: /note="3' tri-ethylene glycol (TEG)"
aacaucaaggaagauggcauuucua

SEQ ID NO: 3114 - RNA, 24 nt, Artificial Sequence
  source: /note="Description of Artificial Sequence: Synthetic oligonucleotide"
  source: /note="RNA"
  source: /note="5' tri-ethylene glycol (TEG)"
  modified_base (3)..(3): 5-methyl modified nucleotide
  modified_base (6)..(6): 5-methyl modified nucleotide
  modified_base (18)..(18): 5-methyl modified nucleotide
  modified_base (23)..(23): 5-methyl modified nucleotide
  source: /note="3' tri-ethylene glycol (TEG)"
aacaucaaggaagauggcauuucu

SEQ ID NO: 3115 - RNA, 23 nt, Artificial Sequence
  source: /note="Description of Artificial Sequence: Synthetic oligonucleotide"
  source: /note="RNA"
  source: /note="5' tri-ethylene glycol (TEG)"
  modified_base (3)..(3): 5-methyl modified nucleotide
  modified_base (6)..(6): 5-methyl modified nucleotide
  modified_base (18)..(18): 5-methyl modified nucleotide
  modified_base (23)..(23): 5-methyl modified nucleotide
  source: /note="3' tri-ethylene glycol (TEG)"
aacaucaaggaagauggcauuuc

SEQ ID NO: 3116 - RNA, 22 nt, Artificial Sequence
  source: /note="Description of Artificial Sequence: Synthetic oligonucleotide"
  source: /note="RNA"
  source: /note="5' tri-ethylene glycol (TEG)"
  modified_base (3)..(3): 5-methyl modified nucleotide
  modified_base (6)..(6): 5-methyl modified nucleotide
  modified_base (18)..(18): 5-methyl modified nucleotide
  source: /note="3' tri-ethylene glycol (TEG)"
aacaucaaggaagauggcauuu

SEQ ID NO: 3117 - RNA, 21 nt, Artificial Sequence
  source: /note="Description of Artificial Sequence: Synthetic oligonucleotide"
  source: /note="RNA"
  source: /note="5' tri-ethylene glycol (TEG)"
  modified_base (3)..(3): 5-methyl modified nucleotide
  modified_base (6)..(6): 5-methyl modified nucleotide
  modified_base (18)..(18): 5-methyl modified nucleotide
  source: /note="3' tri-ethylene glycol (TEG)"
aacaucaaggaagauggcauu

SEQ ID NO: 3118 - RNA, 20 nt, Artificial Sequence
  source: /note="Description of Artificial Sequence: Synthetic oligonucleotide"
  source: /note="RNA"
  source: /note="5' tri-ethylene glycol (TEG)"
  modified_base (3)..(3): 5-methyl modified nucleotide
  modified_base (6)..(6): 5-methyl modified nucleotide
  modified_base (18)..(18): 5-methyl modified nucleotide
  source: /note="3' tri-ethylene glycol (TEG)"
aacaucaaggaagauggcau

SEQ ID NO: 3119 - RNA, 19 nt, Artificial Sequence
  source: /note="Description of Artificial Sequence: Synthetic oligonucleotide"
  source: /note="RNA"
  source: /note="5' tri-ethylene glycol (TEG)"
  modified_base (3)..(3): 5-methyl modified nucleotide
  modified_base (6)..(6): 5-methyl modified nucleotide
  modified_base (18)..(18): 5-methyl modified nucleotide
  source: /note="3' tri-ethylene glycol (TEG)"
aacaucaaggaagauggca

SEQ ID NO: 3120 - RNA, 18 nt, Artificial Sequence
  source: /note="Description of Artificial Sequence: Synthetic oligonucleotide"
  source: /note="RNA"
  source: /note="5' tri-ethylene glycol (TEG)"
  modified_base (3)..(3): 5-methyl modified nucleotide
  modified_base (6)..(6): 5-methyl modified nucleotide
  modified_base (18)..(18): 5-methyl modified nucleotide
  source: /note="3' tri-ethylene glycol (TEG)"
aacaucaaggaagauggc

SEQ ID NO: 3121 - RNA, 17 nt, Artificial Sequence
  source: /note="Description of Artificial Sequence: Synthetic oligonucleotide"
  source: /note="RNA"
  source: /note="5' tri-ethylene glycol (TEG)"
  modified_base (3)..(3): 5-methyl modified nucleotide
  modified_base (6)..(6): 5-methyl modified nucleotide
  source: /note="3' tri-ethylene glycol (TEG)"
aacaucaaggaagaugg

SEQ ID NO: 3122 - RNA, 16 nt, Artificial Sequence
  source: /note="Description of Artificial Sequence: Synthetic oligonucleotide"
  source: /note="RNA"
  source: /note="5' tri-ethylene glycol (TEG)"
  modified_base (3)..(3): 5-methyl modified nucleotide
  modified_base (6)..(6): 5-methyl modified nucleotide
  source: /note="3' tri-ethylene glycol (TEG)"
aacaucaaggaagaug

SEQ ID NO: 3123 - RNA, 15 nt, Artificial Sequence
  source: /note="Description of Artificial Sequence: Synthetic oligonucleotide"
  source: /note="RNA"
  source: /note="5' tri-ethylene glycol (TEG)"
  modified_base (3)..(3): 5-methyl modified nucleotide
  modified_base (6)..(6): 5-methyl modified nucleotide
  source: /note="3' tri-ethylene glycol (TEG)"
aacaucaaggaagau

SEQ ID NO: 3124 - RNA, 14 nt, Artificial Sequence
  source: /note="Description of Artificial Sequence: Synthetic oligonucleotide"
  source: /note="RNA"
  source: /note="5' tri-ethylene glycol (TEG)"
  modified_base (3)..(3): 5-methyl modified nucleotide
  modified_base (6)..(6): 5-methyl modified nucleotide
  source: /note="3' tri-ethylene glycol (TEG)"
aacaucaaggaaga

SEQ ID NO: 3125 - RNA, 13 nt, Artificial Sequence
  source: /note="Description of Artificial Sequence: Synthetic oligonucleotide"
  source: /note="RNA"
  source: /note="5' tri-ethylene glycol (TEG)"
  modified_base (3)..(3): 5-methyl modified nucleotide
  modified_base (6)..(6): 5-methyl modified nucleotide
  source: /note="3' tri-ethylene glycol (TEG)"
aacaucaaggaag

SEQ ID NO: 3126 - RNA, 25 nt, Artificial Sequence
  source: /note="Description of Artificial Sequence: Synthetic oligonucleotide"
  source: /note="RNA"
  source: /note="5' tri-ethylene glycol (TEG)"
  modified_base (2)..(2): 5-methyl modified nucleotide
  modified_base (5)..(5): 5-methyl modified nucleotide
  modified_base (17)..(17): 5-methyl modified nucleotide
  modified_base (22)..(22): 5-methyl modified nucleotide
  source: /note="3' tri-ethylene glycol (TEG)"
acaucaaggaagauggcauuucuag

SEQ ID NO: 3127 - RNA, 24 nt, Artificial Sequence
  source: /note="Description of Artificial Sequence: Synthetic oligonucleotide"
  source: /note="RNA"
  source: /note="5' tri-ethylene glycol (TEG)"
  modified_base (2)..(2): 5-methyl modified nucleotide
  modified_base (5)..(5): 5-methyl modified nucleotide
  modified_base (17)..(17): 5-methyl modified nucleotide
  modified_base (22)..(22): 5-methyl modified nucleotide
  source: /note="3' tri-ethylene glycol (TEG)"
acaucaaggaagauggcauuucua

SEQ ID NO: 3128 - RNA, 23 nt, Artificial Sequence
  source: /note="Description of Artificial Sequence: Synthetic oligonucleotide"
  source: /note="RNA"
  source: /note="5' tri-ethylene glycol (TEG)"
  modified_base (2)..(2): 5-methyl modified nucleotide
  modified_base (5)..(5): 5-methyl modified nucleotide
  modified_base (17)..(17): 5-methyl modified nucleotide
  modified_base (22)..(22): 5-methyl modified nucleotide
  source: /note="3' tri-ethylene glycol (TEG)"
acaucaaggaagauggcauuucu

SEQ ID NO: 3129 - RNA, 22 nt, Artificial Sequence
  source: /note="Description of Artificial Sequence: Synthetic oligonucleotide"
  source: /note="RNA"
  source: /note="5' tri-ethylene glycol (TEG)"
  modified_base (2)..(2): 5-methyl modified nucleotide
  modified_base (5)..(5): 5-methyl modified nucleotide
  modified_base (17)..(17): 5-methyl modified nucleotide
  modified_base (22)..(22): 5-methyl modified nucleotide
  source: /note="3' tri-ethylene glycol (TEG)"
acaucaaggaagauggcauuuc

SEQ ID NO: 3130 - RNA, 21 nt, Artificial Sequence
  source: /note="Description of Artificial Sequence: Synthetic oligonucleotide"
  source: /note="RNA"
  source: /note="5' tri-ethylene glycol (TEG)"
  modified_base (2)..(2): 5-methyl modified nucleotide
  modified_base (5)..(5): 5-methyl modified nucleotide
  modified_base (17)..(17): 5-methyl modified nucleotide
  source: /note="3' tri-ethylene glycol (TEG)"
acaucaaggaagauggcauuu

SEQ ID NO: 3131 - RNA, 20 nt, Artificial Sequence
  source: /note="Description of Artificial Sequence: Synthetic oligonucleotide"
  source: /note="RNA"
  source: /note="5' tri-ethylene glycol (TEG)"
  modified_base (2)..(2): 5-methyl modified nucleotide
  modified_base (5)..(5): 5-methyl modified nucleotide
  modified_base (17)..(17): 5-methyl modified nucleotide
  source: /note="3' tri-ethylene glycol (TEG)"
acaucaaggaagauggcauu

SEQ ID NO: 3132 - RNA, 19 nt, Artificial Sequence
  source: /note="Description of Artificial Sequence: Synthetic oligonucleotide"
  source: /note="RNA"
  source: /note="5' tri-ethylene glycol (TEG)"
  modified_base (2)..(2): 5-methyl modified nucleotide
  modified_base (5)..(5): 5-methyl modified nucleotide
  modified_base (17)..(17): 5-methyl modified nucleotide
  source: /note="3' tri-ethylene glycol (TEG)"
acaucaaggaagauggcau

SEQ ID NO: 3133 - RNA, 18 nt, Artificial Sequence
  source: /note="Description of Artificial Sequence: Synthetic oligonucleotide"
  source: /note="RNA"
  source: /note="5' tri-ethylene glycol (TEG)"
  modified_base (2)..(2): 5-methyl modified nucleotide
  modified_base (5)..(5): 5-methyl modified nucleotide
  modified_base (17)..(17): 5-methyl modified nucleotide
  source: /note="3' tri-ethylene glycol (TEG)"
acaucaaggaagauggca

SEQ ID NO: 3134 - RNA, 17 nt, Artificial Sequence
  source: /note="Description of Artificial Sequence: Synthetic oligonucleotide"
  source: /note="RNA"
  source: /note="5' tri-ethylene glycol (TEG)"
  modified_base (2)..(2): 5-methyl modified nucleotide
  modified_base (5)..(5): 5-methyl modified nucleotide
  modified_base (17)..(17): 5-methyl modified nucleotide
  source: /note="3' tri-ethylene glycol (TEG)"
acaucaaggaagauggc

SEQ ID NO: 3135 - RNA, 16 nt, Artificial Sequence
  source: /note="Description of Artificial Sequence: Synthetic oligonucleotide"
  source: /note="RNA"
  source: /note="5' tri-ethylene glycol (TEG)"
  modified_base (2)..(2): 5-methyl modified nucleotide
  modified_base (5)..(5): 5-methyl modified nucleotide
  source: /note="3' tri-ethylene glycol (TEG)"
acaucaaggaagaugg

SEQ ID NO: 3136 - RNA, 15 nt, Artificial Sequence
  source: /note="Description of Artificial Sequence: Synthetic oligonucleotide"
  source: /note="RNA"
  source: /note="5' tri-ethylene glycol (TEG)"
  modified_base (2)..(2): 5-methyl modified nucleotide
  modified_base (5)..(5): 5-methyl modified nucleotide
  source: /note="3' tri-ethylene glycol (TEG)"
acaucaaggaagaug

SEQ ID NO: 3137 - RNA, 14 nt, Artificial Sequence
  source: /note="Description of Artificial Sequence: Synthetic oligonucleotide"
  source: /note="RNA"
  source: /note="5' tri-ethylene glycol (TEG)"
  modified_base (2)..(2): 5-methyl modified nucleotide
  modified_base (5)..(5): 5-methyl modified nucleotide
  source: /note="3' tri-ethylene glycol (TEG)"
acaucaaggaagau

SEQ ID NO: 3138 - RNA, 13 nt, Artificial Sequence
  source: /note="Description of Artificial Sequence: Synthetic oligonucleotide"
  source: /note="RNA"
  source: /note="5' tri-ethylene glycol (TEG)"
  modified_base (2)..(2): 5-methyl modified nucleotide
  modified_base (5)..(5): 5-methyl modified nucleotide
  source: /note="3' tri-ethylene glycol (TEG)"
acaucaaggaaga

SEQ ID NO: 3139 - RNA, 12 nt, Artificial Sequence
  source: /note="Description of Artificial Sequence: Synthetic oligonucleotide"
  source: /note="RNA"
  source: /note="5' tri-ethylene glycol (TEG)"
  modified_base (2)..(2): 5-methyl modified nucleotide
  modified_base (5)..(5): 5-methyl modified nucleotide
  source: /note="3' tri-ethylene glycol (TEG)"
acaucaaggaag

SEQ ID NO: 3140 - RNA, 24 nt, Artificial Sequence
  source: /note="Description of Artificial Sequence: Synthetic oligonucleotide"
  source: /note="RNA"
  source: /note="5' tri-ethylene glycol (TEG)"
  modified_base (1)..(1): 5-methyl modified nucleotide
  modified_base (4)..(4): 5-methyl modified nucleotide
  modified_base (16)..(16): 5-methyl modified nucleotide
  modified_base (21)..(21): 5-methyl modified nucleotide
  source: /note="3' tri-ethylene glycol (TEG)"
caucaaggaagauggcauuucuag

SEQ ID NO: 3141 - RNA, 23 nt, Artificial Sequence
  source: /note="Description of Artificial Sequence: Synthetic oligonucleotide"
  source: /note="RNA"
  source: /note="5' tri-ethylene glycol (TEG)"
  modified_base (1)..(1): 5-methyl modified nucleotide
  modified_base (4)..(4): 5-methyl modified nucleotide
  modified_base (16)..(16): 5-methyl modified nucleotide
  modified_base (21)..(21): 5-methyl modified nucleotide
  source: /note="3' tri-ethylene glycol (TEG)"
caucaaggaagauggcauuucua

SEQ ID NO: 3142 - RNA, 22 nt, Artificial Sequence
  source: /note="Description of Artificial Sequence: Synthetic oligonucleotide"
  source: /note="RNA"
  source: /note="5' tri-ethylene glycol (TEG)"
  modified_base (1)..(1): 5-methyl modified nucleotide
  modified_base (4)..(4): 5-methyl modified nucleotide
  modified_base (16)..(16): 5-methyl modified nucleotide
  modified_base (21)..(21): 5-methyl modified nucleotide
  source: /note="3' tri-ethylene glycol (TEG)"
caucaaggaagauggcauuucu

SEQ ID NO: 3143 - RNA, 21 nt, Artificial Sequence
  source: /note="Description of Artificial Sequence: Synthetic oligonucleotide"
  source: /note="RNA"
  source: /note="5' tri-ethylene glycol (TEG)"
  modified_base (1)..(1): 5-methyl modified nucleotide
  modified_base (4)..(4): 5-methyl modified nucleotide
  modified_base (16)..(16): 5-methyl modified nucleotide
  modified_base (21)..(21): 5-methyl modified nucleotide
  source: /note="3' tri-ethylene glycol (TEG)"
caucaaggaagauggcauuuc

SEQ ID NO: 3144 - RNA, 20 nt, Artificial Sequence
  source: /note="Description of Artificial Sequence: Synthetic oligonucleotide"
  source: /note="RNA"
  source: /note="5' tri-ethylene glycol (TEG)"
  modified_base (1)..(1): 5-methyl modified nucleotide
  modified_base (4)..(4): 5-methyl modified nucleotide
  modified_base (16)..(16): 5-methyl modified nucleotide
  source: /note="3' tri-ethylene glycol (TEG)"
caucaaggaagauggcauuu

SEQ ID NO: 3145 - RNA, 19 nt, Artificial Sequence
  source: /note="Description of Artificial Sequence: Synthetic oligonucleotide"
  source: /note="RNA"
  source: /note="5' tri-ethylene glycol (TEG)"
  modified_base (1)..(1): 5-methyl modified nucleotide
  modified_base (4)..(4): 5-methyl modified nucleotide
  modified_base (16)..(16): 5-methyl modified nucleotide
  source: /note="3' tri-ethylene glycol (TEG)"
caucaaggaagauggcauu

SEQ ID NO: 3146 - RNA, 18 nt, Artificial Sequence
  source: /note="Description of Artificial Sequence: Synthetic oligonucleotide"
  source: /note="RNA"
  source: /note="5' tri-ethylene glycol (TEG)"
  modified_base (1)..(1): 5-methyl modified nucleotide
  modified_base (4)..(4): 5-methyl modified nucleotide
  modified_base (16)..(16): 5-methyl modified nucleotide
  source: /note="3' tri-ethylene glycol (TEG)"
caucaaggaagauggcau

SEQ ID NO: 3147 - RNA, 17 nt, Artificial Sequence
  source: /note="Description of Artificial Sequence: Synthetic oligonucleotide"
  source: /note="RNA"
  source: /note="5' tri-ethylene glycol (TEG)"
  modified_base (1)..(1): 5-methyl modified nucleotide
  modified_base (4)..(4): 5-methyl modified nucleotide
  modified_base (16)..(16): 5-methyl modified nucleotide
  source: /note="3' tri-ethylene glycol (TEG)"
caucaaggaagauggca

SEQ ID NO: 3148 - RNA, 16 nt, Artificial Sequence
  source: /note="Description of Artificial Sequence: Synthetic oligonucleotide"
  source: /note="RNA"
  source: /note="5' tri-ethylene glycol (TEG)"
  modified_base (1)..(1): 5-methyl modified nucleotide
  modified_base (4)..(4): 5-methyl modified nucleotide
  modified_base (16)..(16): 5-methyl modified nucleotide
  source: /note="3' tri-ethylene glycol (TEG)"
caucaaggaagauggc

SEQ ID NO: 3149 - RNA, 15 nt, Artificial Sequence
  source: /note="Description of Artificial Sequence: Synthetic oligonucleotide"
  source: /note="RNA"
  source: /note="5' tri-ethylene glycol (TEG)"
  modified_base (1)..(1): 5-methyl modified nucleotide
  modified_base (4)..(4): 5-methyl modified nucleotide
  source: /note="3' tri-ethylene glycol (TEG)"
caucaaggaagaugg

SEQ ID NO: 3150 - RNA, 14 nt, Artificial Sequence
  source: /note="Description of Artificial Sequence: Synthetic oligonucleotide"
  source: /note="RNA"
  source: /note="5' tri-ethylene glycol (TEG)"
  modified_base (1)..(1): 5-methyl modified nucleotide
  modified_base (4)..(4): 5-methyl modified nucleotide
  source: /note="3' tri-ethylene glycol (TEG)"
caucaaggaagaug

SEQ ID NO: 3151 - RNA, 13 nt, Artificial Sequence
  source: /note="Description of Artificial Sequence: Synthetic oligonucleotide"
  source: /note="RNA"
  source: /note="5' tri-ethylene glycol (TEG)"
  modified_base (1)..(1): 5-methyl modified nucleotide
  modified_base (4)..(4): 5-methyl modified nucleotide
  source: /note="3' tri-ethylene glycol (TEG)"
caucaaggaagau

SEQ ID NO: 3152 - RNA, 12 nt, Artificial Sequence
  source: /note="Description of Artificial Sequence: Synthetic oligonucleotide"
  source: /note="RNA"
  source: /note="5' tri-ethylene glycol (TEG)"
  modified_base (1)..(1): 5-methyl modified nucleotide
  modified_base (4)..(4): 5-methyl modified nucleotide
  source: /note="3' tri-ethylene glycol (TEG)"
caucaaggaaga

SEQ ID NO: 3153 - RNA, 11 nt, Artificial Sequence
  source: /note="Description of Artificial Sequence: Synthetic oligonucleotide"
  source: /note="RNA"
  source: /note="5' tri-ethylene glycol (TEG)"
  modified_base (1)..(1): 5-methyl modified nucleotide
  modified_base (4)..(4): 5-methyl modified nucleotide
  source: /note="3' tri-ethylene glycol (TEG)"
caucaaggaag

SEQ ID NO: 3154 - RNA, 23 nt, Artificial Sequence
  source: /note="Description of Artificial Sequence: Synthetic oligonucleotide"
  source: /note="RNA"
  source: /note="5' tri-ethylene glycol (TEG)"
  modified_base (3)..(3): 5-methyl modified nucleotide
  modified_base (15)..(15): 5-methyl modified nucleotide
  modified_base (20)..(20): 5-methyl modified nucleotide
  source: /note="3' tri-ethylene glycol (TEG)"
aucaaggaagauggcauuucuag

SEQ ID NO: 3155 - RNA, 22 nt, Artificial Sequence
  source: /note="Description of Artificial Sequence: Synthetic oligonucleotide"
  source: /note="RNA"
  source: /note="5' tri-ethylene glycol (TEG)"
  modified_base (3)..(3): 5-methyl modified nucleotide
  modified_base (15)..(15): 5-methyl modified nucleotide
  modified_base (20)..(20): 5-methyl modified nucleotide
  source: /note="3' tri-ethylene glycol (TEG)"
aucaaggaagauggcauuucua

SEQ ID NO: 3156 - RNA, 21 nt, Artificial Sequence
  source: /note="Description of Artificial Sequence: Synthetic oligonucleotide"
  source: /note="RNA"
  source: /note="5' tri-ethylene glycol (TEG)"
  modified_base (3)..(3): 5-methyl modified nucleotide
  modified_base (15)..(15): 5-methyl modified nucleotide
  modified_base (20)..(20): 5-methyl modified nucleotide
  source: /note="3' tri-ethylene glycol (TEG)"
aucaaggaagauggcauuucu

SEQ ID NO: 3157 - RNA, 20 nt, Artificial Sequence
  source: /note="Description of Artificial Sequence: Synthetic oligonucleotide"
  source: /note="RNA"
  source: /note="5' tri-ethylene glycol (TEG)"
  modified_base (3)..(3): 5-methyl modified nucleotide
  modified_base (15)..(15): 5-methyl modified nucleotide
  modified_base (20)..(20): 5-methyl modified nucleotide
  source: /note="3' tri-ethylene glycol (TEG)"
aucaaggaagauggcauuuc

SEQ ID NO: 3158 - RNA, 19 nt, Artificial Sequence
  source: /note="Description of Artificial Sequence: Synthetic oligonucleotide"
  source: /note="RNA"
  source: /note="5' tri-ethylene glycol (TEG)"
  modified_base (3)..(3): 5-methyl modified nucleotide
  modified_base (15)..(15): 5-methyl modified nucleotide
  source: /note="3' tri-ethylene glycol (TEG)"
aucaaggaagauggcauuu

SEQ ID NO: 3159 - RNA, 18 nt, Artificial Sequence
  source: /note="Description of Artificial Sequence: Synthetic oligonucleotide"
  source: /note="RNA"
  source: /note="5' tri-ethylene glycol (TEG)"
  modified_base (3)..(3): 5-methyl modified nucleotide
  modified_base (15)..(15): 5-methyl modified nucleotide
  source: /note="3' tri-ethylene glycol (TEG)"
aucaaggaagauggcauu

SEQ ID NO: 3160 - RNA, 17 nt, Artificial Sequence
  source: /note="Description of Artificial Sequence: Synthetic oligonucleotide"
  source: /note="RNA"
  source: /note="5' tri-ethylene glycol (TEG)"
  modified_base (3)..(3): 5-methyl modified nucleotide
  modified_base (15)..(15): 5-methyl modified nucleotide
  source: /note="3' tri-ethylene glycol (TEG)"
aucaaggaagauggcau

SEQ ID NO: 3161 - RNA, 16 nt, Artificial Sequence
  source: /note="Description of Artificial Sequence: Synthetic oligonucleotide"
  source: /note="RNA"
  source: /note="5' tri-ethylene glycol (TEG)"
  modified_base (3)..(3): 5-methyl modified nucleotide
  modified_base (15)..(15): 5-methyl modified nucleotide
  source: /note="3' tri-ethylene glycol (TEG)"
aucaaggaagauggca

SEQ ID NO: 3162 - RNA, 15 nt, Artificial Sequence
  source: /note="Description of Artificial Sequence: Synthetic oligonucleotide"
  source: /note="RNA"
  source: /note="5' tri-ethylene glycol (TEG)"
  modified_base (3)..(3): 5-methyl modified nucleotide
  modified_base (15)..(15): 5-methyl modified nucleotide
  source: /note="3' tri-ethylene glycol (TEG)"
aucaaggaagauggc

SEQ ID NO: 3163 - RNA, 14 nt, Artificial Sequence
  source: /note="Description of Artificial Sequence: Synthetic oligonucleotide"
  source: /note="RNA"
  source: /note="5' tri-ethylene glycol (TEG)"
  modified_base (3)..(3): 5-methyl modified nucleotide
  source: /note="3' tri-ethylene glycol (TEG)"
aucaaggaagaugg

SEQ ID NO: 3164 - RNA, 13 nt, Artificial Sequence
  source: /note="Description of Artificial Sequence: Synthetic oligonucleotide"
  source: /note="RNA"
  source: /note="5' tri-ethylene glycol (TEG)"
  modified_base (3)..(3): 5-methyl modified nucleotide
  source: /note="3' tri-ethylene glycol (TEG)"
aucaaggaagaug

SEQ ID NO: 3165 - RNA, 12 nt, Artificial Sequence
  source: /note="Description of Artificial Sequence: Synthetic oligonucleotide"
  source: /note="RNA"
  source: /note="5' tri-ethylene glycol (TEG)"
  modified_base (3)..(3): 5-methyl modified nucleotide
  source: /note="3' tri-ethylene glycol (TEG)"
aucaaggaagau

SEQ ID NO: 3166 - RNA, 11 nt, Artificial Sequence
  source: /note="Description of Artificial Sequence: Synthetic oligonucleotide"
  source: /note="RNA"
  source: /note="5' tri-ethylene glycol (TEG)"
  modified_base (3)..(3): 5-methyl modified nucleotide
  source: /note="3' tri-ethylene glycol (TEG)"
aucaaggaaga

SEQ ID NO: 3167 - RNA, 10 nt, Artificial Sequence
  source: /note="Description of Artificial Sequence: Synthetic oligonucleotide"
  source: /note="RNA"
  source: /note="5' tri-ethylene glycol (TEG)"
  modified_base (3)..(3): 5-methyl modified nucleotide
  source: /note="3' tri-ethylene glycol (TEG)"
aucaaggaag

SEQ ID NO: 3168 - RNA, 23 nt, Artificial Sequence
  source: /note="Description of Artificial Sequence: Synthetic oligonucleotide"
  source: /note="RNA"
  source: /note="5' tri-ethylene glycol (TEG)"
  modified_base (1)..(1): 5-methyl modified nucleotide
  modified_base (2)..(2): 5-methyl modified nucleotide
  modified_base (7)..(7): 5-methyl modified nucleotide
  modified_base (13)..(13): 5-methyl modified nucleotide
  modified_base (14)..(14): 5-methyl modified nucleotide
  modified_base (16)..(16): 5-methyl modified nucleotide
  modified_base (17)..(17): 5-methyl modified nucleotide
  modified_base (20)..(20): 5-methyl modified nucleotide
  modified_base (23)..(23): 5-methyl modified nucleotide
  source: /note="3' tri-ethylene glycol (TEG)"
ccagagcagguaccuccaacauc

SEQ ID NO: 3169 - RNA, 18 nt, Artificial Sequence
  source: /note="Description of Artificial Sequence: Synthetic oligonucleotide"
  source: /note="RNA"
  source: /note="5' tri-ethylene glycol (TEG)"
  modified_base (1)..(1): 5-methyl modified nucleotide
  modified_base (2)..(2): 5-methyl modified nucleotide
  modified_base (7)..(7): 5-methyl modified nucleotide
  modified_base (13)..(13): 5-methyl modified nucleotide
  modified_base (14)..(14): 5-methyl modified nucleotide
  modified_base (16)..(16): 5-methyl modified nucleotide
  modified_base (17)..(17): 5-methyl modified nucleotide
  source: /note="3' tri-ethylene glycol (TEG)"
ccagagcagguaccucca

SEQ ID NO: 3170 - RNA, 23 nt, Artificial Sequence
  source: /note="Description of Artificial Sequence: Synthetic oligonucleotide"
  source: /note="RNA"
  source: /note="5' tri-ethylene glycol (TEG)"
  modified_base (1)..(1): 5-methyl modified nucleotide
  modified_base (2)..(2): 5-methyl modified nucleotide
  modified_base (4)..(4): 5-methyl modified nucleotide
  modified_base (18)..(18): 5-methyl modified nucleotide
  source: /note="3' tri-ethylene glycol (TEG)"
ccucugugauuuuauaacuugau

SEQ ID NO: 3171 - RNA, 17 nt, Artificial Sequence
  source: /note="Description of Artificial Sequence: Synthetic oligonucleotide"
  source: /note="RNA"
  source: /note="5' tri-ethylene glycol (TEG)"
  modified_base (2)..(2): 5-methyl modified nucleotide
  modified_base (4)..(4): 5-methyl modified nucleotide
  modified_base (5)..(5): 5-methyl modified nucleotide
  modified_base (6)..(6): 5-methyl modified nucleotide
  modified_base (8)..(8): 5-methyl modified nucleotide
  modified_base (9)..(9): 5-methyl modified nucleotide
  modified_base (12)..(12): 5-methyl modified nucleotide
  modified_base (14)..(14): 5-methyl modified nucleotide
  modified_base (15)..(15): 5-methyl modified nucleotide
  modified_base (16)..(16): 5-methyl modified nucleotide
  source: /note="3' tri-ethylene glycol (TEG)"
ucacccaccaucacccu

SEQ ID NO: 3172 - RNA, 20 nt, Artificial Sequence
  source: /note="Description of Artificial Sequence: Synthetic oligonucleotide"
  source: /note="RNA"
  source: /note="5' tri-ethylene glycol (TEG)"
  modified_base (7)..(7): 5-methyl modified nucleotide
  modified_base (8)..(8): 5-methyl modified nucleotide
  modified_base (10)..(10): 5-methyl modified nucleotide
  modified_base (16)..(16): 5-methyl modified nucleotide
  modified_base (18)..(18): 5-methyl modified nucleotide
  modified_base (19)..(19): 5-methyl modified nucleotide
  modified_base (20)..(20): 5-methyl modified nucleotide
  source: /note="3' tri-ethylene glycol (TEG)"
ugauauccucaaggucaccc

SEQ ID NO: 3173 - RNA, 22 nt, Artificial Sequence
  source: /note="Description of Artificial Sequence: Synthetic oligonucleotide"
  source: /note="RNA"
  source: /note="5' tri-ethylene glycol (TEG)"
  modified_base (1)..(1): 5-methyl modified nucleotide
  modified_base (4)..(4): 5-methyl modified nucleotide
  modified_base (13)..(13): 5-methyl modified nucleotide
  modified_base (16)..(16): 5-methyl modified nucleotide
  modified_base (18)..(18): 5-methyl modified nucleotide
  source: /note="3' tri-ethylene glycol (TEG)"
cugcuugaugaucaucucguug

SEQ ID NO: 3174 - RNA, 18 nt, Artificial Sequence
  source: /note="Description of Artificial Sequence: Synthetic oligonucleotide"
  source: /note="RNA"
  source: /note="5' tri-ethylene glycol (TEG)"
  modified_base (1)..(1): 5-methyl modified nucleotide
  modified_base (4)..(4): 5-methyl modified nucleotide
  modified_base (13)..(13): 5-methyl modified nucleotide
  modified_base (16)..(16): 5-methyl modified nucleotide
  modified_base (18)..(18): 5-methyl modified nucleotide
  source: /note="3' tri-ethylene glycol (TEG)"
cugcuugaugaucaucuc

SEQ ID NO: 3175 - RNA, 19 nt, Artificial Sequence
  source: /note="Description of Artificial Sequence: Synthetic oligonucleotide"
  source: /note="RNA"
  source: /note="5' tri-ethylene glycol (TEG)"
  modified_base (5)..(5): 5-methyl modified nucleotide
  modified_base (6)..(6): 5-methyl modified nucleotide
  modified_base (14)..(14): 5-methyl modified nucleotide
  modified_base (15)..(15): 5-methyl modified nucleotide
  modified_base (17)..(17): 5-methyl modified nucleotide
  source: /note="3' tri-ethylene glycol (TEG)"
guuuccuuaguaaccacag

SEQ ID NO: 3176 - RNA, 17 nt, Artificial Sequence
  source: /note="Description of Artificial Sequence: Synthetic oligonucleotide"
  source: /note="RNA"
  source: /note="5' tri-ethylene glycol (TEG)"
  modified_base (5)..(5): 5-methyl modified nucleotide
  modified_base (6)..(6): 5-methyl modified nucleotide
  modified_base (14)..(14): 5-methyl modified nucleotide
  modified_base (15)..(15): 5-methyl modified nucleotide
  modified_base (17)..(17): 5-methyl modified nucleotide
  source: /note="3' tri-ethylene glycol (TEG)"
guuuccuuaguaaccac

SEQ ID NO: 3177 - DNA, 20 bp, Artificial Sequence
  source: /note="Description of Artificial Sequence: Synthetic oligonucleotide"
  source: /note="Description of Combined DNA/RNA Molecule: Synthetic oligonucleotide"
  source: /note="DNA/RNA"
  modified_base (1)..(1): bicyclic nucleic acid (BNA)
tcaaggaagauggcauuucu

SEQ ID NO: 3178 - DNA, 22 bp, Artificial Sequence
  source: /note="Description of Artificial Sequence: Synthetic oligonucleotide"
  source: /note="Description of Combined DNA/RNA Molecule: Synthetic oligonucleotide"
  source: /note="DNA/RNA"
  modified_base (1)..(1): bicyclic nucleic acid (BNA)
tcaaggaagauggcauuucuag

SEQ ID NO: 3179 - RNA, 18 nt, Artificial Sequence
  source: /note="Description of Artificial Sequence: Synthetic oligonucleotide"
  source: /note="RNA"
  modified_base (1)..(1): bicyclic nucleic acid (BNA)
gguaaguucuguccaagc

SEQ ID NO: 3180 - RNA, 18 nt, Artificial Sequence
  source: /note="Description of Artificial Sequence: Synthetic oligonucleotide"
  source: /note="RNA"
  modified_base (1)..(1): bicyclic nucleic acid (BNA)
guaaguucuguccaagcc

SEQ ID NO: 3181 - RNA, 18 nt, Artificial Sequence
  source: /note="Description of Artificial Sequence: Synthetic oligonucleotide"
  source: /note="RNA"
  modified_base (1)..(1): bicyclic nucleic acid (BNA)
agucgguaaguucugucc

SEQ ID NO: 3182 - RNA, 18 nt, Artificial Sequence
  source: /note="Description of Artificial Sequence: Synthetic oligonucleotide"
  source: /note="RNA"
  modified_base (1)..(1): bicyclic nucleic acid (BNA)
cuguccaagcccgguuga

SEQ ID NO: 3183 - DNA, 15 bp, Artificial Sequence
  source: /note="Description of Artificial Sequence: Synthetic oligonucleotide"
  source: /note="Description of Combined DNA/RNA Molecule: Synthetic oligonucleotide"
  source: /note="DNA/RNA"
  modified_base (1)..(1): bicyclic nucleic acid (BNA)
taaguucuguccaag

SEQ ID NO: 3184 - DNA, 20 bp, Artificial Sequence
  source: /note="Description of Artificial Sequence: Synthetic oligonucleotide"
  source: /note="Description of Combined DNA/RNA Molecule: Synthetic oligonucleotide"
  source: /note="DNA/RNA"
  modified_base (1)..(1): bicyclic nucleic acid (BNA)
tucuguccaagcccgguuga

SEQ ID NO: 3185 - DNA, 19 bp, Artificial Sequence
  source: /note="Description of Artificial Sequence: Synthetic oligonucleotide"
  source: /note="Description of Combined DNA/RNA Molecule: Synthetic oligonucleotide"
  source: /note="DNA/RNA"
  modified_base (1)..(1): bicyclic nucleic acid (BNA)
tucuguccaagcccgguug

SEQ ID NO: 3186 - DNA, 18 bp, Artificial Sequence
  source: /note="Description of Artificial Sequence: Synthetic oligonucleotide"
  source: /note="Description of Combined DNA/RNA Molecule: Synthetic oligonucleotide"
  source: /note="DNA/RNA"
  modified_base (1)..(1): bicyclic nucleic acid (BNA)
tucuguccaagcccgguu

SEQ ID NO: 3187 - DNA, 17 bp, Artificial Sequence
  source: /note="Description of Artificial Sequence: Synthetic oligonucleotide"
  source: /note="Description of Combined DNA/RNA Molecule: Synthetic oligonucleotide"
  source: /note="DNA/RNA"
  modified_base (1)..(1): bicyclic nucleic acid (BNA)
tucuguccaagcccggu

SEQ ID NO: 3188 - DNA, 16 bp, Artificial Sequence
  source: /note="Description of Artificial Sequence: Synthetic oligonucleotide"
  source: /note="Description of Combined DNA/RNA Molecule: Synthetic oligonucleotide"
  source: /note="DNA/RNA"
  modified_base (1)..(1): bicyclic nucleic acid (BNA)
tucuguccaagcccgg

SEQ ID NO: 3189 - DNA, 15 bp, Artificial Sequence
  source: /note="Description of Artificial Sequence: Synthetic oligonucleotide"
  source: /note="Description of Combined DNA/RNA Molecule: Synthetic oligonucleotide"
  source: /note="DNA/RNA"
  modified_base (1)..(1): bicyclic nucleic acid (BNA)
tucuguccaagcccg

SEQ ID NO: 3190 - DNA, 14 bp, Artificial Sequence
  source: /note="Description of Artificial Sequence: Synthetic oligonucleotide"
  source: /note="Description of Combined DNA/RNA Molecule: Synthetic oligonucleotide"
  source: /note="DNA/RNA"
  modified_base (1)..(1): bicyclic nucleic acid (BNA)
tucuguccaagccc

SEQ ID NO: 3191 - DNA, 13 bp, Artificial Sequence
  source: /note="Description of Artificial Sequence: Synthetic oligonucleotide"
  source: /note="Description of Combined DNA/RNA Molecule: Synthetic oligonucleotide"
  source: /note="DNA/RNA"
  modified_base (1)..(1): bicyclic nucleic acid (BNA)
tucuguccaagcc

SEQ ID NO: 3192 - DNA, 12 bp, Artificial Sequence
  source: /note="Description of Artificial Sequence: Synthetic oligonucleotide"
  source: /note="Description of Combined DNA/RNA Molecule: Synthetic oligonucleotide"
  source: /note="DNA/RNA"
  modified_base (1)..(1): bicyclic nucleic acid (BNA)
tucuguccaagc

SEQ ID NO: 3193 - DNA, 11 bp, Artificial Sequence
  source: /note="Description of Artificial Sequence: Synthetic oligonucleotide"
  source: /note="Description of Combined DNA/RNA Molecule: Synthetic oligonucleotide"
  source: /note="DNA/RNA"
  modified_base (1)..(1): bicyclic nucleic acid (BNA)
tucuguccaag

SEQ ID NO: 3194 - DNA, 10 bp, Artificial Sequence
  source: /note="Description of Artificial Sequence: Synthetic oligonucleotide"
  source: /note="Description of Combined DNA/RNA Molecule: Synthetic oligonucleotide"
  source: /note="DNA/RNA"
  modified_base (1)..(1): bicyclic nucleic acid (BNA)
tucuguccaa

SEQ ID NO: 3195 - DNA, 9 bp, Artificial Sequence
  source: /note="Description of Artificial Sequence: Synthetic oligonucleotide"
  source: /note="Description of Combined DNA/RNA Molecule: Synthetic oligonucleotide"
  source: /note="DNA/RNA"
  modified_base (1)..(1): bicyclic nucleic acid (BNA)
tucugucca

SEQ ID NO: 3196 - DNA, 8 bp, Artificial Sequence
  source: /note="Description of Artificial Sequence: Synthetic oligonucleotide"
  source: /note="Description of Combined DNA/RNA Molecule: Synthetic oligonucleotide"
  source: /note="DNA/RNA"
  modified_base (1)..(1): bicyclic nucleic acid (BNA)
tucugucc

SEQ ID NO: 3197 - DNA, 19 bp, Artificial Sequence
  source: /note="Description of Artificial Sequence: Synthetic oligonucleotide"
  source: /note="Description of Combined DNA/RNA Molecule: Synthetic oligonucleotide"
  source: /note="DNA/RNA"
  modified_base (1)..(1): bicyclic nucleic acid (BNA)
tcuguccaagcccgguuga

SEQ ID NO: 3198 - DNA, 18 bp, Artificial Sequence
  source: /note="Description of Artificial Sequence: Synthetic oligonucleotide"
  source: /note="Description of Combined DNA/RNA Molecule: Synthetic oligonucleotide"
  source: /note="DNA/RNA"
  modified_base (1)..(1): bicyclic nucleic acid (BNA)
tcuguccaagcccgguug

SEQ ID NO: 3199 - DNA, 17 bp, Artificial Sequence
  source: /note="Description of Artificial Sequence: Synthetic oligonucleotide"
  source: /note="Description of Combined DNA/RNA Molecule: Synthetic oligonucleotide"
  source: /note="DNA/RNA"
  modified_base (1)..(1): bicyclic nucleic acid (BNA)
tcuguccaagcccgguu

SEQ ID NO: 3200 - DNA, 16 bp, Artificial Sequence
  source: /note="Description of Artificial Sequence: Synthetic oligonucleotide"
  source: /note="Description of Combined DNA/RNA Molecule: Synthetic oligonucleotide"
  source: /note="DNA/RNA"
  modified_base (1)..(1): bicyclic nucleic acid (BNA)
tcuguccaagcccggu

SEQ ID NO: 3201 - DNA, 15 bp, Artificial Sequence
  source: /note="Description of Artificial Sequence: Synthetic oligonucleotide"
  source: /note="Description of Combined DNA/RNA Molecule: Synthetic oligonucleotide"
  source: /note="DNA/RNA"
  modified_base (1)..(1): bicyclic nucleic acid (BNA)
tcuguccaagcccgg

SEQ ID NO: 3202 - DNA, 14 bp, Artificial Sequence
  source: /note="Description of Artificial Sequence: Synthetic oligonucleotide"
  source: /note="Description of Combined DNA/RNA Molecule: Synthetic oligonucleotide"
  source: /note="DNA/RNA"
  modified_base (1)..(1): bicyclic nucleic acid (BNA)
tcuguccaagcccg

SEQ ID NO: 3203 - DNA, 13 bp, Artificial Sequence
  source: /note="Description of Artificial Sequence: Synthetic oligonucleotide"
  source: /note="Description of Combined DNA/RNA Molecule: Synthetic oligonucleotide"
  source: /note="DNA/RNA"
  modified_base (1)..(1): bicyclic nucleic acid (BNA)
tcuguccaagccc

SEQ ID NO: 3204 - DNA, 12 bp, Artificial Sequence
  source: /note="Description of Artificial Sequence: Synthetic oligonucleotide"
  source: /note="Description of Combined DNA/RNA Molecule: Synthetic oligonucleotide"
  source: /note="DNA/RNA"
  modified_base (1)..(1): bicyclic nucleic acid (BNA)
tcuguccaagcc

SEQ ID NO: 3205 - DNA, 11 bp, Artificial Sequence
  source: /note="Description of Artificial Sequence: Synthetic oligonucleotide"
  source: /note="Description of Combined DNA/RNA Molecule: Synthetic oligonucleotide"
  source: /note="DNA/RNA"
  modified_base (1)..(1): bicyclic nucleic acid (BNA)
tcuguccaagc

SEQ ID NO: 3206 - DNA, 10 bp, Artificial Sequence
  source: /note="Description of Artificial Sequence: Synthetic oligonucleotide"
  source: /note="Description of Combined DNA/RNA Molecule: Synthetic oligonucleotide"
  source: /note="DNA/RNA"
  modified_base (1)..(1): bicyclic nucleic acid (BNA)
tcuguccaag

SEQ ID NO: 3207 - DNA, 9 bp, Artificial Sequence
  source: /note="Description of Artificial Sequence: Synthetic oligonucleotide"
  source: /note="Description of Combined DNA/RNA Molecule: Synthetic oligonucleotide"
  source: /note="DNA/RNA"
  modified_base (1)..(1): bicyclic nucleic acid (BNA)
tcuguccaa

SEQ ID NO: 3208 - DNA, 8 bp, Artificial Sequence
  source: /note="Description of Artificial Sequence: Synthetic oligonucleotide"
  source: /note="Description of Combined DNA/RNA Molecule: Synthetic oligonucleotide"
  source: /note="DNA/RNA"
  modified_base (1)..(1): bicyclic nucleic acid (BNA)
tcugucca

SEQ ID NO: 3209 - RNA, 17 nt, Artificial Sequence
  source: /note="Description of Artificial Sequence: Synthetic oligonucleotide"
  source: /note="RNA"
  modified_base (1)..(1): bicyclic nucleic acid (BNA)
cuguccaagcccgguug

SEQ ID NO: 3210 - RNA, 16 nt, Artificial Sequence
  source: /note="Description of Artificial Sequence: Synthetic oligonucleotide"
  source: /note="RNA"
  modified_base (1)..(1): bicyclic nucleic acid (BNA)
cuguccaagcccgguu

SEQ ID NO: 3211 - RNA, 15 nt, Artificial Sequence
  source: /note="Description of Artificial Sequence: Synthetic oligonucleotide"
  source: /note="RNA"
  modified_base (1)..(1): bicyclic nucleic acid (BNA)
cuguccaagcccggu

SEQ ID NO: 3212 - RNA, 14 nt, Artificial Sequence
  source: /note="Description of Artificial Sequence: Synthetic oligonucleotide"
  source: /note="RNA"
  modified_base (1)..(1): bicyclic nucleic acid (BNA)
cuguccaagcccgg

SEQ ID NO: 3213 - RNA, 13 nt, Artificial Sequence
  source: /note="Description of Artificial Sequence: Synthetic oligonucleotide"
  source: /note="RNA"
  modified_base (1)..(1): bicyclic nucleic acid (BNA)
cuguccaagcccg

SEQ ID NO: 3214 - RNA, 12 nt, Artificial Sequence
  source: /note="Description of Artificial Sequence: Synthetic oligonucleotide"
  source: /note="RNA"
  modified_base (1)..(1): bicyclic nucleic acid (BNA)
cuguccaagccc

SEQ ID NO: 3215 - RNA, 11 nt, Artificial Sequence
  source: /note="Description of Artificial Sequence: Synthetic oligonucleotide"
  source: /note="RNA"
  modified_base (1)..(1): bicyclic nucleic acid (BNA)
cuguccaagcc

SEQ ID NO: 3216 - RNA, 10 nt, Artificial Sequence
  source: /note="Description of Artificial Sequence: Synthetic oligonucleotide"
  source: /note="RNA"
  modified_base (1)..(1): bicyclic nucleic acid (BNA)
cuguccaagc

SEQ ID NO: 3217 - RNA, 9 nt, Artificial Sequence
  source: /note="Description of Artificial Sequence: Synthetic oligonucleotide"
  source: /note="RNA"
  modified_base (1)..(1): bicyclic nucleic acid (BNA)
cuguccaag

SEQ ID NO: 3218 - RNA, 8 nt, Artificial Sequence
  source: /note="Description of Artificial Sequence: Synthetic oligonucleotide"
  source: /note="RNA"
  modified_base (1)..(1): bicyclic nucleic acid (BNA)
cuguccaa

SEQ ID NO: 3219 - RNA, 20 nt, Artificial Sequence
  source: /note="Description of Artificial Sequence: Synthetic oligonucleotide"
  source: /note="RNA"
  modified_base (1)..(1): bicyclic nucleic acid (BNA)
guucuguccaagcccgguug

SEQ ID NO: 3220 - RNA, 19 nt, Artificial Sequence
  source: /note="Description of Artificial Sequence: Synthetic oligonucleotide"
  source: /note="RNA"
  modified_base (1)..(1): bicyclic nucleic acid (BNA)
guucuguccaagcccgguu

SEQ ID NO: 3221 - RNA, 18 nt, Artificial Sequence
  source: /note="Description of Artificial Sequence: Synthetic oligonucleotide"
  source: /note="RNA"
  modified_base (1)..(1): bicyclic nucleic acid (BNA)
guucuguccaagcccggu

SEQ ID NO: 3222 - RNA, 17 nt, Artificial Sequence
  source: /note="Description of Artificial Sequence: Synthetic oligonucleotide"
  source: /note="RNA"
  modified_base (1)..(1): bicyclic nucleic acid (BNA)
guucuguccaagcccgg

SEQ ID NO: 3223 - RNA, 16 nt, Artificial Sequence
  source: /note="Description of Artificial Sequence: Synthetic oligonucleotide"
  source: /note="RNA"
  modified_base (1)..(1): bicyclic nucleic acid (BNA)
guucuguccaagcccg

SEQ ID NO: 3224 - RNA, 15 nt, Artificial Sequence
  source: /note="Description of Artificial Sequence: Synthetic oligonucleotide"
  source: /note="RNA"
  modified_base (1)..(1): bicyclic nucleic acid (BNA)
guucuguccaagccc

SEQ ID NO: 3225 - RNA, 14 nt, Artificial Sequence
  source: /note="Description of Artificial Sequence: Synthetic oligonucleotide"
  source: /note="RNA"
  modified_base (1)..(1): bicyclic nucleic acid (BNA)
guucuguccaagcc

SEQ ID NO: 3226 - RNA, 13 nt, Artificial Sequence
  source: /note="Description of Artificial Sequence: Synthetic oligonucleotide"
  source: /note="RNA"
  modified_base (1)..(1): bicyclic nucleic acid (BNA)
guucuguccaagc

SEQ ID NO: 3227 - RNA, 12 nt, Artificial Sequence
  source: /note="Description of Artificial Sequence: Synthetic oligonucleotide"
  source: /note="RNA"
  modified_base (1)..(1): bicyclic nucleic acid (BNA)
guucuguccaag

SEQ ID NO: 3228 - RNA, 11 nt, Artificial Sequence
  source: /note="Description of Artificial Sequence: Synthetic oligonucleotide"
  source: /note="RNA"
  modified_base (1)..(1): bicyclic nucleic acid (BNA)
guucuguccaa

SEQ ID NO: 3229 - RNA, 10 nt, Artificial Sequence
  source: /note="Description of Artificial Sequence: Synthetic oligonucleotide"
  source: /note="RNA"
  modified_base (1)..(1): bicyclic nucleic acid (BNA)
guucugucca

SEQ ID NO: 3230 - RNA, 9 nt, Artificial Sequence
  source: /note="Description of Artificial Sequence: Synthetic oligonucleotide"
  source: /note="RNA"
  modified_base (1)..(1): bicyclic nucleic acid (BNA)
guucugucc

SEQ ID NO: 3231 - RNA, 8 nt, Artificial Sequence
  source: /note="Description of Artificial Sequence: Synthetic oligonucleotide"
  source: /note="RNA"
  modified_base (1)..(1): bicyclic nucleic acid (BNA)
guucuguc

SEQ ID NO: 3232 - RNA, 20 nt, Artificial Sequence
  source: /note="Description of Artificial Sequence: Synthetic oligonucleotide"
  source: /note="RNA"
  modified_base (1)..(1): bicyclic nucleic acid (BNA)
aguucuguccaagcccgguu

SEQ ID NO: 3233 - RNA, 19 nt, Artificial Sequence
  source: /note="Description of Artificial Sequence: Synthetic oligonucleotide"
  source: /note="RNA"
  modified_base (1)..(1): bicyclic nucleic acid (BNA)
aguucuguccaagcccggu

SEQ ID NO: 3234 - RNA, 18 nt, Artificial Sequence
  source: /note="Description of Artificial Sequence: Synthetic oligonucleotide"
  source: /note="RNA"
  modified_base (1)..(1): bicyclic nucleic acid (BNA)
aguucuguccaagcccgg

SEQ ID NO: 3235 - RNA, 17 nt, Artificial Sequence
  source: /note="Description of Artificial Sequence: Synthetic oligonucleotide"
  source: /note="RNA"
  modified_base (1)..(1): bicyclic nucleic acid (BNA)
aguucuguccaagcccg

SEQ ID NO: 3236 - RNA, 16 nt, Artificial Sequence
  source: /note="Description of Artificial Sequence: Synthetic oligonucleotide"
  source: /note="RNA"
  modified_base (1)..(1): bicyclic nucleic acid (BNA)
aguucuguccaagccc

SEQ ID NO: 3237 - RNA, 15 nt, Artificial Sequence
  source: /note="Description of Artificial Sequence: Synthetic oligonucleotide"
  source: /note="RNA"
  modified_base (1)..(1): bicyclic nucleic acid (BNA)
aguucuguccaagcc

SEQ ID NO: 3238 - RNA, 14 nt, Artificial Sequence
  source: /note="Description of Artificial Sequence: Synthetic oligonucleotide"
  source: /note="RNA"
  modified_base (1)..(1): bicyclic nucleic acid (BNA)
aguucuguccaagc

SEQ ID NO: 3239 - RNA, 13 nt, Artificial Sequence
  source: /note="Description of Artificial Sequence: Synthetic oligonucleotide"
  source: /note="RNA"
  modified_base (1)..(1): bicyclic nucleic acid (BNA)
aguucuguccaag

SEQ ID NO: 3240 - RNA, 12 nt, Artificial Sequence
  source: /note="Description of Artificial Sequence: Synthetic oligonucleotide"
  source: /note="RNA"
  modified_base (1)..(1): bicyclic nucleic acid (BNA)
aguucuguccaa

SEQ ID NO: 3241 - RNA, 11 nt, Artificial Sequence
  source: /note="Description of Artificial Sequence: Synthetic oligonucleotide"
  source: /note="RNA"
  modified_base (1)..(1): bicyclic nucleic acid (BNA)
aguucugucca

SEQ ID NO: 3242 - RNA, 10 nt, Artificial Sequence
  source: /note="Description of Artificial Sequence: Synthetic oligonucleotide"
  source: /note="RNA"
  modified_base (1)..(1): bicyclic nucleic acid (BNA)
aguucugucc

SEQ ID NO: 3243 - RNA, 9 nt, Artificial Sequence
  source: /note="Description of Artificial Sequence: Synthetic oligonucleotide"
  source: /note="RNA"
  modified_base (1)..(1): bicyclic nucleic acid (BNA)
aguucuguc

SEQ ID NO: 3244 - RNA, 8 nt, Artificial Sequence
  source: /note="Description of Artificial Sequence: Synthetic oligonucleotide"
  source: /note="RNA"
  modified_base (1)..(1): bicyclic nucleic acid (BNA)
aguucugu

SEQ ID NO: 3245 - RNA, 20 nt, Artificial Sequence
  source: /note="Description of Artificial Sequence: Synthetic oligonucleotide"
  source: /note="RNA"
  modified_base (1)..(1): bicyclic nucleic acid (BNA)
aaguucuguccaagcccggu

SEQ ID NO: 3246 - RNA, 19 nt, Artificial Sequence
  source: /note="Description of Artificial Sequence: Synthetic oligonucleotide"
  source: /note="RNA"
  modified_base (1)..(1): bicyclic nucleic acid (BNA)
aaguucuguccaagcccgg

SEQ ID NO: 3247 - RNA, 18 nt, Artificial Sequence
  source: /note="Description of Artificial Sequence: Synthetic oligonucleotide"
  source: /note="RNA"
  modified_base (1)..(1): bicyclic nucleic acid (BNA)
aaguucuguccaagcccg

SEQ ID NO: 3248 - RNA, 17 nt, Artificial Sequence
  source: /note="Description of Artificial Sequence: Synthetic oligonucleotide"
  source: /note="RNA"
  modified_base (1)..(1): bicyclic nucleic acid (BNA)
aaguucuguccaagccc

SEQ ID NO: 3249 - RNA, 16 nt, Artificial Sequence
  source: /note="Description of Artificial Sequence: Synthetic oligonucleotide"
  source: /note="RNA"
  modified_base (1)..(1): bicyclic nucleic acid (BNA)
aaguucuguccaagcc

SEQ ID NO: 3250 - RNA, 15 nt, Artificial Sequence
  source: /note="Description of Artificial Sequence: Synthetic oligonucleotide"
  source: /note="RNA"
  modified_base (1)..(1): bicyclic nucleic acid (BNA)
aaguucuguccaagc

SEQ ID NO: 3251 - RNA, 14 nt, Artificial Sequence
  source: /note="Description of Artificial Sequence: Synthetic oligonucleotide"
  source: /note="RNA"
  modified_base (1)..(1): bicyclic nucleic acid (BNA)
aaguucuguccaag

SEQ ID NO: 3252 - RNA, 13 nt, Artificial Sequence
  source: /note="Description of Artificial Sequence: Synthetic oligonucleotide"
  source: /note="RNA"
  modified_base (1)..(1): bicyclic nucleic acid (BNA)
aaguucuguccaa

SEQ ID NO: 3253 - RNA, 12 nt, Artificial Sequence
  source: /note="Description of Artificial Sequence: Synthetic oligonucleotide"
  source: /note="RNA"
  modified_base (1)..(1): bicyclic nucleic acid (BNA)
aaguucugucca

SEQ ID NO: 3254 - RNA, 11 nt, Artificial Sequence
  source: /note="Description of Artificial Sequence: Synthetic oligonucleotide"
  source: /note="RNA"
  modified_base (1)..(1): bicyclic nucleic acid (BNA)
aaguucugucc

SEQ ID NO: 3255 - RNA, 10 nt, Artificial Sequence
  source: /note="Description of Artificial Sequence: Synthetic oligonucleotide"
  source: /note="RNA"
  modified_base (1)..(1): bicyclic nucleic acid (BNA)
aaguucuguc

SEQ ID NO: 3256 - RNA, 9 nt, Artificial Sequence
  source: /note="Description of Artificial Sequence: Synthetic oligonucleotide"
  source: /note="RNA"
  modified_base (1)..(1): bicyclic nucleic acid (BNA)
aaguucugu

SEQ ID NO: 3257 - RNA, 8 nt, Artificial Sequence
  source: /note="Description of Artificial Sequence: Synthetic oligonucleotide"
  source: /note="RNA"
  modified_base (1)..(1): bicyclic nucleic acid (BNA)
aaguucug

SEQ ID NO: 3258 - DNA, 20 bp, Artificial Sequence
  source: /note="Description of Artificial Sequence: Synthetic oligonucleotide"
  source: /note="Description of Combined DNA/RNA Molecule: Synthetic oligonucleotide"
  source: /note="DNA/RNA"
  modified_base (1)..(1): bicyclic nucleic acid (BNA)
taaguucuguccaagcccgg

SEQ ID NO: 3259 - DNA, 19 bp, Artificial Sequence
  source: /note="Description of Artificial Sequence: Synthetic oligonucleotide"
  source: /note="Description of Combined DNA/RNA Molecule: Synthetic oligonucleotide"
  source: /note="DNA/RNA"
  modified_base (1)..(1): bicyclic nucleic acid (BNA)
taaguucuguccaagcccg

SEQ ID NO: 3260 - DNA, 18 bp, Artificial Sequence
  source: /note="Description of Artificial Sequence: Synthetic oligonucleotide"
  source: /note="Description of Combined DNA/RNA Molecule: Synthetic oligonucleotide"
  source: /note="DNA/RNA"
  modified_base (1)..(1): bicyclic nucleic acid (BNA)
taaguucuguccaagccc

SEQ ID NO: 3261 - DNA, 17 bp, Artificial Sequence
  source: /note="Description of Artificial Sequence: Synthetic oligonucleotide"
  source: /note="Description of Combined DNA/RNA Molecule: Synthetic oligonucleotide"
  source: /note="DNA/RNA"
  modified_base (1)..(1): bicyclic nucleic acid (BNA)
taaguucuguccaagcc

SEQ ID NO: 3262 - DNA, 16 bp, Artificial Sequence
  source: /note="Description of Artificial Sequence: Synthetic oligonucleotide"
  source: /note="Description of Combined DNA/RNA Molecule: Synthetic oligonucleotide"
  source: /note="DNA/RNA"
  modified_base (1)..(1): bicyclic nucleic acid (BNA)
taaguucuguccaagc

SEQ ID NO: 3263 - DNA, 14 bp, Artificial Sequence
  source: /note="Description of Artificial Sequence: Synthetic oligonucleotide"
  source: /note="Description of Combined DNA/RNA Molecule: Synthetic oligonucleotide"
  source: /note="DNA/RNA"
  modified_base (1)..(1): bicyclic nucleic acid (BNA)
taaguucuguccaa

SEQ ID NO: 3264 - DNA, 13 bp, Artificial Sequence
  source: /note="Description of Artificial Sequence: Synthetic oligonucleotide"
  source: /note="Description of Combined DNA/RNA Molecule: Synthetic oligonucleotide"
  source: /note="DNA/RNA"
  modified_base (1)..(1): bicyclic nucleic acid (BNA)
taaguucugucca

SEQ ID NO: 3265 - DNA, 12 bp, Artificial Sequence
  source: /note="Description of Artificial Sequence: Synthetic oligonucleotide"
  source: /note="Description of Combined DNA/RNA Molecule: Synthetic oligonucleotide"
  source: /note="DNA/RNA"
  modified_base (1)..(1): bicyclic nucleic acid (BNA)
taaguucugucc

SEQ ID NO: 3266 - DNA, 11 bp, Artificial Sequence
  source: /note="Description of Artificial Sequence: Synthetic oligonucleotide"
  source: /note="Description of Combined DNA/RNA Molecule: Synthetic oligonucleotide"
  source: /note="DNA/RNA"
  modified_base (1)..(1): bicyclic nucleic acid (BNA)
taaguucuguc

SEQ ID NO: 3267 - DNA, 10 bp, Artificial Sequence
  source: /note="Description of Artificial Sequence: Synthetic oligonucleotide"
  source: /note="Description of Combined DNA/RNA Molecule: Synthetic oligonucleotide"
  source: /note="DNA/RNA"
  modified_base (1)..(1): bicyclic nucleic acid (BNA)
taaguucugu

SEQ ID NO: 3268 - DNA, 9 bp, Artificial Sequence
  source: /note="Description of Artificial Sequence: Synthetic oligonucleotide"
  source: /note="Description of Combined DNA/RNA Molecule: Synthetic oligonucleotide"
  source: /note="DNA/RNA"
  modified_base (1)..(1): bicyclic nucleic acid (BNA)
taaguucug

SEQ ID NO: 3269 - DNA, 8 bp, Artificial Sequence
  source: /note="Description of Artificial Sequence: Synthetic oligonucleotide"
  source: /note="Description of Combined DNA/RNA Molecule: Synthetic oligonucleotide"
  source: /note="DNA/RNA"
  modified_base (1)..(1): bicyclic nucleic acid (BNA)
taaguucu

SEQ ID NO: 3270 - RNA, 20 nt, Artificial Sequence
  source: /note="Description of Artificial Sequence: Synthetic oligonucleotide"
  source: /note="RNA"
  modified_base (1)..(1): bicyclic nucleic acid (BNA)
guaaguucuguccaagcccg

SEQ ID NO: 3271 - RNA, 19 nt, Artificial Sequence
  source: /note="Description of Artificial Sequence: Synthetic oligonucleotide"
  source: /note="RNA"
  modified_base (1)..(1): bicyclic nucleic acid (BNA)
guaaguucuguccaagccc

SEQ ID NO: 3272 - RNA, 17 nt, Artificial Sequence
  source: /note="Description of Artificial Sequence: Synthetic oligonucleotide"
  source: /note="RNA"
  modified_base (1)..(1): bicyclic nucleic acid (BNA)
guaaguucuguccaagc

SEQ ID NO: 3273 - RNA, 16 nt, Artificial Sequence
  source: /note="Description of Artificial Sequence: Synthetic oligonucleotide"
  source: /note="RNA"
  modified_base (1)..(1): bicyclic nucleic acid (BNA)
guaaguucuguccaag

SEQ ID NO: 3274 - RNA, 15 nt, Artificial Sequence
  source: /note="Description of Artificial Sequence: Synthetic oligonucleotide"
  source: /note="RNA"
  modified_base (1)..(1): bicyclic nucleic acid (BNA)
guaaguucuguccaa

SEQ ID NO: 3275 - RNA, 14 nt, Artificial Sequence
  source: /note="Description of Artificial Sequence: Synthetic oligonucleotide"
  source: /note="RNA"
  modified_base (1)..(1): bicyclic nucleic acid (BNA)
guaaguucugucca

SEQ ID NO: 3276 - RNA, 13 nt, Artificial Sequence
  source: /note="Description of Artificial Sequence: Synthetic oligonucleotide"
  source: /note="RNA"
  modified_base (1)..(1): bicyclic nucleic acid (BNA)
guaaguucugucc

SEQ ID NO: 3277 - RNA, 12 nt, Artificial Sequence
  source: /note="Description of Artificial Sequence: Synthetic oligonucleotide"
  source: /note="RNA"
  modified_base (1)..(1): bicyclic nucleic acid (BNA)
guaaguucuguc

SEQ ID NO: 3278 - RNA, 11 nt, Artificial Sequence
  source: /note="Description of Artificial Sequence: Synthetic oligonucleotide"
  source: /note="RNA"
  modified_base (1)..(1): bicyclic nucleic acid (BNA)
guaaguucugu

SEQ ID NO: 3279 - RNA, 10 nt, Artificial Sequence
  source: /note="Description of Artificial Sequence: Synthetic oligonucleotide"
  source: /note="RNA"
  modified_base (1)..(1): bicyclic nucleic acid (BNA)
guaaguucug

SEQ ID NO: 3280 - RNA, 9 nt, Artificial Sequence
  source: /note="Description of Artificial Sequence: Synthetic oligonucleotide"
  source: /note="RNA"
  modified_base (1)..(1): bicyclic nucleic acid (BNA)
guaaguucu

SEQ ID NO: 3281 - RNA, 8 nt, Artificial Sequence
  source: /note="Description of Artificial Sequence: Synthetic oligonucleotide"
  source: /note="RNA"
  modified_base (1)..(1): bicyclic nucleic acid (BNA)
guaaguuc

SEQ ID NO: 3282 - RNA, 20 nt, Artificial Sequence
  source: /note="Description of Artificial Sequence: Synthetic oligonucleotide"
  source: /note="RNA"
  modified_base (1)..(1): bicyclic nucleic acid (BNA)
gguaaguucuguccaagccc

SEQ ID NO: 3283 - RNA, 19 nt, Artificial Sequence
  source: /note="Description of Artificial Sequence: Synthetic oligonucleotide"
  source: /note="RNA"
  modified_base (1)..(1): bicyclic nucleic acid (BNA)
gguaaguucuguccaagcc

SEQ ID NO: 3284 - RNA, 17 nt, Artificial Sequence
  source: /note="Description of Artificial Sequence: Synthetic oligonucleotide"
  source: /note="RNA"
  modified_base (1)..(1): bicyclic nucleic acid (BNA)
gguaaguucuguccaag

SEQ ID NO: 3285 - RNA, 16 nt, Artificial Sequence
  source: /note="Description of Artificial Sequence: Synthetic oligonucleotide"
  source: /note="RNA"
  modified_base (1)..(1): bicyclic nucleic acid (BNA)
gguaaguucuguccaa

SEQ ID NO: 3286 - RNA, 15 nt, Artificial Sequence
  source: /note="Description of Artificial Sequence: Synthetic oligonucleotide"
  source: /note="RNA"
  modified_base (1)..(1): bicyclic nucleic acid (BNA)
gguaaguucugucca

SEQ ID NO: 3287 - RNA, 14 nt, Artificial Sequence
  source: /note="Description of Artificial Sequence: Synthetic oligonucleotide"
  source: /note="RNA"
  modified_base (1)..(1): bicyclic nucleic acid (BNA)
gguaaguucugucc

SEQ ID NO: 3288 - RNA, 13 nt, Artificial Sequence
  source: /note="Description of Artificial Sequence: Synthetic oligonucleotide"
  source: /note="RNA"
  modified_base (1)..(1): bicyclic nucleic acid (BNA)
gguaaguucuguc

SEQ ID NO: 3289 - RNA, 12 nt, Artificial Sequence
  source: /note="Description of Artificial Sequence: Synthetic oligonucleotide"
  source: /note="RNA"
  modified_base (1)..(1): bicyclic nucleic acid (BNA)
gguaaguucugu

SEQ ID NO: 3290 - RNA, 11 nt, Artificial Sequence
  source: /note="Description of Artificial Sequence: Synthetic oligonucleotide"
  source: /note="RNA"
  modified_base (1)..(1): bicyclic nucleic acid (BNA)
gguaaguucug

SEQ ID NO: 3291 - RNA, 10 nt, Artificial Sequence
  source: /note="Description of Artificial Sequence: Synthetic oligonucleotide"
  source: /note="RNA"
  modified_base (1)..(1): bicyclic nucleic acid (BNA)
gguaaguucu

SEQ ID NO: 3292 - RNA, 9 nt, Artificial Sequence
  source: /note="Description of Artificial Sequence: Synthetic oligonucleotide"
  source: /note="RNA"
  modified_base (1)..(1): bicyclic nucleic acid (BNA)
gguaaguuc

SEQ ID NO: 3293 - RNA, 8 nt, Artificial Sequence
  source: /note="Description of Artificial Sequence: Synthetic oligonucleotide"
  source: /note="RNA"
  modified_base (1)..(1): bicyclic nucleic acid (BNA)
gguaaguu

SEQ ID NO: 3294 - RNA, 20 nt, Artificial Sequence
  source: /note="Description of Artificial Sequence: Synthetic oligonucleotide"
  source: /note="RNA"
  modified_base (1)..(1): bicyclic nucleic acid (BNA)
cgguaaguucuguccaagcc

SEQ ID NO: 3295 - RNA, 19 nt, Artificial Sequence
  source: /note="Description of Artificial Sequence: Synthetic oligonucleotide"
  source: /note="RNA"
  modified_base (1)..(1): bicyclic nucleic acid (BNA)
cgguaaguucuguccaagc

SEQ ID NO: 3296 - RNA, 18 nt, Artificial Sequence
  source: /note="Description of Artificial Sequence: Synthetic oligonucleotide"
  source: /note="RNA"
  modified_base (1)..(1): bicyclic nucleic acid (BNA)
cgguaaguucuguccaag

SEQ ID NO: 3297 - RNA, 17 nt, Artificial Sequence
  source: /note="Description of Artificial Sequence: Synthetic oligonucleotide"
  source: /note="RNA"
  modified_base (1)..(1): bicyclic nucleic acid (BNA)
cgguaaguucuguccaa

SEQ ID NO: 3298 - RNA, 16 nt, Artificial Sequence
  source: /note="Description of Artificial Sequence: Synthetic oligonucleotide"
  source: /note="RNA"
  modified_base (1)..(1): bicyclic nucleic acid (BNA)
cgguaaguucugucca

SEQ ID NO: 3299 - RNA, 15 nt, Artificial Sequence
  source: /note="Description of Artificial Sequence: Synthetic oligonucleotide"
  source: /note="RNA"
  modified_base (1)..(1): bicyclic nucleic acid (BNA)
cgguaaguucugucc

SEQ ID NO: 3300 - RNA, 14 nt, Artificial Sequence
  source: /note="Description of Artificial Sequence: Synthetic oligonucleotide"
  source: /note="RNA"
  modified_base (1)..(1): bicyclic nucleic acid (BNA)
cgguaaguucuguc

SEQ ID NO: 3301 - RNA, 13 nt, Artificial Sequence
  source: /note="Description of Artificial Sequence: Synthetic oligonucleotide"
  source: /note="RNA"
  modified_base (1)..(1): bicyclic nucleic acid (BNA)
cgguaaguucugu

SEQ ID NO: 3302 - RNA, 12 nt, Artificial Sequence
  source: /note="Description of Artificial Sequence: Synthetic oligonucleotide"
  source: /note="RNA"
  modified_base (1)..(1): bicyclic nucleic acid (BNA)
cgguaaguucug

SEQ ID NO: 3303 - RNA, 11 nt, Artificial Sequence
  source: /note="Description of Artificial Sequence: Synthetic oligonucleotide"
  source: /note="RNA"
  modified_base (1)..(1): bicyclic nucleic acid (BNA)
cgguaaguucu

SEQ ID NO: 3304 - RNA, 10 nt, Artificial Sequence
  source: /note="Description of Artificial Sequence: Synthetic oligonucleotide"
  source: /note="RNA"
  modified_base (1)..(1): bicyclic nucleic acid (BNA)
cgguaaguuc

SEQ ID NO: 3305 - RNA, 9 nt, Artificial Sequence
  source: /note="Description of Artificial Sequence: Synthetic oligonucleotide"
  source: /note="RNA"
  modified_base (1)..(1): bicyclic nucleic acid (BNA)
cgguaaguu

SEQ ID NO: 3306 - RNA, 8 nt, Artificial Sequence
  source: /note="Description of Artificial Sequence: Synthetic oligonucleotide"
  source: /note="RNA"
  modified_base (1)..(1): bicyclic nucleic acid (BNA)
cgguaagu

SEQ ID NO: 3307 - DNA, 20 bp, Artificial Sequence
  source: /note="Description of Artificial Sequence: Synthetic oligonucleotide"
  source: /note="Description of Combined DNA/RNA Molecule: Synthetic oligonucleotide"
  source: /note="DNA/RNA"
  modified_base (1)..(1): bicyclic nucleic acid (BNA)
tcgguaaguucuguccaagc

SEQ ID NO: 3308 - DNA, 19 bp, Artificial Sequence
  source: /note="Description of Artificial Sequence: Synthetic oligonucleotide"
  source: /note="Description of Combined DNA/RNA Molecule: Synthetic oligonucleotide"
  source: /note="DNA/RNA"
  modified_base (1)..(1): bicyclic nucleic acid (BNA)
tcgguaaguucuguccaag

SEQ ID NO: 3309 - DNA, 18 bp, Artificial Sequence
  source: /note="Description of Artificial Sequence: Synthetic oligonucleotide"
  source: /note="Description of Combined DNA/RNA Molecule: Synthetic oligonucleotide"
  source: /note="DNA/RNA"
  modified_base (1)..(1): bicyclic nucleic acid (BNA)
tcgguaaguucuguccaa

SEQ ID NO: 3310 - DNA, 17 bp, Artificial Sequence
  source: /note="Description of Artificial Sequence: Synthetic oligonucleotide"
  source: /note="Description of Combined DNA/RNA Molecule: Synthetic oligonucleotide"
  source: /note="DNA/RNA"
  modified_base (1)..(1): bicyclic nucleic acid (BNA)
tcgguaaguucugucca

SEQ ID NO: 3311 - DNA, 16 bp, Artificial Sequence
  source: /note="Description of Artificial Sequence: Synthetic oligonucleotide"
  source: /note="Description of Combined DNA/RNA Molecule: Synthetic oligonucleotide"
  source: /note="DNA/RNA"
  modified_base (1)..(1): bicyclic nucleic acid (BNA)
tcgguaaguucugucc

SEQ ID NO: 3312 - DNA, 15 bp, Artificial Sequence
  source: /note="Description of Artificial Sequence: Synthetic oligonucleotide"
  source: /note="Description of Combined DNA/RNA Molecule: Synthetic oligonucleotide"
  source: /note="DNA/RNA"
  modified_base (1)..(1): bicyclic nucleic acid (BNA)
tcgguaaguucuguc

SEQ ID NO: 3313 - DNA, 14 bp, Artificial Sequence
  source: /note="Description of Artificial Sequence: Synthetic oligonucleotide"
  source: /note="Description of Combined DNA/RNA Molecule: Synthetic oligonucleotide"
  source: /note="DNA/RNA"
  modified_base (1)..(1): bicyclic nucleic acid (BNA)
tcgguaaguucugu

SEQ ID NO: 3314 - DNA, 13 bp, Artificial Sequence
  source: /note="Description of Artificial Sequence: Synthetic oligonucleotide"
  source: /note="Description of Combined DNA/RNA Molecule: Synthetic oligonucleotide"
  source: /note="DNA/RNA"
  modified_base (1)..(1): bicyclic nucleic acid (BNA)
tcgguaaguucug

SEQ ID NO: 3315 - DNA, 12 bp, Artificial Sequence
  source: /note="Description of Artificial Sequence: Synthetic oligonucleotide"
  source: /note="Description of Combined DNA/RNA Molecule: Synthetic oligonucleotide"
  source: /note="DNA/RNA"
  modified_base (1)..(1): bicyclic nucleic acid (BNA)
tcgguaaguucu

SEQ ID NO: 3316 - DNA, 11 bp, Artificial Sequence
  source: /note="Description of Artificial Sequence: Synthetic oligonucleotide"
  source: /note="Description of Combined DNA/RNA Molecule: Synthetic oligonucleotide"
  source: /note="DNA/RNA"
  modified_base (1)..(1): bicyclic nucleic acid (BNA)
tcgguaaguuc

SEQ ID NO: 3317 - DNA, 10 bp, Artificial Sequence
  source: /note="Description of Artificial Sequence: Synthetic oligonucleotide"
  source: /note="Description of Combined DNA/RNA Molecule: Synthetic oligonucleotide"
  source: /note="DNA/RNA"
  modified_base (1)..(1): bicyclic nucleic acid (BNA)
tcgguaaguu

SEQ ID NO: 3318 - DNA, 9 bp, Artificial Sequence
  source: /note="Description of Artificial Sequence: Synthetic oligonucleotide"
  source: /note="Description of Combined DNA/RNA Molecule: Synthetic oligonucleotide"
  source: /note="DNA/RNA"
  modified_base (1)..(1): bicyclic nucleic acid (BNA)
tcgguaagu

SEQ ID NO: 3319 - RNA, 20 nt, Artificial Sequence
  source: /note="Description of Artificial Sequence: Synthetic oligonucleotide"
  source: /note="RNA"
  modified_base (1)..(1): bicyclic nucleic acid (BNA)
gucgguaaguucuguccaag

SEQ ID NO: 3320 - RNA, 19 nt, Artificial Sequence
  source: /note="Description of Artificial Sequence: Synthetic oligonucleotide"
  source: /note="RNA"
  modified_base (1)..(1): bicyclic nucleic acid (BNA)
gucgguaaguucuguccaa

SEQ ID NO: 3321 - RNA, 18 nt, Artificial Sequence
  source: /note="Description of Artificial Sequence: Synthetic oligonucleotide"
  source: /note="RNA"
  modified_base (1)..(1): bicyclic nucleic acid (BNA)
gucgguaaguucugucca

SEQ ID NO: 3322 - RNA, 17 nt, Artificial Sequence
  source: /note="Description of Artificial Sequence: Synthetic oligonucleotide"
  source: /note="RNA"
  modified_base (1)..(1): bicyclic nucleic acid (BNA)
gucgguaaguucugucc

SEQ ID NO: 3323 - RNA, 16 nt, Artificial Sequence
  source: /note="Description of Artificial Sequence: Synthetic oligonucleotide"
  source: /note="RNA"
  modified_base (1)..(1): bicyclic nucleic acid (BNA)
gucgguaaguucuguc

SEQ ID NO: 3324 - RNA, 15 nt, Artificial Sequence
  source: /note="Description of Artificial Sequence: Synthetic oligonucleotide"
  source: /note="RNA"
  modified_base (1)..(1): bicyclic nucleic acid (BNA)
gucgguaaguucugu

SEQ ID NO: 3325 - RNA, 14 nt, Artificial Sequence
  source: /note="Description of Artificial Sequence: Synthetic oligonucleotide"
  source: /note="RNA"
  modified_base (1)..(1): bicyclic nucleic acid (BNA)
gucgguaaguucug

SEQ ID NO: 3326 - RNA, 13 nt, Artificial Sequence
  source: /note="Description of Artificial Sequence: Synthetic oligonucleotide"
  source: /note="RNA"
  modified_base (1)..(1): bicyclic nucleic acid (BNA)
gucgguaaguucu

SEQ ID NO: 3327 - RNA, 12 nt, Artificial Sequence
  source: /note="Description of Artificial Sequence: Synthetic oligonucleotide"
  source: /note="RNA"
  modified_base (1)..(1): bicyclic nucleic acid (BNA)
gucgguaaguuc

SEQ ID NO: 3328 - RNA, 11 nt, Artificial Sequence
  source: /note="Description of Artificial Sequence: Synthetic oligonucleotide"
  source: /note="RNA"
  modified_base (1)..(1): bicyclic nucleic acid (BNA)
gucgguaaguu

SEQ ID NO: 3329 - RNA, 10 nt, Artificial Sequence
  source: /note="Description of Artificial Sequence: Synthetic oligonucleotide"
  source: /note="RNA"
  modified_base (1)..(1): bicyclic nucleic acid (BNA)
gucgguaagu

SEQ ID NO: 3330 - RNA, 20 nt, Artificial Sequence
  source: /note="Description of Artificial Sequence: Synthetic oligonucleotide"
  source: /note="RNA"
  modified_base (1)..(1): bicyclic nucleic acid (BNA)
agucgguaaguucuguccaa

SEQ ID NO: 3331 - RNA, 19 nt, Artificial Sequence
  source: /note="Description of Artificial Sequence: Synthetic oligonucleotide"
  source: /note="RNA"
  modified_base (1)..(1): bicyclic nucleic acid (BNA)
agucgguaaguucugucca

SEQ ID NO: 3332 - RNA, 17 nt, Artificial Sequence
  source: /note="Description of Artificial Sequence: Synthetic oligonucleotide"
  source: /note="RNA"
  modified_base (1)..(1): bicyclic nucleic acid (BNA)
agucgguaaguucuguc

SEQ ID NO: 3333 - RNA, 16 nt, Artificial Sequence
  source: /note="Description of Artificial Sequence: Synthetic oligonucleotide"
  source: /note="RNA"
  modified_base (1)..(1): bicyclic nucleic acid (BNA)
agucgguaaguucugu

SEQ ID NO: 3334 - RNA, 15 nt, Artificial Sequence
  source: /note="Description of Artificial Sequence: Synthetic oligonucleotide"
  source: /note="RNA"
  modified_base (1)..(1): bicyclic nucleic acid (BNA)
agucgguaaguucug

SEQ ID NO: 3335 - RNA, 14 nt, Artificial Sequence
  source: /note="Description of Artificial Sequence: Synthetic oligonucleotide"
  source: /note="RNA"
  modified_base (1)..(1): bicyclic nucleic acid (BNA)
agucgguaaguucu

SEQ ID NO: 3336 - RNA, 13 nt, Artificial Sequence
  source: /note="Description of Artificial Sequence: Synthetic oligonucleotide"
  source: /note="RNA"
  modified_base (1)..(1): bicyclic nucleic acid (BNA)
agucgguaaguuc

SEQ ID NO: 3337 - RNA, 12 nt, Artificial Sequence
  source: /note="Description of Artificial Sequence: Synthetic oligonucleotide"
  source: /note="RNA"
  modified_base (1)..(1): bicyclic nucleic acid (BNA)
agucgguaaguu

SEQ ID NO: 3338 - RNA, 11 nt, Artificial Sequence
  source: /note="Description of Artificial Sequence: Synthetic oligonucleotide"
  source: /note="RNA"
  modified_base (1)..(1): bicyclic nucleic acid (BNA)
agucgguaagu

SEQ ID NO: 3339 - RNA, 20 nt, Artificial Sequence
  source: /note="Description of Artificial Sequence: Synthetic oligonucleotide"
  source: /note="RNA"
  modified_base (1)..(1): bicyclic nucleic acid (BNA)
cagucgguaaguucugucca

SEQ ID NO: 3340 - RNA, 19 nt, Artificial Sequence
  source: /note="Description of Artificial Sequence: Synthetic oligonucleotide"
  source: /note="RNA"
  modified_base (1)..(1): bicyclic nucleic acid (BNA)
cagucgguaaguucugucc

SEQ ID NO: 3341 - RNA, 18 nt, Artificial Sequence
  source: /note="Description of Artificial Sequence: Synthetic oligonucleotide"
  source: /note="RNA"
  modified_base (1)..(1): bicyclic nucleic acid (BNA)
cagucgguaaguucuguc

SEQ ID NO: 3342 - RNA, 17 nt, Artificial Sequence
  source: /note="Description of Artificial Sequence: Synthetic oligonucleotide"
  source: /note="RNA"
  modified_base (1)..(1): bicyclic nucleic acid (BNA)
cagucgguaaguucugu

SEQ ID NO: 3343 - RNA, 16 nt, Artificial Sequence
  source: /note="Description of Artificial Sequence: Synthetic oligonucleotide"
  source: /note="RNA"
  modified_base (1)..(1): bicyclic nucleic acid (BNA)
cagucgguaaguucug

SEQ ID NO: 3344 - RNA, 15 nt, Artificial Sequence
  source: /note="Description of Artificial Sequence: Synthetic oligonucleotide"
  source: /note="RNA"
  modified_base (1)..(1): bicyclic nucleic acid (BNA)
cagucgguaaguucu

SEQ ID NO: 3345 - RNA, 14 nt, Artificial Sequence
  source: /note="Description of Artificial Sequence: Synthetic oligonucleotide"
  source: /note="RNA"
  modified_base (1)..(1): bicyclic nucleic acid (BNA)
cagucgguaaguuc

SEQ ID NO: 3346 - RNA, 13 nt, Artificial Sequence
  source: /note="Description of Artificial Sequence: Synthetic oligonucleotide"
  source: /note="RNA"
  modified_base (1)..(1): bicyclic nucleic acid (BNA)
cagucgguaaguu

SEQ ID NO: 3347 - RNA, 12 nt, Artificial Sequence
  source: /note="Description of Artificial Sequence: Synthetic oligonucleotide"
  source: /note="RNA"
  modified_base (1)..(1): bicyclic nucleic acid (BNA)
cagucgguaagu

SEQ ID NO: 3348 - RNA, 20 nt, Artificial Sequence
  source: /note="Description of Artificial Sequence: Synthetic oligonucleotide"
  source: /note="RNA"
  modified_base (1)..(1): bicyclic nucleic acid (BNA)
ccagucgguaaguucugucc

SEQ ID NO: 3349 - RNA, 19 nt, Artificial Sequence
  source: /note="Description of Artificial Sequence: Synthetic oligonucleotide"
  source: /note="RNA"
  modified_base (1)..(1): bicyclic nucleic acid (BNA)
ccagucgguaaguucuguc

SEQ ID NO: 3350 - RNA, 18 nt, Artificial Sequence
  source: /note="Description of Artificial Sequence: Synthetic oligonucleotide"
  source: /note="RNA"
  modified_base (1)..(1): bicyclic nucleic acid (BNA)
ccagucgguaaguucugu

SEQ ID NO: 3351 - RNA, 17 nt, Artificial Sequence
  source: /note="Description of Artificial Sequence: Synthetic oligonucleotide"
  source: /note="RNA"
  modified_base (1)..(1): bicyclic nucleic acid (BNA)
ccagucgguaaguucug

SEQ ID NO: 3352 - RNA, 16 nt, Artificial Sequence
  source: /note="Description of Artificial Sequence: Synthetic oligonucleotide"
  source: /note="RNA"
  modified_base (1)..(1): bicyclic nucleic acid (BNA)
ccagucgguaaguucu

SEQ ID NO: 3353 - RNA, 15 nt, Artificial Sequence
  source: /note="Description of Artificial Sequence: Synthetic oligonucleotide"
  source: /note="RNA"
  modified_base (1)..(1): bicyclic nucleic acid (BNA)
ccagucgguaaguuc

SEQ ID NO: 3354 - RNA, 14 nt, Artificial Sequence
  source: /note="Description of Artificial Sequence: Synthetic oligonucleotide"
  source: /note="RNA"
  modified_base (1)..(1): bicyclic nucleic acid (BNA)
ccagucgguaaguu

SEQ ID NO: 3355 - RNA, 13 nt, Artificial Sequence
  source: /note="Description of Artificial Sequence: Synthetic oligonucleotide"
  source: /note="RNA"
  modified_base (1)..(1): bicyclic nucleic acid (BNA)
ccagucgguaagu

SEQ ID NO: 3356 - RNA, 20 nt, Artificial Sequence
  source: /note="Description of Artificial Sequence: Synthetic oligonucleotide"
  source: /note="RNA"
  modified_base (1)..(1): bicyclic nucleic acid (BNA)
gccagucgguaaguucuguc

SEQ ID NO: 3357 - RNA, 19 nt, Artificial Sequence
  source: /note="Description of Artificial Sequence: Synthetic oligonucleotide"
  source: /note="RNA"
  modified_base (1)..(1): bicyclic nucleic acid (BNA)
gccagucgguaaguucugu

SEQ ID NO: 3358 - RNA, 18 nt, Artificial Sequence
  source: /note="Description of Artificial Sequence: Synthetic oligonucleotide"
  source: /note="RNA"
  modified_base (1)..(1): bicyclic nucleic acid (BNA)
gccagucgguaaguucug

SEQ ID NO: 3359 - RNA, 17 nt, Artificial Sequence
  source: /note="Description of Artificial Sequence: Synthetic oligonucleotide"
  source: /note="RNA"
  modified_base (1)..(1): bicyclic nucleic acid (BNA)
gccagucgguaaguucu

SEQ ID NO: 3360 - RNA, 16 nt, Artificial Sequence
  source: /note="Description of Artificial Sequence: Synthetic oligonucleotide"
  source: /note="RNA"
  modified_base (1)..(1): bicyclic nucleic acid (BNA)
gccagucgguaaguuc

SEQ ID NO: 3361 - RNA, 15 nt, Artificial Sequence
  source: /note="Description of Artificial Sequence: Synthetic oligonucleotide"
  source: /note="RNA"
  modified_base (1)..(1): bicyclic nucleic acid (BNA)
gccagucgguaaguu

SEQ ID NO: 3362 - RNA, 14 nt, Artificial Sequence
  source: /note="Description of Artificial Sequence: Synthetic oligonucleotide"
  source: /note="RNA"
  modified_base (1)..(1): bicyclic nucleic acid (BNA)
gccagucgguaagu

SEQ ID NO: 3363 - DNA, 20 bp, Artificial Sequence
  source: /note="Description of Artificial Sequence: Synthetic oligonucleotide"
  source: /note="Description of Combined DNA/RNA Molecule: Synthetic oligonucleotide"
  source: /note="DNA/RNA"
  modified_base (1)..(1): bicyclic nucleic acid (BNA)
tcaaggaagauggcauuucu

SEQ ID NO: 3364 - DNA, 22 bp, Artificial Sequence
  source: /note="Description of Artificial Sequence: Synthetic oligonucleotide"
  source: /note="Description of Combined DNA/RNA Molecule: Synthetic oligonucleotide"
  source: /note="DNA/RNA"
  modified_base (1)..(1): bicyclic nucleic acid (BNA)
tcaaggaagauggcauuucuag

SEQ ID NO: 3365 - DNA, 16 bp, Artificial Sequence
  source: /note="Description of Artificial Sequence: Synthetic oligonucleotide"
  source: /note="Description of Combined DNA/RNA Molecule: Synthetic oligonucleotide"
  source: /note="DNA/RNA"
  modified_base (1)..(1): bicyclic nucleic acid (BNA)
tcaaggaagauggcau

SEQ ID NO: 3366 - RNA, 15 nt, Artificial Sequence
  source: /note="Description of Artificial Sequence: Synthetic oligonucleotide"
  source: /note="RNA"
  modified_base (1)..(1): bicyclic nucleic acid (BNA)
gaagauggcauuucu

SEQ ID NO: 3367 - DNA, 21 bp, Artificial Sequence
  source: /note="Description of Artificial Sequence: Synthetic oligonucleotide"
  source: /note="Description of Combined DNA/RNA Molecule: Synthetic oligonucleotide"
  source: /note="DNA/RNA"
  modified_base (1)..(1): bicyclic nucleic acid (BNA)
tcaaggaagauggcauuucua

SEQ ID NO: 3368 - DNA, 19 bp, Artificial Sequence
  source: /note="Description of Artificial Sequence: Synthetic oligonucleotide"
  source: /note="Description of Combined DNA/RNA Molecule: Synthetic oligonucleotide"
  source: /note="DNA/RNA"
  modified_base (1)..(1): bicyclic nucleic acid (BNA)
tcaaggaagauggcauuuc

SEQ ID NO: 3369 - DNA, 18 bp, Artificial Sequence
  source: /note="Description of Artificial Sequence: Synthetic oligonucleotide"
  source: /note="Description of Combined DNA/RNA Molecule: Synthetic oligonucleotide"
  source: /note="DNA/RNA"
  modified_base (1)..(1): bicyclic nucleic acid (BNA)
tcaaggaagauggcauuu

SEQ ID NO: 3370 - DNA, 17 bp, Artificial Sequence
  source: /note="Description of Artificial Sequence: Synthetic oligonucleotide"
  source: /note="Description of Combined DNA/RNA Molecule: Synthetic oligonucleotide"
  source: /note="DNA/RNA"
  modified_base (1)..(1): bicyclic nucleic acid (BNA)
tcaaggaagauggcauu

SEQ ID NO: 3371 - DNA, 15 bp, Artificial Sequence
  source: /note="Description of Artificial Sequence: Synthetic oligonucleotide"
  source: /note="Description of Combined DNA/RNA Molecule: Synthetic oligonucleotide"
  source: /note="DNA/RNA"
  modified_base (1)..(1): bicyclic nucleic acid (BNA)
tcaaggaagauggca

SEQ ID NO: 3372 - DNA, 14 bp, Artificial Sequence
  source: /note="Description of Artificial Sequence: Synthetic oligonucleotide"
  source: /note="Description of Combined DNA/RNA Molecule: Synthetic oligonucleotide"
  source: /note="DNA/RNA"
  modified_base (1)..(1): bicyclic nucleic acid (BNA)
tcaaggaagauggc

SEQ ID NO: 3373 - DNA, 13 bp, Artificial Sequence
  source: /note="Description of Artificial Sequence: Synthetic oligonucleotide"
  source: /note="Description of Combined DNA/RNA Molecule: Synthetic oligonucleotide"
  source: /note="DNA/RNA"
  modified_base (1)..(1): bicyclic nucleic acid (BNA)
tcaaggaagaugg

SEQ ID NO: 3374 - DNA, 12 bp, Artificial Sequence
  source: /note="Description of Artificial Sequence: Synthetic oligonucleotide"
  source: /note="Description of Combined DNA/RNA Molecule: Synthetic oligonucleotide"
  source: /note="DNA/RNA"
  modified_base (1)..(1): bicyclic nucleic acid (BNA)
tcaaggaagaug

SEQ ID NO: 3375 - DNA, 11 bp, Artificial Sequence
  source: /note="Description of Artificial Sequence: Synthetic oligonucleotide"
  source: /note="Description of Combined DNA/RNA Molecule: Synthetic oligonucleotide"
  source: /note="DNA/RNA"
  modified_base (1)..(1): bicyclic nucleic acid (BNA)
tcaaggaagau

SEQ ID NO: 3376 - DNA, 10 bp, Artificial Sequence
  source: /note="Description of Artificial Sequence: Synthetic oligonucleotide"
  source: /note="DNA/RNA"
  modified_base (1)..(1): bicyclic nucleic acid (BNA)
tcaaggaaga

SEQ ID NO: 3377 - DNA, 9 bp, Artificial Sequence
  source: /note="Description of Artificial Sequence: Synthetic oligonucleotide"
  source: /note="DNA/RNA"
  modified_base (1)..(1): bicyclic nucleic acid (BNA)
tcaaggaag

SEQ ID NO: 3378 - RNA, 21 nt, Artificial Sequence
  source: /note="Description of Artificial Sequence: Synthetic oligonucleotide"
  source: /note="RNA"
  modified_base (1)..(1): bicyclic nucleic acid (BNA)
caaggaagauggcauuucuag

SEQ ID NO: 3379 - RNA, 20 nt, Artificial Sequence
  source: /note="Description of Artificial Sequence: Synthetic oligonucleotide"
  source: /note="RNA"
  modified_base (1)..(1): bicyclic nucleic acid (BNA)
caaggaagauggcauuucua

SEQ ID NO: 3380 - RNA, 19 nt, Artificial Sequence
  source: /note="Description of Artificial Sequence: Synthetic oligonucleotide"
  source: /note="RNA"
  modified_base (1)..(1): bicyclic nucleic acid (BNA)
caaggaagauggcauuucu

SEQ ID NO: 3381 - RNA, 18 nt, Artificial Sequence
  source: /note="Description of Artificial Sequence: Synthetic oligonucleotide"
  source: /note="RNA"
  modified_base (1)..(1): bicyclic nucleic acid (BNA)
caaggaagauggcauuuc

SEQ ID NO: 3382 - RNA, 17 nt, Artificial Sequence
  source: /note="Description of Artificial Sequence: Synthetic oligonucleotide"
  source: /note="RNA"
  modified_base (1)..(1): bicyclic nucleic acid (BNA)
caaggaagauggcauuu

SEQ ID NO: 3383 - RNA, 16 nt, Artificial Sequence
  source: /note="Description of Artificial Sequence: Synthetic oligonucleotide"
  source: /note="RNA"
  modified_base (1)..(1): bicyclic nucleic acid (BNA)
caaggaagauggcauu

SEQ ID NO: 3384 - RNA, 15 nt, Artificial Sequence
  source: /note="Description of Artificial Sequence: Synthetic oligonucleotide"
  source: /note="RNA"
  modified_base (1)..(1): bicyclic nucleic acid (BNA)
caaggaagauggcau

SEQ ID NO: 3385 - RNA, 14 nt, Artificial Sequence
  source: /note="Description of Artificial Sequence: Synthetic oligonucleotide"
  source: /note="RNA"
  modified_base (1)..(1): bicyclic nucleic acid (BNA)
caaggaagauggca

SEQ ID NO: 3386 - RNA, 13 nt, Artificial Sequence
  source: /note="Description of Artificial Sequence: Synthetic oligonucleotide"
  source: /note="RNA"
  modified_base (1)..(1): bicyclic nucleic acid (BNA)
caaggaagauggc

SEQ ID NO: 3387 - RNA, 12 nt, Artificial Sequence
  source: /note="Description of Artificial Sequence: Synthetic oligonucleotide"
  source: /note="RNA"
  modified_base (1)..(1): bicyclic nucleic acid (BNA)
caaggaagaugg

SEQ ID NO: 3388 - RNA, 11 nt, Artificial Sequence
  source: /note="Description of Artificial Sequence: Synthetic oligonucleotide"
  source: /note="RNA"
  modified_base (1)..(1): bicyclic nucleic acid (BNA)
caaggaagaug

SEQ ID NO: 3389 - RNA, 10 nt, Artificial Sequence
  source: /note="Description of Artificial Sequence: Synthetic oligonucleotide"
  source: /note="RNA"
  modified_base (1)..(1): bicyclic nucleic acid (BNA)
caaggaagau

SEQ ID NO: 3390 - RNA, 9 nt, Artificial Sequence
  source: /note="Description of Artificial Sequence: Synthetic oligonucleotide"
  source: /note="RNA/Antisense Oligonucleotide"
  modified_base (1)..(1): bicyclic nucleic acid (BNA)
caaggaaga

SEQ ID NO: 3391 - RNA, 8 nt, Artificial Sequence
  source: /note="Description of Artificial Sequence: Synthetic oligonucleotide"
  source: /note="RNA/Antisense Oligonucleotide"
  modified_base (1)..(1): bicyclic nucleic acid (BNA)
caaggaag

SEQ ID NO: 3392 - RNA, 20 nt, Artificial Sequence
  source: /note="Description of Artificial Sequence: Synthetic oligonucleotide"
  source: /note="RNA"
  modified_base (1)..(1): bicyclic nucleic acid (BNA)
aaggaagauggcauuucuag

SEQ ID NO: 3393 - RNA, 19 nt, Artificial Sequence
  source: /note="Description of Artificial Sequence: Synthetic oligonucleotide"
  source: /note="RNA"
  modified_base (1)..(1): bicyclic nucleic acid (BNA)
aaggaagauggcauuucua

SEQ ID NO: 3394 - RNA, 18 nt, Artificial Sequence
  source: /note="Description of Artificial Sequence: Synthetic oligonucleotide"
  source: /note="RNA"
  modified_base (1)..(1): bicyclic nucleic acid (BNA)
aaggaagauggcauuucu

SEQ ID NO: 3395 - RNA, 17 nt, Artificial Sequence
  source: /note="Description of Artificial Sequence: Synthetic oligonucleotide"
  source: /note="RNA"
  modified_base (1)..(1): bicyclic nucleic acid (BNA)
aaggaagauggcauuuc

SEQ ID NO: 3396 - RNA, 16 nt, Artificial Sequence
  source: /note="Description of Artificial Sequence: Synthetic oligonucleotide"
  source: /note="RNA"
  modified_base (1)..(1): bicyclic nucleic acid (BNA)
aaggaagauggcauuu

SEQ ID NO: 3397 - RNA, 15 nt, Artificial Sequence
  source: /note="Description of Artificial Sequence: Synthetic oligonucleotide"
  source: /note="RNA"
  modified_base (1)..(1): bicyclic nucleic acid (BNA)
aaggaagauggcauu

SEQ ID NO: 3398 - RNA, 14 nt, Artificial Sequence
  source: /note="Description of Artificial Sequence: Synthetic oligonucleotide"
  source: /note="RNA"
  modified_base (1)..(1): bicyclic nucleic acid (BNA)
aaggaagauggcau

SEQ ID NO: 3399 - RNA, 13 nt, Artificial Sequence
  source: /note="Description of Artificial Sequence: Synthetic oligonucleotide"
  source: /note="RNA"
  modified_base (1)..(1): bicyclic nucleic acid (BNA)
aaggaagauggca

SEQ ID NO: 3400 - RNA, 12 nt, Artificial Sequence
  source: /note="Description of Artificial Sequence: Synthetic oligonucleotide"
  source: /note="RNA"
  modified_base (1)..(1): bicyclic nucleic acid (BNA)
aaggaagauggc

SEQ ID NO: 3401 - RNA, 11 nt, Artificial Sequence
  source: /note="Description of Artificial Sequence: Synthetic oligonucleotide"
  source: /note="RNA"
  modified_base (1)..(1): bicyclic nucleic acid (BNA)
aaggaagaugg

SEQ ID NO: 3402 - RNA, 10 nt, Artificial Sequence
  source: /note="Description of Artificial Sequence: Synthetic oligonucleotide"
  source: /note="RNA"
  modified_base (1)..(1): bicyclic nucleic acid (BNA)
aaggaagaug

SEQ ID NO: 3403 - RNA, 9 nt, Artificial Sequence
  source: /note="Description of Artificial Sequence: Synthetic oligonucleotide"
  source: /note="RNA"
  modified_base (1)..(1): bicyclic nucleic acid (BNA)
aaggaagau

SEQ ID NO: 3404 - RNA, 8 nt, Artificial Sequence
  source: /note="Description of Artificial Sequence: Synthetic oligonucleotide"
  source: /note="RNA/Antisense Oligonucleotide"
  modified_base (1)..(1): bicyclic nucleic acid (BNA)
aaggaaga

SEQ ID NO: 3405 - RNA, 19 nt, Artificial Sequence
  source: /note="Description of Artificial Sequence: Synthetic oligonucleotide"
  source: /note="RNA"
  modified_base (1)..(1): bicyclic nucleic acid (BNA)
aggaagauggcauuucuag

SEQ ID NO: 3406 - RNA, 18 nt, Artificial Sequence
  source: /note="Description of Artificial Sequence: Synthetic oligonucleotide"
  source: /note="RNA"
  modified_base (1)..(1): bicyclic nucleic acid (BNA)
aggaagauggcauuucua

SEQ ID NO: 3407 - RNA, 17 nt, Artificial Sequence
  source: /note="Description of Artificial Sequence: Synthetic oligonucleotide"
  source: /note="RNA"
  modified_base (1)..(1): bicyclic nucleic acid (BNA)
aggaagauggcauuucu

SEQ ID NO: 3408 - RNA, 16 nt, Artificial Sequence
  source: /note="Description of Artificial Sequence: Synthetic oligonucleotide"
  source: /note="RNA"
  modified_base (1)..(1): bicyclic nucleic acid (BNA)
aggaagauggcauuuc

SEQ ID NO: 3409 - RNA, 15 nt, Artificial Sequence
  source: /note="Description of Artificial Sequence: Synthetic oligonucleotide"
  source: /note="RNA"
  modified_base (1)..(1): bicyclic nucleic acid (BNA)
aggaagauggcauuu

SEQ ID NO: 3410 - RNA, 14 nt, Artificial Sequence
  source: /note="Description of Artificial Sequence: Synthetic oligonucleotide"
  source: /note="RNA"
  modified_base (1)..(1): bicyclic nucleic acid (BNA)
aggaagauggcauu

SEQ ID NO: 3411 - RNA, 13 nt, Artificial Sequence
  source: /note="Description of Artificial Sequence: Synthetic oligonucleotide"
  source: /note="RNA"
  modified_base (1)..(1): bicyclic nucleic acid (BNA)
aggaagauggcau

SEQ ID NO: 3412 - RNA, 12 nt, Artificial Sequence
  source: /note="Description of Artificial Sequence: Synthetic oligonucleotide"
  source: /note="RNA"
  modified_base (1)..(1): bicyclic nucleic acid (BNA)
aggaagauggca

SEQ ID NO: 3413 - RNA, 10 nt, Artificial Sequence
  source: /note="Description of Artificial Sequence: Synthetic oligonucleotide"
  source: /note="RNA"
  modified_base (1)..(1): bicyclic nucleic acid (BNA)
aggaagaugg

SEQ ID NO: 3414 - RNA, 9 nt, Artificial Sequence
  source: /note="Description of Artificial Sequence: Synthetic oligonucleotide"
  source: /note="RNA"
  modified_base (1)..(1): bicyclic nucleic acid (BNA)
aggaagaug

SEQ ID NO: 3415 - RNA, 8 nt, Artificial Sequence
  source: /note="Description of Artificial Sequence: Synthetic oligonucleotide"
  source: /note="RNA"
  modified_base (1)..(1): bicyclic nucleic acid (BNA)
aggaagau

SEQ ID NO: 3416 - RNA, 18 nt, Artificial Sequence
  source: /note="Description of Artificial Sequence: Synthetic oligonucleotide"
  source: /note="RNA"
  modified_base (1)..(1): bicyclic nucleic acid (BNA)
ggaagauggcauuucuag

SEQ ID NO: 3417 - RNA, 17 nt, Artificial Sequence
  source: /note="Description of Artificial Sequence: Synthetic oligonucleotide"
  source: /note="RNA"
  modified_base (1)..(1): bicyclic nucleic acid (BNA)
ggaagauggcauuucua

SEQ ID NO: 3418 - RNA, 16 nt, Artificial Sequence
  source: /note="Description of Artificial Sequence: Synthetic oligonucleotide"
  source: /note="RNA"
  modified_base (1)..(1): bicyclic nucleic acid (BNA)
ggaagauggcauuucu

SEQ ID NO: 3419 - RNA, 15 nt, Artificial Sequence
  source: /note="Description of Artificial Sequence: Synthetic oligonucleotide"
  source: /note="RNA"
  modified_base (1)..(1): bicyclic nucleic acid (BNA)
ggaagauggcauuuc

SEQ ID NO: 3420 - RNA, 14 nt, Artificial Sequence
  source: /note="Description of Artificial Sequence: Synthetic oligonucleotide"
  source: /note="RNA"
  modified_base (1)..(1): bicyclic nucleic acid (BNA)
ggaagauggcauuu

SEQ ID NO: 3421 - RNA, 13 nt, Artificial Sequence
  source: /note="Description of Artificial Sequence: Synthetic oligonucleotide"
  source: /note="RNA"
  modified_base (1)..(1): bicyclic nucleic acid (BNA)
ggaagauggcauu

SEQ ID NO: 3422 - RNA, 12 nt, Artificial Sequence
  source: /note="Description of Artificial Sequence: Synthetic oligonucleotide"
  source: /note="RNA"
  modified_base (1)..(1): bicyclic nucleic acid (BNA)
ggaagauggcau

SEQ ID NO: 3423 - RNA, 11 nt, Artificial Sequence
  source: /note="Description of Artificial Sequence: Synthetic oligonucleotide"
  source: /note="RNA"
  modified_base (1)..(1): bicyclic nucleic acid (BNA)
ggaagauggca

SEQ ID NO: 3424 - RNA, 10 nt, Artificial Sequence
  source: /note="Description of Artificial Sequence: Synthetic oligonucleotide"
  source: /note="RNA"
  modified_base (1)..(1): bicyclic nucleic acid (BNA)
ggaagauggc

SEQ ID NO: 3425 - RNA, 8 nt, Artificial Sequence
  source: /note="Description of Artificial Sequence: Synthetic oligonucleotide"
  source: /note="RNA"
  modified_base (1)..(1): bicyclic nucleic acid (BNA)
ggaagaug

SEQ ID NO: 3426 - RNA, 17 nt, Artificial Sequence
  source: /note="Description of Artificial Sequence: Synthetic oligonucleotide"
  source: /note="RNA"
  modified_base (1)..(1): bicyclic nucleic acid (BNA)
gaagauggcauuucuag

SEQ ID NO: 3427 - RNA, 16 nt, Artificial Sequence
  source: /note="Description of Artificial Sequence: Synthetic oligonucleotide"
  source: /note="RNA"
  modified_base (1)..(1): bicyclic nucleic acid (BNA)
gaagauggcauuucua

SEQ ID NO: 3428 - RNA, 14 nt, Artificial Sequence
  source: /note="Description of Artificial Sequence: Synthetic oligonucleotide"
  source: /note="RNA"
  modified_base (1)..(1): bicyclic nucleic acid (BNA)
gaagauggcauuuc

SEQ ID NO: 3429 - RNA, 13 nt, Artificial Sequence
  source: /note="Description of Artificial Sequence: Synthetic oligonucleotide"
  source: /note="RNA"
  modified_base (1)..(1): bicyclic nucleic acid (BNA)
gaagauggcauuu

SEQ ID NO: 3430 - RNA, 12 nt, Artificial Sequence
  source: /note="Description of Artificial Sequence: Synthetic oligonucleotide"
  source: /note="RNA"
  modified_base (1)..(1): bicyclic nucleic acid (BNA)
gaagauggcauu

SEQ ID NO: 3431 - RNA, 11 nt, Artificial Sequence
  source: /note="Description of Artificial Sequence: Synthetic oligonucleotide"
  source: /note="RNA"
  modified_base (1)..(1): bicyclic nucleic acid (BNA)
gaagauggcau

SEQ ID NO: 3432 - RNA, 10 nt, Artificial Sequence
  source: /note="Description of Artificial Sequence: Synthetic oligonucleotide"
  source: /note="RNA"
  modified_base (1)..(1): bicyclic nucleic acid (BNA)
gaagauggca

SEQ ID NO: 3433 - RNA, 9 nt, Artificial Sequence
  source: /note="Description of Artificial Sequence: Synthetic oligonucleotide"
  source: /note="RNA"
  modified_base (1)..(1): bicyclic nucleic acid (BNA)
gaagauggc

SEQ ID NO: 3434 - RNA, 8 nt, Artificial Sequence
  source: /note="Description of Artificial Sequence: Synthetic oligonucleotide"
  source: /note="RNA"
  modified_base (1)..(1): bicyclic nucleic acid (BNA)
gaagaugg

SEQ ID NO: 3435 - RNA, 16 nt, Artificial Sequence
  source: /note="Description of Artificial Sequence: Synthetic oligonucleotide"
  source: /note="RNA"
  modified_base (1)..(1): bicyclic nucleic acid (BNA)
aagauggcauuucuag

SEQ ID NO: 3436 - RNA, 15 nt, Artificial Sequence
  source: /note="Description of Artificial Sequence: Synthetic oligonucleotide"
  source: /note="RNA"
  modified_base (1)..(1): bicyclic nucleic acid (BNA)
aagauggcauuucua

SEQ ID NO: 3437 - RNA, 14 nt, Artificial Sequence
  source: /note="Description of Artificial Sequence: Synthetic oligonucleotide"
  source: /note="RNA"
  modified_base (1)..(1): bicyclic nucleic acid (BNA)
aagauggcauuucu

SEQ ID NO: 3438 - RNA, 13 nt, Artificial Sequence
  source: /note="Description of Artificial Sequence: Synthetic oligonucleotide"
  source: /note="RNA"
  modified_base (1)..(1): bicyclic nucleic acid (BNA)
aagauggcauuuc

SEQ ID NO: 3439 - RNA, 12 nt, Artificial Sequence
  source: /note="Description of Artificial Sequence: Synthetic oligonucleotide"
  source: /note="RNA"
  modified_base (1)..(1): bicyclic nucleic acid (BNA)
aagauggcauuu

SEQ ID NO: 3440 - RNA, 11 nt, Artificial Sequence
  source: /note="Description of Artificial Sequence: Synthetic oligonucleotide"
  source: /note="RNA"
  modified_base (1)..(1): bicyclic nucleic acid (BNA)
aagauggcauu

SEQ ID NO: 3441 - RNA, 10 nt, Artificial Sequence
  source: /note="Description of Artificial Sequence: Synthetic oligonucleotide"
  source: /note="RNA"
  modified_base (1)..(1): bicyclic nucleic acid (BNA)
aagauggcau

SEQ ID NO: 3442 - RNA, 9 nt, Artificial Sequence
  source: /note="Description of Artificial Sequence: Synthetic oligonucleotide"
  source: /note="RNA"
  modified_base (1)..(1): bicyclic nucleic acid (BNA)
aagauggca

SEQ ID NO: 3443 - RNA, 8 nt, Artificial Sequence
  source: /note="Description of Artificial Sequence: Synthetic oligonucleotide"
  source: /note="RNA"
  modified_base (1)..(1): bicyclic nucleic acid (BNA)
aagauggc

SEQ ID NO: 3444 - RNA, 15 nt, Artificial Sequence
  source: /note="Description of Artificial Sequence: Synthetic oligonucleotide"
  source: /note="RNA"
  modified_base (1)..(1): bicyclic nucleic acid (BNA)
agauggcauuucuag

SEQ ID NO: 3445 - RNA, 14 nt, Artificial Sequence
  source: /note="Description of Artificial Sequence: Synthetic oligonucleotide"
  source: /note="RNA"
  modified_base (1)..(1): bicyclic nucleic acid (BNA)
agauggcauuucua

SEQ ID NO: 3446 - RNA, 13 nt, Artificial Sequence
  source: /note="Description of Artificial Sequence: Synthetic oligonucleotide"
  source: /note="RNA"
  modified_base (1)..(1): bicyclic nucleic acid (BNA)
agauggcauuucu

SEQ ID NO: 3447 - RNA, 12 nt, Artificial Sequence
  source: /note="Description of Artificial Sequence: Synthetic oligonucleotide"
  source: /note="RNA"
  modified_base (1)..(1): bicyclic nucleic acid (BNA)
agauggcauuuc

SEQ ID NO: 3448 - RNA, 11 nt, Artificial Sequence
  source: /note="Description of Artificial Sequence: Synthetic oligonucleotide"
  source: /note="RNA"
  modified_base (1)..(1): bicyclic nucleic acid (BNA)
agauggcauuu

SEQ ID NO: 3449 - RNA, 10 nt, Artificial Sequence
  source: /note="Description of Artificial Sequence: Synthetic oligonucleotide"
  source: /note="RNA"
  modified_base (1)..(1): bicyclic nucleic acid (BNA)
agauggcauu

SEQ ID NO: 3450 - RNA, 9 nt, Artificial Sequence
  source: /note="Description of Artificial Sequence: Synthetic oligonucleotide"
  source: /note="RNA"
  modified_base (1)..(1): bicyclic nucleic acid (BNA)
agauggcau

SEQ ID NO: 3451 - RNA, 8 nt, Artificial Sequence
  source: /note="Description of Artificial Sequence: Synthetic oligonucleotide"
  source: /note="RNA"
  modified_base (1)..(1): bicyclic nucleic acid (BNA)
agauggca

SEQ ID NO: 3452 - RNA, 30 nt, Artificial Sequence; identical to SEQ ID NO: 284
  source: /note="Description of Artificial Sequence: Synthetic oligonucleotide"
  source: /note="RNA"
  modified_base (1)..(1): bicyclic nucleic acid (BNA)

SEQ ID NO: 3453 - RNA, 29 nt, Artificial Sequence
  source: /note="Description of Artificial Sequence: Synthetic oligonucleotide"
  source: /note="RNA"
  modified_base (1)..(1): bicyclic nucleic acid (BNA)
cuccaacaucaaggaagauggcauuucua

SEQ ID NO: 3454 - RNA, 28 nt, Artificial Sequence
  source: /note="Description of Artificial Sequence: Synthetic oligonucleotide"
  source: /note="RNA"
  modified_base (1)..(1): bicyclic nucleic acid (BNA)
cuccaacaucaaggaagauggcauuucu

SEQ ID NO: 3455 - RNA, 27 nt, Artificial Sequence
  source: /note="Description of Artificial Sequence: Synthetic oligonucleotide"
  source: /note="RNA"
  modified_base (1)..(1): bicyclic nucleic acid (BNA)
cuccaacaucaaggaagauggcauuuc

SEQ ID NO: 3456 - RNA, 26 nt, Artificial Sequence
  source: /note="Description of Artificial Sequence: Synthetic oligonucleotide"
  source: /note="RNA"
  modified_base (1)..(1): bicyclic nucleic acid (BNA)
cuccaacaucaaggaagauggcauuu

SEQ ID NO: 3457 - RNA, 25 nt, Artificial Sequence
  source: /note="Description of Artificial Sequence: Synthetic oligonucleotide"
  source: /note="RNA"
  modified_base (1)..(1): bicyclic nucleic acid (BNA)
cuccaacaucaaggaagauggcauu

SEQ ID NO: 3458 - RNA, 24 nt, Artificial Sequence
  source: /note="Description of Artificial Sequence: Synthetic oligonucleotide"
  source: /note="RNA"
  modified_base (1)..(1): bicyclic nucleic acid (BNA)
cuccaacaucaaggaagauggcau

SEQ ID NO: 3459 - RNA, 23 nt, Artificial Sequence
  source: /note="Description of Artificial Sequence: Synthetic oligonucleotide"
  source: /note="RNA"
  modified_base (1)..(1): bicyclic nucleic acid (BNA)
cuccaacaucaaggaagauggca

SEQ ID NO: 3460 - RNA, 22 nt, Artificial Sequence
  source: /note="Description of Artificial Sequence: Synthetic oligonucleotide"
  source: /note="RNA"
  modified_base (1)..(1): bicyclic nucleic acid (BNA)
cuccaacaucaaggaagauggc

SEQ ID NO: 3461 - RNA, 21 nt, Artificial Sequence
  source: /note="Description of Artificial Sequence: Synthetic oligonucleotide"
  source: /note="RNA"
  modified_base (1)..(1): bicyclic nucleic acid (BNA)
cuccaacaucaaggaagaugg

SEQ ID NO: 3462 - RNA, 20 nt, Artificial Sequence
  source: /note="Description of Artificial Sequence: Synthetic oligonucleotide"
  source: /note="RNA"
  modified_base (1)..(1): bicyclic nucleic acid (BNA)
cuccaacaucaaggaagaug

SEQ ID NO: 3463 - RNA, 19 nt, Artificial Sequence
  source: /note="Description of Artificial Sequence: Synthetic oligonucleotide"
  source: /note="RNA"
  modified_base (1)..(1): bicyclic nucleic acid (BNA)
cuccaacaucaaggaagau

SEQ ID NO: 3464 - RNA, 18 nt, Artificial Sequence
  source: /note="Description of Artificial Sequence: Synthetic oligonucleotide"
  source: /note="RNA"
  modified_base (1)..(1): bicyclic nucleic acid (BNA)
cuccaacaucaaggaaga

SEQ ID NO: 3465 - RNA, 17 nt, Artificial Sequence
  source: /note="Description of Artificial Sequence: Synthetic oligonucleotide"
  source: /note="RNA"
  modified_base (1)..(1): bicyclic nucleic acid (BNA)
cuccaacaucaaggaag

SEQ ID NO: 3466 - DNA, 29 bp, Artificial Sequence
  source: /note="Description of Artificial Sequence: Synthetic oligonucleotide"
  source: /note="Description of Combined DNA/RNA Molecule: Synthetic oligonucleotide"
  source: /note="DNA/RNA"
  modified_base (1)..(1): bicyclic nucleic acid (BNA)
tccaacaucaaggaagauggcauuucuag

SEQ ID NO: 3467 - DNA, 28 bp, Artificial Sequence
  source: /note="Description of Artificial Sequence: Synthetic oligonucleotide"
  source: /note="Description of Combined DNA/RNA Molecule: Synthetic oligonucleotide"
  source: /note="DNA/RNA"
  modified_base (1)..(1): bicyclic nucleic acid (BNA)
tccaacaucaaggaagauggcauuucua

SEQ ID NO: 3468 - DNA, 27 bp, Artificial Sequence
  source: /note="Description of Artificial Sequence: Synthetic oligonucleotide"
  source: /note="Description of Combined DNA/RNA Molecule: Synthetic oligonucleotide"
  source: /note="DNA/RNA"
  modified_base (1)..(1): bicyclic nucleic acid (BNA)
tccaacaucaaggaagauggcauuucu

SEQ ID NO: 3469 - DNA, 26 bp, Artificial Sequence
  source: /note="Description of Artificial Sequence: Synthetic oligonucleotide"
  source: /note="Description of Combined DNA/RNA Molecule: Synthetic oligonucleotide"
  source: /note="DNA/RNA"
  modified_base (1)..(1): bicyclic nucleic acid (BNA)
tccaacaucaaggaagauggcauuuc

SEQ ID NO: 3470 - DNA, 25 bp, Artificial Sequence
  source: /note="Description of Artificial Sequence: Synthetic oligonucleotide"
  source: /note="Description of Combined DNA/RNA Molecule: Synthetic oligonucleotide"
  source: /note="DNA/RNA"
  modified_base (1)..(1): bicyclic nucleic acid (BNA)
tccaacaucaaggaagauggcauuu

SEQ ID NO: 3471 - DNA, 24 bp, Artificial Sequence
  source: /note="Description of Artificial Sequence: Synthetic oligonucleotide"
  source: /note="Description of Combined DNA/RNA Molecule: Synthetic oligonucleotide"
  source: /note="DNA/RNA"
  modified_base (1)..(1): bicyclic nucleic acid (BNA)
tccaacaucaaggaagauggcauu

SEQ ID NO: 3472 - DNA, 23 bp, Artificial Sequence
  source: /note="Description of Artificial Sequence: Synthetic oligonucleotide"
  source: /note="Description of Combined DNA/RNA Molecule: Synthetic oligonucleotide"
  source: /note="DNA/RNA"
  modified_base (1)..(1): bicyclic nucleic acid (BNA)
tccaacaucaaggaagauggcau

SEQ ID NO: 3473 - DNA, 22 bp, Artificial Sequence
  source: /note="Description of Artificial Sequence: Synthetic oligonucleotide"
  source: /note="Description of Combined DNA/RNA Molecule: Synthetic oligonucleotide"
  source: /note="DNA/RNA"
  modified_base (1)..(1): bicyclic nucleic acid (BNA)
tccaacaucaaggaagauggca

SEQ ID NO: 3474 - DNA, 21 bp, Artificial Sequence
  source: /note="Description of Artificial Sequence: Synthetic oligonucleotide"
  source: /note="Description of Combined DNA/RNA Molecule: Synthetic oligonucleotide"
  source: /note="DNA/RNA"
  modified_base (1)..(1): bicyclic nucleic acid (BNA)
tccaacaucaaggaagauggc

SEQ ID NO: 3475 - DNA, 20 bp, Artificial Sequence
  source: /note="Description of Artificial Sequence: Synthetic oligonucleotide"
  source: /note="Description of Combined DNA/RNA Molecule: Synthetic oligonucleotide"
  source: /note="DNA/RNA"
  modified_base (1)..(1): bicyclic nucleic acid (BNA)
tccaacaucaaggaagaugg

SEQ ID NO: 3476 - DNA, 19 bp, Artificial Sequence
  source: /note="Description of Artificial Sequence: Synthetic oligonucleotide"
  source: /note="Description of Combined DNA/RNA Molecule: Synthetic oligonucleotide"
  source: /note="DNA/RNA"
  modified_base (1)..(1): bicyclic nucleic acid (BNA)
tccaacaucaaggaagaug

SEQ ID NO: 3477 - DNA, 18 bp, Artificial Sequence
  source: /note="Description of Artificial Sequence: Synthetic oligonucleotide"
  source: /note="Description of Combined DNA/RNA Molecule: Synthetic oligonucleotide"
  source: /note="DNA/RNA"
  modified_base (1)..(1): bicyclic nucleic acid (BNA)
tccaacaucaaggaagau

SEQ ID NO: 3478 - DNA, 17 bp, Artificial Sequence
  source: /note="Description of Artificial Sequence: Synthetic oligonucleotide"
  source: /note="Description of Combined DNA/RNA Molecule: Synthetic oligonucleotide"
  source: /note="DNA/RNA"
  modified_base (1)..(1): bicyclic nucleic acid (BNA)
tccaacaucaaggaaga

SEQ ID NO: 3479 - DNA, 16 bp, Artificial Sequence
  source: /note="Description of Artificial Sequence: Synthetic oligonucleotide"
  source: /note="Description of Combined DNA/RNA Molecule: Synthetic oligonucleotide"
  source: /note="DNA/RNA"
  modified_base (1)..(1): bicyclic nucleic acid (BNA)
tccaacaucaaggaag

SEQ ID NO: 3480 - RNA, 28 nt, Artificial Sequence
  source: /note="Description of Artificial Sequence: Synthetic oligonucleotide"
  source: /note="RNA"
  modified_base (1)..(1): bicyclic nucleic acid (BNA)
ccaacaucaaggaagauggcauuucuag

SEQ ID NO: 3481 - RNA, 27 nt, Artificial Sequence
  source: /note="Description of Artificial Sequence: Synthetic oligonucleotide"
  source: /note="RNA"
  modified_base (1)..(1): bicyclic nucleic acid (BNA)
ccaacaucaaggaagauggcauuucua

SEQ ID NO: 3482 - RNA, 26 nt, Artificial Sequence
  source: /note="Description of Artificial Sequence: Synthetic oligonucleotide"
  source: /note="RNA"
  modified_base (1)..(1): bicyclic nucleic acid (BNA)
ccaacaucaaggaagauggcauuucu

SEQ ID NO: 3483 - RNA, 25 nt, Artificial Sequence
  source: /note="Description of Artificial Sequence: Synthetic oligonucleotide"
  source: /note="RNA"
  modified_base (1)..(1): bicyclic nucleic acid (BNA)
ccaacaucaaggaagauggcauuuc

SEQ ID NO: 3484 - RNA, 24 nt, Artificial Sequence
  source: /note="Description of Artificial Sequence: Synthetic oligonucleotide"
  source: /note="RNA"
  modified_base (1)..(1): bicyclic nucleic acid (BNA)
ccaacaucaaggaagauggcauuu

SEQ ID NO: 3485 - RNA, 23 nt, Artificial Sequence
  source: /note="Description of Artificial Sequence: Synthetic oligonucleotide"
  source: /note="RNA"
  modified_base (1)..(1): bicyclic nucleic acid (BNA)
ccaacaucaaggaagauggcauu

SEQ ID NO: 3486 - RNA, 22 nt, Artificial Sequence
  source: /note="Description of Artificial Sequence: Synthetic oligonucleotide"
  source: /note="RNA"
  modified_base (1)..(1): bicyclic nucleic acid (BNA)
ccaacaucaaggaagauggcau

SEQ ID NO: 3487 - RNA, 21 nt, Artificial Sequence
  source: /note="Description of Artificial Sequence: Synthetic oligonucleotide"
  source: /note="RNA"
  modified_base (1)..(1): bicyclic nucleic acid (BNA)
ccaacaucaaggaagauggca

SEQ ID NO: 3488 - RNA, 20 nt, Artificial Sequence
  source: /note="Description of Artificial Sequence: Synthetic oligonucleotide"
  source: /note="RNA"
  modified_base (1)..(1): bicyclic nucleic acid (BNA)
ccaacaucaaggaagauggc

SEQ ID NO: 3489 - RNA, 19 nt, Artificial Sequence
  source: /note="Description of Artificial Sequence: Synthetic oligonucleotide"
  source: /note="RNA"
  modified_base (1)..(1): bicyclic nucleic acid (BNA)
ccaacaucaaggaagaugg

SEQ ID NO: 3490 - RNA, 18 nt, Artificial Sequence
  source: /note="Description of Artificial Sequence: Synthetic oligonucleotide"
  source: /note="RNA"
  modified_base (1)..(1): bicyclic nucleic acid (BNA)
ccaacaucaaggaagaug

SEQ ID NO: 3491 - RNA, 17 nt, Artificial Sequence
  source: /note="Description of Artificial Sequence: Synthetic oligonucleotide"
  source: /note="RNA"
  modified_base (1)..(1): bicyclic nucleic acid (BNA)
ccaacaucaaggaagau

SEQ ID NO: 3492 - RNA, 16 nt, Artificial Sequence
  source: /note="Description of Artificial Sequence: Synthetic oligonucleotide"
  source: /note="RNA"
  modified_base (1)..(1): bicyclic nucleic acid (BNA)
ccaacaucaaggaaga

SEQ ID NO: 3493 - RNA, 15 nt, Artificial Sequence
  source: /note="Description of Artificial Sequence: Synthetic oligonucleotide"
  source: /note="RNA"
  modified_base (1)..(1): bicyclic nucleic acid (BNA)
ccaacaucaaggaag

SEQ ID NO: 3494 - RNA, 27 nt, Artificial Sequence
  source: /note="Description of Artificial Sequence: Synthetic oligonucleotide"
  source: /note="RNA"
  modified_base (1)..(1): bicyclic nucleic acid (BNA)
caacaucaaggaagauggcauuucuag

SEQ ID NO: 3495 - RNA, 26 nt, Artificial Sequence
  source: /note="Description of Artificial Sequence: Synthetic oligonucleotide"
  source: /note="RNA"
  modified_base (1)..(1): bicyclic nucleic acid (BNA)
caacaucaaggaagauggcauuucua

SEQ ID NO: 3496 - RNA, 25 nt, Artificial Sequence
  source: /note="Description of Artificial Sequence: Synthetic oligonucleotide"
  source: /note="RNA"
  modified_base (1)..(1): bicyclic nucleic acid (BNA)
caacaucaaggaagauggcauuucu

SEQ ID NO: 3497 - RNA, 24 nt, Artificial Sequence
  source: /note="Description of Artificial Sequence: Synthetic oligonucleotide"
  source: /note="RNA"
  modified_base (1)..(1): bicyclic nucleic acid (BNA)
caacaucaaggaagauggcauuuc

SEQ ID NO: 3498 - RNA, 23 nt, Artificial Sequence
  source: /note="Description of Artificial Sequence: Synthetic oligonucleotide"
  source: /note="RNA"
  modified_base (1)..(1): bicyclic nucleic acid (BNA)
caacaucaaggaagauggcauuu

SEQ ID NO: 3499 - RNA, 22 nt, Artificial Sequence
  source: /note="Description of Artificial Sequence: Synthetic oligonucleotide"
  source: /note="RNA"
  modified_base (1)..(1): bicyclic nucleic acid (BNA)
caacaucaaggaagauggcauu

SEQ ID NO: 3500 - RNA, 21 nt, Artificial Sequence
  source: /note="Description of Artificial Sequence: Synthetic oligonucleotide"
  source: /note="RNA"
  modified_base (1)..(1): bicyclic nucleic acid (BNA)
caacaucaaggaagauggcau

SEQ ID NO: 3501 - RNA, 20 nt, Artificial Sequence
  source: /note="Description of Artificial Sequence: Synthetic oligonucleotide"
  source: /note="RNA"
  modified_base (1)..(1): bicyclic nucleic acid (BNA)
caacaucaaggaagauggca

SEQ ID NO: 3502 - RNA, 19 nt, Artificial Sequence
  source: /note="Description of Artificial Sequence: Synthetic oligonucleotide"
  source: /note="RNA"
  modified_base (1)..(1): bicyclic nucleic acid (BNA)
caacaucaaggaagauggc

SEQ ID NO: 3503 - RNA, 18 nt, Artificial Sequence
  source: /note="Description of Artificial Sequence: Synthetic oligonucleotide"
  source: /note="RNA"
  modified_base (1)..(1): bicyclic nucleic acid (BNA)
caacaucaaggaagaugg

SEQ ID NO: 3504 - RNA, 17 nt, Artificial Sequence
  source: /note="Description of Artificial Sequence: Synthetic oligonucleotide"
  source: /note="RNA"
  modified_base (1)..(1): bicyclic nucleic acid (BNA)
caacaucaaggaagaug

SEQ ID NO: 3505 - RNA, 16 nt, Artificial Sequence
  source: /note="Description of Artificial Sequence: Synthetic oligonucleotide"
  source: /note="RNA"
  modified_base (1)..(1): bicyclic nucleic acid (BNA)
caacaucaaggaagau

SEQ ID NO: 3506 - RNA, 15 nt, Artificial Sequence
  source: /note="Description of Artificial Sequence: Synthetic oligonucleotide"
  source: /note="RNA"
  modified_base (1)..(1): bicyclic nucleic acid (BNA)
caacaucaaggaaga

SEQ ID NO: 3507 - RNA, 14 nt, Artificial Sequence
  source: /note="Description of Artificial Sequence: Synthetic oligonucleotide"
  source: /note="RNA"
  modified_base (1)..(1): bicyclic nucleic acid (BNA)
caacaucaaggaag

SEQ ID NO: 3508 - RNA, 26 nt, Artificial Sequence
  source: /note="Description of Artificial Sequence: Synthetic oligonucleotide"
  source: /note="RNA"
  modified_base (1)..(1): bicyclic nucleic acid (BNA)
aacaucaaggaagauggcauuucuag

SEQ ID NO: 3509 - RNA, 25 nt, Artificial Sequence
  source: /note="Description of Artificial Sequence: Synthetic oligonucleotide"
  source: /note="RNA"
  modified_base (1)..(1): bicyclic nucleic acid (BNA)
aacaucaaggaagauggcauuucua

SEQ ID NO: 3510 - RNA, 24 nt, Artificial Sequence
  source: /note="Description of Artificial Sequence: Synthetic oligonucleotide"
  source: /note="RNA"
  modified_base (1)..(1): bicyclic nucleic acid (BNA)
aacaucaaggaagauggcauuucu

SEQ ID NO: 3511 - RNA, 23 nt, Artificial Sequence
  source: /note="Description of Artificial Sequence: Synthetic oligonucleotide"
  source: /note="RNA"
  modified_base (1)..(1): bicyclic nucleic acid (BNA)
aacaucaaggaagauggcauuuc

SEQ ID NO: 3512 - RNA, 22 nt, Artificial Sequence
  source: /note="Description of Artificial Sequence: Synthetic oligonucleotide"
  source: /note="RNA"
  modified_base (1)..(1): bicyclic nucleic acid (BNA)
aacaucaaggaagauggcauuu

SEQ ID NO: 3513 - RNA, 21 nt, Artificial Sequence
  source: /note="Description of Artificial Sequence: Synthetic oligonucleotide"
  source: /note="RNA"
  modified_base (1)..(1): bicyclic nucleic acid (BNA)
aacaucaaggaagauggcauu

SEQ ID NO: 3514 - RNA, 20 nt, Artificial Sequence
  source: /note="Description of Artificial Sequence: Synthetic oligonucleotide"
  source: /note="RNA"
  modified_base (1)..(1): bicyclic nucleic acid (BNA)
aacaucaaggaagauggcau

SEQ ID NO: 3515 - RNA, 19 nt, Artificial Sequence
  source: /note="Description of Artificial Sequence: Synthetic oligonucleotide"
  source: /note="RNA"
  modified_base (1)..(1): bicyclic nucleic acid (BNA)
aacaucaaggaagauggca

SEQ ID NO: 3516 - RNA, 18 nt, Artificial Sequence
  source: /note="Description of Artificial Sequence: Synthetic oligonucleotide"
  source: /note="RNA"
  modified_base (1)..(1): bicyclic nucleic acid (BNA)
aacaucaaggaagauggc

SEQ ID NO: 3517 - RNA, 17 nt, Artificial Sequence
  source: /note="Description of Artificial Sequence: Synthetic oligonucleotide"
  source: /note="RNA"
  modified_base (1)..(1): bicyclic nucleic acid (BNA)
aacaucaaggaagaugg

SEQ ID NO: 3518 - RNA, 16 nt, Artificial Sequence
  source: /note="Description of Artificial Sequence: Synthetic oligonucleotide"
  source: /note="RNA"
  modified_base (1)..(1): bicyclic nucleic acid (BNA)
aacaucaaggaagaug

SEQ ID NO: 3519 - RNA, 15 nt, Artificial Sequence
  source: /note="Description of Artificial Sequence: Synthetic oligonucleotide"
  source: /note="RNA"
  modified_base (1)..(1): bicyclic nucleic acid (BNA)
aacaucaaggaagau

SEQ ID NO: 3520 - RNA, 14 nt, Artificial Sequence
  source: /note="Description of Artificial Sequence: Synthetic oligonucleotide"
  source: /note="RNA"
  modified_base (1)..(1): bicyclic nucleic acid (BNA)
aacaucaaggaaga

SEQ ID NO: 3521 - RNA, 13 nt, Artificial Sequence
  source: /note="Description of Artificial Sequence: Synthetic oligonucleotide"
  source: /note="RNA"
  modified_base (1)..(1): bicyclic nucleic acid (BNA)
aacaucaaggaag

SEQ ID NO: 3522 - RNA, 25 nt, Artificial Sequence
  source: /note="Description of Artificial Sequence: Synthetic oligonucleotide"
  source: /note="RNA"
  modified_base (1)..(1): bicyclic nucleic acid (BNA)
acaucaaggaagauggcauuucuag

SEQ ID NO: 3523 - RNA, 24 nt, Artificial Sequence
  source: /note="Description of Artificial Sequence: Synthetic oligonucleotide"
  source: /note="RNA"
  modified_base (1)..(1): bicyclic nucleic acid (BNA)
acaucaaggaagauggcauuucua

SEQ ID NO: 3524 - RNA, 23 nt, Artificial Sequence
  source: /note="Description of Artificial Sequence: Synthetic oligonucleotide"
  source: /note="RNA"
  modified_base (1)..(1): bicyclic nucleic acid (BNA)
acaucaaggaagauggcauuucu

SEQ ID NO: 3525 - RNA, 22 nt, Artificial Sequence
  source: /note="Description of Artificial Sequence: Synthetic oligonucleotide"
  source: /note="RNA"
  modified_base (1)..(1): bicyclic nucleic acid (BNA)
acaucaaggaagauggcauuuc

SEQ ID NO: 3526 - RNA, 21 nt, Artificial Sequence
  source: /note="Description of Artificial Sequence: Synthetic oligonucleotide"
  source: /note="RNA"
  modified_base (1)..(1): bicyclic nucleic acid (BNA)
acaucaaggaagauggcauuu

SEQ ID NO: 3527 - RNA, 20 nt, Artificial Sequence
  source: /note="Description of Artificial Sequence: Synthetic oligonucleotide"
  source: /note="RNA"
  modified_base (1)..(1): bicyclic nucleic acid (BNA)
acaucaaggaagauggcauu

SEQ ID NO: 3528 - RNA, 19 nt, Artificial Sequence
  source: /note="Description of Artificial Sequence: Synthetic oligonucleotide"
  source: /note="RNA"
  modified_base (1)..(1): bicyclic nucleic acid (BNA)
acaucaaggaagauggcau

SEQ ID NO: 3529 - RNA, 18 nt, Artificial Sequence
  source: /note="Description of Artificial Sequence: Synthetic oligonucleotide"
  source: /note="RNA"
  modified_base (1)..(1): bicyclic nucleic acid (BNA)
acaucaaggaagauggca

SEQ ID NO: 3530 - RNA, 17 nt, Artificial Sequence
  source: /note="Description of Artificial Sequence: Synthetic oligonucleotide"
  source: /note="RNA"
  modified_base (1)..(1): bicyclic nucleic acid (BNA)
acaucaaggaagauggc

SEQ ID NO: 3531 - RNA, 16 nt, Artificial Sequence
  source: /note="Description of Artificial Sequence: Synthetic oligonucleotide"
  source: /note="RNA"
  modified_base (1)..(1): bicyclic nucleic acid (BNA)
acaucaaggaagaugg

SEQ ID NO: 3532 - RNA, 15 nt, Artificial Sequence
  source: /note="Description of Artificial Sequence: Synthetic oligonucleotide"
  source: /note="RNA"
  modified_base (1)..(1): bicyclic nucleic acid (BNA)
acaucaaggaagaug

SEQ ID NO: 3533 - RNA, 14 nt, Artificial Sequence
  source: /note="Description of Artificial Sequence: Synthetic oligonucleotide"
  source: /note="RNA"
  modified_base (1)..(1): bicyclic nucleic acid (BNA)
acaucaaggaagau

SEQ ID NO: 3534 - RNA, 13 nt, Artificial Sequence
  source: /note="Description of Artificial Sequence: Synthetic oligonucleotide"
  source: /note="RNA"
  modified_base (1)..(1): bicyclic nucleic acid (BNA)
acaucaaggaaga

SEQ ID NO: 3535 - RNA, 12 nt, Artificial Sequence
  source: /note="Description of Artificial Sequence: Synthetic oligonucleotide"
  source: /note="RNA"
  modified_base (1)..(1): bicyclic nucleic acid (BNA)
acaucaaggaag

SEQ ID NO: 3536 - RNA, 24 nt, Artificial Sequence
  source: /note="Description of Artificial Sequence: Synthetic oligonucleotide"
  source: /note="RNA"
  modified_base (1)..(1): bicyclic nucleic acid (BNA)
caucaaggaagauggcauuucuag

SEQ ID NO: 3537 - RNA, 23 nt, Artificial Sequence
  source: /note="Description of Artificial Sequence: Synthetic oligonucleotide"
  source: /note="RNA"
  modified_base (1)..(1): bicyclic nucleic acid (BNA)
caucaaggaagauggcauuucua

SEQ ID NO: 3538 - RNA, 22 nt, Artificial Sequence
  source: /note="Description of Artificial Sequence: Synthetic oligonucleotide"
  source: /note="RNA"
  modified_base (1)..(1): bicyclic nucleic acid (BNA)
caucaaggaagauggcauuucu

SEQ ID NO: 3539 - RNA, 21 nt, Artificial Sequence
  source: /note="Description of Artificial Sequence: Synthetic oligonucleotide"
  source: /note="RNA"
  modified_base (1)..(1): bicyclic nucleic acid (BNA)
caucaaggaagauggcauuuc

SEQ ID NO: 3540 - RNA, 20 nt, Artificial Sequence
  source: /note="Description of Artificial Sequence: Synthetic oligonucleotide"
  source: /note="RNA"
  modified_base (1)..(1): bicyclic nucleic acid (BNA)
caucaaggaagauggcauuu

SEQ ID NO: 3541 - RNA, 19 nt, Artificial Sequence
  source: /note="Description of Artificial Sequence: Synthetic oligonucleotide"
  source: /note="RNA"
  modified_base (1)..(1): bicyclic nucleic acid (BNA)
caucaaggaagauggcauu

SEQ ID NO: 3542 - RNA, 18 nt, Artificial Sequence
  source: /note="Description of Artificial Sequence: Synthetic oligonucleotide"
  source: /note="RNA"
  modified_base (1)..(1): bicyclic nucleic acid (BNA)
caucaaggaagauggcau

SEQ ID NO: 3543 - RNA, 17 nt, Artificial Sequence
  source: /note="Description of Artificial Sequence: Synthetic oligonucleotide"
  source: /note="RNA"
  modified_base (1)..(1): bicyclic nucleic acid (BNA)
caucaaggaagauggca

SEQ ID NO: 3544 - RNA, 16 nt, Artificial Sequence
  source: /note="Description of Artificial Sequence: Synthetic oligonucleotide"
  source: /note="RNA"
  modified_base (1)..(1): bicyclic nucleic acid (BNA)
caucaaggaagauggc

SEQ ID NO: 3545 - RNA, 15 nt, Artificial Sequence
  source: /note="Description of Artificial Sequence: Synthetic oligonucleotide"
  source: /note="RNA"
  modified_base (1)..(1): bicyclic nucleic acid (BNA)
caucaaggaagaugg

SEQ ID NO: 3546 - RNA, 14 nt, Artificial Sequence
  source: /note="Description of Artificial Sequence: Synthetic oligonucleotide"
  source: /note="RNA"
  modified_base (1)..(1): bicyclic nucleic acid (BNA)
caucaaggaagaug

SEQ ID NO: 3547 - RNA, 13 nt, Artificial Sequence
  source: /note="Description of Artificial Sequence: Synthetic oligonucleotide"
  source: /note="RNA"
  modified_base (1)..(1): bicyclic nucleic acid (BNA)
caucaaggaagau

SEQ ID NO: 3548 - RNA, 12 nt, Artificial Sequence
  source: /note="Description of Artificial Sequence: Synthetic oligonucleotide"
  source: /note="RNA"
  modified_base (1)..(1): bicyclic nucleic acid (BNA)
caucaaggaaga

SEQ ID NO: 3549 - RNA, 11 nt, Artificial Sequence
  source: /note="Description of Artificial Sequence: Synthetic oligonucleotide"
  source: /note="RNA"
  modified_base (1)..(1): bicyclic nucleic acid (BNA)
caucaaggaag

SEQ ID NO: 3550 - RNA, 23 nt, Artificial Sequence
  source: /note="Description of Artificial Sequence: Synthetic oligonucleotide"
  source: /note="RNA"
  modified_base (1)..(1): bicyclic nucleic acid (BNA)
aucaaggaagauggcauuucuag

SEQ ID NO: 3551 - RNA, 22 nt, Artificial Sequence
  source: /note="Description of Artificial Sequence: Synthetic oligonucleotide"
  source: /note="RNA"
  modified_base (1)..(1): bicyclic nucleic acid (BNA)
aucaaggaagauggcauuucua

SEQ ID NO: 3552 - RNA, 21 nt, Artificial Sequence
  source: /note="Description of Artificial Sequence: Synthetic oligonucleotide"
  source: /note="RNA"
  modified_base (1)..(1): bicyclic nucleic acid (BNA)
aucaaggaagauggcauuucu

SEQ ID NO: 3553 - RNA, 20 nt, Artificial Sequence
  source: /note="Description of Artificial Sequence: Synthetic oligonucleotide"
  source: /note="RNA"
  modified_base (1)..(1): bicyclic nucleic acid (BNA)
aucaaggaagauggcauuuc

SEQ ID NO: 3554 - RNA, 19 nt, Artificial Sequence
  source: /note="Description of Artificial Sequence: Synthetic oligonucleotide"
  source: /note="RNA"
  modified_base (1)..(1): bicyclic nucleic acid (BNA)
aucaaggaagauggcauuu

SEQ ID NO: 3555 - RNA, 18 nt, Artificial Sequence
  source: /note="Description of Artificial Sequence: Synthetic oligonucleotide"
  source: /note="RNA"
  modified_base (1)..(1): bicyclic nucleic acid (BNA)
aucaaggaagauggcauu

SEQ ID NO: 3556 - RNA, 17 nt, Artificial Sequence
  source: /note="Description of Artificial Sequence: Synthetic oligonucleotide"
  source: /note="RNA"
  modified_base (1)..(1): bicyclic nucleic acid (BNA)
aucaaggaagauggcau

SEQ ID NO: 3557 - RNA, 16 nt, Artificial Sequence
  source: /note="Description of Artificial Sequence: Synthetic oligonucleotide"
  source: /note="RNA"
  modified_base (1)..(1): bicyclic nucleic acid (BNA)
aucaaggaagauggca

SEQ ID NO: 3558 - RNA, 15 nt, Artificial Sequence
  source: /note="Description of Artificial Sequence: Synthetic oligonucleotide"
  source: /note="RNA"
  modified_base (1)..(1): bicyclic nucleic acid (BNA)
aucaaggaagauggc

SEQ ID NO: 3559 - RNA, 14 nt, Artificial Sequence
  source: /note="Description of Artificial Sequence: Synthetic oligonucleotide"
  source: /note="RNA"
  modified_base (1)..(1): bicyclic nucleic acid (BNA)
aucaaggaagaugg

SEQ ID NO: 3560 - RNA, 13 nt, Artificial Sequence
  source: /note="Description of Artificial Sequence: Synthetic oligonucleotide"
  source: /note="RNA"
  modified_base (1)..(1): bicyclic nucleic acid (BNA)
aucaaggaagaug

SEQ ID NO: 3561 - RNA, 12 nt, Artificial Sequence
  source: /note="Description of Artificial Sequence: Synthetic oligonucleotide"
  source: /note="RNA"
  modified_base (1)..(1): bicyclic nucleic acid (BNA)
aucaaggaagau

SEQ ID NO: 3562 - RNA, 11 nt, Artificial Sequence
  source: /note="Description of Artificial Sequence: Synthetic oligonucleotide"
  source: /note="RNA"
  modified_base (1)..(1): bicyclic nucleic acid (BNA)
aucaaggaaga

SEQ ID NO: 3563 - RNA, 10 nt, Artificial Sequence
  source: /note="Description of Artificial Sequence: Synthetic oligonucleotide"
  source: /note="RNA"
  modified_base (1)..(1): bicyclic nucleic acid (BNA)
aucaaggaag

SEQ ID NO: 3564 - RNA, 23 nt, Artificial Sequence
  source: /note="Description of Artificial Sequence: Synthetic oligonucleotide"
  source: /note="RNA"
  modified_base (1)..(1): bicyclic nucleic acid (BNA)
ccagagcagguaccuccaacauc

SEQ ID NO: 3565 - RNA, 18 nt, Artificial Sequence
  source: /note="Description of Artificial Sequence: Synthetic oligonucleotide"
  source: /note="RNA"
  modified_base (1)..(1): bicyclic nucleic acid (BNA)
ccagagcagguaccucca

SEQ ID NO: 3566 - RNA, 23 nt, Artificial Sequence
  source: /note="Description of Artificial Sequence: Synthetic oligonucleotide"
  source: /note="RNA"
  modified_base (1)..(1): bicyclic nucleic acid (BNA)
ccucugugauuuuauaacuugau

SEQ ID NO: 3567 - DNA, 17 bp, Artificial Sequence
  source: /note="Description of Artificial Sequence: Synthetic oligonucleotide"
  source: /note="Description of Combined DNA/RNA Molecule: Synthetic oligonucleotide"
  source: /note="DNA/RNA"
  modified_base (1)..(1): bicyclic nucleic acid (BNA)
tcacccaccaucacccu

SEQ ID NO: 3568 - DNA, 20 bp, Artificial Sequence
  source: /note="Description of Artificial Sequence: Synthetic oligonucleotide"
  source: /note="Description of Combined DNA/RNA Molecule: Synthetic oligonucleotide"
  source: /note="DNA/RNA"
  modified_base (1)..(1): bicyclic nucleic acid (BNA)
tgauauccucaaggucaccc

SEQ ID NO: 3569 - RNA, 22 nt, Artificial Sequence
  source: /note="Description of Artificial Sequence: Synthetic oligonucleotide"
  source: /note="RNA"
  modified_base (1)..(1): bicyclic nucleic acid (BNA)
cugcuugaugaucaucucguug

SEQ ID NO: 3570 - RNA, 18 nt, Artificial Sequence
  source: /note="Description of Artificial Sequence: Synthetic oligonucleotide"
  source: /note="RNA"
  modified_base (1)..(1): bicyclic nucleic acid (BNA)
cugcuugaugaucaucuc

SEQ ID NO: 3571 - RNA, 19 nt, Artificial Sequence
  source: /note="Description of Artificial Sequence: Synthetic oligonucleotide"
  source: /note="RNA"
  modified_base (1)..(1): bicyclic nucleic acid (BNA)
guuuccuuaguaaccacag

SEQ ID NO: 3572 - RNA, 17 nt, Artificial Sequence
  source: /note="Description of Artificial Sequence: Synthetic oligonucleotide"
  source: /note="RNA"
  modified_base (1)..(1): bicyclic nucleic acid (BNA)
guuuccuuaguaaccac

SEQ ID NO: 3573 - DNA, 20 bp, Artificial Sequence
  source: /note="Description of Artificial Sequence: Synthetic oligonucleotide"
  source: /note="Description of Combined DNA/RNA Molecule: Synthetic oligonucleotide"
  source: /note="DNA/RNA"
  source: /note="5' tri-ethylene glycol (TEG)"
  modified_base (1)..(1): bicyclic nucleic acid (BNA)
tcaaggaagauggcauuucu

SEQ ID NO: 3574 - DNA, 22 bp, Artificial Sequence
  source: /note="Description of Artificial Sequence: Synthetic oligonucleotide"
  source: /note="Description of Combined DNA/RNA Molecule: Synthetic oligonucleotide"
  source: /note="DNA/RNA"
  source: /note="5' tri-ethylene glycol (TEG)"
  modified_base (1)..(1): bicyclic nucleic acid (BNA)
tcaaggaagauggcauuucuag

SEQ ID NO: 3575 - RNA, 18 nt, Artificial Sequence
  source: /note="Description of Artificial Sequence: Synthetic oligonucleotide"
  source: /note="RNA"
  source: /note="5' tri-ethylene glycol (TEG)"
  modified_base (1)..(1): bicyclic nucleic acid (BNA)
gguaaguucuguccaagc

SEQ ID NO: 3576 - RNA, 18 nt, Artificial Sequence
  source: /note="Description of Artificial Sequence: Synthetic oligonucleotide"
  source: /note="RNA"
  source: /note="5' tri-ethylene glycol (TEG)"
  modified_base (1)..(1): bicyclic nucleic acid (BNA)
guaaguucuguccaagcc

SEQ ID NO: 3577 - RNA, 18 nt, Artificial Sequence
  source: /note="Description of Artificial Sequence: Synthetic oligonucleotide"
  source: /note="RNA"
  source: /note="5' tri-ethylene glycol (TEG)"
  modified_base (1)..(1): bicyclic nucleic acid (BNA)
agucgguaaguucugucc

SEQ ID NO: 3578 - RNA, 18 nt, Artificial Sequence
  source: /note="Description of Artificial Sequence: Synthetic oligonucleotide"
  source: /note="RNA"
  source: /note="5' tri-ethylene glycol (TEG)"
  modified_base (1)..(1): bicyclic nucleic acid (BNA)
cuguccaagcccgguuga

SEQ ID NO: 3579 - DNA, 15 bp, Artificial Sequence
  source: /note="Description of Artificial Sequence: Synthetic oligonucleotide"
  source: /note="Description of Combined DNA/RNA Molecule: Synthetic oligonucleotide"
  source: /note="DNA/RNA"
  source: /note="5' tri-ethylene glycol (TEG)"
  modified_base (1)..(1): bicyclic nucleic acid (BNA)
taaguucuguccaag

SEQ ID NO: 3580 - DNA, 20 bp, Artificial Sequence
  source: /note="Description of Artificial Sequence: Synthetic oligonucleotide"
  source: /note="Description of Combined DNA/RNA Molecule: Synthetic oligonucleotide"
  source: /note="DNA/RNA"
  source: /note="5' tri-ethylene glycol (TEG)"
  modified_base (1)..(1): bicyclic nucleic acid (BNA)
tucuguccaagcccgguuga

SEQ ID NO: 3581 - DNA, 19 bp, Artificial Sequence
  source: /note="Description of Artificial Sequence: Synthetic oligonucleotide"
  source: /note="Description of Combined DNA/RNA Molecule: Synthetic oligonucleotide"
  source: /note="DNA/RNA"
  source: /note="5' tri-ethylene glycol (TEG)"
  modified_base (1)..(1): bicyclic nucleic acid (BNA)
tucuguccaagcccgguug

SEQ ID NO: 3582 - DNA, 18 bp, Artificial Sequence
  source: /note="Description of Artificial Sequence: Synthetic oligonucleotide"
  source: /note="Description of Combined DNA/RNA Molecule: Synthetic oligonucleotide"
  source: /note="DNA/RNA"
  source: /note="5' tri-ethylene glycol (TEG)"
  modified_base (1)..(1): bicyclic nucleic acid (BNA)
tucuguccaagcccgguu

SEQ ID NO: 3583 - DNA, 17 bp, Artificial Sequence
  source: /note="Description of Artificial Sequence: Synthetic oligonucleotide"
  source: /note="Description of Combined DNA/RNA Molecule: Synthetic oligonucleotide"
  source: /note="DNA/RNA"
  source: /note="5' tri-ethylene glycol (TEG)"
  modified_base (1)..(1): bicyclic nucleic acid (BNA)
tucuguccaagcccggu

SEQ ID NO: 3584 - DNA, 16 bp, Artificial Sequence
  source: /note="Description of Artificial Sequence: Synthetic oligonucleotide"
  source: /note="Description of Combined DNA/RNA Molecule: Synthetic oligonucleotide"
  source: /note="DNA/RNA"
  source: /note="5' tri-ethylene glycol (TEG)"
  modified_base (1)..(1): bicyclic nucleic acid (BNA)
tucuguccaagcccgg

SEQ ID NO: 3585 - DNA, 15 bp, Artificial Sequence
  source: /note="Description of Artificial Sequence: Synthetic oligonucleotide"
  source: /note="Description of Combined DNA/RNA Molecule: Synthetic oligonucleotide"
  source: /note="DNA/RNA"
  source: /note="5' tri-ethylene glycol (TEG)"
  modified_base (1)..(1): bicyclic nucleic acid (BNA)
tucuguccaagcccg

SEQ ID NO: 3586 - DNA, 14 bp, Artificial Sequence
  source: /note="Description of Artificial Sequence: Synthetic oligonucleotide"
  source: /note="Description of Combined DNA/RNA Molecule: Synthetic oligonucleotide"
  source: /note="DNA/RNA"
  source: /note="5' tri-ethylene glycol (TEG)"
  modified_base (1)..(1): bicyclic nucleic acid (BNA)
tucuguccaagccc

SEQ ID NO: 3587 - DNA, 13 bp, Artificial Sequence
  source: /note="Description of Artificial Sequence: Synthetic oligonucleotide"
  source: /note="Description of Combined DNA/RNA Molecule: Synthetic oligonucleotide"
  source: /note="DNA/RNA"
  source: /note="5' tri-ethylene glycol (TEG)"
  modified_base (1)..(1): bicyclic nucleic acid (BNA)
tucuguccaagcc

SEQ ID NO: 3588 - DNA, 12 bp, Artificial Sequence
  source: /note="Description of Artificial Sequence: Synthetic oligonucleotide"
  source: /note="Description of Combined DNA/RNA Molecule: Synthetic oligonucleotide"
  source: /note="DNA/RNA"
  source: /note="5' tri-ethylene glycol (TEG)"
  modified_base (1)..(1): bicyclic nucleic acid (BNA)
tucuguccaagc

SEQ ID NO: 3589 - DNA, 11 bp, Artificial Sequence
  source: /note="Description of Artificial Sequence: Synthetic oligonucleotide"
  source: /note="Description of Combined DNA/RNA Molecule: Synthetic oligonucleotide"
  source: /note="DNA/RNA"
  source: /note="5' tri-ethylene glycol (TEG)"
  modified_base (1)..(1): bicyclic nucleic acid (BNA)
tucuguccaag

SEQ ID NO: 3590 - DNA, 10 bp, Artificial Sequence
  source: /note="Description of Artificial Sequence: Synthetic oligonucleotide"
  source: /note="Description of Combined DNA/RNA Molecule: Synthetic oligonucleotide"
  source: /note="DNA/RNA"
  source: /note="5' tri-ethylene glycol (TEG)"
  modified_base (1)..(1): bicyclic nucleic acid (BNA)
tucuguccaa

SEQ ID NO: 3591 - DNA, 9 bp, Artificial Sequence
  source: /note="Description of Artificial Sequence: Synthetic oligonucleotide"
  source: /note="Description of Combined DNA/RNA Molecule: Synthetic oligonucleotide"
  source: /note="DNA/RNA"
  source: /note="5' tri-ethylene glycol (TEG)"
  modified_base (1)..(1): bicyclic nucleic acid (BNA)
tucugucca

SEQ ID NO: 3592 - DNA, 8 bp, Artificial Sequence
  source: /note="Description of Artificial Sequence: Synthetic oligonucleotide"
  source: /note="Description of Combined DNA/RNA Molecule: Synthetic oligonucleotide"
  source: /note="DNA/RNA"
  source: /note="5' tri-ethylene glycol (TEG)"
  modified_base (1)..(1): bicyclic nucleic acid (BNA)
tucugucc

SEQ ID NO: 3593 - DNA, 19 bp, Artificial Sequence
  source: /note="Description of Artificial Sequence: Synthetic oligonucleotide"
  source: /note="Description of Combined DNA/RNA Molecule: Synthetic oligonucleotide"
  source: /note="DNA/RNA"
  source: /note="5' tri-ethylene glycol (TEG)"
  modified_base (1)..(1): bicyclic nucleic acid (BNA)
tcuguccaagcccgguuga

SEQ ID NO: 3594 - DNA, 18 bp, Artificial Sequence
  source: /note="Description of Artificial Sequence: Synthetic oligonucleotide"
  source: /note="Description of Combined DNA/RNA Molecule: Synthetic oligonucleotide"
  source: /note="DNA/RNA"
  source: /note="5' tri-ethylene glycol (TEG)"
  modified_base (1)..(1): bicyclic nucleic acid (BNA)
tcuguccaagcccgguug

SEQ ID NO: 3595 - DNA, 17 bp, Artificial Sequence
  source: /note="Description of Artificial Sequence: Synthetic oligonucleotide"
  source: /note="Description of Combined DNA/RNA Molecule: Synthetic oligonucleotide"
  source: /note="DNA/RNA"
  source: /note="5' tri-ethylene glycol (TEG)"
  modified_base (1)..(1): bicyclic nucleic acid (BNA)
tcuguccaagcccgguu

SEQ ID NO: 3596 - DNA, 16 bp, Artificial Sequence
  source: /note="Description of Artificial Sequence: Synthetic oligonucleotide"
  source: /note="Description of Combined DNA/RNA Molecule: Synthetic oligonucleotide"
  source: /note="DNA/RNA"
  source: /note="5' tri-ethylene glycol (TEG)"
  modified_base (1)..(1): bicyclic nucleic acid (BNA)
tcuguccaagcccggu

SEQ ID NO: 3597 - DNA, 15 bp, Artificial Sequence
  source: /note="Description of Artificial Sequence: Synthetic oligonucleotide"
  source: /note="Description of Combined DNA/RNA Molecule: Synthetic oligonucleotide"
  source: /note="DNA/RNA"
  source: /note="5' tri-ethylene glycol (TEG)"
  modified_base (1)..(1): bicyclic nucleic acid (BNA)
tcuguccaagcccgg

SEQ ID NO: 3598 - DNA, 14 bp, Artificial Sequence
  source: /note="Description of Artificial Sequence: Synthetic oligonucleotide"
  source: /note="Description of Combined DNA/RNA Molecule: Synthetic oligonucleotide"
  source: /note="DNA/RNA"
  source: /note="5' tri-ethylene glycol (TEG)"
  modified_base (1)..(1): bicyclic nucleic acid (BNA)
tcuguccaagcccg

SEQ ID NO: 3599 - DNA, 13 bp, Artificial Sequence
  source: /note="Description of Artificial Sequence: Synthetic oligonucleotide"
  source: /note="Description of Combined DNA/RNA Molecule: Synthetic oligonucleotide"
  source: /note="DNA/RNA"
  source: /note="5' tri-ethylene glycol (TEG)"
  modified_base (1)..(1): bicyclic nucleic acid (BNA)
tcuguccaagccc

SEQ ID NO: 3600 - DNA, 12 bp, Artificial Sequence
  source: /note="Description of Artificial Sequence: Synthetic oligonucleotide"
  source: /note="Description of Combined DNA/RNA Molecule: Synthetic oligonucleotide"
  source: /note="DNA/RNA"
  source: /note="5' tri-ethylene glycol (TEG)"
  modified_base (1)..(1): bicyclic nucleic acid (BNA)
tcuguccaagcc

SEQ ID NO: 3601 - DNA, 11 bp, Artificial Sequence
  source: /note="Description of Artificial Sequence: Synthetic oligonucleotide"
  source: /note="Description of Combined DNA/RNA Molecule: Synthetic oligonucleotide"
  source: /note="DNA/RNA"
  source: /note="5' tri-ethylene glycol (TEG)"
  modified_base (1)..(1): bicyclic nucleic acid (BNA)
tcuguccaagc

SEQ ID NO: 3602 - DNA, 10 bp, Artificial Sequence
  source: /note="Description of Artificial Sequence: Synthetic oligonucleotide"
  source: /note="Description of Combined DNA/RNA Molecule: Synthetic oligonucleotide"
  source: /note="DNA/RNA"
  source: /note="5' tri-ethylene glycol (TEG)"
  modified_base (1)..(1): bicyclic nucleic acid (BNA)
tcuguccaag

SEQ ID NO: 3603 - DNA, 9 bp, Artificial Sequence
  source: /note="Description of Artificial Sequence: Synthetic oligonucleotide"
  source: /note="Description of Combined DNA/RNA Molecule: Synthetic oligonucleotide"
  source: /note="DNA/RNA"
  source: /note="5' tri-ethylene glycol (TEG)"
  modified_base (1)..(1): bicyclic nucleic acid (BNA)
tcuguccaa

SEQ ID NO: 3604 - DNA, 8 bp, Artificial Sequence
  source: /note="Description of Artificial Sequence: Synthetic oligonucleotide"
  source: /note="Description of Combined DNA/RNA Molecule: Synthetic oligonucleotide"
  source: /note="DNA/RNA"
  source: /note="5' tri-ethylene glycol (TEG)"
  modified_base (1)..(1): bicyclic nucleic acid (BNA)
tcugucca

SEQ ID NO: 3605 - RNA, 17 nt, Artificial Sequence
  source: /note="Description of Artificial Sequence: Synthetic oligonucleotide"
  source: /note="RNA"
  source: /note="5' tri-ethylene glycol (TEG)"
  modified_base (1)..(1): bicyclic nucleic acid (BNA)
cuguccaagcccgguug

SEQ ID NO: 3606 - RNA, 16 nt, Artificial Sequence
  source: /note="Description of Artificial Sequence: Synthetic oligonucleotide"
  source: /note="RNA"
  source: /note="5' tri-ethylene glycol (TEG)"
  modified_base (1)..(1): bicyclic nucleic acid (BNA)
cuguccaagcccgguu

SEQ ID NO: 3607 - RNA, 15 nt, Artificial Sequence
  source: /note="Description of Artificial Sequence: Synthetic oligonucleotide"
  source: /note="RNA"
  source: /note="5' tri-ethylene glycol (TEG)"
  modified_base (1)..(1): bicyclic nucleic acid (BNA)
cuguccaagcccggu

SEQ ID NO: 3608 - RNA, 14 nt, Artificial Sequence
  source: /note="Description of Artificial Sequence: Synthetic oligonucleotide"
  source: /note="RNA"
  source: /note="5' tri-ethylene glycol (TEG)"
  modified_base (1)..(1): bicyclic nucleic acid (BNA)
cuguccaagcccgg

SEQ ID NO: 3609 - RNA, 13 nt, Artificial Sequence
  source: /note="Description of Artificial Sequence: Synthetic oligonucleotide"
  source: /note="RNA"
  source: /note="5' tri-ethylene glycol (TEG)"
  modified_base (1)..(1): bicyclic nucleic acid (BNA)
cuguccaagcccg

SEQ ID NO: 3610 - RNA, 12 nt, Artificial Sequence
  source: /note="Description of Artificial Sequence: Synthetic oligonucleotide"
  source: /note="RNA"
  source: /note="5' tri-ethylene glycol (TEG)"
  modified_base (1)..(1): bicyclic nucleic acid (BNA)
cuguccaagccc

SEQ ID NO: 3611 - RNA, 11 nt, Artificial Sequence
  source: /note="Description of Artificial Sequence: Synthetic oligonucleotide"
  source: /note="RNA"
  source: /note="5' tri-ethylene glycol (TEG)"
  modified_base (1)..(1): bicyclic nucleic acid (BNA)
cuguccaagcc

SEQ ID NO: 3612 - RNA, 10 nt, Artificial Sequence
  source: /note="Description of Artificial Sequence: Synthetic oligonucleotide"
  source: /note="RNA"
  source: /note="5' tri-ethylene glycol (TEG)"
  modified_base (1)..(1): bicyclic nucleic acid (BNA)
cuguccaagc

SEQ ID NO: 3613 - RNA, 9 nt, Artificial Sequence
  source: /note="Description of Artificial Sequence: Synthetic oligonucleotide"
  source: /note="RNA"
  source: /note="5' tri-ethylene glycol (TEG)"
  modified_base (1)..(1): bicyclic nucleic acid (BNA)
cuguccaag

SEQ ID NO: 3614 - RNA, 8 nt, Artificial Sequence
  source: /note="Description of Artificial Sequence: Synthetic oligonucleotide"
  source: /note="RNA"
  source: /note="5' tri-ethylene glycol (TEG)"
  modified_base (1)..(1): bicyclic nucleic acid (BNA)
cuguccaa

SEQ ID NO: 3615 - RNA, 20 nt, Artificial Sequence
  source: /note="Description of Artificial Sequence: Synthetic oligonucleotide"
  source: /note="RNA"
  source: /note="5' tri-ethylene glycol (TEG)"
  modified_base (1)..(1): bicyclic nucleic acid (BNA)
guucuguccaagcccgguug

SEQ ID NO: 3616 - RNA, 19 nt, Artificial Sequence
  source: /note="Description of Artificial Sequence: Synthetic oligonucleotide"
  source: /note="RNA"
  source: /note="5' tri-ethylene glycol (TEG)"
  modified_base (1)..(1): bicyclic nucleic acid (BNA)
guucuguccaagcccgguu

SEQ ID NO: 3617 - RNA, 18 nt, Artificial Sequence
  source: /note="Description of Artificial Sequence: Synthetic oligonucleotide"
  source: /note="RNA"
  source: /note="5' tri-ethylene glycol (TEG)"
  modified_base (1)..(1): bicyclic nucleic acid (BNA)
guucuguccaagcccggu

SEQ ID NO: 3618 - RNA, 17 nt, Artificial Sequence
  source: /note="Description of Artificial Sequence: Synthetic oligonucleotide"
  source: /note="RNA"
  source: /note="5' tri-ethylene glycol (TEG)"
  modified_base (1)..(1): bicyclic nucleic acid (BNA)
guucuguccaagcccgg

SEQ ID NO: 3619 - RNA, 16 nt, Artificial Sequence
  source: /note="Description of Artificial Sequence: Synthetic oligonucleotide"
  source: /note="RNA"
  source: /note="5' tri-ethylene glycol (TEG)"
  modified_base (1)..(1): bicyclic nucleic acid (BNA)
guucuguccaagcccg

SEQ ID NO: 3620 - RNA, 15 nt, Artificial Sequence
  source: /note="Description of Artificial Sequence: Synthetic oligonucleotide"
  source: /note="RNA"
  source: /note="5' tri-ethylene glycol (TEG)"
  modified_base (1)..(1): bicyclic nucleic acid (BNA)
guucuguccaagccc

SEQ ID NO: 3621 - RNA, 14 nt, Artificial Sequence
  source: /note="Description of Artificial Sequence: Synthetic oligonucleotide"
  source: /note="RNA"
  source: /note="5' tri-ethylene glycol (TEG)"
  modified_base (1)..(1): bicyclic nucleic acid (BNA)
guucuguccaagcc

SEQ ID NO: 3622 - RNA, 13 nt, Artificial Sequence
  source: /note="Description of Artificial Sequence: Synthetic oligonucleotide"
  source: /note="RNA"
  source: /note="5' tri-ethylene glycol (TEG)"
  modified_base (1)..(1): bicyclic nucleic acid (BNA)
guucuguccaagc

SEQ ID NO: 3623 - RNA, 12 nt, Artificial Sequence
  source: /note="Description of Artificial Sequence: Synthetic oligonucleotide"
  source: /note="RNA"
  source: /note="5' tri-ethylene glycol (TEG)"
  modified_base (1)..(1): bicyclic nucleic acid (BNA)
guucuguccaag

SEQ ID NO: 3624 - RNA, 11 nt, Artificial Sequence
  source: /note="Description of Artificial Sequence: Synthetic oligonucleotide"
  source: /note="RNA"
  source: /note="5' tri-ethylene glycol (TEG)"
  modified_base (1)..(1): bicyclic nucleic acid (BNA)
guucuguccaa

SEQ ID NO: 3625 - RNA, 10 nt, Artificial Sequence
  source: /note="Description of Artificial Sequence: Synthetic oligonucleotide"
  source: /note="RNA"
  source: /note="5' tri-ethylene glycol (TEG)"
  modified_base (1)..(1): bicyclic nucleic acid (BNA)
guucugucca

SEQ ID NO: 3626 - RNA, 9 nt, Artificial Sequence
  source: /note="Description of Artificial Sequence: Synthetic oligonucleotide"
  source: /note="RNA"
  source: /note="5' tri-ethylene glycol (TEG)"
  modified_base (1)..(1): bicyclic nucleic acid (BNA)
guucugucc

SEQ ID NO: 3627 - RNA, 8 nt, Artificial Sequence
  source: /note="Description of Artificial Sequence: Synthetic oligonucleotide"
  source: /note="RNA"
  source: /note="5' tri-ethylene glycol (TEG)"
  modified_base (1)..(1): bicyclic nucleic acid (BNA)
guucuguc

SEQ ID NO: 3628 - RNA, 20 nt, Artificial Sequence
  source: /note="Description of Artificial Sequence: Synthetic oligonucleotide"
  source: /note="RNA"
  source: /note="5' tri-ethylene glycol (TEG)"
  modified_base (1)..(1): bicyclic nucleic acid (BNA)
aguucuguccaagcccgguu

SEQ ID NO: 3629 - RNA, 19 nt, Artificial Sequence
  source: /note="Description of Artificial Sequence: Synthetic oligonucleotide"
  source: /note="RNA"
  source: /note="5' tri-ethylene glycol (TEG)"
  modified_base (1)..(1): bicyclic nucleic acid (BNA)
aguucuguccaagcccggu

SEQ ID NO: 3630 - RNA, 18 nt, Artificial Sequence
  source: /note="Description of Artificial Sequence: Synthetic oligonucleotide"
  source: /note="RNA"
  source: /note="5' tri-ethylene glycol (TEG)"
  modified_base (1)..(1): bicyclic nucleic acid (BNA)
aguucuguccaagcccgg

SEQ ID NO: 3631 - RNA, 17 nt, Artificial Sequence
  source: /note="Description of Artificial Sequence: Synthetic oligonucleotide"
  source: /note="RNA"
  source: /note="5' tri-ethylene glycol (TEG)"
  modified_base (1)..(1): bicyclic nucleic acid (BNA)
aguucuguccaagcccg

SEQ ID NO: 3632 - RNA, 16 nt, Artificial Sequence
  source: /note="Description of Artificial Sequence: Synthetic oligonucleotide"
  source: /note="RNA"
  source: /note="5' tri-ethylene glycol (TEG)"
  modified_base (1)..(1): bicyclic nucleic acid (BNA)
aguucuguccaagccc

SEQ ID NO: 3633 - RNA, 15 nt, Artificial Sequence
  source: /note="Description of Artificial Sequence: Synthetic oligonucleotide"
  source: /note="RNA"
  source: /note="5' tri-ethylene glycol (TEG)"
  modified_base (1)..(1): bicyclic nucleic acid (BNA)
aguucuguccaagcc

SEQ ID NO: 3634 - RNA, 14 nt, Artificial Sequence
  source: /note="Description of Artificial Sequence: Synthetic oligonucleotide"
  source: /note="RNA"
  source: /note="5' tri-ethylene glycol (TEG)"
  modified_base (1)..(1): bicyclic nucleic acid (BNA)
aguucuguccaagc

SEQ ID NO: 3635 - RNA, 13 nt, Artificial Sequence
  source: /note="Description of Artificial Sequence: Synthetic oligonucleotide"
  source: /note="RNA"
  source: /note="5' tri-ethylene glycol (TEG)"
  modified_base (1)..(1): bicyclic nucleic acid (BNA)
aguucuguccaag

SEQ ID NO: 3636 - RNA, 12 nt, Artificial Sequence
  source: /note="Description of Artificial Sequence: Synthetic oligonucleotide"
  source: /note="RNA"
  source: /note="5' tri-ethylene glycol (TEG)"
  modified_base (1)..(1): bicyclic nucleic acid (BNA)
aguucuguccaa

SEQ ID NO: 3637 - RNA, 11 nt, Artificial Sequence
  source: /note="Description of Artificial Sequence: Synthetic oligonucleotide"
  source: /note="RNA"
  source: /note="5' tri-ethylene glycol (TEG)"
  modified_base (1)..(1): bicyclic nucleic acid (BNA)
aguucugucca

SEQ ID NO: 3638 - RNA, 10 nt, Artificial Sequence
  source: /note="Description of Artificial Sequence: Synthetic oligonucleotide"
  source: /note="RNA"
  source: /note="5' tri-ethylene glycol (TEG)"
  modified_base (1)..(1): bicyclic nucleic acid (BNA)
aguucugucc

SEQ ID NO: 3639 - RNA, 9 nt, Artificial Sequence
  source: /note="Description of Artificial Sequence: Synthetic oligonucleotide"
  source: /note="RNA"
  source: /note="5' tri-ethylene glycol (TEG)"
  modified_base (1)..(1): bicyclic nucleic acid (BNA)
aguucuguc

SEQ ID NO: 3640 - RNA, 8 nt, Artificial Sequence
  source: /note="Description of Artificial Sequence: Synthetic oligonucleotide"
  source: /note="RNA"
  source: /note="5' tri-ethylene glycol (TEG)"
  modified_base (1)..(1): bicyclic nucleic acid (BNA)
aguucugu

SEQ ID NO: 3641 - RNA, 20 nt, Artificial Sequence
  source: /note="Description of Artificial Sequence: Synthetic oligonucleotide"
  source: /note="RNA"
  source: /note="5' tri-ethylene glycol (TEG)"
  modified_base (1)..(1): bicyclic nucleic acid (BNA)
aaguucuguccaagcccggu

SEQ ID NO: 3642 - RNA, 19 nt, Artificial Sequence
  source: /note="Description of Artificial Sequence: Synthetic oligonucleotide"
  source: /note="RNA"
  source: /note="5' tri-ethylene glycol (TEG)"
  modified_base (1)..(1): bicyclic nucleic acid (BNA)
aaguucuguccaagcccgg

SEQ ID NO: 3643 - RNA, 18 nt, Artificial Sequence
  source: /note="Description of Artificial Sequence: Synthetic oligonucleotide"
  source: /note="RNA"
  source: /note="5' tri-ethylene glycol (TEG)"
  modified_base (1)..(1): bicyclic nucleic acid (BNA)
aaguucuguccaagcccg

SEQ ID NO: 3644 - RNA, 17 nt, Artificial Sequence
  source: /note="Description of Artificial Sequence: Synthetic oligonucleotide"
  source: /note="RNA"
  source: /note="5' tri-ethylene glycol (TEG)"
  modified_base (1)..(1): bicyclic nucleic acid (BNA)
aaguucuguccaagccc

SEQ ID NO: 3645 - RNA, 16 nt, Artificial Sequence
  source: /note="Description of Artificial Sequence: Synthetic oligonucleotide"
  source: /note="RNA"
  source: /note="5' tri-ethylene glycol (TEG)"
  modified_base (1)..(1): bicyclic nucleic acid (BNA)
aaguucuguccaagcc

SEQ ID NO: 3646 - RNA, 15 nt, Artificial Sequence
  source: /note="Description of Artificial Sequence: Synthetic oligonucleotide"
  source: /note="RNA"
  source: /note="5' tri-ethylene glycol (TEG)"
  modified_base (1)..(1): bicyclic nucleic acid (BNA)
aaguucuguccaagc

SEQ ID NO: 3647 - RNA, 14 nt, Artificial Sequence
  source: /note="Description of Artificial Sequence: Synthetic oligonucleotide"
  source: /note="RNA"
  source: /note="5' tri-ethylene glycol (TEG)"
  modified_base (1)..(1): bicyclic nucleic acid (BNA)
aaguucuguccaag

SEQ ID NO: 3648 - RNA, 13 nt, Artificial Sequence
  source: /note="Description of Artificial Sequence: Synthetic oligonucleotide"
  source: /note="RNA"
  source: /note="5' tri-ethylene glycol (TEG)"
  modified_base (1)..(1): bicyclic nucleic acid (BNA)
aaguucuguccaa

SEQ ID NO: 3649 - RNA, 12 nt, Artificial Sequence
  source: /note="Description of Artificial Sequence: Synthetic oligonucleotide"
  source: /note="RNA"
  source: /note="5' tri-ethylene glycol (TEG)"
  modified_base (1)..(1): bicyclic nucleic acid (BNA)
aaguucugucca

SEQ ID NO: 3650 - RNA, 11 nt, Artificial Sequence
  source: /note="Description of Artificial Sequence: Synthetic oligonucleotide"
  source: /note="RNA"
  source: /note="5' tri-ethylene glycol (TEG)"
  modified_base (1)..(1): bicyclic nucleic acid (BNA)
aaguucugucc

SEQ ID NO: 3651 - RNA, 10 nt, Artificial Sequence
  source: /note="Description of Artificial Sequence: Synthetic oligonucleotide"
  source: /note="RNA"
  source: /note="5' tri-ethylene glycol (TEG)"
  modified_base (1)..(1): bicyclic nucleic acid (BNA)
aaguucuguc

SEQ ID NO: 3652 - RNA, 9 nt, Artificial Sequence
  source: /note="Description of Artificial Sequence: Synthetic oligonucleotide"
  source: /note="RNA"
  source: /note="5' tri-ethylene glycol (TEG)"
  modified_base (1)..(1): bicyclic nucleic acid (BNA)
aaguucugu

SEQ ID NO: 3653 - RNA, 8 nt, Artificial Sequence
  source: /note="Description of Artificial Sequence: Synthetic oligonucleotide"
  source: /note="RNA"
  source: /note="5' tri-ethylene glycol (TEG)"
  modified_base (1)..(1): bicyclic nucleic acid (BNA)
aaguucug

SEQ ID NO: 3654 - DNA, 20 bp, Artificial Sequence
  source: /note="Description of Artificial Sequence: Synthetic oligonucleotide"
  source: /note="Description of Combined DNA/RNA Molecule: Synthetic oligonucleotide"
  source: /note="DNA/RNA"
  source: /note="5' tri-ethylene glycol (TEG)"
  modified_base (1)..(1): bicyclic nucleic acid (BNA)
taaguucuguccaagcccgg

SEQ ID NO: 3655 - DNA, 19 bp, Artificial Sequence
  source: /note="Description of Artificial Sequence: Synthetic oligonucleotide"
  source: /note="Description of Combined DNA/RNA Molecule: Synthetic oligonucleotide"
  source: /note="DNA/RNA"
  source: /note="5' tri-ethylene glycol (TEG)"
  modified_base (1)..(1): bicyclic nucleic acid (BNA)
taaguucuguccaagcccg

SEQ ID NO: 3656 - DNA, 18 bp, Artificial Sequence
  source: /note="Description of Artificial Sequence: Synthetic oligonucleotide"
  source: /note="Description of Combined DNA/RNA Molecule: Synthetic oligonucleotide"
  source: /note="DNA/RNA"
  source: /note="5' tri-ethylene glycol (TEG)"
  modified_base (1)..(1): bicyclic nucleic acid (BNA)
taaguucuguccaagccc

SEQ ID NO: 3657 - DNA, 17 bp, Artificial Sequence
  source: /note="Description of Artificial Sequence: Synthetic oligonucleotide"
  source: /note="Description of Combined DNA/RNA Molecule: Synthetic oligonucleotide"
  source: /note="DNA/RNA"
  source: /note="5' tri-ethylene glycol (TEG)"
  modified_base (1)..(1): bicyclic nucleic acid (BNA)
taaguucuguccaagcc

SEQ ID NO: 3658 - DNA, 16 bp, Artificial Sequence
  source: /note="Description of Artificial Sequence: Synthetic oligonucleotide"
  source: /note="Description of Combined DNA/RNA Molecule: Synthetic oligonucleotide"
  source: /note="DNA/RNA"
  source: /note="5' tri-ethylene glycol (TEG)"
  modified_base (1)..(1): bicyclic nucleic acid (BNA)
taaguucuguccaagc

SEQ ID NO: 3659 - DNA, 14 bp, Artificial Sequence
  source: /note="Description of Artificial Sequence: Synthetic oligonucleotide"
  source: /note="Description of Combined DNA/RNA Molecule: Synthetic oligonucleotide"
  source: /note="DNA/RNA"
  source: /note="5' tri-ethylene glycol (TEG)"
  modified_base (1)..(1): bicyclic nucleic acid (BNA)
taaguucuguccaa

SEQ ID NO: 3660 - DNA, 13 bp, Artificial Sequence
  source: /note="Description of Artificial Sequence: Synthetic oligonucleotide"
  source: /note="Description of Combined DNA/RNA Molecule: Synthetic oligonucleotide"
  source: /note="DNA/RNA"
  source: /note="5' tri-ethylene glycol (TEG)"
  modified_base (1)..(1): bicyclic nucleic acid (BNA)
taaguucugucca

SEQ ID NO: 3661 - DNA, 12 bp, Artificial Sequence
  source: /note="Description of Artificial Sequence: Synthetic oligonucleotide"
  source: /note="Description of Combined DNA/RNA Molecule: Synthetic oligonucleotide"
  source: /note="DNA/RNA"
  source: /note="5' tri-ethylene glycol (TEG)"
  modified_base (1)..(1): bicyclic nucleic acid (BNA)
taaguucugucc

SEQ ID NO: 3662 - DNA, 11 bp, Artificial Sequence
  source: /note="Description of Artificial Sequence: Synthetic oligonucleotide"
  source: /note="Description of Combined DNA/RNA Molecule: Synthetic oligonucleotide"
  source: /note="DNA/RNA"
  source: /note="5' tri-ethylene glycol (TEG)"
  modified_base (1)..(1): bicyclic nucleic acid (BNA)
taaguucuguc

SEQ ID NO: 3663 - DNA, 10 bp, Artificial Sequence
  source: /note="Description of Artificial Sequence: Synthetic oligonucleotide"
  source: /note="Description of Combined DNA/RNA Molecule: Synthetic oligonucleotide"
  source: /note="DNA/RNA"
  source: /note="5' tri-ethylene glycol (TEG)"
  modified_base (1)..(1): bicyclic nucleic acid (BNA)
taaguucugu

SEQ ID NO: 3664 - DNA, 9 bp, Artificial Sequence
  source: /note="Description of Artificial Sequence: Synthetic oligonucleotide"
  source: /note="Description of Combined DNA/RNA Molecule: Synthetic oligonucleotide"
  source: /note="DNA/RNA"
  source: /note="5' tri-ethylene glycol (TEG)"
  modified_base (1)..(1): bicyclic nucleic acid (BNA)
taaguucug

SEQ ID NO: 3665 - DNA, 8 bp, Artificial Sequence
  source: /note="Description of Artificial Sequence: Synthetic oligonucleotide"
  source: /note="Description of Combined DNA/RNA Molecule: Synthetic oligonucleotide"
  source: /note="DNA/RNA"
  source: /note="5' tri-ethylene glycol (TEG)"
  modified_base (1)..(1): bicyclic nucleic acid (BNA)
taaguucu

SEQ ID NO: 3666 - RNA, 20 nt, Artificial Sequence
  source: /note="Description of Artificial Sequence: Synthetic oligonucleotide"
  source: /note="RNA"
  source: /note="5' tri-ethylene glycol (TEG)"
  modified_base (1)..(1): bicyclic nucleic acid (BNA)
guaaguucuguccaagcccg

SEQ ID NO: 3667 - RNA, 19 nt, Artificial Sequence
  source: /note="Description of Artificial Sequence: Synthetic oligonucleotide"
  source: /note="RNA"
  source: /note="5' tri-ethylene glycol (TEG)"
  modified_base (1)..(1): bicyclic nucleic acid (BNA)
guaaguucuguccaagccc

SEQ ID NO: 3668 - RNA, 17 nt, Artificial Sequence
  source: /note="Description of Artificial Sequence: Synthetic oligonucleotide"
  source: /note="RNA"
  source: /note="5' tri-ethylene glycol (TEG)"
  modified_base (1)..(1): bicyclic nucleic acid (BNA)
guaaguucuguccaagc

SEQ ID NO: 3669 - RNA, 16 nt, Artificial Sequence
  source: /note="Description of Artificial Sequence: Synthetic oligonucleotide"
  source: /note="RNA"
  source: /note="5' tri-ethylene glycol (TEG)"
  modified_base (1)..(1): bicyclic nucleic acid (BNA)
guaaguucuguccaag

SEQ ID NO: 3670 - RNA, 15 nt, Artificial Sequence
  source: /note="Description of Artificial Sequence: Synthetic oligonucleotide"
  source: /note="RNA"
  source: /note="5' tri-ethylene glycol (TEG)"
  modified_base (1)..(1): bicyclic nucleic acid (BNA)
guaaguucuguccaa

SEQ ID NO: 3671 - RNA, 14 nt, Artificial Sequence
  source: /note="Description of Artificial Sequence: Synthetic oligonucleotide"
  source: /note="RNA"
  source: /note="5' tri-ethylene glycol (TEG)"
  modified_base (1)..(1): bicyclic nucleic acid (BNA)
guaaguucugucca

SEQ ID NO: 3672 - RNA, 13 nt, Artificial Sequence
  source: /note="Description of Artificial Sequence: Synthetic oligonucleotide"
  source: /note="RNA"
  source: /note="5' tri-ethylene glycol (TEG)"
  modified_base (1)..(1): bicyclic nucleic acid (BNA)
guaaguucugucc

SEQ ID NO: 3673 - RNA, 12 nt, Artificial Sequence
  source: /note="Description of Artificial Sequence: Synthetic oligonucleotide"
  source: /note="RNA"
  source: /note="5' tri-ethylene glycol (TEG)"
  modified_base (1)..(1): bicyclic nucleic acid (BNA)
guaaguucuguc

SEQ ID NO: 3674 - RNA, 11 nt, Artificial Sequence
  source: /note="Description of Artificial Sequence: Synthetic oligonucleotide"
  source: /note="RNA"
  source: /note="5' tri-ethylene glycol (TEG)"
  modified_base (1)..(1): bicyclic nucleic acid (BNA)
guaaguucugu

SEQ ID NO: 3675 - RNA, 10 nt, Artificial Sequence
  source: /note="Description of Artificial Sequence: Synthetic oligonucleotide"
  source: /note="RNA"
  source: /note="5' tri-ethylene glycol (TEG)"
  modified_base (1)..(1): bicyclic nucleic acid (BNA)
guaaguucug

SEQ ID NO: 3676 - RNA, 9 nt, Artificial Sequence
  source: /note="Description of Artificial Sequence: Synthetic oligonucleotide"
  source: /note="RNA"
  source: /note="5' tri-ethylene glycol (TEG)"
  modified_base (1)..(1): bicyclic nucleic acid (BNA)
guaaguucu

SEQ ID NO: 3677 - RNA, 8 nt, Artificial Sequence
  source: /note="Description of Artificial Sequence: Synthetic oligonucleotide"
  source: /note="RNA"
  source: /note="5' tri-ethylene glycol (TEG)"
  modified_base (1)..(1): bicyclic nucleic acid (BNA)
guaaguuc

SEQ ID NO: 3678 - RNA, 20 nt, Artificial Sequence
  source: /note="Description of Artificial Sequence: Synthetic oligonucleotide"
  source: /note="RNA"
  source: /note="5' tri-ethylene glycol (TEG)"
  modified_base (1)..(1): bicyclic nucleic acid (BNA)
gguaaguucuguccaagccc

SEQ ID NO: 3679 - RNA, 19 nt, Artificial Sequence
  source: /note="Description of Artificial Sequence: Synthetic oligonucleotide"
  source: /note="RNA"
  source: /note="5' tri-ethylene glycol (TEG)"
  modified_base (1)..(1): bicyclic nucleic acid (BNA)
gguaaguucuguccaagcc

SEQ ID NO: 3680 - RNA, 17 nt, Artificial Sequence
  source: /note="Description of Artificial Sequence: Synthetic oligonucleotide"
  source: /note="RNA"
  source: /note="5' tri-ethylene glycol (TEG)"
  modified_base (1)..(1): bicyclic nucleic acid (BNA)
gguaaguucuguccaag

SEQ ID NO: 3681 - RNA, 16 nt, Artificial Sequence
  source: /note="Description of Artificial Sequence: Synthetic oligonucleotide"
  source: /note="RNA"
  source: /note="5' tri-ethylene glycol (TEG)"
  modified_base (1)..(1): bicyclic nucleic acid (BNA)
gguaaguucuguccaa

SEQ ID NO: 3682 - RNA, 15 nt, Artificial Sequence
  source: /note="Description of Artificial Sequence: Synthetic oligonucleotide"
  source: /note="RNA"
  source: /note="5' tri-ethylene glycol (TEG)"
  modified_base (1)..(1): bicyclic nucleic acid (BNA)
gguaaguucugucca

SEQ ID NO: 3683 - RNA, 14 nt, Artificial Sequence
  source: /note="Description of Artificial Sequence: Synthetic oligonucleotide"
  source: /note="RNA"
  source: /note="5' tri-ethylene glycol (TEG)"
  modified_base (1)..(1): bicyclic nucleic acid (BNA)
gguaaguucugucc

SEQ ID NO: 3684 - RNA, 13 nt, Artificial Sequence
  source: /note="Description of Artificial Sequence: Synthetic oligonucleotide"
  source: /note="RNA"
  source: /note="5' tri-ethylene glycol (TEG)"
  modified_base (1)..(1): bicyclic nucleic acid (BNA)
gguaaguucuguc

SEQ ID NO: 3685 - RNA, 12 nt, Artificial Sequence
  source: /note="Description of Artificial Sequence: Synthetic oligonucleotide"
  source: /note="RNA"
  source: /note="5' tri-ethylene glycol (TEG)"
  modified_base (1)..(1): bicyclic nucleic acid (BNA)
gguaaguucugu

SEQ ID NO: 3686 - RNA, 11 nt, Artificial Sequence
  source: /note="Description of Artificial Sequence: Synthetic oligonucleotide"
  source: /note="RNA"
  source: /note="5' tri-ethylene glycol (TEG)"
  modified_base (1)..(1): bicyclic nucleic acid (BNA)
gguaaguucug

SEQ ID NO: 3687 - RNA, 10 nt, Artificial Sequence
  source: /note="Description of Artificial Sequence: Synthetic oligonucleotide"
  source: /note="RNA"
  source: /note="5' tri-ethylene glycol (TEG)"
  modified_base (1)..(1): bicyclic nucleic acid (BNA)
gguaaguucu

SEQ ID NO: 3688 - RNA, 9 nt, Artificial Sequence
  source: /note="Description of Artificial Sequence: Synthetic oligonucleotide"
  source: /note="RNA"
  source: /note="5' tri-ethylene glycol (TEG)"
  modified_base (1)..(1): bicyclic nucleic acid (BNA)
gguaaguuc

SEQ ID NO: 3689 - RNA, 8 nt, Artificial Sequence
  source: /note="Description of Artificial Sequence: Synthetic oligonucleotide"
  source: /note="RNA"
  source: /note="5' tri-ethylene glycol (TEG)"
  modified_base (1)..(1): bicyclic nucleic acid (BNA)
gguaaguu

SEQ ID NO: 3690 - RNA, 20 nt, Artificial Sequence
  source: /note="Description of Artificial Sequence: Synthetic oligonucleotide"
  source: /note="RNA"
  source: /note="5' tri-ethylene glycol (TEG)"
  modified_base (1)..(1): bicyclic nucleic acid (BNA)
cgguaaguucuguccaagcc

SEQ ID NO: 3691 - RNA, 19 nt, Artificial Sequence
  source: /note="Description of Artificial Sequence: Synthetic oligonucleotide"
  source: /note="RNA"
  source: /note="5' tri-ethylene glycol (TEG)"
  modified_base (1)..(1): bicyclic nucleic acid (BNA)
cgguaaguucuguccaagc

SEQ ID NO: 3692 - RNA, 18 nt, Artificial Sequence
  source: /note="Description of Artificial Sequence: Synthetic oligonucleotide"
  source: /note="RNA"
  source: /note="5' tri-ethylene glycol (TEG)"
  modified_base (1)..(1): bicyclic nucleic acid (BNA)
cgguaaguucuguccaag

SEQ ID NO: 3693 - RNA, 17 nt, Artificial Sequence
  source: /note="Description of Artificial Sequence: Synthetic oligonucleotide"
  source: /note="RNA"
  source: /note="5' tri-ethylene glycol (TEG)"
  modified_base (1)..(1): bicyclic nucleic acid (BNA)
cgguaaguucuguccaa

SEQ ID NO: 3694 - RNA, 16 nt, Artificial Sequence
  source: /note="Description of Artificial Sequence: Synthetic oligonucleotide"
  source: /note="RNA"
  source: /note="5' tri-ethylene glycol (TEG)"
  modified_base (1)..(1): bicyclic nucleic acid (BNA)
cgguaaguucugucca

SEQ ID NO: 3695 - RNA, 15 nt, Artificial Sequence
  source: /note="Description of Artificial Sequence: Synthetic oligonucleotide"
  source: /note="RNA"
  source: /note="5' tri-ethylene glycol (TEG)"
  modified_base (1)..(1): bicyclic nucleic acid (BNA)
cgguaaguucugucc

SEQ ID NO: 3696 - RNA, 14 nt, Artificial Sequence
  source: /note="Description of Artificial Sequence: Synthetic oligonucleotide"
  source: /note="RNA"
  source: /note="5' tri-ethylene glycol (TEG)"
  modified_base (1)..(1): bicyclic nucleic acid (BNA)
cgguaaguucuguc

SEQ ID NO: 3697 - RNA, 13 nt, Artificial Sequence
  source: /note="Description of Artificial Sequence: Synthetic oligonucleotide"
  source: /note="RNA"
  source: /note="5' tri-ethylene glycol (TEG)"
  modified_base (1)..(1): bicyclic nucleic acid (BNA)
cgguaaguucugu

SEQ ID NO: 3698 - RNA, 12 nt, Artificial Sequence
  source: /note="Description of Artificial Sequence: Synthetic oligonucleotide"
  source: /note="RNA"
  source: /note="5' tri-ethylene glycol (TEG)"
  modified_base (1)..(1): bicyclic nucleic acid (BNA)
cgguaaguucug

SEQ ID NO: 3699 - RNA, 11 nt, Artificial Sequence
  source: /note="Description of Artificial Sequence: Synthetic oligonucleotide"
  source: /note="RNA"
  source: /note="5' tri-ethylene glycol (TEG)"
  modified_base (1)..(1): bicyclic nucleic acid (BNA)
cgguaaguucu

SEQ ID NO: 3700 - RNA, 10 nt, Artificial Sequence
  source: /note="Description of Artificial Sequence: Synthetic oligonucleotide"
  source: /note="RNA"
  source: /note="5' tri-ethylene glycol (TEG)"
  modified_base (1)..(1): bicyclic nucleic acid (BNA)
cgguaaguuc

SEQ ID NO: 3701 - RNA, 9 nt, Artificial Sequence
  source: /note="Description of Artificial Sequence: Synthetic oligonucleotide"
  source: /note="RNA"
  source: /note="5' tri-ethylene glycol (TEG)"
  modified_base (1)..(1): bicyclic nucleic acid (BNA)
cgguaaguu

SEQ ID NO: 3702 - RNA, 8 nt, Artificial Sequence
  source: /note="Description of Artificial Sequence: Synthetic oligonucleotide"
  source: /note="RNA"
  source: /note="5' tri-ethylene glycol (TEG)"
  modified_base (1)..(1): bicyclic nucleic acid (BNA)
cgguaagu

SEQ ID NO: 3703 - DNA, 20 bp, Artificial Sequence
  source: /note="Description of Artificial Sequence: Synthetic oligonucleotide"
  source: /note="Description of Combined DNA/RNA Molecule: Synthetic oligonucleotide"
  source: /note="DNA/RNA"
  source: /note="5' tri-ethylene glycol (TEG)"
  modified_base (1)..(1): bicyclic nucleic acid (BNA)
tcgguaaguucuguccaagc

SEQ ID NO: 3704 - DNA, 19 bp, Artificial Sequence
  source: /note="Description of Artificial Sequence: Synthetic oligonucleotide"
  source: /note="Description of Combined DNA/RNA Molecule: Synthetic oligonucleotide"
  source: /note="DNA/RNA"
  source: /note="5' tri-ethylene glycol (TEG)"
  modified_base (1)..(1): bicyclic nucleic acid (BNA)
tcgguaaguucuguccaag

SEQ ID NO: 3705 - DNA, 18 bp, Artificial Sequence
  source: /note="Description of Artificial Sequence: Synthetic oligonucleotide"
  source: /note="Description of Combined DNA/RNA Molecule: Synthetic oligonucleotide"
  source: /note="DNA/RNA"
  source: /note="5' tri-ethylene glycol (TEG)"
  modified_base (1)..(1): bicyclic nucleic acid (BNA)
tcgguaaguucuguccaa

SEQ ID NO: 3706 - DNA, 17 bp, Artificial Sequence
  source: /note="Description of Artificial Sequence: Synthetic oligonucleotide"
  source: /note="Description of Combined DNA/RNA Molecule: Synthetic oligonucleotide"
  source: /note="DNA/RNA"
  source: /note="5' tri-ethylene glycol (TEG)"
  modified_base (1)..(1): bicyclic nucleic acid (BNA)
tcgguaaguucugucca

SEQ ID NO: 3707 - DNA, 16 bp, Artificial Sequence
  source: /note="Description of Artificial Sequence: Synthetic oligonucleotide"
  source: /note="Description of Combined DNA/RNA Molecule: Synthetic oligonucleotide"
  source: /note="DNA/RNA"
  source: /note="5' tri-ethylene glycol (TEG)"
  modified_base (1)..(1): bicyclic nucleic acid (BNA)
tcgguaaguucugucc

SEQ ID NO: 3708 - DNA, 15 bp, Artificial Sequence
  source: /note="Description of Artificial Sequence: Synthetic oligonucleotide"
  source: /note="Description of Combined DNA/RNA Molecule: Synthetic oligonucleotide"
  source: /note="DNA/RNA"
  source: /note="5' tri-ethylene glycol (TEG)"
  modified_base (1)..(1): bicyclic nucleic acid (BNA)
tcgguaaguucuguc

SEQ ID NO: 3709 - DNA, 14 bp, Artificial Sequence
  source: /note="Description of Artificial Sequence: Synthetic oligonucleotide"
  source: /note="Description of Combined DNA/RNA Molecule: Synthetic oligonucleotide"
  source: /note="DNA/RNA"
  source: /note="5' tri-ethylene glycol (TEG)"
  modified_base (1)..(1): bicyclic nucleic acid (BNA)
tcgguaaguucugu

SEQ ID NO: 3710 - DNA, 13 bp, Artificial Sequence
  source: /note="Description of Artificial Sequence: Synthetic oligonucleotide"
  source: /note="Description of Combined DNA/RNA Molecule: Synthetic oligonucleotide"
  source: /note="DNA/RNA"
  source: /note="5' tri-ethylene glycol (TEG)"
  modified_base (1)..(1): bicyclic nucleic acid (BNA)
tcgguaaguucug

SEQ ID NO: 3711 - DNA, 12 bp, Artificial Sequence
  source: /note="Description of Artificial Sequence: Synthetic oligonucleotide"
  source: /note="Description of Combined DNA/RNA Molecule: Synthetic oligonucleotide"
  source: /note="DNA/RNA"
  source: /note="5' tri-ethylene glycol (TEG)"
  modified_base (1)..(1): bicyclic nucleic acid (BNA)
tcgguaaguucu

SEQ ID NO: 3712 - DNA, 11 bp, Artificial Sequence
  source: /note="Description of Artificial Sequence: Synthetic oligonucleotide"
  source: /note="Description of Combined DNA/RNA Molecule: Synthetic oligonucleotide"
  source: /note="DNA/RNA"
  source: /note="5' tri-ethylene glycol (TEG)"
  modified_base (1)..(1): bicyclic nucleic acid (BNA)
tcgguaaguuc

SEQ ID NO: 3713 - DNA, 10 bp, Artificial Sequence
  source: /note="Description of Artificial Sequence: Synthetic oligonucleotide"
  source: /note="Description of Combined DNA/RNA Molecule: Synthetic oligonucleotide"
  source: /note="DNA/RNA"
  source: /note="5' tri-ethylene glycol (TEG)"
  modified_base (1)..(1): bicyclic nucleic acid (BNA)
tcgguaaguu

SEQ ID NO: 3714 - DNA, 9 bp, Artificial Sequence
  source: /note="Description of Artificial Sequence: Synthetic oligonucleotide"
  source: /note="Description of Combined DNA/RNA Molecule: Synthetic oligonucleotide"
  source: /note="DNA/RNA"
  source: /note="5' tri-ethylene glycol (TEG)"
  modified_base (1)..(1): bicyclic nucleic acid (BNA)
tcgguaagu

SEQ ID NO: 3715 - RNA, 20 nt, Artificial Sequence
  source: /note="Description of Artificial Sequence: Synthetic oligonucleotide"
  source: /note="RNA"
  source: /note="5' tri-ethylene glycol (TEG)"
  modified_base (1)..(1): bicyclic nucleic acid (BNA)
gucgguaaguucuguccaag

SEQ ID NO: 3716 - RNA, 19 nt, Artificial Sequence
  source: /note="Description of Artificial Sequence: Synthetic oligonucleotide"
  source: /note="RNA"
  source: /note="5' tri-ethylene glycol (TEG)"
  modified_base (1)..(1): bicyclic nucleic acid (BNA)
gucgguaaguucuguccaa

SEQ ID NO: 3717 - RNA, 18 nt, Artificial Sequence
  source: /note="Description of Artificial Sequence: Synthetic oligonucleotide"
  source: /note="RNA"
  source: /note="5' tri-ethylene glycol (TEG)"
  modified_base (1)..(1): bicyclic nucleic acid (BNA)
gucgguaaguucugucca

SEQ ID NO: 3718 - RNA, 17 nt, Artificial Sequence
  source: /note="Description of Artificial Sequence: Synthetic oligonucleotide"
  source: /note="RNA"
  source: /note="5' tri-ethylene glycol (TEG)"
  modified_base (1)..(1): bicyclic nucleic acid (BNA)
gucgguaaguucugucc

SEQ ID NO: 3719 - RNA, 16 nt, Artificial Sequence
  source: /note="Description of Artificial Sequence: Synthetic oligonucleotide"
  source: /note="RNA"
  source: /note="5' tri-ethylene glycol (TEG)"
  modified_base (1)..(1): bicyclic nucleic acid (BNA)
gucgguaaguucuguc

SEQ ID NO: 3720 - RNA, 15 nt, Artificial Sequence
  source: /note="Description of Artificial Sequence: Synthetic oligonucleotide"
  source: /note="RNA"
  source: /note="5' tri-ethylene glycol (TEG)"
  modified_base (1)..(1): bicyclic nucleic acid (BNA)
gucgguaaguucugu

SEQ ID NO: 3721 - RNA, 14 nt, Artificial Sequence
  source: /note="Description of Artificial Sequence: Synthetic oligonucleotide"
  source: /note="RNA"
  source: /note="5' tri-ethylene glycol (TEG)"
  modified_base (1)..(1): bicyclic nucleic acid (BNA)
gucgguaaguucug

SEQ ID NO: 3722 - RNA, 13 nt, Artificial Sequence
  source: /note="Description of Artificial Sequence: Synthetic oligonucleotide"
  source: /note="RNA"
  source: /note="5' tri-ethylene glycol (TEG)"
  modified_base (1)..(1): bicyclic nucleic acid (BNA)
gucgguaaguucu

SEQ ID NO: 3723 - RNA, 12 nt, Artificial Sequence
  source: /note="Description of Artificial Sequence: Synthetic oligonucleotide"
  source: /note="RNA"
  source: /note="5' tri-ethylene glycol (TEG)"
  modified_base (1)..(1): bicyclic nucleic acid (BNA)
gucgguaaguuc

SEQ ID NO: 3724 - RNA, 11 nt, Artificial Sequence
  source: /note="Description of Artificial Sequence: Synthetic oligonucleotide"
  source: /note="RNA"
  source: /note="5' tri-ethylene glycol (TEG)"
  modified_base (1)..(1): bicyclic nucleic acid (BNA)
gucgguaaguu

SEQ ID NO: 3725 - RNA, 10 nt, Artificial Sequence
  source: /note="Description of Artificial Sequence: Synthetic oligonucleotide"
  source: /note="RNA"
  source: /note="5' tri-ethylene glycol (TEG)"
  modified_base (1)..(1): bicyclic nucleic acid (BNA)
gucgguaagu

SEQ ID NO: 3726 - RNA, 20 nt, Artificial Sequence
  source: /note="Description of Artificial Sequence: Synthetic oligonucleotide"
  source: /note="RNA"
  source: /note="5' tri-ethylene glycol (TEG)"
  modified_base (1)..(1): bicyclic nucleic acid (BNA)
agucgguaaguucuguccaa

SEQ ID NO: 3727 - RNA, 19 nt, Artificial Sequence
  source: /note="Description of Artificial Sequence: Synthetic oligonucleotide"
  source: /note="RNA"
  source: /note="5' tri-ethylene glycol (TEG)"
  modified_base (1)..(1): bicyclic nucleic acid (BNA)
agucgguaaguucugucca

SEQ ID NO: 3728 - RNA, 17 nt, Artificial Sequence
  source: /note="Description of Artificial Sequence: Synthetic oligonucleotide"
  source: /note="RNA"
  source: /note="5' tri-ethylene glycol (TEG)"
  modified_base (1)..(1): bicyclic nucleic acid (BNA)
agucgguaaguucuguc

SEQ ID NO: 3729 - RNA, 16 nt, Artificial Sequence
  source: /note="Description of Artificial Sequence: Synthetic oligonucleotide"
  source: /note="RNA"
  source: /note="5' tri-ethylene glycol (TEG)"
  modified_base (1)..(1): bicyclic nucleic acid (BNA)
agucgguaaguucugu

SEQ ID NO: 3730 - RNA, 15 nt, Artificial Sequence
  source: /note="Description of Artificial Sequence: Synthetic oligonucleotide"
  source: /note="RNA"
  source: /note="5' tri-ethylene glycol (TEG)"
  modified_base (1)..(1): bicyclic nucleic acid (BNA)
agucgguaaguucug

SEQ ID NO: 3731 - RNA, 14 nt, Artificial Sequence
  source: /note="Description of Artificial Sequence: Synthetic oligonucleotide"
  source: /note="RNA"
  source: /note="5' tri-ethylene glycol (TEG)"
  modified_base (1)..(1): bicyclic nucleic acid (BNA)
agucgguaaguucu

SEQ ID NO: 3732 - RNA, 13 nt, Artificial Sequence
  source: /note="Description of Artificial Sequence: Synthetic oligonucleotide"
  source: /note="RNA"
  source: /note="5' tri-ethylene glycol (TEG)"
  modified_base (1)..(1): bicyclic nucleic acid (BNA)
agucgguaaguuc

SEQ ID NO: 3733 - RNA, 12 nt, Artificial Sequence
  source: /note="Description of Artificial Sequence: Synthetic oligonucleotide"
  source: /note="RNA"
  source: /note="5' tri-ethylene glycol (TEG)"
  modified_base (1)..(1): bicyclic nucleic acid (BNA)
agucgguaaguu

SEQ ID NO: 3734 - RNA, 11 nt, Artificial Sequence
  source: /note="Description of Artificial Sequence: Synthetic oligonucleotide"
  source: /note="RNA"
  source: /note="5' tri-ethylene glycol (TEG)"
  modified_base (1)..(1): bicyclic nucleic acid (BNA)
agucgguaagu

SEQ ID NO: 3735 - RNA, 20 nt, Artificial Sequence
  source: /note="Description of Artificial Sequence: Synthetic oligonucleotide"
  source: /note="RNA"
  source: /note="5' tri-ethylene glycol (TEG)"
  modified_base (1)..(1): bicyclic nucleic acid (BNA)
cagucgguaaguucugucca

SEQ ID NO: 3736 - RNA, 19 nt, Artificial Sequence
  source: /note="Description of Artificial Sequence: Synthetic oligonucleotide"
  source: /note="RNA"
  source: /note="5' tri-ethylene glycol (TEG)"
  modified_base (1)..(1): bicyclic nucleic acid (BNA)
cagucgguaaguucugucc

SEQ ID NO: 3737 - RNA, 18 nt, Artificial Sequence
  source: /note="Description of Artificial Sequence: Synthetic oligonucleotide"
  source: /note="RNA"
  source: /note="5' tri-ethylene glycol (TEG)"
  modified_base (1)..(1): bicyclic nucleic acid (BNA)
cagucgguaaguucuguc

SEQ ID NO: 3738 - RNA, 17 nt, Artificial Sequence
  source: /note="Description of Artificial Sequence: Synthetic oligonucleotide"
  source: /note="RNA"
  source: /note="5' tri-ethylene glycol (TEG)"
  modified_base (1)..(1): bicyclic nucleic acid (BNA)
cagucgguaaguucugu

SEQ ID NO: 3739 - RNA, 16 nt, Artificial Sequence
  source: /note="Description of Artificial Sequence: Synthetic oligonucleotide"
  source: /note="RNA"
  source: /note="5' tri-ethylene glycol (TEG)"
  modified_base (1)..(1): bicyclic nucleic acid (BNA)
cagucgguaaguucug

SEQ ID NO: 3740 - RNA, 15 nt, Artificial Sequence
  source: /note="Description of Artificial Sequence: Synthetic oligonucleotide"
  source: /note="RNA"
  source: /note="5' tri-ethylene glycol (TEG)"
  modified_base (1)..(1): bicyclic nucleic acid (BNA)
cagucgguaaguucu

SEQ ID NO: 3741 - RNA, 14 nt, Artificial Sequence
  source: /note="Description of Artificial Sequence: Synthetic oligonucleotide"
  source: /note="RNA"
  source: /note="5' tri-ethylene glycol (TEG)"
  modified_base (1)..(1): bicyclic nucleic acid (BNA)
cagucgguaaguuc

SEQ ID NO: 3742 - RNA, 13 nt, Artificial Sequence
  source: /note="Description of Artificial Sequence: Synthetic oligonucleotide"
  source: /note="RNA"
  source: /note="5' tri-ethylene glycol (TEG)"
  modified_base (1)..(1): bicyclic nucleic acid (BNA)
cagucgguaaguu

SEQ ID NO: 3743 - RNA, 12 nt, Artificial Sequence
  source: /note="Description of Artificial Sequence: Synthetic oligonucleotide"
  source: /note="RNA"
  source: /note="5' tri-ethylene glycol (TEG)"
  modified_base (1)..(1): bicyclic nucleic acid (BNA)
cagucgguaagu

SEQ ID NO: 3744 - RNA, 20 nt, Artificial Sequence
  source: /note="Description of Artificial Sequence: Synthetic oligonucleotide"
  source: /note="RNA"
  source: /note="5' tri-ethylene glycol (TEG)"
  modified_base (1)..(1): bicyclic nucleic acid (BNA)
ccagucgguaaguucugucc

SEQ ID NO: 3745 - RNA, 19 nt, Artificial Sequence
  source: /note="Description of Artificial Sequence: Synthetic oligonucleotide"
  source: /note="RNA"
  source: /note="5' tri-ethylene glycol (TEG)"
  modified_base (1)..(1): bicyclic nucleic acid (BNA)
ccagucgguaaguucuguc

SEQ ID NO: 3746 - RNA, 18 nt, Artificial Sequence
  source: /note="Description of Artificial Sequence: Synthetic oligonucleotide"
  source: /note="RNA"
  source: /note="5' tri-ethylene glycol (TEG)"
  modified_base (1)..(1): bicyclic nucleic acid (BNA)
ccagucgguaaguucugu

SEQ ID NO: 3747 - RNA, 17 nt, Artificial Sequence
  source: /note="Description of Artificial Sequence: Synthetic oligonucleotide"
  source: /note="RNA"
  source: /note="5' tri-ethylene glycol (TEG)"
  modified_base (1)..(1): bicyclic nucleic acid (BNA)
ccagucgguaaguucug

SEQ ID NO: 3748 - RNA, 16 nt, Artificial Sequence
  source: /note="Description of Artificial Sequence: Synthetic oligonucleotide"
  source: /note="RNA"
  source: /note="5' tri-ethylene glycol (TEG)"
  modified_base (1)..(1): bicyclic nucleic acid (BNA)
ccagucgguaaguucu

SEQ ID NO: 3749 - RNA, 15 nt, Artificial Sequence
  source: /note="Description of Artificial Sequence: Synthetic oligonucleotide"
  source: /note="RNA"
  source: /note="5' tri-ethylene glycol (TEG)"
  modified_base (1)..(1): bicyclic nucleic acid (BNA)
ccagucgguaaguuc

SEQ ID NO: 3750 - RNA, 14 nt, Artificial Sequence
  source: /note="Description of Artificial Sequence: Synthetic oligonucleotide"
  source: /note="RNA"
  source: /note="5' tri-ethylene glycol (TEG)"
  modified_base (1)..(1): bicyclic nucleic acid (BNA)
ccagucgguaaguu

SEQ ID NO: 3751 - RNA, 13 nt, Artificial Sequence
  source: /note="Description of Artificial Sequence: Synthetic oligonucleotide"
  source: /note="RNA"
  source: /note="5' tri-ethylene glycol (TEG)"
  modified_base (1)..(1): bicyclic nucleic acid (BNA)
ccagucgguaagu

SEQ ID NO: 3752 - RNA, 20 nt, Artificial Sequence
  source: /note="Description of Artificial Sequence: Synthetic oligonucleotide"
  source: /note="RNA"
  source: /note="5' tri-ethylene glycol (TEG)"
  modified_base (1)..(1): bicyclic nucleic acid (BNA)
gccagucgguaaguucuguc

SEQ ID NO: 3753 - RNA, 19 nt, Artificial Sequence
  source: /note="Description of Artificial Sequence: Synthetic oligonucleotide"
  source: /note="RNA"
  source: /note="5' tri-ethylene glycol (TEG)"
  modified_base (1)..(1): bicyclic nucleic acid (BNA)
gccagucgguaaguucugu

SEQ ID NO: 3754 - RNA, 18 nt, Artificial Sequence
  source: /note="Description of Artificial Sequence: Synthetic oligonucleotide"
  source: /note="RNA"
  source: /note="5' tri-ethylene glycol (TEG)"
  modified_base (1)..(1): bicyclic nucleic acid (BNA)
gccagucgguaaguucug

SEQ ID NO: 3755 - RNA, 17 nt, Artificial Sequence
  source: /note="Description of Artificial Sequence: Synthetic oligonucleotide"
  source: /note="RNA"
  source: /note="5' tri-ethylene glycol (TEG)"
  modified_base (1)..(1): bicyclic nucleic acid (BNA)
gccagucgguaaguucu

SEQ ID NO: 3756 - RNA, 16 nt, Artificial Sequence
  source: /note="Description of Artificial Sequence: Synthetic oligonucleotide"
  source: /note="RNA"
  source: /note="5' tri-ethylene glycol (TEG)"
  modified_base (1)..(1): bicyclic nucleic acid (BNA)
gccagucgguaaguuc

SEQ ID NO: 3757 - RNA, 15 nt, Artificial Sequence
  source: /note="Description of Artificial Sequence: Synthetic oligonucleotide"
  source: /note="RNA"
  source: /note="5' tri-ethylene glycol (TEG)"
  modified_base (1)..(1): bicyclic nucleic acid (BNA)
gccagucgguaaguu

SEQ ID NO: 3758 - RNA, 14 nt, Artificial Sequence
  source: /note="Description of Artificial Sequence: Synthetic oligonucleotide"
  source: /note="RNA"
  source: /note="5' tri-ethylene glycol (TEG)"
  modified_base (1)..(1): bicyclic nucleic acid (BNA)
gccagucgguaagu

SEQ ID NO: 3759 - DNA, 20 bp, Artificial Sequence
  source: /note="Description of Artificial Sequence: Synthetic oligonucleotide"
  source: /note="Description of Combined DNA/RNA Molecule: Synthetic oligonucleotide"
  source: /note="DNA/RNA"
  source: /note="5' tri-ethylene glycol (TEG)"
  modified_base (1)..(1): bicyclic nucleic acid (BNA)
tcaaggaagauggcauuucu

SEQ ID NO: 3760 - DNA, 22 bp, Artificial Sequence
  source: /note="Description of Artificial Sequence: Synthetic oligonucleotide"
  source: /note="Description of Combined DNA/RNA Molecule: Synthetic oligonucleotide"
  source: /note="DNA/RNA"
  source: /note="5' tri-ethylene glycol (TEG)"
  modified_base (1)..(1): bicyclic nucleic acid (BNA)
tcaaggaagauggcauuucuag

SEQ ID NO: 3761 - DNA, 16 bp, Artificial Sequence
  source: /note="Description of Artificial Sequence: Synthetic oligonucleotide"
  source: /note="Description of Combined DNA/RNA Molecule: Synthetic oligonucleotide"
  source: /note="DNA/RNA"
  source: /note="5' tri-ethylene glycol (TEG)"
  modified_base (1)..(1): bicyclic nucleic acid (BNA)
tcaaggaagauggcau

SEQ ID NO: 3762 - RNA, 15 nt, Artificial Sequence
  source: /note="Description of Artificial Sequence: Synthetic oligonucleotide"
  source: /note="RNA"
  source: /note="5' tri-ethylene glycol (TEG)"
  modified_base (1)..(1): bicyclic nucleic acid (BNA)
gaagauggcauuucu

SEQ ID NO: 3763 - DNA, 21 bp, Artificial Sequence
  source: /note="Description of Artificial Sequence: Synthetic oligonucleotide"
  source: /note="Description of Combined DNA/RNA Molecule: Synthetic oligonucleotide"
  source: /note="DNA/RNA"
  source: /note="5' tri-ethylene glycol (TEG)"
  modified_base (1)..(1): bicyclic nucleic acid (BNA)
tcaaggaagauggcauuucua

SEQ ID NO: 3764 - DNA, 19 bp, Artificial Sequence
  source: /note="Description of Artificial Sequence: Synthetic oligonucleotide"
  source: /note="Description of Combined DNA/RNA Molecule: Synthetic oligonucleotide"
  source: /note="DNA/RNA"
  source: /note="5' tri-ethylene glycol (TEG)"
  modified_base (1)..(1): bicyclic nucleic acid (BNA)
tcaaggaagauggcauuuc

SEQ ID NO: 3765 - DNA, 18 bp, Artificial Sequence
  source: /note="Description of Artificial Sequence: Synthetic oligonucleotide"
  source: /note="Description of Combined DNA/RNA Molecule: Synthetic oligonucleotide"
  source: /note="DNA/RNA"
  source: /note="5' tri-ethylene glycol (TEG)"
  modified_base (1)..(1): bicyclic nucleic acid (BNA)
tcaaggaagauggcauuu

SEQ ID NO: 3766 - DNA, 17 bp, Artificial Sequence
  source: /note="Description of Artificial Sequence: Synthetic oligonucleotide"
  source: /note="Description of Combined DNA/RNA Molecule: Synthetic oligonucleotide"
  source: /note="DNA/RNA"
  source: /note="5' tri-ethylene glycol (TEG)"
  modified_base (1)..(1): bicyclic nucleic acid (BNA)
tcaaggaagauggcauu

SEQ ID NO: 3767 - DNA, 15 bp, Artificial Sequence
  source: /note="Description of Artificial Sequence: Synthetic oligonucleotide"
  source: /note="Description of Combined DNA/RNA Molecule: Synthetic oligonucleotide"
  source: /note="DNA/RNA"
  source: /note="5' tri-ethylene glycol (TEG)"
  modified_base (1)..(1): bicyclic nucleic acid (BNA)
tcaaggaagauggca

SEQ ID NO: 3768 - DNA, 14 bp, Artificial Sequence
  source: /note="Description of Artificial Sequence: Synthetic oligonucleotide"
  source: /note="Description of Combined DNA/RNA Molecule: Synthetic oligonucleotide"
  source: /note="DNA/RNA"
  source: /note="5' tri-ethylene glycol (TEG)"
  modified_base (1)..(1): bicyclic nucleic acid (BNA)
tcaaggaagauggc

SEQ ID NO: 3769 - DNA, 13 bp, Artificial Sequence
  source: /note="Description of Artificial Sequence: Synthetic oligonucleotide"
  source: /note="Description of Combined DNA/RNA Molecule: Synthetic oligonucleotide"
  source: /note="DNA/RNA"
  source: /note="5' tri-ethylene glycol (TEG)"
  modified_base (1)..(1): bicyclic nucleic acid (BNA)
tcaaggaagaugg

SEQ ID NO: 3770 - DNA, 12 bp, Artificial Sequence
  source: /note="Description of Artificial Sequence: Synthetic oligonucleotide"
  source: /note="Description of Combined DNA/RNA Molecule: Synthetic oligonucleotide"
  source: /note="DNA/RNA"
  source: /note="5' tri-ethylene glycol (TEG)"
  modified_base (1)..(1): bicyclic nucleic acid (BNA)
tcaaggaagaug

SEQ ID NO: 3771 - DNA, 11 bp, Artificial Sequence
  source: /note="Description of Artificial Sequence: Synthetic oligonucleotide"
  source: /note="Description of Combined DNA/RNA Molecule: Synthetic oligonucleotide"
  source: /note="DNA/RNA"
  source: /note="5' tri-ethylene glycol (TEG)"
  modified_base (1)..(1): bicyclic nucleic acid (BNA)
tcaaggaagau

SEQ ID NO: 3772 - DNA, 10 bp, Artificial Sequence
  source: /note="Description of Artificial Sequence: Synthetic oligonucleotide"
  source: /note="DNA/RNA"
  source: /note="5' tri-ethylene glycol (TEG)"
  modified_base (1)..(1): bicyclic nucleic acid (BNA)
tcaaggaaga

SEQ ID NO: 3773 - DNA, 9 bp, Artificial Sequence
  source: /note="Description of Artificial Sequence: Synthetic oligonucleotide"
  source: /note="DNA/RNA"
  source: /note="5' tri-ethylene glycol (TEG)"
  modified_base (1)..(1): bicyclic nucleic acid (BNA)
tcaaggaag

SEQ ID NO: 3774 - RNA, 21 nt, Artificial Sequence
  source: /note="Description of Artificial Sequence: Synthetic oligonucleotide"
  source: /note="RNA"
  source: /note="5' tri-ethylene glycol (TEG)"
  modified_base (1)..(1): bicyclic nucleic acid (BNA)
caaggaagauggcauuucuag

SEQ ID NO: 3775 - RNA, 20 nt, Artificial Sequence
  source: /note="Description of Artificial Sequence: Synthetic oligonucleotide"
  source: /note="RNA"
  source: /note="5' tri-ethylene glycol (TEG)"
  modified_base (1)..(1): bicyclic nucleic acid (BNA)
caaggaagauggcauuucua

SEQ ID NO: 3776 - RNA, 19 nt, Artificial Sequence
  source: /note="Description of Artificial Sequence: Synthetic oligonucleotide"
  source: /note="RNA"
  source: /note="5' tri-ethylene glycol (TEG)"
  modified_base (1)..(1): bicyclic nucleic acid (BNA)
caaggaagauggcauuucu

SEQ ID NO: 3777 - RNA, 18 nt, Artificial Sequence
  source: /note="Description of Artificial Sequence: Synthetic oligonucleotide"
  source: /note="RNA"
  source: /note="5' tri-ethylene glycol (TEG)"
  modified_base (1)..(1): bicyclic nucleic acid (BNA)
caaggaagauggcauuuc

SEQ ID NO: 3778 - RNA, 17 nt, Artificial Sequence
  source: /note="Description of Artificial Sequence: Synthetic oligonucleotide"
  source: /note="RNA"
  source: /note="5' tri-ethylene glycol (TEG)"
  modified_base (1)..(1): bicyclic nucleic acid (BNA)
caaggaagauggcauuu

SEQ ID NO: 3779 - RNA, 16 nt, Artificial Sequence
  source: /note="Description of Artificial Sequence: Synthetic oligonucleotide"
  source: /note="RNA"
  source: /note="5' tri-ethylene glycol (TEG)"
  modified_base (1)..(1): bicyclic nucleic acid (BNA)
caaggaagauggcauu

SEQ ID NO: 3780 - RNA, 15 nt, Artificial Sequence
  source: /note="Description of Artificial Sequence: Synthetic oligonucleotide"
  source: /note="RNA"
  source: /note="5' tri-ethylene glycol (TEG)"
  modified_base (1)..(1): bicyclic nucleic acid (BNA)
caaggaagauggcau

SEQ ID NO: 3781 - RNA, 14 nt, Artificial Sequence
  source: /note="Description of Artificial Sequence: Synthetic oligonucleotide"
  source: /note="RNA"
  source: /note="5' tri-ethylene glycol (TEG)"
  modified_base (1)..(1): bicyclic nucleic acid (BNA)
caaggaagauggca

SEQ ID NO: 3782 - RNA, 13 nt, Artificial Sequence
  source: /note="Description of Artificial Sequence: Synthetic oligonucleotide"
  source: /note="RNA"
  source: /note="5' tri-ethylene glycol (TEG)"
  modified_base (1)..(1): bicyclic nucleic acid (BNA)
caaggaagauggc

SEQ ID NO: 3783 - RNA, 12 nt, Artificial Sequence
  source: /note="Description of Artificial Sequence: Synthetic oligonucleotide"
  source: /note="RNA"
  source: /note="5' tri-ethylene glycol (TEG)"
  modified_base (1)..(1): bicyclic nucleic acid (BNA)
caaggaagaugg

SEQ ID NO: 3784 - RNA, 11 nt, Artificial Sequence
  source: /note="Description of Artificial Sequence: Synthetic oligonucleotide"
  source: /note="RNA"
  source: /note="5' tri-ethylene glycol (TEG)"
  modified_base (1)..(1): bicyclic nucleic acid (BNA)
caaggaagaug

SEQ ID NO: 3785 - RNA, 10 nt, Artificial Sequence
  source: /note="Description of Artificial Sequence: Synthetic oligonucleotide"
  source: /note="RNA"
  source: /note="5' tri-ethylene glycol (TEG)"
  modified_base (1)..(1): bicyclic nucleic acid (BNA)
caaggaagau

SEQ ID NO: 3786 - RNA, 9 nt, Artificial Sequence
  source: /note="Description of Artificial Sequence: Synthetic oligonucleotide"
  source: /note="RNA/Antisense Oligonucleotide"
  source: /note="5' tri-ethylene glycol (TEG)"
  modified_base (1)..(1): bicyclic nucleic acid (BNA)
caaggaaga

SEQ ID NO: 3787 - RNA, 8 nt, Artificial Sequence
  source: /note="Description of Artificial Sequence: Synthetic oligonucleotide"
  source: /note="RNA/Antisense Oligonucleotide"
  source: /note="5' tri-ethylene glycol (TEG)"
  modified_base (1)..(1): bicyclic nucleic acid (BNA)
caaggaag

SEQ ID NO: 3788 - RNA, 20 nt, Artificial Sequence
  source: /note="Description of Artificial Sequence: Synthetic oligonucleotide"
  source: /note="RNA"
  source: /note="5' tri-ethylene glycol (TEG)"
  modified_base (1)..(1): bicyclic nucleic acid (BNA)
aaggaagauggcauuucuag

SEQ ID NO: 3789 - RNA, 19 nt, Artificial Sequence
  source: /note="Description of Artificial Sequence: Synthetic oligonucleotide"
  source: /note="RNA"
  source: /note="5' tri-ethylene glycol (TEG)"
  modified_base (1)..(1): bicyclic nucleic acid (BNA)
aaggaagauggcauuucua

SEQ ID NO: 3790 - RNA, 18 nt, Artificial Sequence
  source: /note="Description of Artificial Sequence: Synthetic oligonucleotide"
  source: /note="RNA"
  source: /note="5' tri-ethylene glycol (TEG)"
  modified_base (1)..(1): bicyclic nucleic acid (BNA)
aaggaagauggcauuucu

SEQ ID NO: 3791 - RNA, 17 nt, Artificial Sequence
  source: /note="Description of Artificial Sequence: Synthetic oligonucleotide"
  source: /note="RNA"
  source: /note="5' tri-ethylene glycol (TEG)"
  modified_base (1)..(1): bicyclic nucleic acid (BNA)
aaggaagauggcauuuc

SEQ ID NO: 3792 - RNA, 16 nt, Artificial Sequence
  source: /note="Description of Artificial Sequence: Synthetic oligonucleotide"
  source: /note="RNA"
  source: /note="5' tri-ethylene glycol (TEG)"
  modified_base (1)..(1): bicyclic nucleic acid (BNA)
aaggaagauggcauuu

SEQ ID NO: 3793 - RNA, 15 nt, Artificial Sequence
  source: /note="Description of Artificial Sequence: Synthetic oligonucleotide"
  source: /note="RNA"
  source: /note="5' tri-ethylene glycol (TEG)"
  modified_base (1)..(1): bicyclic nucleic acid (BNA)
aaggaagauggcauu

SEQ ID NO: 3794 - RNA, 14 nt, Artificial Sequence
  source: /note="Description of Artificial Sequence: Synthetic oligonucleotide"
  source: /note="RNA"
  source: /note="5' tri-ethylene glycol (TEG)"
  modified_base (1)..(1): bicyclic nucleic acid (BNA)
aaggaagauggcau

SEQ ID NO: 3795 - RNA, 13 nt, Artificial Sequence
  source: /note="Description of Artificial Sequence: Synthetic oligonucleotide"
  source: /note="RNA"
  source: /note="5' tri-ethylene glycol (TEG)"
  modified_base (1)..(1): bicyclic nucleic acid (BNA)
aaggaagauggca

SEQ ID NO: 3796 - RNA, 12 nt, Artificial Sequence
  source: /note="Description of Artificial Sequence: Synthetic oligonucleotide"
  source: /note="RNA"
  source: /note="5' tri-ethylene glycol (TEG)"
  modified_base (1)..(1): bicyclic nucleic acid (BNA)
aaggaagauggc

SEQ ID NO: 3797 - RNA, 11 nt, Artificial Sequence
  source: /note="Description of Artificial Sequence: Synthetic oligonucleotide"
  source: /note="RNA"
  source: /note="5' tri-ethylene glycol (TEG)"
  modified_base (1)..(1): bicyclic nucleic acid (BNA)
aaggaagaugg

SEQ ID NO: 3798 - RNA, 10 nt, Artificial Sequence
  source: /note="Description of Artificial Sequence: Synthetic oligonucleotide"
  source: /note="RNA"
  source: /note="5' tri-ethylene glycol (TEG)"
  modified_base (1)..(1): bicyclic nucleic acid (BNA)
aaggaagaug

SEQ ID NO: 3799 - RNA, 9 nt, Artificial Sequence
  source: /note="Description of Artificial Sequence: Synthetic oligonucleotide"
  source: /note="RNA"
  source: /note="5' tri-ethylene glycol (TEG)"
  modified_base (1)..(1): bicyclic nucleic acid (BNA)
aaggaagau

SEQ ID NO: 3800 - RNA, 8 nt, Artificial Sequence
  source: /note="Description of Artificial Sequence: Synthetic oligonucleotide"
  source: /note="RNA/Antisense Oligonucleotide"
  source: /note="5' tri-ethylene glycol (TEG)"
  modified_base (1)..(1): bicyclic nucleic acid (BNA)
aaggaaga

SEQ ID NO: 3801 - RNA, 19 nt, Artificial Sequence
  source: /note="Description of Artificial Sequence: Synthetic oligonucleotide"
  source: /note="RNA"
  source: /note="5' tri-ethylene glycol (TEG)"
  modified_base (1)..(1): bicyclic nucleic acid (BNA)
aggaagauggcauuucuag

SEQ ID NO: 3802 - RNA, 18 nt, Artificial Sequence
  source: /note="Description of Artificial Sequence: Synthetic oligonucleotide"
  source: /note="RNA"
  source: /note="5' tri-ethylene glycol (TEG)"
  modified_base (1)..(1): bicyclic nucleic acid (BNA)
aggaagauggcauuucua

SEQ ID NO: 3803 - RNA, 17 nt, Artificial Sequence
  source: /note="Description of Artificial Sequence: Synthetic oligonucleotide"
  source: /note="RNA"
  source: /note="5' tri-ethylene glycol (TEG)"
  modified_base (1)..(1): bicyclic nucleic acid (BNA)
aggaagauggcauuucu

SEQ ID NO: 3804 - RNA, 16 nt, Artificial Sequence
  source: /note="Description of Artificial Sequence: Synthetic oligonucleotide"
  source: /note="RNA"
  source: /note="5' tri-ethylene glycol (TEG)"
  modified_base (1)..(1): bicyclic nucleic acid (BNA)
aggaagauggcauuuc

SEQ ID NO: 3805 - RNA, 15 nt, Artificial Sequence
  source: /note="Description of Artificial Sequence: Synthetic oligonucleotide"
  source: /note="RNA"
  source: /note="5' tri-ethylene glycol (TEG)"
  modified_base (1)..(1): bicyclic nucleic acid (BNA)
aggaagauggcauuu

SEQ ID NO: 3806 - RNA, 14 nt, Artificial Sequence
  source: /note="Description of Artificial Sequence: Synthetic oligonucleotide"
  source: /note="RNA"
  source: /note="5' tri-ethylene glycol (TEG)"
  modified_base (1)..(1): bicyclic nucleic acid (BNA)
aggaagauggcauu

SEQ ID NO: 3807 - RNA, 13 nt, Artificial Sequence
  source: /note="Description of Artificial Sequence: Synthetic oligonucleotide"
  source: /note="RNA"
  source: /note="5' tri-ethylene glycol (TEG)"
  modified_base (1)..(1): bicyclic nucleic acid (BNA)
aggaagauggcau

SEQ ID NO: 3808 - RNA, 12 nt, Artificial Sequence
  source: /note="Description of Artificial Sequence: Synthetic oligonucleotide"
  source: /note="RNA"
  source: /note="5' tri-ethylene glycol (TEG)"
  modified_base (1)..(1): bicyclic nucleic acid (BNA)
aggaagauggca

SEQ ID NO: 3809 - RNA, 10 nt, Artificial Sequence
  source: /note="Description of Artificial Sequence: Synthetic oligonucleotide"
  source: /note="RNA"
  source: /note="5' tri-ethylene glycol (TEG)"
  modified_base (1)..(1): bicyclic nucleic acid (BNA)
aggaagaugg

SEQ ID NO: 3810 - RNA, 9 nt, Artificial Sequence
  source: /note="Description of Artificial Sequence: Synthetic oligonucleotide"
  source: /note="RNA"
  source: /note="5' tri-ethylene glycol (TEG)"
  modified_base (1)..(1): bicyclic nucleic acid (BNA)
aggaagaug

SEQ ID NO: 3811 - RNA, 8 nt, Artificial Sequence
  source: /note="Description of Artificial Sequence: Synthetic oligonucleotide"
  source: /note="RNA"
  source: /note="5' tri-ethylene glycol (TEG)"
  modified_base (1)..(1): bicyclic nucleic acid (BNA)
aggaagau

SEQ ID NO: 3812 - RNA, 18 nt, Artificial Sequence
  source: /note="Description of Artificial Sequence: Synthetic oligonucleotide"
  source: /note="RNA"
  source: /note="5' tri-ethylene glycol (TEG)"
  modified_base (1)..(1): bicyclic nucleic acid (BNA)
ggaagauggcauuucuag

SEQ ID NO: 3813 - RNA, 17 nt, Artificial Sequence
  source: /note="Description of Artificial Sequence: Synthetic oligonucleotide"
  source: /note="RNA"
  source: /note="5' tri-ethylene glycol (TEG)"
  modified_base (1)..(1): bicyclic nucleic acid (BNA)
ggaagauggcauuucua

SEQ ID NO: 3814 - RNA, 16 nt, Artificial Sequence
  source: /note="Description of Artificial Sequence: Synthetic oligonucleotide"
  source: /note="RNA"
  source: /note="5' tri-ethylene glycol (TEG)"
  modified_base (1)..(1): bicyclic nucleic acid (BNA)
ggaagauggcauuucu

SEQ ID NO: 3815 - RNA, 15 nt, Artificial Sequence
  source: /note="Description of Artificial Sequence: Synthetic oligonucleotide"
  source: /note="RNA"
  source: /note="5' tri-ethylene glycol (TEG)"
  modified_base (1)..(1): bicyclic nucleic acid (BNA)
ggaagauggcauuuc

SEQ ID NO: 3816 - RNA, 14 nt, Artificial Sequence
  source: /note="Description of Artificial Sequence: Synthetic oligonucleotide"
  source: /note="RNA"
  source: /note="5' tri-ethylene glycol (TEG)"
  modified_base (1)..(1): bicyclic nucleic acid (BNA)
ggaagauggcauuu

SEQ ID NO: 3817 - RNA, 13 nt, Artificial Sequence
  source: /note="Description of Artificial Sequence: Synthetic oligonucleotide"
  source: /note="RNA"
  source: /note="5' tri-ethylene glycol (TEG)"
  modified_base (1)..(1): bicyclic nucleic acid (BNA)
ggaagauggcauu

SEQ ID NO: 3818 - RNA, 12 nt, Artificial Sequence
  source: /note="Description of Artificial Sequence: Synthetic oligonucleotide"
  source: /note="RNA"
  source: /note="5' tri-ethylene glycol (TEG)"
  modified_base (1)..(1): bicyclic nucleic acid (BNA)
ggaagauggcau

SEQ ID NO: 3819 - RNA, 11 nt, Artificial Sequence
  source: /note="Description of Artificial Sequence: Synthetic oligonucleotide"
  source: /note="RNA"
  source: /note="5' tri-ethylene glycol (TEG)"
  modified_base (1)..(1): bicyclic nucleic acid (BNA)
ggaagauggca

SEQ ID NO: 3820 - RNA, 10 nt, Artificial Sequence
  source: /note="Description of Artificial Sequence: Synthetic oligonucleotide"
  source: /note="RNA"
  source: /note="5' tri-ethylene glycol (TEG)"
  modified_base (1)..(1): bicyclic nucleic acid (BNA)
ggaagauggc

SEQ ID NO: 3821 - RNA, 8 nt, Artificial Sequence
  source: /note="Description of Artificial Sequence: Synthetic oligonucleotide"
  source: /note="RNA"
  source: /note="5' tri-ethylene glycol (TEG)"
  modified_base (1)..(1): bicyclic nucleic acid (BNA)
ggaagaug

SEQ ID NO: 3822 - RNA, 17 nt, Artificial Sequence
  source: /note="Description of Artificial Sequence: Synthetic oligonucleotide"
  source: /note="RNA"
  source: /note="5' tri-ethylene glycol (TEG)"
  modified_base (1)..(1): bicyclic nucleic acid (BNA)
gaagauggcauuucuag

SEQ ID NO: 3823 - RNA, 16 nt, Artificial Sequence
  source: /note="Description of Artificial Sequence: Synthetic oligonucleotide"
  source: /note="RNA"
  source: /note="5' tri-ethylene glycol (TEG)"
  modified_base (1)..(1): bicyclic nucleic acid (BNA)
gaagauggcauuucua

SEQ ID NO: 3824 - RNA, 14 nt, Artificial Sequence
  source: /note="Description of Artificial Sequence: Synthetic oligonucleotide"
  source: /note="RNA"
  source: /note="5' tri-ethylene glycol (TEG)"
  modified_base (1)..(1): bicyclic nucleic acid (BNA)
gaagauggcauuuc

SEQ ID NO: 3825 - RNA, 13 nt, Artificial Sequence
  source: /note="Description of Artificial Sequence: Synthetic oligonucleotide"
  source: /note="RNA"
  source: /note="5' tri-ethylene glycol (TEG)"
  modified_base (1)..(1): bicyclic nucleic acid (BNA)
gaagauggcauuu

SEQ ID NO: 3826 - RNA, 12 nt, Artificial Sequence
  source: /note="Description of Artificial Sequence: Synthetic oligonucleotide"
  source: /note="RNA"
  source: /note="5' tri-ethylene glycol (TEG)"
  modified_base (1)..(1): bicyclic nucleic acid (BNA)
gaagauggcauu

SEQ ID NO: 3827 - RNA, 11 nt, Artificial Sequence
  source: /note="Description of Artificial Sequence: Synthetic oligonucleotide"
  source: /note="RNA"
  source: /note="5' tri-ethylene glycol (TEG)"
  modified_base (1)..(1): bicyclic nucleic acid (BNA)
gaagauggcau

SEQ ID NO: 3828 - RNA, 10 nt, Artificial Sequence
  source: /note="Description of Artificial Sequence: Synthetic oligonucleotide"
  source: /note="RNA"
  source: /note="5' tri-ethylene glycol (TEG)"
  modified_base (1)..(1): bicyclic nucleic acid (BNA)
gaagauggca

SEQ ID NO: 3829 - RNA, 9 nt, Artificial Sequence
  source: /note="Description of Artificial Sequence: Synthetic oligonucleotide"
  source: /note="RNA"
  source: /note="5' tri-ethylene glycol (TEG)"
  modified_base (1)..(1): bicyclic nucleic acid (BNA)
gaagauggc

SEQ ID NO: 3830 - RNA, 8 nt, Artificial Sequence
  source: /note="Description of Artificial Sequence: Synthetic oligonucleotide"
  source: /note="RNA"
  source: /note="5' tri-ethylene glycol (TEG)"
  modified_base (1)..(1): bicyclic nucleic acid (BNA)
gaagaugg

SEQ ID NO: 3831 - RNA, 16 nt, Artificial Sequence
  source: /note="Description of Artificial Sequence: Synthetic oligonucleotide"
  source: /note="RNA"
  source: /note="5' tri-ethylene glycol (TEG)"
  modified_base (1)..(1): bicyclic nucleic acid (BNA)
aagauggcauuucuag

SEQ ID NO: 3832 - RNA, 15 nt, Artificial Sequence
  source: /note="Description of Artificial Sequence: Synthetic oligonucleotide"
  source: /note="RNA"
  source: /note="5' tri-ethylene glycol (TEG)"
  modified_base (1)..(1): bicyclic nucleic acid (BNA)
aagauggcauuucua

SEQ ID NO: 3833 - RNA, 14 nt, Artificial Sequence
  source: /note="Description of Artificial Sequence: Synthetic oligonucleotide"
  source: /note="RNA"
  source: /note="5' tri-ethylene glycol (TEG)"
  modified_base (1)..(1): bicyclic nucleic acid (BNA)
aagauggcauuucu

SEQ ID NO: 3834 - RNA, 13 nt, Artificial Sequence
  source: /note="Description of Artificial Sequence: Synthetic oligonucleotide"
  source: /note="RNA"
  source: /note="5' tri-ethylene glycol (TEG)"
  modified_base (1)..(1): bicyclic nucleic acid (BNA)
aagauggcauuuc

SEQ ID NO: 3835 - RNA, 12 nt, Artificial Sequence
  source: /note="Description of Artificial Sequence: Synthetic oligonucleotide"
  source: /note="RNA"
  source: /note="5' tri-ethylene glycol (TEG)"
  modified_base (1)..(1): bicyclic nucleic acid (BNA)
aagauggcauuu

SEQ ID NO: 3836 - RNA, 11 nt, Artificial Sequence
  source: /note="Description of Artificial Sequence: Synthetic oligonucleotide"
  source: /note="RNA"
  source: /note="5' tri-ethylene glycol (TEG)"
  modified_base (1)..(1): bicyclic nucleic acid (BNA)
aagauggcauu

SEQ ID NO: 3837 - RNA, 10 nt, Artificial Sequence
  source: /note="Description of Artificial Sequence: Synthetic oligonucleotide"
  source: /note="RNA"
  source: /note="5' tri-ethylene glycol (TEG)"
  modified_base (1)..(1): bicyclic nucleic acid (BNA)
aagauggcau

SEQ ID NO: 3838 - RNA, 9 nt, Artificial Sequence
  source: /note="Description of Artificial Sequence: Synthetic oligonucleotide"
  source: /note="RNA"
  source: /note="5' tri-ethylene glycol (TEG)"
  modified_base (1)..(1): bicyclic nucleic acid (BNA)
aagauggca

SEQ ID NO: 3839 - RNA, 8 nt, Artificial Sequence
  source: /note="Description of Artificial Sequence: Synthetic oligonucleotide"
  source: /note="RNA"
  source: /note="5' tri-ethylene glycol (TEG)"
  modified_base (1)..(1): bicyclic nucleic acid (BNA)
aagauggc

SEQ ID NO: 3840 - RNA, 15 nt, Artificial Sequence
  source: /note="Description of Artificial Sequence: Synthetic oligonucleotide"
  source: /note="RNA"
  source: /note="5' tri-ethylene glycol (TEG)"
  modified_base (1)..(1): bicyclic nucleic acid (BNA)
agauggcauuucuag

SEQ ID NO: 3841 - RNA, 14 nt, Artificial Sequence
  source: /note="Description of Artificial Sequence: Synthetic oligonucleotide"
  source: /note="RNA"
  source: /note="5' tri-ethylene glycol (TEG)"
  modified_base (1)..(1): bicyclic nucleic acid (BNA)
agauggcauuucua

SEQ ID NO: 3842 - RNA, 13 nt, Artificial Sequence
  source: /note="Description of Artificial Sequence: Synthetic oligonucleotide"
  source: /note="RNA"
  source: /note="5' tri-ethylene glycol (TEG)"
  modified_base (1)..(1): bicyclic nucleic acid (BNA)
agauggcauuucu

SEQ ID NO: 3843 - RNA, 12 nt, Artificial Sequence
  source: /note="Description of Artificial Sequence: Synthetic oligonucleotide"
  source: /note="RNA"
  source: /note="5' tri-ethylene glycol (TEG)"
  modified_base (1)..(1): bicyclic nucleic acid (BNA)
agauggcauuuc

SEQ ID NO: 3844 - RNA, 11 nt, Artificial Sequence
  source: /note="Description of Artificial Sequence: Synthetic oligonucleotide"
  source: /note="RNA"
  source: /note="5' tri-ethylene glycol (TEG)"
  modified_base (1)..(1): bicyclic nucleic acid (BNA)
agauggcauuu

SEQ ID NO: 3845 - RNA, 10 nt, Artificial Sequence
  source: /note="Description of Artificial Sequence: Synthetic oligonucleotide"
  source: /note="RNA"
  source: /note="5' tri-ethylene glycol (TEG)"
  modified_base (1)..(1): bicyclic nucleic acid (BNA)
agauggcauu

SEQ ID NO: 3846 - RNA, 9 nt, Artificial Sequence
  source: /note="Description of Artificial Sequence: Synthetic oligonucleotide"
  source: /note="RNA"
  source: /note="5' tri-ethylene glycol (TEG)"
  modified_base (1)..(1): bicyclic nucleic acid (BNA)
agauggcau

SEQ ID NO: 3847 - RNA, 8 nt, Artificial Sequence
  source: /note="Description of Artificial Sequence: Synthetic oligonucleotide"
  source: /note="RNA"
  source: /note="5' tri-ethylene glycol (TEG)"
  modified_base (1)..(1): bicyclic nucleic acid (BNA)
agauggca

SEQ ID NO: 3848 - RNA, 30 nt, Artificial Sequence; identical to SEQ ID NO: 284
  source: /note="Description of Artificial Sequence: Synthetic oligonucleotide"
  source: /note="RNA"
  source: /note="5' tri-ethylene glycol (TEG)"
  modified_base (1)..(1): bicyclic nucleic acid (BNA)

SEQ ID NO: 3849 - RNA, 29 nt, Artificial Sequence
  source: /note="Description of Artificial Sequence: Synthetic oligonucleotide"
  source: /note="RNA"
  source: /note="5' tri-ethylene glycol (TEG)"
  modified_base (1)..(1): bicyclic nucleic acid (BNA)
cuccaacaucaaggaagauggcauuucua

SEQ ID NO: 3850 - RNA, 28 nt, Artificial Sequence
  source: /note="Description of Artificial Sequence: Synthetic oligonucleotide"
  source: /note="RNA"
  source: /note="5' tri-ethylene glycol (TEG)"
  modified_base (1)..(1): bicyclic nucleic acid (BNA)
cuccaacaucaaggaagauggcauuucu

SEQ ID NO: 3851 - RNA, 27 nt, Artificial Sequence
  source: /note="Description of Artificial Sequence: Synthetic oligonucleotide"
  source: /note="RNA"
  source: /note="5' tri-ethylene glycol (TEG)"
  modified_base (1)..(1): bicyclic nucleic acid (BNA)
cuccaacaucaaggaagauggcauuuc

SEQ ID NO: 3852 - RNA, 26 nt, Artificial Sequence
  source: /note="Description of Artificial Sequence: Synthetic oligonucleotide"
  source: /note="RNA"
  source: /note="5' tri-ethylene glycol (TEG)"
  modified_base (1)..(1): bicyclic nucleic acid (BNA)
cuccaacaucaaggaagauggcauuu

SEQ ID NO: 3853 - RNA, 25 nt, Artificial Sequence
  source: /note="Description of Artificial Sequence: Synthetic oligonucleotide"
  source: /note="RNA"
  source: /note="5' tri-ethylene glycol (TEG)"
  modified_base (1)..(1): bicyclic nucleic acid (BNA)
cuccaacaucaaggaagauggcauu

SEQ ID NO: 3854 - RNA, 24 nt, Artificial Sequence
  source: /note="Description of Artificial Sequence: Synthetic oligonucleotide"
  source: /note="RNA"
  source: /note="5' tri-ethylene glycol (TEG)"
  modified_base (1)..(1): bicyclic nucleic acid (BNA)
cuccaacaucaaggaagauggcau

SEQ ID NO: 3855 - RNA, 23 nt, Artificial Sequence
  source: /note="Description of Artificial Sequence: Synthetic oligonucleotide"
  source: /note="RNA"
  source: /note="5' tri-ethylene glycol (TEG)"
  modified_base (1)..(1): bicyclic nucleic acid (BNA)
cuccaacaucaaggaagauggca

SEQ ID NO: 3856 - RNA, 22 nt, Artificial Sequence
  source: /note="Description of Artificial Sequence: Synthetic oligonucleotide"
  source: /note="RNA"
  source: /note="5' tri-ethylene glycol (TEG)"
  modified_base (1)..(1): bicyclic nucleic acid (BNA)
cuccaacaucaaggaagauggc

SEQ ID NO: 3857 - RNA, 21 nt, Artificial Sequence
  source: /note="Description of Artificial Sequence: Synthetic oligonucleotide"
  source: /note="RNA"
  source: /note="5' tri-ethylene glycol (TEG)"
  modified_base (1)..(1): bicyclic nucleic acid (BNA)
cuccaacaucaaggaagaugg

SEQ ID NO: 3858 - RNA, 20 nt, Artificial Sequence
  source: /note="Description of Artificial Sequence: Synthetic oligonucleotide"
  source: /note="RNA"
  source: /note="5' tri-ethylene glycol (TEG)"
  modified_base (1)..(1): bicyclic nucleic acid (BNA)
cuccaacaucaaggaagaug

SEQ ID NO: 3859 - RNA, 19 nt, Artificial Sequence
  source: /note="Description of Artificial Sequence: Synthetic oligonucleotide"
  source: /note="RNA"
  source: /note="5' tri-ethylene glycol (TEG)"
  modified_base (1)..(1): bicyclic nucleic acid (BNA)
cuccaacaucaaggaagau

SEQ ID NO: 3860 - RNA, 18 nt, Artificial Sequence
  source: /note="Description of Artificial Sequence: Synthetic oligonucleotide"
  source: /note="RNA"
  source: /note="5' tri-ethylene glycol (TEG)"
  modified_base (1)..(1): bicyclic nucleic acid (BNA)
cuccaacaucaaggaaga

SEQ ID NO: 3861 - RNA, 17 nt, Artificial Sequence
  source: /note="Description of Artificial Sequence: Synthetic oligonucleotide"
  source: /note="RNA"
  source: /note="5' tri-ethylene glycol (TEG)"
  modified_base (1)..(1): bicyclic nucleic acid (BNA)
cuccaacaucaaggaag

SEQ ID NO: 3862 - DNA, 29 bp, Artificial Sequence
  source: /note="Description of Artificial Sequence: Synthetic oligonucleotide"
  source: /note="Description of Combined DNA/RNA Molecule: Synthetic oligonucleotide"
  source: /note="DNA/RNA"
  source: /note="5' tri-ethylene glycol (TEG)"
  modified_base (1)..(1): bicyclic nucleic acid (BNA)
tccaacaucaaggaagauggcauuucuag

SEQ ID NO: 3863 - DNA, 28 bp, Artificial Sequence
  source: /note="Description of Artificial Sequence: Synthetic oligonucleotide"
  source: /note="Description of Combined DNA/RNA Molecule: Synthetic oligonucleotide"
  source: /note="DNA/RNA"
  source: /note="5' tri-ethylene glycol (TEG)"
  modified_base (1)..(1): bicyclic nucleic acid (BNA)
tccaacaucaaggaagauggcauuucua

SEQ ID NO: 3864 - DNA, 27 bp, Artificial Sequence
  source: /note="Description of Artificial Sequence: Synthetic oligonucleotide"
  source: /note="Description of Combined DNA/RNA Molecule: Synthetic oligonucleotide"
  source: /note="DNA/RNA"
  source: /note="5' tri-ethylene glycol (TEG)"
  modified_base (1)..(1): bicyclic nucleic acid (BNA)
tccaacaucaaggaagauggcauuucu

SEQ ID NO: 3865 - DNA, 26 bp, Artificial Sequence
  source: /note="Description of Artificial Sequence: Synthetic oligonucleotide"
  source: /note="Description of Combined DNA/RNA Molecule: Synthetic oligonucleotide"
  source: /note="DNA/RNA"
  source: /note="5' tri-ethylene glycol (TEG)"
  modified_base (1)..(1): bicyclic nucleic acid (BNA)
tccaacaucaaggaagauggcauuuc

SEQ ID NO: 3866 - DNA, 25 bp, Artificial Sequence
  source: /note="Description of Artificial Sequence: Synthetic oligonucleotide"
  source: /note="Description of Combined DNA/RNA Molecule: Synthetic oligonucleotide"
  source: /note="DNA/RNA"
  source: /note="5' tri-ethylene glycol (TEG)"
  modified_base (1)..(1): bicyclic nucleic acid (BNA)
tccaacaucaaggaagauggcauuu

SEQ ID NO: 3867 - DNA, 24 bp, Artificial Sequence
  source: /note="Description of Artificial Sequence: Synthetic oligonucleotide"
  source: /note="Description of Combined DNA/RNA Molecule: Synthetic oligonucleotide"
  source: /note="DNA/RNA"
  source: /note="5' tri-ethylene glycol (TEG)"
  modified_base (1)..(1): bicyclic nucleic acid (BNA)
tccaacaucaaggaagauggcauu

SEQ ID NO: 3868 - DNA, 23 bp, Artificial Sequence
  source: /note="Description of Artificial Sequence: Synthetic oligonucleotide"
  source: /note="Description of Combined DNA/RNA Molecule: Synthetic oligonucleotide"
  source: /note="DNA/RNA"
  source: /note="5' tri-ethylene glycol (TEG)"
  modified_base (1)..(1): bicyclic nucleic acid (BNA)
tccaacaucaaggaagauggcau

SEQ ID NO: 3869 - DNA, 22 bp, Artificial Sequence
  source: /note="Description of Artificial Sequence: Synthetic oligonucleotide"
  source: /note="Description of Combined DNA/RNA Molecule: Synthetic oligonucleotide"
  source: /note="DNA/RNA"
  source: /note="5' tri-ethylene glycol (TEG)"
  modified_base (1)..(1): bicyclic nucleic acid (BNA)
tccaacaucaaggaagauggca

SEQ ID NO: 3870 - DNA, 21 bp, Artificial Sequence
  source: /note="Description of Artificial Sequence: Synthetic oligonucleotide"
  source: /note="Description of Combined DNA/RNA Molecule: Synthetic oligonucleotide"
  source: /note="DNA/RNA"
  source: /note="5' tri-ethylene glycol (TEG)"
  modified_base (1)..(1): bicyclic nucleic acid (BNA)
tccaacaucaaggaagauggc

SEQ ID NO: 3871 - DNA, 20 bp, Artificial Sequence
  source: /note="Description of Artificial Sequence: Synthetic oligonucleotide"
  source: /note="Description of Combined DNA/RNA Molecule: Synthetic oligonucleotide"
  source: /note="DNA/RNA"
  source: /note="5' tri-ethylene glycol (TEG)"
  modified_base (1)..(1): bicyclic nucleic acid (BNA)
tccaacaucaaggaagaugg

SEQ ID NO: 3872 - DNA, 19 bp, Artificial Sequence
  source: /note="Description of Artificial Sequence: Synthetic oligonucleotide"
  source: /note="Description of Combined DNA/RNA Molecule: Synthetic oligonucleotide"
  source: /note="DNA/RNA"
  source: /note="5' tri-ethylene glycol (TEG)"
  modified_base (1)..(1): bicyclic nucleic acid (BNA)
tccaacaucaaggaagaug

SEQ ID NO: 3873 - DNA, 18 bp, Artificial Sequence
  source: /note="Description of Artificial Sequence: Synthetic oligonucleotide"
  source: /note="Description of Combined DNA/RNA Molecule: Synthetic oligonucleotide"
  source: /note="DNA/RNA"
  source: /note="5' tri-ethylene glycol (TEG)"
  modified_base (1)..(1): bicyclic nucleic acid (BNA)
tccaacaucaaggaagau

SEQ ID NO: 3874 - DNA, 17 bp, Artificial Sequence
  source: /note="Description of Artificial Sequence: Synthetic oligonucleotide"
  source: /note="Description of Combined DNA/RNA Molecule: Synthetic oligonucleotide"
  source: /note="DNA/RNA"
  source: /note="5' tri-ethylene glycol (TEG)"
  modified_base (1)..(1): bicyclic nucleic acid (BNA)
tccaacaucaaggaaga

SEQ ID NO: 3875 - DNA, 16 bp, Artificial Sequence
  source: /note="Description of Artificial Sequence: Synthetic oligonucleotide"
  source: /note="Description of Combined DNA/RNA Molecule: Synthetic oligonucleotide"
  source: /note="DNA/RNA"
  source: /note="5' tri-ethylene glycol (TEG)"
  modified_base (1)..(1): bicyclic nucleic acid (BNA)
tccaacaucaaggaag

SEQ ID NO: 3876 - RNA, 28 nt, Artificial Sequence
  source: /note="Description of Artificial Sequence: Synthetic oligonucleotide"
  source: /note="RNA"
  source: /note="5' tri-ethylene glycol (TEG)"
  modified_base (1)..(1): bicyclic nucleic acid (BNA)
ccaacaucaaggaagauggcauuucuag

SEQ ID NO: 3877 - RNA, 27 nt, Artificial Sequence
  source: /note="Description of Artificial Sequence: Synthetic oligonucleotide"
  source: /note="RNA"
  source: /note="5' tri-ethylene glycol (TEG)"
  modified_base (1)..(1): bicyclic nucleic acid (BNA)
ccaacaucaaggaagauggcauuucua

SEQ ID NO: 3878 - RNA, 26 nt, Artificial Sequence
  source: /note="Description of Artificial Sequence: Synthetic oligonucleotide"
  source: /note="RNA"
  source: /note="5' tri-ethylene glycol (TEG)"
  modified_base (1)..(1): bicyclic nucleic acid (BNA)
ccaacaucaaggaagauggcauuucu

SEQ ID NO: 3879 - RNA, 25 nt, Artificial Sequence
  source: /note="Description of Artificial Sequence: Synthetic oligonucleotide"
  source: /note="RNA"
  source: /note="5' tri-ethylene glycol (TEG)"
  modified_base (1)..(1): bicyclic nucleic acid (BNA)
ccaacaucaaggaagauggcauuuc

SEQ ID NO: 3880 - RNA, 24 nt, Artificial Sequence
  source: /note="Description of Artificial Sequence: Synthetic oligonucleotide"
  source: /note="RNA"
  source: /note="5' tri-ethylene glycol (TEG)"
  modified_base (1)..(1): bicyclic nucleic acid (BNA)
ccaacaucaaggaagauggcauuu

SEQ ID NO: 3881 - RNA, 23 nt, Artificial Sequence
  source: /note="Description of Artificial Sequence: Synthetic oligonucleotide"
  source: /note="RNA"
  source: /note="5' tri-ethylene glycol (TEG)"
  modified_base (1)..(1): bicyclic nucleic acid (BNA)
ccaacaucaaggaagauggcauu

SEQ ID NO: 3882 - RNA, 22 nt, Artificial Sequence
  source: /note="Description of Artificial Sequence: Synthetic oligonucleotide"
  source: /note="RNA"
  source: /note="5' tri-ethylene glycol (TEG)"
  modified_base (1)..(1): bicyclic nucleic acid (BNA)
ccaacaucaaggaagauggcau

SEQ ID NO: 3883 - RNA, 21 nt, Artificial Sequence
  source: /note="Description of Artificial Sequence: Synthetic oligonucleotide"
  source: /note="RNA"
  source: /note="5' tri-ethylene glycol (TEG)"
  modified_base (1)..(1): bicyclic nucleic acid (BNA)
ccaacaucaaggaagauggca

SEQ ID NO: 3884 - RNA, 20 nt, Artificial Sequence
  source: /note="Description of Artificial Sequence: Synthetic oligonucleotide"
  source: /note="RNA"
  source: /note="5' tri-ethylene glycol (TEG)"
  modified_base (1)..(1): bicyclic nucleic acid (BNA)
ccaacaucaaggaagauggc

SEQ ID NO: 3885 - RNA, 19 nt, Artificial Sequence
  source: /note="Description of Artificial Sequence: Synthetic oligonucleotide"
  source: /note="RNA"
  source: /note="5' tri-ethylene glycol (TEG)"
  modified_base (1)..(1): bicyclic nucleic acid (BNA)
ccaacaucaaggaagaugg

SEQ ID NO: 3886 - RNA, 18 nt, Artificial Sequence
  source: /note="Description of Artificial Sequence: Synthetic oligonucleotide"
  source: /note="RNA"
  source: /note="5' tri-ethylene glycol (TEG)"
  modified_base (1)..(1): bicyclic nucleic acid (BNA)
ccaacaucaaggaagaug

SEQ ID NO: 3887 - RNA, 17 nt, Artificial Sequence
  source: /note="Description of Artificial Sequence: Synthetic oligonucleotide"
  source: /note="RNA"
  source: /note="5' tri-ethylene glycol (TEG)"
  modified_base (1)..(1): bicyclic nucleic acid (BNA)
ccaacaucaaggaagau

SEQ ID NO: 3888 - RNA, 16 nt, Artificial Sequence
  source: /note="Description of Artificial Sequence: Synthetic oligonucleotide"
  source: /note="RNA"
  source: /note="5' tri-ethylene glycol (TEG)"
  modified_base (1)..(1): bicyclic nucleic acid (BNA)
ccaacaucaaggaaga

SEQ ID NO: 3889 - RNA, 15 nt, Artificial Sequence
  source: /note="Description of Artificial Sequence: Synthetic oligonucleotide"
  source: /note="RNA"
  source: /note="5' tri-ethylene glycol (TEG)"
  modified_base (1)..(1): bicyclic nucleic acid (BNA)
ccaacaucaaggaag

SEQ ID NO: 3890 - RNA, 27 nt, Artificial Sequence
  source: /note="Description of Artificial Sequence: Synthetic oligonucleotide"
  source: /note="RNA"
  source: /note="5' tri-ethylene glycol (TEG)"
  modified_base (1)..(1): bicyclic nucleic acid (BNA)
caacaucaaggaagauggcauuucuag

SEQ ID NO: 3891 - RNA, 26 nt, Artificial Sequence
  source: /note="Description of Artificial Sequence: Synthetic oligonucleotide"
  source: /note="RNA"
  source: /note="5' tri-ethylene glycol (TEG)"
  modified_base (1)..(1): bicyclic nucleic acid (BNA)
caacaucaaggaagauggcauuucua

SEQ ID NO: 3892 - RNA, 25 nt, Artificial Sequence
  source: /note="Description of Artificial Sequence: Synthetic oligonucleotide"
  source: /note="RNA"
  source: /note="5' tri-ethylene glycol (TEG)"
  modified_base (1)..(1): bicyclic nucleic acid (BNA)
caacaucaaggaagauggcauuucu

SEQ ID NO: 3893 - RNA, 24 nt, Artificial Sequence
  source: /note="Description of Artificial Sequence: Synthetic oligonucleotide"
  source: /note="RNA"
  source: /note="5' tri-ethylene glycol (TEG)"
  modified_base (1)..(1): bicyclic nucleic acid (BNA)
caacaucaaggaagauggcauuuc

SEQ ID NO: 3894 - RNA, 23 nt, Artificial Sequence
  source: /note="Description of Artificial Sequence: Synthetic oligonucleotide"
  source: /note="RNA"
  source: /note="5' tri-ethylene glycol (TEG)"
  modified_base (1)..(1): bicyclic nucleic acid (BNA)
caacaucaaggaagauggcauuu

SEQ ID NO: 3895 - RNA, 22 nt, Artificial Sequence
  source: /note="Description of Artificial Sequence: Synthetic oligonucleotide"
  source: /note="RNA"
  source: /note="5' tri-ethylene glycol (TEG)"
  modified_base (1)..(1): bicyclic nucleic acid (BNA)
caacaucaaggaagauggcauu

SEQ ID NO: 3896 - RNA, 21 nt, Artificial Sequence
  source: /note="Description of Artificial Sequence: Synthetic oligonucleotide"
  source: /note="RNA"
  source: /note="5' tri-ethylene glycol (TEG)"
  modified_base (1)..(1): bicyclic nucleic acid (BNA)
caacaucaaggaagauggcau

SEQ ID NO: 3897 - RNA, 20 nt, Artificial Sequence
  source: /note="Description of Artificial Sequence: Synthetic oligonucleotide"
  source: /note="RNA"
  source: /note="5' tri-ethylene glycol (TEG)"
  modified_base (1)..(1): bicyclic nucleic acid (BNA)
caacaucaaggaagauggca

SEQ ID NO: 3898 - RNA, 19 nt, Artificial Sequence
  source: /note="Description of Artificial Sequence: Synthetic oligonucleotide"
  source: /note="RNA"
  source: /note="5' tri-ethylene glycol (TEG)"
  modified_base (1)..(1): bicyclic nucleic acid (BNA)
caacaucaaggaagauggc

SEQ ID NO: 3899 - RNA, 18 nt, Artificial Sequence
  source: /note="Description of Artificial Sequence: Synthetic oligonucleotide"
  source: /note="RNA"
  source: /note="5' tri-ethylene glycol (TEG)"
  modified_base (1)..(1): bicyclic nucleic acid (BNA)
caacaucaaggaagaugg

SEQ ID NO: 3900 - RNA, 17 nt, Artificial Sequence
  source: /note="Description of Artificial Sequence: Synthetic oligonucleotide"
  source: /note="RNA"
  source: /note="5' tri-ethylene glycol (TEG)"
  modified_base (1)..(1): bicyclic nucleic acid (BNA)
caacaucaaggaagaug

SEQ ID NO: 3901 - RNA, 16 nt, Artificial Sequence
  source: /note="Description of Artificial Sequence: Synthetic oligonucleotide"
  source: /note="RNA"
  source: /note="5' tri-ethylene glycol (TEG)"
  modified_base (1)..(1): bicyclic nucleic acid (BNA)
caacaucaaggaagau

SEQ ID NO: 3902 - RNA, 15 nt, Artificial Sequence
  source: /note="Description of Artificial Sequence: Synthetic oligonucleotide"
  source: /note="RNA"
  source: /note="5' tri-ethylene glycol (TEG)"
  modified_base (1)..(1): bicyclic nucleic acid (BNA)
caacaucaaggaaga

SEQ ID NO: 3903 - RNA, 14 nt, Artificial Sequence
  source: /note="Description of Artificial Sequence: Synthetic oligonucleotide"
  source: /note="RNA"
  source: /note="5' tri-ethylene glycol (TEG)"
  modified_base (1)..(1): bicyclic nucleic acid (BNA)
caacaucaaggaag

SEQ ID NO: 3904 - RNA, 26 nt, Artificial Sequence
  source: /note="Description of Artificial Sequence: Synthetic oligonucleotide"
  source: /note="RNA"
  source: /note="5' tri-ethylene glycol (TEG)"
  modified_base (1)..(1): bicyclic nucleic acid (BNA)
aacaucaaggaagauggcauuucuag

SEQ ID NO: 3905 - RNA, 25 nt, Artificial Sequence
  source: /note="Description of Artificial Sequence: Synthetic oligonucleotide"
  source: /note="RNA"
  source: /note="5' tri-ethylene glycol (TEG)"
  modified_base (1)..(1): bicyclic nucleic acid (BNA)
aacaucaaggaagauggcauuucua

SEQ ID NO: 3906 - RNA, 24 nt, Artificial Sequence
  source: /note="Description of Artificial Sequence: Synthetic oligonucleotide"
  source: /note="RNA"
  source: /note="5' tri-ethylene glycol (TEG)"
  modified_base (1)..(1): bicyclic nucleic acid (BNA)
aacaucaaggaagauggcauuucu

SEQ ID NO: 3907 - RNA, 23 nt, Artificial Sequence
  source: /note="Description of Artificial Sequence: Synthetic oligonucleotide"
  source: /note="RNA"
  source: /note="5' tri-ethylene glycol (TEG)"
  modified_base (1)..(1): bicyclic nucleic acid (BNA)
aacaucaaggaagauggcauuuc

SEQ ID NO: 3908 - RNA, 22 nt, Artificial Sequence
  source: /note="Description of Artificial Sequence: Synthetic oligonucleotide"
  source: /note="RNA"
  source: /note="5' tri-ethylene glycol (TEG)"
  modified_base (1)..(1): bicyclic nucleic acid (BNA)
aacaucaaggaagauggcauuu

SEQ ID NO: 3909 - RNA, 21 nt, Artificial Sequence
  source: /note="Description of Artificial Sequence: Synthetic oligonucleotide"
  source: /note="RNA"
  source: /note="5' tri-ethylene glycol (TEG)"
  modified_base (1)..(1): bicyclic nucleic acid (BNA)
aacaucaaggaagauggcauu

SEQ ID NO: 3910 - RNA, 20 nt, Artificial Sequence
  source: /note="Description of Artificial Sequence: Synthetic oligonucleotide"
  source: /note="RNA"
  source: /note="5' tri-ethylene glycol (TEG)"
  modified_base (1)..(1): bicyclic nucleic acid (BNA)
aacaucaaggaagauggcau

SEQ ID NO: 3911 - RNA, 19 nt, Artificial Sequence
  source: /note="Description of Artificial Sequence: Synthetic oligonucleotide"
  source: /note="RNA"
  source: /note="5' tri-ethylene glycol (TEG)"
  modified_base (1)..(1): bicyclic nucleic acid (BNA)
aacaucaaggaagauggca

SEQ ID NO: 3912 - RNA, 18 nt, Artificial Sequence
  source: /note="Description of Artificial Sequence: Synthetic oligonucleotide"
  source: /note="RNA"
  source: /note="5' tri-ethylene glycol (TEG)"
  modified_base (1)..(1): bicyclic nucleic acid (BNA)
aacaucaaggaagauggc

SEQ ID NO: 3913 - RNA, 17 nt, Artificial Sequence
  source: /note="Description of Artificial Sequence: Synthetic oligonucleotide"
  source: /note="RNA"
  source: /note="5' tri-ethylene glycol (TEG)"
  modified_base (1)..(1): bicyclic nucleic acid (BNA)
aacaucaaggaagaugg

SEQ ID NO: 3914 - RNA, 16 nt, Artificial Sequence
  source: /note="Description of Artificial Sequence: Synthetic oligonucleotide"
  source: /note="RNA"
  source: /note="5' tri-ethylene glycol (TEG)"
  modified_base (1)..(1): bicyclic nucleic acid (BNA)
aacaucaaggaagaug

SEQ ID NO: 3915 - RNA, 15 nt, Artificial Sequence
  source: /note="Description of Artificial Sequence: Synthetic oligonucleotide"
  source: /note="RNA"
  source: /note="5' tri-ethylene glycol (TEG)"
  modified_base (1)..(1): bicyclic nucleic acid (BNA)
aacaucaaggaagau

SEQ ID NO: 3916 - RNA, 14 nt, Artificial Sequence
  source: /note="Description of Artificial Sequence: Synthetic oligonucleotide"
  source: /note="RNA"
  source: /note="5' tri-ethylene glycol (TEG)"
  modified_base (1)..(1): bicyclic nucleic acid (BNA)
aacaucaaggaaga

SEQ ID NO: 3917 - RNA, 13 nt, Artificial Sequence
  source: /note="Description of Artificial Sequence: Synthetic oligonucleotide"
  source: /note="RNA"
  source: /note="5' tri-ethylene glycol (TEG)"
  modified_base (1)..(1): bicyclic nucleic acid (BNA)
aacaucaaggaag

SEQ ID NO: 3918 - RNA, 25 nt, Artificial Sequence
  source: /note="Description of Artificial Sequence: Synthetic oligonucleotide"
  source: /note="RNA"
  source: /note="5' tri-ethylene glycol (TEG)"
  modified_base (1)..(1): bicyclic nucleic acid (BNA)
acaucaaggaagauggcauuucuag

SEQ ID NO: 3919 - RNA, 24 nt, Artificial Sequence
  source: /note="Description of Artificial Sequence: Synthetic oligonucleotide"
  source: /note="RNA"
  source: /note="5' tri-ethylene glycol (TEG)"
  modified_base (1)..(1): bicyclic nucleic acid (BNA)
acaucaaggaagauggcauuucua

SEQ ID NO: 3920 - RNA, 23 nt, Artificial Sequence
  source: /note="Description of Artificial Sequence: Synthetic oligonucleotide"
  source: /note="RNA"
  source: /note="5' tri-ethylene glycol (TEG)"
  modified_base (1)..(1): bicyclic nucleic acid (BNA)
acaucaaggaagauggcauuucu

SEQ ID NO: 3921 - RNA, 22 nt, Artificial Sequence
  source: /note="Description of Artificial Sequence: Synthetic oligonucleotide"
  source: /note="RNA"
  source: /note="5' tri-ethylene glycol (TEG)"
  modified_base (1)..(1): bicyclic nucleic acid (BNA)
acaucaaggaagauggcauuuc

SEQ ID NO: 3922 - RNA, 21 nt, Artificial Sequence
  source: /note="Description of Artificial Sequence: Synthetic oligonucleotide"
  source: /note="RNA"
  source: /note="5' tri-ethylene glycol (TEG)"
  modified_base (1)..(1): bicyclic nucleic acid (BNA)
acaucaaggaagauggcauuu

SEQ ID NO: 3923 - RNA, 20 nt, Artificial Sequence
  source: /note="Description of Artificial Sequence: Synthetic oligonucleotide"
  source: /note="RNA"
  source: /note="5' tri-ethylene glycol (TEG)"
  modified_base (1)..(1): bicyclic nucleic acid (BNA)
acaucaaggaagauggcauu

SEQ ID NO: 3924 - RNA, 19 nt, Artificial Sequence
  source: /note="Description of Artificial Sequence: Synthetic oligonucleotide"
  source: /note="RNA"
  source: /note="5' tri-ethylene glycol (TEG)"
  modified_base (1)..(1): bicyclic nucleic acid (BNA)
acaucaaggaagauggcau

SEQ ID NO: 3925 - RNA, 18 nt, Artificial Sequence
  source: /note="Description of Artificial Sequence: Synthetic oligonucleotide"
  source: /note="RNA"
  source: /note="5' tri-ethylene glycol (TEG)"
  modified_base (1)..(1): bicyclic nucleic acid (BNA)
acaucaaggaagauggca

SEQ ID NO: 3926 - RNA, 17 nt, Artificial Sequence
  source: /note="Description of Artificial Sequence: Synthetic oligonucleotide"
  source: /note="RNA"
  source: /note="5' tri-ethylene glycol (TEG)"
  modified_base (1)..(1): bicyclic nucleic acid (BNA)
acaucaaggaagauggc

SEQ ID NO: 3927 - RNA, 16 nt, Artificial Sequence
  source: /note="Description of Artificial Sequence: Synthetic oligonucleotide"
  source: /note="RNA"
  source: /note="5' tri-ethylene glycol (TEG)"
  modified_base (1)..(1): bicyclic nucleic acid (BNA)
acaucaaggaagaugg

SEQ ID NO: 3928 - RNA, 15 nt, Artificial Sequence
  source: /note="Description of Artificial Sequence: Synthetic oligonucleotide"
  source: /note="RNA"
  source: /note="5' tri-ethylene glycol (TEG)"
  modified_base (1)..(1): bicyclic nucleic acid (BNA)
acaucaaggaagaug

SEQ ID NO: 3929 - RNA, 14 nt, Artificial Sequence
  source: /note="Description of Artificial Sequence: Synthetic oligonucleotide"
  source: /note="RNA"
  source: /note="5' tri-ethylene glycol (TEG)"
  modified_base (1)..(1): bicyclic nucleic acid (BNA)
acaucaaggaagau

SEQ ID NO: 3930 - RNA, 13 nt, Artificial Sequence
  source: /note="Description of Artificial Sequence: Synthetic oligonucleotide"
  source: /note="RNA"
  source: /note="5' tri-ethylene glycol (TEG)"
  modified_base (1)..(1): bicyclic nucleic acid (BNA)
acaucaaggaaga

SEQ ID NO: 3931 - RNA, 12 nt, Artificial Sequence
  source: /note="Description of Artificial Sequence: Synthetic oligonucleotide"
  source: /note="RNA"
  source: /note="5' tri-ethylene glycol (TEG)"
  modified_base (1)..(1): bicyclic nucleic acid (BNA)
acaucaaggaag

SEQ ID NO: 3932 - RNA, 24 nt, Artificial Sequence
  source: /note="Description of Artificial Sequence: Synthetic oligonucleotide"
  source: /note="RNA"
  source: /note="5' tri-ethylene glycol (TEG)"
  modified_base (1)..(1): bicyclic nucleic acid (BNA)
caucaaggaagauggcauuucuag

SEQ ID NO: 3933 - RNA, 23 nt, Artificial Sequence
  source: /note="Description of Artificial Sequence: Synthetic oligonucleotide"
  source: /note="RNA"
  source: /note="5' tri-ethylene glycol (TEG)"
  modified_base (1)..(1): bicyclic nucleic acid (BNA)
caucaaggaagauggcauuucua

SEQ ID NO: 3934 - RNA, 22 nt, Artificial Sequence
  source: /note="Description of Artificial Sequence: Synthetic oligonucleotide"
  source: /note="RNA"
  source: /note="5' tri-ethylene glycol (TEG)"
  modified_base (1)..(1): bicyclic nucleic acid (BNA)
caucaaggaagauggcauuucu

SEQ ID NO: 3935 - RNA, 21 nt, Artificial Sequence
  source: /note="Description of Artificial Sequence: Synthetic oligonucleotide"
  source: /note="RNA"
  source: /note="5' tri-ethylene glycol (TEG)"
  modified_base (1)..(1): bicyclic nucleic acid (BNA)
caucaaggaagauggcauuuc

SEQ ID NO: 3936 - RNA, 20 nt, Artificial Sequence
  source: /note="Description of Artificial Sequence: Synthetic oligonucleotide"
  source: /note="RNA"
  source: /note="5' tri-ethylene glycol (TEG)"
  modified_base (1)..(1): bicyclic nucleic acid (BNA)
caucaaggaagauggcauuu

SEQ ID NO: 3937 - RNA, 19 nt, Artificial Sequence
  source: /note="Description of Artificial Sequence: Synthetic oligonucleotide"
  source: /note="RNA"
  source: /note="5' tri-ethylene glycol (TEG)"
  modified_base (1)..(1): bicyclic nucleic acid (BNA)
caucaaggaagauggcauu

SEQ ID NO: 3938 - RNA, 18 nt, Artificial Sequence
  source: /note="Description of Artificial Sequence: Synthetic oligonucleotide"
  source: /note="RNA"
  source: /note="5' tri-ethylene glycol (TEG)"
  modified_base (1)..(1): bicyclic nucleic acid (BNA)
caucaaggaagauggcau

SEQ ID NO: 3939 - RNA, 17 nt, Artificial Sequence
  source: /note="Description of Artificial Sequence: Synthetic oligonucleotide"
  source: /note="RNA"
  source: /note="5' tri-ethylene glycol (TEG)"
  modified_base (1)..(1): bicyclic nucleic acid (BNA)
caucaaggaagauggca

SEQ ID NO: 3940 - RNA, 16 nt, Artificial Sequence
  source: /note="Description of Artificial Sequence: Synthetic oligonucleotide"
  source: /note="RNA"
  source: /note="5' tri-ethylene glycol (TEG)"
  modified_base (1)..(1): bicyclic nucleic acid (BNA)
caucaaggaagauggc

SEQ ID NO: 3941 - RNA, 15 nt, Artificial Sequence
  source: /note="Description of Artificial Sequence: Synthetic oligonucleotide"
  source: /note="RNA"
  source: /note="5' tri-ethylene glycol (TEG)"
  modified_base (1)..(1): bicyclic nucleic acid (BNA)
caucaaggaagaugg

SEQ ID NO: 3942 - RNA, 14 nt, Artificial Sequence
  source: /note="Description of Artificial Sequence: Synthetic oligonucleotide"
  source: /note="RNA"
  source: /note="5' tri-ethylene glycol (TEG)"
  modified_base (1)..(1): bicyclic nucleic acid (BNA)
caucaaggaagaug

SEQ ID NO: 3943 - RNA, 13 nt, Artificial Sequence
  source: /note="Description of Artificial Sequence: Synthetic oligonucleotide"
  source: /note="RNA"
  source: /note="5' tri-ethylene glycol (TEG)"
  modified_base (1)..(1): bicyclic nucleic acid (BNA)
caucaaggaagau

SEQ ID NO: 3944 - RNA, 12 nt, Artificial Sequence
  source: /note="Description of Artificial Sequence: Synthetic oligonucleotide"
  source: /note="RNA"
  source: /note="5' tri-ethylene glycol (TEG)"
  modified_base (1)..(1): bicyclic nucleic acid (BNA)
caucaaggaaga

SEQ ID NO: 3945 - RNA, 11 nt, Artificial Sequence
  source: /note="Description of Artificial Sequence: Synthetic oligonucleotide"
  source: /note="RNA"
  source: /note="5' tri-ethylene glycol (TEG)"
  modified_base (1)..(1): bicyclic nucleic acid (BNA)
caucaaggaag

SEQ ID NO: 3946 - RNA, 23 nt, Artificial Sequence
  source: /note="Description of Artificial Sequence: Synthetic oligonucleotide"
  source: /note="RNA"
  source: /note="5' tri-ethylene glycol (TEG)"
  modified_base (1)..(1): bicyclic nucleic acid (BNA)
aucaaggaagauggcauuucuag

SEQ ID NO: 3947 - RNA, 22 nt, Artificial Sequence
  source: /note="Description of Artificial Sequence: Synthetic oligonucleotide"
  source: /note="RNA"
  source: /note="5' tri-ethylene glycol (TEG)"
  modified_base (1)..(1): bicyclic nucleic acid (BNA)
aucaaggaagauggcauuucua

SEQ ID NO: 3948 - RNA, 21 nt, Artificial Sequence
  source: /note="Description of Artificial Sequence: Synthetic oligonucleotide"
  source: /note="RNA"
  source: /note="5' tri-ethylene glycol (TEG)"
  modified_base (1)..(1): bicyclic nucleic acid (BNA)
aucaaggaagauggcauuucu

SEQ ID NO: 3949 - RNA, 20 nt, Artificial Sequence
  source: /note="Description of Artificial Sequence: Synthetic oligonucleotide"
  source: /note="RNA"
  source: /note="5' tri-ethylene glycol (TEG)"
  modified_base (1)..(1): bicyclic nucleic acid (BNA)
aucaaggaagauggcauuuc

SEQ ID NO: 3950 - RNA, 19 nt, Artificial Sequence
  source: /note="Description of Artificial Sequence: Synthetic oligonucleotide"
  source: /note="RNA"
  source: /note="5' tri-ethylene glycol (TEG)"
  modified_base (1)..(1): bicyclic nucleic acid (BNA)
aucaaggaagauggcauuu

SEQ ID NO: 3951 - RNA, 18 nt, Artificial Sequence
  source: /note="Description of Artificial Sequence: Synthetic oligonucleotide"
  source: /note="RNA"
  source: /note="5' tri-ethylene glycol (TEG)"
  modified_base (1)..(1): bicyclic nucleic acid (BNA)
aucaaggaagauggcauu

SEQ ID NO: 3952 - RNA, 17 nt, Artificial Sequence
  source: /note="Description of Artificial Sequence: Synthetic oligonucleotide"
  source: /note="RNA"
  source: /note="5' tri-ethylene glycol (TEG)"
  modified_base (1)..(1): bicyclic nucleic acid (BNA)
aucaaggaagauggcau

SEQ ID NO: 3953 - RNA, 16 nt, Artificial Sequence
  source: /note="Description of Artificial Sequence: Synthetic oligonucleotide"
  source: /note="RNA"
  source: /note="5' tri-ethylene glycol (TEG)"
  modified_base (1)..(1): bicyclic nucleic acid (BNA)
aucaaggaagauggca

SEQ ID NO: 3954 - RNA, 15 nt, Artificial Sequence
  source: /note="Description of Artificial Sequence: Synthetic oligonucleotide"
  source: /note="RNA"
  source: /note="5' tri-ethylene glycol (TEG)"
  modified_base (1)..(1): bicyclic nucleic acid (BNA)
aucaaggaagauggc

SEQ ID NO: 3955 - RNA, 14 nt, Artificial Sequence
  source: /note="Description of Artificial Sequence: Synthetic oligonucleotide"
  source: /note="RNA"
  source: /note="5' tri-ethylene glycol (TEG)"
  modified_base (1)..(1): bicyclic nucleic acid (BNA)
aucaaggaagaugg

SEQ ID NO: 3956 - RNA, 13 nt, Artificial Sequence
  source: /note="Description of Artificial Sequence: Synthetic oligonucleotide"
  source: /note="RNA"
  source: /note="5' tri-ethylene glycol (TEG)"
  modified_base (1)..(1): bicyclic nucleic acid (BNA)
aucaaggaagaug

SEQ ID NO: 3957 - RNA, 12 nt, Artificial Sequence
  source: /note="Description of Artificial Sequence: Synthetic oligonucleotide"
  source: /note="RNA"
  source: /note="5' tri-ethylene glycol (TEG)"
  modified_base (1)..(1): bicyclic nucleic acid (BNA)
aucaaggaagau

SEQ ID NO: 3958 - RNA, 11 nt, Artificial Sequence
  source: /note="Description of Artificial Sequence: Synthetic oligonucleotide"
  source: /note="RNA"
  source: /note="5' tri-ethylene glycol (TEG)"
  modified_base (1)..(1): bicyclic nucleic acid (BNA)
aucaaggaaga

SEQ ID NO: 3959 - RNA, 10 nt, Artificial Sequence
  source: /note="Description of Artificial Sequence: Synthetic oligonucleotide"
  source: /note="RNA"
  source: /note="5' tri-ethylene glycol (TEG)"
  modified_base (1)..(1): bicyclic nucleic acid (BNA)
aucaaggaag

SEQ ID NO: 3960 - RNA, 23 nt, Artificial Sequence
  source: /note="Description of Artificial Sequence: Synthetic oligonucleotide"
  source: /note="RNA"
  source: /note="5' tri-ethylene glycol (TEG)"
  modified_base (1)..(1): bicyclic nucleic acid (BNA)
ccagagcagguaccuccaacauc

SEQ ID NO: 3961 - RNA, 18 nt, Artificial Sequence
  source: /note="Description of Artificial Sequence: Synthetic oligonucleotide"
  source: /note="RNA"
  source: /note="5' tri-ethylene glycol (TEG)"
  modified_base (1)..(1): bicyclic nucleic acid (BNA)
ccagagcagguaccucca

SEQ ID NO: 3962 - RNA, 23 nt, Artificial Sequence
  source: /note="Description of Artificial Sequence: Synthetic oligonucleotide"
  source: /note="RNA"
  source: /note="5' tri-ethylene glycol (TEG)"
  modified_base (1)..(1): bicyclic nucleic acid (BNA)
ccucugugauuuuauaacuugau

SEQ ID NO: 3963 - DNA, 17 bp, Artificial Sequence
  source: /note="Description of Artificial Sequence: Synthetic oligonucleotide"
  source: /note="Description of Combined DNA/RNA Molecule: Synthetic oligonucleotide"
  source: /note="DNA/RNA"
  source: /note="5' tri-ethylene glycol (TEG)"
  modified_base (1)..(1): bicyclic nucleic acid (BNA)
tcacccaccaucacccu

SEQ ID NO: 3964 - DNA, 20 bp, Artificial Sequence
  source: /note="Description of Artificial Sequence: Synthetic oligonucleotide"
  source: /note="Description of Combined DNA/RNA Molecule: Synthetic oligonucleotide"
  source: /note="DNA/RNA"
  source: /note="5' tri-ethylene glycol (TEG)"
  modified_base (1)..(1): bicyclic nucleic acid (BNA)
tgauauccucaaggucaccc

SEQ ID NO: 3965 - RNA, 22 nt, Artificial Sequence
  source: /note="Description of Artificial Sequence: Synthetic oligonucleotide"
  source: /note="RNA"
  source: /note="5' tri-ethylene glycol (TEG)"
  modified_base (1)..(1): bicyclic nucleic acid (BNA)
cugcuugaugaucaucucguug

SEQ ID NO: 3966 - RNA, 18 nt, Artificial Sequence
  source: /note="Description of Artificial Sequence: Synthetic oligonucleotide"
  source: /note="RNA"
  source: /note="5' tri-ethylene glycol (TEG)"
  modified_base (1)..(1): bicyclic nucleic acid (BNA)
cugcuugaugaucaucuc

SEQ ID NO: 3967 - RNA, 19 nt, Artificial Sequence
  source: /note="Description of Artificial Sequence: Synthetic oligonucleotide"
  source: /note="RNA"
  source: /note="5' tri-ethylene glycol (TEG)"
  modified_base (1)..(1): bicyclic nucleic acid (BNA)
guuuccuuaguaaccacag

SEQ ID NO: 3968 - RNA, 17 nt, Artificial Sequence
  source: /note="Description of Artificial Sequence: Synthetic oligonucleotide"
  source: /note="RNA"
  source: /note="5' tri-ethylene glycol (TEG)"
  modified_base (1)..(1): bicyclic nucleic acid (BNA)
guuuccuuaguaaccac

SEQ ID NO: 3969 - DNA, 20 bp, Artificial Sequence
  source: /note="Description of Artificial Sequence: Synthetic oligonucleotide"
  source: /note="Description of Combined DNA/RNA Molecule: Synthetic oligonucleotide"
  source: /note="DNA/RNA"
  modified_base (1)..(1): bicyclic nucleic acid (BNA)
  source: /note="3' tri-ethylene glycol (TEG)"
tcaaggaagauggcauuucu

SEQ ID NO: 3970 - DNA, 22 bp, Artificial Sequence
  source: /note="Description of Artificial Sequence: Synthetic oligonucleotide"
  source: /note="Description of Combined DNA/RNA Molecule: Synthetic oligonucleotide"
  source: /note="DNA/RNA"
  modified_base (1)..(1): bicyclic nucleic acid (BNA)
  source: /note="3' tri-ethylene glycol (TEG)"
tcaaggaagauggcauuucuag

SEQ ID NO: 3971 - RNA, 18 nt, Artificial Sequence
  source: /note="Description of Artificial Sequence: Synthetic oligonucleotide"
  source: /note="RNA"
  modified_base (1)..(1): bicyclic nucleic acid (BNA)
  source: /note="3' tri-ethylene glycol (TEG)"
gguaaguucuguccaagc

SEQ ID NO: 3972 - RNA, 18 nt, Artificial Sequence
  source: /note="Description of Artificial Sequence: Synthetic oligonucleotide"
  source: /note="RNA"
  modified_base (1)..(1): bicyclic nucleic acid (BNA)
  source: /note="3' tri-ethylene glycol (TEG)"
guaaguucuguccaagcc

SEQ ID NO: 3973 - RNA, 18 nt, Artificial Sequence
  source: /note="Description of Artificial Sequence: Synthetic oligonucleotide"
  source: /note="RNA"
  modified_base (1)..(1): bicyclic nucleic acid (BNA)
  source: /note="3' tri-ethylene glycol (TEG)"
agucgguaaguucugucc

SEQ ID NO: 3974 - RNA, 18 nt, Artificial Sequence
  source: /note="Description of Artificial Sequence: Synthetic oligonucleotide"
  source: /note="RNA"
  modified_base (1)..(1): bicyclic nucleic acid (BNA)
  source: /note="3' tri-ethylene glycol (TEG)"
cuguccaagcccgguuga

SEQ ID NO: 3975 - DNA, 15 bp, Artificial Sequence
  source: /note="Description of Artificial Sequence: Synthetic oligonucleotide"
  source: /note="Description of Combined DNA/RNA Molecule: Synthetic oligonucleotide"
  source: /note="DNA/RNA"
  modified_base (1)..(1): bicyclic nucleic acid (BNA)
  source: /note="3' tri-ethylene glycol (TEG)"
taaguucuguccaag

SEQ ID NO: 3976 - DNA, 20 bp, Artificial Sequence
  source: /note="Description of Artificial Sequence: Synthetic oligonucleotide"
  source: /note="Description of Combined DNA/RNA Molecule: Synthetic oligonucleotide"
  source: /note="DNA/RNA"
  modified_base (1)..(1): bicyclic nucleic acid (BNA)
  source: /note="3' tri-ethylene glycol (TEG)"
tucuguccaagcccgguuga

SEQ ID NO: 3977 - DNA, 19 bp, Artificial Sequence
  source: /note="Description of Artificial Sequence: Synthetic oligonucleotide"
  source: /note="Description of Combined DNA/RNA Molecule: Synthetic oligonucleotide"
  source: /note="DNA/RNA"
  modified_base (1)..(1): bicyclic nucleic acid (BNA)
  source: /note="3' tri-ethylene glycol (TEG)"
tucuguccaagcccgguug

SEQ ID NO: 3978 - DNA, 18 bp, Artificial Sequence
  source: /note="Description of Artificial Sequence: Synthetic oligonucleotide"
  source: /note="Description of Combined DNA/RNA Molecule: Synthetic oligonucleotide"
  source: /note="DNA/RNA"
  modified_base (1)..(1): bicyclic nucleic acid (BNA)
  source: /note="3' tri-ethylene glycol (TEG)"
tucuguccaagcccgguu

SEQ ID NO: 3979 - DNA, 17 bp, Artificial Sequence
  source: /note="Description of Artificial Sequence: Synthetic oligonucleotide"
  source: /note="Description of Combined DNA/RNA Molecule: Synthetic oligonucleotide"
  source: /note="DNA/RNA"
  modified_base (1)..(1): bicyclic nucleic acid (BNA)
  source: /note="3' tri-ethylene glycol (TEG)"
tucuguccaagcccggu

SEQ ID NO: 3980 - DNA, 16 bp, Artificial Sequence
  source: /note="Description of Artificial Sequence: Synthetic oligonucleotide"
  source: /note="Description of Combined DNA/RNA Molecule: Synthetic oligonucleotide"
  source: /note="DNA/RNA"
  modified_base (1)..(1): bicyclic nucleic acid (BNA)
  source: /note="3' tri-ethylene glycol (TEG)"
tucuguccaagcccgg

SEQ ID NO: 3981 - DNA, 15 bp, Artificial Sequence
  source: /note="Description of Artificial Sequence: Synthetic oligonucleotide"
  source: /note="Description of Combined DNA/RNA Molecule: Synthetic oligonucleotide"
  source: /note="DNA/RNA"
  modified_base (1)..(1): bicyclic nucleic acid (BNA)
  source: /note="3' tri-ethylene glycol (TEG)"
tucuguccaagcccg

SEQ ID NO: 3982 - DNA, 14 bp, Artificial Sequence
  source: /note="Description of Artificial Sequence: Synthetic oligonucleotide"
  source: /note="Description of Combined DNA/RNA Molecule: Synthetic oligonucleotide"
  source: /note="DNA/RNA"
  modified_base (1)..(1): bicyclic nucleic acid (BNA)
  source: /note="3' tri-ethylene glycol (TEG)"
tucuguccaagccc

SEQ ID NO: 3983 - DNA, 13 bp, Artificial Sequence
  source: /note="Description of Artificial Sequence: Synthetic oligonucleotide"
  source: /note="Description of Combined DNA/RNA Molecule: Synthetic oligonucleotide"
  source: /note="DNA/RNA"
  modified_base (1)..(1): bicyclic nucleic acid (BNA)
  source: /note="3' tri-ethylene glycol (TEG)"
tucuguccaagcc

SEQ ID NO: 3984 - DNA, 12 bp, Artificial Sequence
  source: /note="Description of Artificial Sequence: Synthetic oligonucleotide"
  source: /note="Description of Combined DNA/RNA Molecule: Synthetic oligonucleotide"
  source: /note="DNA/RNA"
  modified_base (1)..(1): bicyclic nucleic acid (BNA)
  source: /note="3' tri-ethylene glycol (TEG)"
tucuguccaagc

SEQ ID NO: 3985 - DNA, 11 bp, Artificial Sequence
  source: /note="Description of Artificial Sequence: Synthetic oligonucleotide"
  source: /note="Description of Combined DNA/RNA Molecule: Synthetic oligonucleotide"
  source: /note="DNA/RNA"
  modified_base (1)..(1): bicyclic nucleic acid (BNA)
  source: /note="3' tri-ethylene glycol (TEG)"
tucuguccaag

SEQ ID NO: 3986 - DNA, 10 bp, Artificial Sequence
  source: /note="Description of Artificial Sequence: Synthetic oligonucleotide"
  source: /note="Description of Combined DNA/RNA Molecule: Synthetic oligonucleotide"
  source: /note="DNA/RNA"
  modified_base (1)..(1): bicyclic nucleic acid (BNA)
  source: /note="3' tri-ethylene glycol (TEG)"
tucuguccaa

SEQ ID NO: 3987 - DNA, 9 bp, Artificial Sequence
  source: /note="Description of Artificial Sequence: Synthetic oligonucleotide"
  source: /note="Description of Combined DNA/RNA Molecule: Synthetic oligonucleotide"
  source: /note="DNA/RNA"
  modified_base (1)..(1): bicyclic nucleic acid (BNA)
  source: /note="3' tri-ethylene glycol (TEG)"
tucugucca

SEQ ID NO: 3988 - DNA, 8 bp, Artificial Sequence
  source: /note="Description of Artificial Sequence: Synthetic oligonucleotide"
  source: /note="Description of Combined DNA/RNA Molecule: Synthetic oligonucleotide"
  source: /note="DNA/RNA"
  modified_base (1)..(1): bicyclic nucleic acid (BNA)
  source: /note="3' tri-ethylene glycol (TEG)"
tucugucc

SEQ ID NO: 3989 - DNA, 19 bp, Artificial Sequence
  source: /note="Description of Artificial Sequence: Synthetic oligonucleotide"
  source: /note="Description of Combined DNA/RNA Molecule: Synthetic oligonucleotide"
  source: /note="DNA/RNA"
  modified_base (1)..(1): bicyclic nucleic acid (BNA)
  source: /note="3' tri-ethylene glycol (TEG)"
tcuguccaagcccgguuga

SEQ ID NO: 3990 - DNA, 18 bp, Artificial Sequence
  source: /note="Description of Artificial Sequence: Synthetic oligonucleotide"
  source: /note="Description of Combined DNA/RNA Molecule: Synthetic oligonucleotide"
  source: /note="DNA/RNA"
  modified_base (1)..(1): bicyclic nucleic acid (BNA)
  source: /note="3' tri-ethylene glycol (TEG)"
tcuguccaagcccgguug

SEQ ID NO: 3991 - DNA, 17 bp, Artificial Sequence
  source: /note="Description of Artificial Sequence: Synthetic oligonucleotide"
  source: /note="Description of Combined DNA/RNA Molecule: Synthetic oligonucleotide"
  source: /note="DNA/RNA"
  modified_base (1)..(1): bicyclic nucleic acid (BNA)
  source: /note="3' tri-ethylene glycol (TEG)"
tcuguccaagcccgguu

SEQ ID NO: 3992 - DNA, 16 bp, Artificial Sequence
  source: /note="Description of Artificial Sequence: Synthetic oligonucleotide"
  source: /note="Description of Combined DNA/RNA Molecule: Synthetic oligonucleotide"
  source: /note="DNA/RNA"
  modified_base (1)..(1): bicyclic nucleic acid (BNA)
  source: /note="3' tri-ethylene glycol (TEG)"
tcuguccaagcccggu

SEQ ID NO: 3993 - DNA, 15 bp, Artificial Sequence
  source: /note="Description of Artificial Sequence: Synthetic oligonucleotide"
  source: /note="Description of Combined DNA/RNA Molecule: Synthetic oligonucleotide"
  source: /note="DNA/RNA"
  modified_base (1)..(1): bicyclic nucleic acid (BNA)
  source: /note="3' tri-ethylene glycol (TEG)"
tcuguccaagcccgg

SEQ ID NO: 3994 - DNA, 14 bp, Artificial Sequence
  source: /note="Description of Artificial Sequence: Synthetic oligonucleotide"
  source: /note="Description of Combined DNA/RNA Molecule: Synthetic oligonucleotide"
  source: /note="DNA/RNA"
  modified_base (1)..(1): bicyclic nucleic acid (BNA)
  source: /note="3' tri-ethylene glycol (TEG)"
tcuguccaagcccg

SEQ ID NO: 3995 - DNA, 13 bp, Artificial Sequence
  source: /note="Description of Artificial Sequence: Synthetic oligonucleotide"
  source: /note="Description of Combined DNA/RNA Molecule: Synthetic oligonucleotide"
  source: /note="DNA/RNA"
  modified_base (1)..(1): bicyclic nucleic acid (BNA)
  source: /note="3' tri-ethylene glycol (TEG)"
tcuguccaagccc

SEQ ID NO: 3996 - DNA, 12 bp, Artificial Sequence
  source: /note="Description of Artificial Sequence: Synthetic oligonucleotide"
  source: /note="Description of Combined DNA/RNA Molecule: Synthetic oligonucleotide"
  source: /note="DNA/RNA"
  modified_base (1)..(1): bicyclic nucleic acid (BNA)
  source: /note="3' tri-ethylene glycol (TEG)"
tcuguccaagcc

SEQ ID NO: 3997 - DNA, 11 bp, Artificial Sequence
  source: /note="Description of Artificial Sequence: Synthetic oligonucleotide"
  source: /note="Description of Combined DNA/RNA Molecule: Synthetic oligonucleotide"
  source: /note="DNA/RNA"
  modified_base (1)..(1): bicyclic nucleic acid (BNA)
  source: /note="3' tri-ethylene glycol (TEG)"
tcuguccaagc

SEQ ID NO: 3998 - DNA, 10 bp, Artificial Sequence
  source: /note="Description of Artificial Sequence: Synthetic oligonucleotide"
  source: /note="Description of Combined DNA/RNA Molecule: Synthetic oligonucleotide"
  source: /note="DNA/RNA"
  modified_base (1)..(1): bicyclic nucleic acid (BNA)
  source: /note="3' tri-ethylene glycol (TEG)"
tcuguccaag

SEQ ID NO: 3999 - DNA, 9 bp, Artificial Sequence
  source: /note="Description of Artificial Sequence: Synthetic oligonucleotide"
  source: /note="Description of Combined DNA/RNA Molecule: Synthetic oligonucleotide"
  source: /note="DNA/RNA"
  modified_base (1)..(1): bicyclic nucleic acid (BNA)
  source: /note="3' tri-ethylene glycol (TEG)"
tcuguccaa

SEQ ID NO: 4000 - DNA, 8 bp, Artificial Sequence
  source: /note="Description of Artificial Sequence: Synthetic oligonucleotide"
  source: /note="Description of Combined DNA/RNA Molecule: Synthetic oligonucleotide"
  source: /note="DNA/RNA"
  modified_base (1)..(1): bicyclic nucleic acid (BNA)
  source: /note="3' tri-ethylene glycol (TEG)"
tcugucca

SEQ ID NO: 4001 - RNA, 17 nt, Artificial Sequence
  source: /note="Description of Artificial Sequence: Synthetic oligonucleotide"
  source: /note="RNA"
  modified_base (1)..(1): bicyclic nucleic acid (BNA)
  source: /note="3' tri-ethylene glycol (TEG)"
cuguccaagcccgguug

SEQ ID NO: 4002 - RNA, 16 nt, Artificial Sequence
  source: /note="Description of Artificial Sequence: Synthetic oligonucleotide"
  source: /note="RNA"
  modified_base (1)..(1): bicyclic nucleic acid (BNA)
  source: /note="3' tri-ethylene glycol (TEG)"
cuguccaagcccgguu

SEQ ID NO: 4003 - RNA, 15 nt, Artificial Sequence
  source: /note="Description of Artificial Sequence: Synthetic oligonucleotide"
  source: /note="RNA"
  modified_base (1)..(1): bicyclic nucleic acid (BNA)
  source: /note="3' tri-ethylene glycol (TEG)"
cuguccaagcccggu

SEQ ID NO: 4004 - RNA, 14 nt, Artificial Sequence
  source: /note="Description of Artificial Sequence: Synthetic oligonucleotide"
  source: /note="RNA"
  modified_base (1)..(1): bicyclic nucleic acid (BNA)
  source: /note="3' tri-ethylene glycol (TEG)"
cuguccaagcccgg

SEQ ID NO: 4005 - RNA, 13 nt, Artificial Sequence
  source: /note="Description of Artificial Sequence: Synthetic oligonucleotide"
  source: /note="RNA"
  modified_base (1)..(1): bicyclic nucleic acid (BNA)
  source: /note="3' tri-ethylene glycol (TEG)"
cuguccaagcccg

SEQ ID NO: 4006 - RNA, 12 nt, Artificial Sequence
  source: /note="Description of Artificial Sequence: Synthetic oligonucleotide"
  source: /note="RNA"
  modified_base (1)..(1): bicyclic nucleic acid (BNA)
  source: /note="3' tri-ethylene glycol (TEG)"
cuguccaagccc

SEQ ID NO: 4007 - RNA, 11 nt, Artificial Sequence
  source: /note="Description of Artificial Sequence: Synthetic oligonucleotide"
  source: /note="RNA"
  modified_base (1)..(1): bicyclic nucleic acid (BNA)
  source: /note="3' tri-ethylene glycol (TEG)"
cuguccaagcc

SEQ ID NO: 4008 - RNA, 10 nt, Artificial Sequence
  source: /note="Description of Artificial Sequence: Synthetic oligonucleotide"
  source: /note="RNA"
  modified_base (1)..(1): bicyclic nucleic acid (BNA)
  source: /note="3' tri-ethylene glycol (TEG)"
cuguccaagc

SEQ ID NO: 4009 - RNA, 9 nt, Artificial Sequence
  source: /note="Description of Artificial Sequence: Synthetic oligonucleotide"
  source: /note="RNA"
  modified_base (1)..(1): bicyclic nucleic acid (BNA)
  source: /note="3' tri-ethylene glycol (TEG)"
cuguccaag

SEQ ID NO: 4010 - RNA, 8 nt, Artificial Sequence
  source: /note="Description of Artificial Sequence: Synthetic oligonucleotide"
  source: /note="RNA"
  modified_base (1)..(1): bicyclic nucleic acid (BNA)
  source: /note="3' tri-ethylene glycol (TEG)"
cuguccaa

SEQ ID NO: 4011 - RNA, 20 nt, Artificial Sequence
  source: /note="Description of Artificial Sequence: Synthetic oligonucleotide"
  source: /note="RNA"
  modified_base (1)..(1): bicyclic nucleic acid (BNA)
  source: /note="3' tri-ethylene glycol (TEG)"
guucuguccaagcccgguug

SEQ ID NO: 4012 - RNA, 19 nt, Artificial Sequence
  source: /note="Description of Artificial Sequence: Synthetic oligonucleotide"
  source: /note="RNA"
  modified_base (1)..(1): bicyclic nucleic acid (BNA)
  source: /note="3' tri-ethylene glycol (TEG)"
guucuguccaagcccgguu

SEQ ID NO: 4013 - RNA, 18 nt, Artificial Sequence
  source: /note="Description of Artificial Sequence: Synthetic oligonucleotide"
  source: /note="RNA"
  modified_base (1)..(1): bicyclic nucleic acid (BNA)
  source: /note="3' tri-ethylene glycol (TEG)"
guucuguccaagcccggu

SEQ ID NO: 4014 - RNA, 17 nt, Artificial Sequence
  source: /note="Description of Artificial Sequence: Synthetic oligonucleotide"
  source: /note="RNA"
  modified_base (1)..(1): bicyclic nucleic acid (BNA)
  source: /note="3' tri-ethylene glycol (TEG)"
guucuguccaagcccgg

SEQ ID NO: 4015 - RNA, 16 nt, Artificial Sequence
  source: /note="Description of Artificial Sequence: Synthetic oligonucleotide"
  source: /note="RNA"
  modified_base (1)..(1): bicyclic nucleic acid (BNA)
  source: /note="3' tri-ethylene glycol (TEG)"
guucuguccaagcccg

SEQ ID NO: 4016 - RNA, 15 nt, Artificial Sequence
  source: /note="Description of Artificial Sequence: Synthetic oligonucleotide"
  source: /note="RNA"
  modified_base (1)..(1): bicyclic nucleic acid (BNA)
  source: /note="3' tri-ethylene glycol (TEG)"
guucuguccaagccc

SEQ ID NO: 4017 - RNA, 14 nt, Artificial Sequence
  source: /note="Description of Artificial Sequence: Synthetic oligonucleotide"
  source: /note="RNA"
  modified_base (1)..(1): bicyclic nucleic acid (BNA)
  source: /note="3' tri-ethylene glycol (TEG)"
guucuguccaagcc

SEQ ID NO: 4018 - RNA, 13 nt, Artificial Sequence
  source: /note="Description of Artificial Sequence: Synthetic oligonucleotide"
  source: /note="RNA"
  modified_base (1)..(1): bicyclic nucleic acid (BNA)
  source: /note="3' tri-ethylene glycol (TEG)"
guucuguccaagc

SEQ ID NO: 4019 - RNA, 12 nt, Artificial Sequence
  source: /note="Description of Artificial Sequence: Synthetic oligonucleotide"
  source: /note="RNA"
  modified_base (1)..(1): bicyclic nucleic acid (BNA)
  source: /note="3' tri-ethylene glycol (TEG)"
guucuguccaag

SEQ ID NO: 4020 - RNA, 11 nt, Artificial Sequence
  source: /note="Description of Artificial Sequence: Synthetic oligonucleotide"
  source: /note="RNA"
  modified_base (1)..(1): bicyclic nucleic acid (BNA)
  source: /note="3' tri-ethylene glycol (TEG)"
guucuguccaa

SEQ ID NO: 4021 - RNA, 10 nt, Artificial Sequence
  source: /note="Description of Artificial Sequence: Synthetic oligonucleotide"
  source: /note="RNA"
  modified_base (1)..(1): bicyclic nucleic acid (BNA)
  source: /note="3' tri-ethylene glycol (TEG)"
guucugucca

SEQ ID NO: 4022 - RNA, 9 nt, Artificial Sequence
  source: /note="Description of Artificial Sequence: Synthetic oligonucleotide"
  source: /note="RNA"
  modified_base (1)..(1): bicyclic nucleic acid (BNA)
  source: /note="3' tri-ethylene glycol (TEG)"
guucugucc

SEQ ID NO: 4023 - RNA, 8 nt, Artificial Sequence
  source: /note="Description of Artificial Sequence: Synthetic oligonucleotide"
  source: /note="RNA"
  modified_base (1)..(1): bicyclic nucleic acid (BNA)
  source: /note="3' tri-ethylene glycol (TEG)"
guucuguc

SEQ ID NO: 4024 - RNA, 20 nt, Artificial Sequence
  source: /note="Description of Artificial Sequence: Synthetic oligonucleotide"
  source: /note="RNA"
  modified_base (1)..(1): bicyclic nucleic acid (BNA)
  source: /note="3' tri-ethylene glycol (TEG)"
aguucuguccaagcccgguu

SEQ ID NO: 4025 - RNA, 19 nt, Artificial Sequence
  source: /note="Description of Artificial Sequence: Synthetic oligonucleotide"
  source: /note="RNA"
  modified_base (1)..(1): bicyclic nucleic acid (BNA)
  source: /note="3' tri-ethylene glycol (TEG)"
aguucuguccaagcccggu

SEQ ID NO: 4026 - RNA, 18 nt, Artificial Sequence
  source: /note="Description of Artificial Sequence: Synthetic oligonucleotide"
  source: /note="RNA"
  modified_base (1)..(1): bicyclic nucleic acid (BNA)
  source: /note="3' tri-ethylene glycol (TEG)"
aguucuguccaagcccgg

SEQ ID NO: 4027 - RNA, 17 nt, Artificial Sequence
  source: /note="Description of Artificial Sequence: Synthetic oligonucleotide"
  source: /note="RNA"
  modified_base (1)..(1): bicyclic nucleic acid (BNA)
  source: /note="3' tri-ethylene glycol (TEG)"
aguucuguccaagcccg

SEQ ID NO: 4028 - RNA, 16 nt, Artificial Sequence
  source: /note="Description of Artificial Sequence: Synthetic oligonucleotide"
  source: /note="RNA"
  modified_base (1)..(1): bicyclic nucleic acid (BNA)
  source: /note="3' tri-ethylene glycol (TEG)"
aguucuguccaagccc

SEQ ID NO: 4029 - RNA, 15 nt, Artificial Sequence
  source: /note="Description of Artificial Sequence: Synthetic oligonucleotide"
  source: /note="RNA"
  modified_base (1)..(1): bicyclic nucleic acid (BNA)
  source: /note="3' tri-ethylene glycol (TEG)"
aguucuguccaagcc

SEQ ID NO: 4030 - RNA, 14 nt, Artificial Sequence
  source: /note="Description of Artificial Sequence: Synthetic oligonucleotide"
  source: /note="RNA"
  modified_base (1)..(1): bicyclic nucleic acid (BNA)
  source: /note="3' tri-ethylene glycol (TEG)"
aguucuguccaagc

SEQ ID NO: 4031 - RNA, 13 nt, Artificial Sequence
  source: /note="Description of Artificial Sequence: Synthetic oligonucleotide"
  source: /note="RNA"
  modified_base (1)..(1): bicyclic nucleic acid (BNA)
  source: /note="3' tri-ethylene glycol (TEG)"
aguucuguccaag

SEQ ID NO: 4032 - RNA, 12 nt, Artificial Sequence
  source: /note="Description of Artificial Sequence: Synthetic oligonucleotide"
  source: /note="RNA"
  modified_base (1)..(1): bicyclic nucleic acid (BNA)
  source: /note="3' tri-ethylene glycol (TEG)"
aguucuguccaa

SEQ ID NO: 4033 - RNA, 11 nt, Artificial Sequence
  source: /note="Description of Artificial Sequence: Synthetic oligonucleotide"
  source: /note="RNA"
  modified_base (1)..(1): bicyclic nucleic acid (BNA)
  source: /note="3' tri-ethylene glycol (TEG)"
aguucugucca

SEQ ID NO: 4034 - RNA, 10 nt, Artificial Sequence
  source: /note="Description of Artificial Sequence: Synthetic oligonucleotide"
  source: /note="RNA"
  modified_base (1)..(1): bicyclic nucleic acid (BNA)
  source: /note="3' tri-ethylene glycol (TEG)"
aguucugucc

SEQ ID NO: 4035 - RNA, 9 nt, Artificial Sequence
  source: /note="Description of Artificial Sequence: Synthetic oligonucleotide"
  source: /note="RNA"
  modified_base (1)..(1): bicyclic nucleic acid (BNA)
  source: /note="3' tri-ethylene glycol (TEG)"
aguucuguc

SEQ ID NO: 4036 - RNA, 8 nt, Artificial Sequence
  source: /note="Description of Artificial Sequence: Synthetic oligonucleotide"
  source: /note="RNA"
  modified_base (1)..(1): bicyclic nucleic acid (BNA)
  source: /note="3' tri-ethylene glycol (TEG)"
aguucugu

SEQ ID NO: 4037 - RNA, 20 nt, Artificial Sequence
  source: /note="Description of Artificial Sequence: Synthetic oligonucleotide"
  source: /note="RNA"
  modified_base (1)..(1): bicyclic nucleic acid (BNA)
  source: /note="3' tri-ethylene glycol (TEG)"
aaguucuguccaagcccggu

SEQ ID NO: 4038 - RNA, 19 nt, Artificial Sequence
  source: /note="Description of Artificial Sequence: Synthetic oligonucleotide"
  source: /note="RNA"
  modified_base (1)..(1): bicyclic nucleic acid (BNA)
  source: /note="3' tri-ethylene glycol (TEG)"
aaguucuguccaagcccgg

SEQ ID NO: 4039 - RNA, 18 nt, Artificial Sequence
  source: /note="Description of Artificial Sequence: Synthetic oligonucleotide"
  source: /note="RNA"
  modified_base (1)..(1): bicyclic nucleic acid (BNA)
  source: /note="3' tri-ethylene glycol (TEG)"
aaguucuguccaagcccg

SEQ ID NO: 4040 - RNA, 17 nt, Artificial Sequence
  source: /note="Description of Artificial Sequence: Synthetic oligonucleotide"
  source: /note="RNA"
  modified_base (1)..(1): bicyclic nucleic acid (BNA)
  source: /note="3' tri-ethylene glycol (TEG)"
aaguucuguccaagccc

SEQ ID NO: 4041 - RNA, 16 nt, Artificial Sequence
  source: /note="Description of Artificial Sequence: Synthetic oligonucleotide"
  source: /note="RNA"
  modified_base (1)..(1): bicyclic nucleic acid (BNA)
  source: /note="3' tri-ethylene glycol (TEG)"
aaguucuguccaagcc

SEQ ID NO: 4042 - RNA, 15 nt, Artificial Sequence
  source: /note="Description of Artificial Sequence: Synthetic oligonucleotide"
  source: /note="RNA"
  modified_base (1)..(1): bicyclic nucleic acid (BNA)
  source: /note="3' tri-ethylene glycol (TEG)"
aaguucuguccaagc

SEQ ID NO: 4043 - RNA, 14 nt, Artificial Sequence
  source: /note="Description of Artificial Sequence: Synthetic oligonucleotide"
  source: /note="RNA"
  modified_base (1)..(1): bicyclic nucleic acid (BNA)
  source: /note="3' tri-ethylene glycol (TEG)"
aaguucuguccaag

SEQ ID NO: 4044 - RNA, 13 nt, Artificial Sequence
  source: /note="Description of Artificial Sequence: Synthetic oligonucleotide"
  source: /note="RNA"
  modified_base (1)..(1): bicyclic nucleic acid (BNA)
  source: /note="3' tri-ethylene glycol (TEG)"
aaguucuguccaa

SEQ ID NO: 4045 - RNA, 12 nt, Artificial Sequence
  source: /note="Description of Artificial Sequence: Synthetic oligonucleotide"
  source: /note="RNA"
  modified_base (1)..(1): bicyclic nucleic acid (BNA)
  source: /note="3' tri-ethylene glycol (TEG)"
aaguucugucca

SEQ ID NO: 4046 - RNA, 11 nt, Artificial Sequence
  source: /note="Description of Artificial Sequence: Synthetic oligonucleotide"
  source: /note="RNA"
  modified_base (1)..(1): bicyclic nucleic acid (BNA)
  source: /note="3' tri-ethylene glycol (TEG)"
aaguucugucc

SEQ ID NO: 4047 - RNA, 10 nt, Artificial Sequence
  source: /note="Description of Artificial Sequence: Synthetic oligonucleotide"
  source: /note="RNA"
  modified_base (1)..(1): bicyclic nucleic acid (BNA)
  source: /note="3' tri-ethylene glycol (TEG)"
aaguucuguc

SEQ ID NO: 4048 - RNA, 9 nt, Artificial Sequence
  source: /note="Description of Artificial Sequence: Synthetic oligonucleotide"
  source: /note="RNA"
  modified_base (1)..(1): bicyclic nucleic acid (BNA)
  source: /note="3' tri-ethylene glycol (TEG)"
aaguucugu

SEQ ID NO: 4049 - RNA, 8 nt, Artificial Sequence
  source: /note="Description of Artificial Sequence: Synthetic oligonucleotide"
  source: /note="RNA"
  modified_base (1)..(1): bicyclic nucleic acid (BNA)
  source: /note="3' tri-ethylene glycol (TEG)"
aaguucug

SEQ ID NO: 4050 - DNA, 20 bp, Artificial Sequence
  source: /note="Description of Artificial Sequence: Synthetic oligonucleotide"
  source: /note="Description of Combined DNA/RNA Molecule: Synthetic oligonucleotide"
  source: /note="DNA/RNA"
  modified_base (1)..(1): bicyclic nucleic acid (BNA)
  source: /note="3' tri-ethylene glycol (TEG)"
taaguucuguccaagcccgg

SEQ ID NO: 4051 - DNA, 19 bp, Artificial Sequence
  source: /note="Description of Artificial Sequence: Synthetic oligonucleotide"
  source: /note="Description of Combined DNA/RNA Molecule: Synthetic oligonucleotide"
  source: /note="DNA/RNA"
  modified_base (1)..(1): bicyclic nucleic acid (BNA)
  source: /note="3' tri-ethylene glycol (TEG)"
taaguucuguccaagcccg

SEQ ID NO: 4052 - DNA, 18 bp, Artificial Sequence
  source: /note="Description of Artificial Sequence: Synthetic oligonucleotide"
  source: /note="Description of Combined DNA/RNA Molecule: Synthetic oligonucleotide"
  source: /note="DNA/RNA"
  modified_base (1)..(1): bicyclic nucleic acid (BNA)
  source: /note="3' tri-ethylene glycol (TEG)"
taaguucuguccaagccc

SEQ ID NO: 4053 - DNA, 17 bp, Artificial Sequence
  source: /note="Description of Artificial Sequence: Synthetic oligonucleotide"
  source: /note="Description of Combined DNA/RNA Molecule: Synthetic oligonucleotide"
  source: /note="DNA/RNA"
  modified_base (1)..(1): bicyclic nucleic acid (BNA)
  source: /note="3' tri-ethylene glycol (TEG)"
taaguucuguccaagcc

SEQ ID NO: 4054 - DNA, 16 bp, Artificial Sequence
  source: /note="Description of Artificial Sequence: Synthetic oligonucleotide"
  source: /note="Description of Combined DNA/RNA Molecule: Synthetic oligonucleotide"
  source: /note="DNA/RNA"
  modified_base (1)..(1): bicyclic nucleic acid (BNA)
  source: /note="3' tri-ethylene glycol (TEG)"
taaguucuguccaagc

SEQ ID NO: 4055 - DNA, 14 bp, Artificial Sequence
  source: /note="Description of Artificial Sequence: Synthetic oligonucleotide"
  source: /note="Description of Combined DNA/RNA Molecule: Synthetic oligonucleotide"
  source: /note="DNA/RNA"
  modified_base (1)..(1): bicyclic nucleic acid (BNA)
  source: /note="3' tri-ethylene glycol (TEG)"
taaguucuguccaa

SEQ ID NO: 4056 - DNA, 13 bp, Artificial Sequence
  source: /note="Description of Artificial Sequence: Synthetic oligonucleotide"
  source: /note="Description of Combined DNA/RNA Molecule: Synthetic oligonucleotide"
  source: /note="DNA/RNA"
  modified_base (1)..(1): bicyclic nucleic acid (BNA)
  source: /note="3' tri-ethylene glycol (TEG)"
taaguucugucca

SEQ ID NO: 4057 - DNA, 12 bp, Artificial Sequence
  source: /note="Description of Artificial Sequence: Synthetic oligonucleotide"
  source: /note="Description of Combined DNA/RNA Molecule: Synthetic oligonucleotide"
  source: /note="DNA/RNA"
  modified_base (1)..(1): bicyclic nucleic acid (BNA)
  source: /note="3' tri-ethylene glycol (TEG)"
taaguucugucc

SEQ ID NO: 4058 - DNA, 11 bp, Artificial Sequence
  source: /note="Description of Artificial Sequence: Synthetic oligonucleotide"
  source: /note="Description of Combined DNA/RNA Molecule: Synthetic oligonucleotide"
  source: /note="DNA/RNA"
  modified_base (1)..(1): bicyclic nucleic acid (BNA)
  source: /note="3' tri-ethylene glycol (TEG)"
taaguucuguc

SEQ ID NO: 4059 - DNA, 10 bp, Artificial Sequence
  source: /note="Description of Artificial Sequence: Synthetic oligonucleotide"
  source: /note="Description of Combined DNA/RNA Molecule: Synthetic oligonucleotide"
  source: /note="DNA/RNA"
  modified_base (1)..(1): bicyclic nucleic acid (BNA)
  source: /note="3' tri-ethylene glycol (TEG)"
taaguucugu

SEQ ID NO: 4060 - DNA, 9 bp, Artificial Sequence
  source: /note="Description of Artificial Sequence: Synthetic oligonucleotide"
  source: /note="Description of Combined DNA/RNA Molecule: Synthetic oligonucleotide"
  source: /note="DNA/RNA"
  modified_base (1)..(1): bicyclic nucleic acid (BNA)
  source: /note="3' tri-ethylene glycol (TEG)"
taaguucug

SEQ ID NO: 4061 - DNA, 8 bp, Artificial Sequence
  source: /note="Description of Artificial Sequence: Synthetic oligonucleotide"
  source: /note="Description of Combined DNA/RNA Molecule: Synthetic oligonucleotide"
  source: /note="DNA/RNA"
  modified_base (1)..(1): bicyclic nucleic acid (BNA)
  source: /note="3' tri-ethylene glycol (TEG)"
taaguucu

SEQ ID NO: 4062 - RNA, 20 nt, Artificial Sequence
  source: /note="Description of Artificial Sequence: Synthetic oligonucleotide"
  source: /note="RNA"
  modified_base (1)..(1): bicyclic nucleic acid (BNA)
  source: /note="3' tri-ethylene glycol (TEG)"
guaaguucuguccaagcccg

SEQ ID NO: 4063 - RNA, 19 nt, Artificial Sequence
  source: /note="Description of Artificial Sequence: Synthetic oligonucleotide"
  source: /note="RNA"
  modified_base (1)..(1): bicyclic nucleic acid (BNA)
  source: /note="3' tri-ethylene glycol (TEG)"
guaaguucuguccaagccc

SEQ ID NO: 4064 - RNA, 17 nt, Artificial Sequence
  source: /note="Description of Artificial Sequence: Synthetic oligonucleotide"
  source: /note="RNA"
  modified_base (1)..(1): bicyclic nucleic acid (BNA)
  source: /note="3' tri-ethylene glycol (TEG)"
guaaguucuguccaagc

SEQ ID NO: 4065 - RNA, 16 nt, Artificial Sequence
  source: /note="Description of Artificial Sequence: Synthetic oligonucleotide"
  source: /note="RNA"
  modified_base (1)..(1): bicyclic nucleic acid (BNA)
  source: /note="3' tri-ethylene glycol (TEG)"
guaaguucuguccaag

SEQ ID NO: 4066 - RNA, 15 nt, Artificial Sequence
  source: /note="Description of Artificial Sequence: Synthetic oligonucleotide"
  source: /note="RNA"
  modified_base (1)..(1): bicyclic nucleic acid (BNA)
  source: /note="3' tri-ethylene glycol (TEG)"
guaaguucuguccaa

SEQ ID NO: 4067 - RNA, 14 nt, Artificial Sequence
  source: /note="Description of Artificial Sequence: Synthetic oligonucleotide"
  source: /note="RNA"
  modified_base (1)..(1): bicyclic nucleic acid (BNA)
  source: /note="3' tri-ethylene glycol (TEG)"
guaaguucugucca

SEQ ID NO: 4068 - RNA, 13 nt, Artificial Sequence
  source: /note="Description of Artificial Sequence: Synthetic oligonucleotide"
  source: /note="RNA"
  modified_base (1)..(1): bicyclic nucleic acid (BNA)
  source: /note="3' tri-ethylene glycol (TEG)"
guaaguucugucc

SEQ ID NO: 4069 - RNA, 12 nt, Artificial Sequence
  source: /note="Description of Artificial Sequence: Synthetic oligonucleotide"
  source: /note="RNA"
  modified_base (1)..(1): bicyclic nucleic acid (BNA)
  source: /note="3' tri-ethylene glycol (TEG)"
guaaguucuguc

SEQ ID NO: 4070 - RNA, 11 nt, Artificial Sequence
  source: /note="Description of Artificial Sequence: Synthetic oligonucleotide"
  source: /note="RNA"
  modified_base (1)..(1): bicyclic nucleic acid (BNA)
  source: /note="3' tri-ethylene glycol (TEG)"
guaaguucugu

SEQ ID NO: 4071 - RNA, 10 nt, Artificial Sequence
  source: /note="Description of Artificial Sequence: Synthetic oligonucleotide"
  source: /note="RNA"
  modified_base (1)..(1): bicyclic nucleic acid (BNA)
  source: /note="3' tri-ethylene glycol (TEG)"
guaaguucug

SEQ ID NO: 4072 - RNA, 9 nt, Artificial Sequence
  source: /note="Description of Artificial Sequence: Synthetic oligonucleotide"
  source: /note="RNA"
  modified_base (1)..(1): bicyclic nucleic acid (BNA)
  source: /note="3' tri-ethylene glycol (TEG)"
guaaguucu

SEQ ID NO: 4073 - RNA, 8 nt, Artificial Sequence
  source: /note="Description of Artificial Sequence: Synthetic oligonucleotide"
  source: /note="RNA"
  modified_base (1)..(1): bicyclic nucleic acid (BNA)
  source: /note="3' tri-ethylene glycol (TEG)"
guaaguuc

SEQ ID NO: 4074 - RNA, 20 nt, Artificial Sequence
  source: /note="Description of Artificial Sequence: Synthetic oligonucleotide"
  source: /note="RNA"
  modified_base (1)..(1): bicyclic nucleic acid (BNA)
  source: /note="3' tri-ethylene glycol (TEG)"
gguaaguucuguccaagccc

SEQ ID NO: 4075 - RNA, 19 nt, Artificial Sequence
  source: /note="Description of Artificial Sequence: Synthetic oligonucleotide"
  source: /note="RNA"
  modified_base (1)..(1): bicyclic nucleic acid (BNA)
  source: /note="3' tri-ethylene glycol (TEG)"
gguaaguucuguccaagcc

SEQ ID NO: 4076 - RNA, 17 nt, Artificial Sequence
  source: /note="Description of Artificial Sequence: Synthetic oligonucleotide"
  source: /note="RNA"
  modified_base (1)..(1): bicyclic nucleic acid (BNA)
  source: /note="3' tri-ethylene glycol (TEG)"
gguaaguucuguccaag

SEQ ID NO: 4077 - RNA, 16 nt, Artificial Sequence
  source: /note="Description of Artificial Sequence: Synthetic oligonucleotide"
  source: /note="RNA"
  modified_base (1)..(1): bicyclic nucleic acid (BNA)
  source: /note="3' tri-ethylene glycol (TEG)"
gguaaguucuguccaa

SEQ ID NO: 4078 - RNA, 15 nt, Artificial Sequence
  source: /note="Description of Artificial Sequence: Synthetic oligonucleotide"
  source: /note="RNA"
  modified_base (1)..(1): bicyclic nucleic acid (BNA)
  source: /note="3' tri-ethylene glycol (TEG)"
gguaaguucugucca

SEQ ID NO: 4079 - RNA, 14 nt, Artificial Sequence
  source: /note="Description of Artificial Sequence: Synthetic oligonucleotide"
  source: /note="RNA"
  modified_base (1)..(1): bicyclic nucleic acid (BNA)
  source: /note="3' tri-ethylene glycol (TEG)"
gguaaguucugucc

SEQ ID NO: 4080 - RNA, 13 nt, Artificial Sequence
  source: /note="Description of Artificial Sequence: Synthetic oligonucleotide"
  source: /note="RNA"
  modified_base (1)..(1): bicyclic nucleic acid (BNA)
  source: /note="3' tri-ethylene glycol (TEG)"
gguaaguucuguc

SEQ ID NO: 4081 - RNA, 12 nt, Artificial Sequence
  source: /note="Description of Artificial Sequence: Synthetic oligonucleotide"
  source: /note="RNA"
  modified_base (1)..(1): bicyclic nucleic acid (BNA)
  source: /note="3' tri-ethylene glycol (TEG)"
gguaaguucugu

SEQ ID NO: 4082 - RNA, 11 nt, Artificial Sequence
  source: /note="Description of Artificial Sequence: Synthetic oligonucleotide"
  source: /note="RNA"
  modified_base (1)..(1): bicyclic nucleic acid (BNA)
  source: /note="3' tri-ethylene glycol (TEG)"
gguaaguucug

SEQ ID NO: 4083 - RNA, 10 nt, Artificial Sequence
  source: /note="Description of Artificial Sequence: Synthetic oligonucleotide"
  source: /note="RNA"
  modified_base (1)..(1): bicyclic nucleic acid (BNA)
  source: /note="3' tri-ethylene glycol (TEG)"
gguaaguucu

SEQ ID NO: 4084 - RNA, 9 nt, Artificial Sequence
  source: /note="Description of Artificial Sequence: Synthetic oligonucleotide"
  source: /note="RNA"
  modified_base (1)..(1): bicyclic nucleic acid (BNA)
  source: /note="3' tri-ethylene glycol (TEG)"
gguaaguuc

SEQ ID NO: 4085 - RNA, 8 nt, Artificial Sequence
  source: /note="Description of Artificial Sequence: Synthetic oligonucleotide"
  source: /note="RNA"
  modified_base (1)..(1): bicyclic nucleic acid (BNA)
  source: /note="3' tri-ethylene glycol (TEG)"
gguaaguu

SEQ ID NO: 4086 - RNA, 20 nt, Artificial Sequence
  source: /note="Description of Artificial Sequence: Synthetic oligonucleotide"
  source: /note="RNA"
  modified_base (1)..(1): bicyclic nucleic acid (BNA)
  source: /note="3' tri-ethylene glycol (TEG)"
cgguaaguucuguccaagcc

SEQ ID NO: 4087 - RNA, 19 nt, Artificial Sequence
  source: /note="Description of Artificial Sequence: Synthetic oligonucleotide"
  source: /note="RNA"
  modified_base (1)..(1): bicyclic nucleic acid (BNA)
  source: /note="3' tri-ethylene glycol (TEG)"
cgguaaguucuguccaagc

SEQ ID NO: 4088 - RNA, 18 nt, Artificial Sequence
  source: /note="Description of Artificial Sequence: Synthetic oligonucleotide"
  source: /note="RNA"
  modified_base (1)..(1): bicyclic nucleic acid (BNA)
  source: /note="3' tri-ethylene glycol (TEG)"
cgguaaguucuguccaag

SEQ ID NO: 4089 - RNA, 17 nt, Artificial Sequence
  source: /note="Description of Artificial Sequence: Synthetic oligonucleotide"
  source: /note="RNA"
  modified_base (1)..(1): bicyclic nucleic acid (BNA)
  source: /note="3' tri-ethylene glycol (TEG)"
cgguaaguucuguccaa

SEQ ID NO: 4090 - RNA, 16 nt, Artificial Sequence
  source: /note="Description of Artificial Sequence: Synthetic oligonucleotide"
  source: /note="RNA"
  modified_base (1)..(1): bicyclic nucleic acid (BNA)
  source: /note="3' tri-ethylene glycol (TEG)"
cgguaaguucugucca

SEQ ID NO: 4091 - RNA, 15 nt, Artificial Sequence
  source: /note="Description of Artificial Sequence: Synthetic oligonucleotide"
  source: /note="RNA"
  modified_base (1)..(1): bicyclic nucleic acid (BNA)
  source: /note="3' tri-ethylene glycol (TEG)"
cgguaaguucugucc

SEQ ID NO: 4092 - RNA, 14 nt, Artificial Sequence
  source: /note="Description of Artificial Sequence: Synthetic oligonucleotide"
  source: /note="RNA"
  modified_base (1)..(1): bicyclic nucleic acid (BNA)
  source: /note="3' tri-ethylene glycol (TEG)"
cgguaaguucuguc

SEQ ID NO: 4093 - RNA, 13 nt, Artificial Sequence
  source: /note="Description of Artificial Sequence: Synthetic oligonucleotide"
  source: /note="RNA"
  modified_base (1)..(1): bicyclic nucleic acid (BNA)
  source: /note="3' tri-ethylene glycol (TEG)"
cgguaaguucugu

SEQ ID NO: 4094 - RNA, 12 nt, Artificial Sequence
  source: /note="Description of Artificial Sequence: Synthetic oligonucleotide"
  source: /note="RNA"
  modified_base (1)..(1): bicyclic nucleic acid (BNA)
  source: /note="3' tri-ethylene glycol (TEG)"
cgguaaguucug

SEQ ID NO: 4095 - RNA, 11 nt, Artificial Sequence
  source: /note="Description of Artificial Sequence: Synthetic oligonucleotide"
  source: /note="RNA"
  modified_base (1)..(1): bicyclic nucleic acid (BNA)
  source: /note="3' tri-ethylene glycol (TEG)"
cgguaaguucu

SEQ ID NO: 4096 - RNA, 10 nt, Artificial Sequence
  source: /note="Description of Artificial Sequence: Synthetic oligonucleotide"
  source: /note="RNA"
  modified_base (1)..(1): bicyclic nucleic acid (BNA)
  source: /note="3' tri-ethylene glycol (TEG)"
cgguaaguuc

SEQ ID NO: 4097 - RNA, 9 nt, Artificial Sequence
  source: /note="Description of Artificial Sequence: Synthetic oligonucleotide"
  source: /note="RNA"
  modified_base (1)..(1): bicyclic nucleic acid (BNA)
  source: /note="3' tri-ethylene glycol (TEG)"
cgguaaguu

SEQ ID NO: 4098 - RNA, 8 nt, Artificial Sequence
  source: /note="Description of Artificial Sequence: Synthetic oligonucleotide"
  source: /note="RNA"
  modified_base (1)..(1): bicyclic nucleic acid (BNA)
  source: /note="3' tri-ethylene glycol (TEG)"
cgguaagu

SEQ ID NO: 4099 - DNA, 20 bp, Artificial Sequence
  source: /note="Description of Artificial Sequence: Synthetic oligonucleotide"
  source: /note="Description of Combined DNA/RNA Molecule: Synthetic oligonucleotide"
  source: /note="DNA/RNA"
  modified_base (1)..(1): bicyclic nucleic acid (BNA)
  source: /note="3' tri-ethylene glycol (TEG)"
tcgguaaguucuguccaagc

SEQ ID NO: 4100 - DNA, 19 bp, Artificial Sequence
  source: /note="Description of Artificial Sequence: Synthetic oligonucleotide"
  source: /note="Description of Combined DNA/RNA Molecule: Synthetic oligonucleotide"
  source: /note="DNA/RNA"
  modified_base (1)..(1): bicyclic nucleic acid (BNA)
  source: /note="3' tri-ethylene glycol (TEG)"
tcgguaaguucuguccaag

SEQ ID NO: 4101 - DNA, 18 bp, Artificial Sequence
  source: /note="Description of Artificial Sequence: Synthetic oligonucleotide"
  source: /note="Description of Combined DNA/RNA Molecule: Synthetic oligonucleotide"
  source: /note="DNA/RNA"
  modified_base (1)..(1): bicyclic nucleic acid (BNA)
  source: /note="3' tri-ethylene glycol (TEG)"
tcgguaaguucuguccaa

SEQ ID NO: 4102 - DNA, 17 bp, Artificial Sequence
  source: /note="Description of Artificial Sequence: Synthetic oligonucleotide"
  source: /note="Description of Combined DNA/RNA Molecule: Synthetic oligonucleotide"
  source: /note="DNA/RNA"
  modified_base (1)..(1): bicyclic nucleic acid (BNA)
  source: /note="3' tri-ethylene glycol (TEG)"
tcgguaaguucugucca

SEQ ID NO: 4103 - DNA, 16 bp, Artificial Sequence
  source: /note="Description of Artificial Sequence: Synthetic oligonucleotide"
  source: /note="Description of Combined DNA/RNA Molecule: Synthetic oligonucleotide"
  source: /note="DNA/RNA"
  modified_base (1)..(1): bicyclic nucleic acid (BNA)
  source: /note="3' tri-ethylene glycol (TEG)"
tcgguaaguucugucc

SEQ ID NO: 4104 - DNA, 15 bp, Artificial Sequence
  source: /note="Description of Artificial Sequence: Synthetic oligonucleotide"
  source: /note="Description of Combined DNA/RNA Molecule: Synthetic oligonucleotide"
  source: /note="DNA/RNA"
  modified_base (1)..(1): bicyclic nucleic acid (BNA)
  source: /note="3' tri-ethylene glycol (TEG)"
tcgguaaguucuguc

SEQ ID NO: 4105 - DNA, 14 bp, Artificial Sequence
  source: /note="Description of Artificial Sequence: Synthetic oligonucleotide"
  source: /note="Description of Combined DNA/RNA Molecule: Synthetic oligonucleotide"
  source: /note="DNA/RNA"
  modified_base (1)..(1): bicyclic nucleic acid (BNA)
  source: /note="3' tri-ethylene glycol (TEG)"
tcgguaaguucugu

SEQ ID NO: 4106 - DNA, 13 bp, Artificial Sequence
  source: /note="Description of Artificial Sequence: Synthetic oligonucleotide"
  source: /note="Description of Combined DNA/RNA Molecule: Synthetic oligonucleotide"
  source: /note="DNA/RNA"
  modified_base (1)..(1): bicyclic nucleic acid (BNA)
  source: /note="3' tri-ethylene glycol (TEG)"
tcgguaaguucug

SEQ ID NO: 4107 - DNA, 12 bp, Artificial Sequence
  source: /note="Description of Artificial Sequence: Synthetic oligonucleotide"
  source: /note="Description of Combined DNA/RNA Molecule: Synthetic oligonucleotide"
  source: /note="DNA/RNA"
  modified_base (1)..(1): bicyclic nucleic acid (BNA)
  source: /note="3' tri-ethylene glycol (TEG)"
tcgguaaguucu

SEQ ID NO: 4108 - DNA, 11 bp, Artificial Sequence
  source: /note="Description of Artificial Sequence: Synthetic oligonucleotide"
  source: /note="Description of Combined DNA/RNA Molecule: Synthetic oligonucleotide"
  source: /note="DNA/RNA"
  modified_base (1)..(1): bicyclic nucleic acid (BNA)
  source: /note="3' tri-ethylene glycol (TEG)"
tcgguaaguuc

SEQ ID NO: 4109 - DNA, 10 bp, Artificial Sequence
  source: /note="Description of Artificial Sequence: Synthetic oligonucleotide"
  source: /note="Description of Combined DNA/RNA Molecule: Synthetic oligonucleotide"
  source: /note="DNA/RNA"
  modified_base (1)..(1): bicyclic nucleic acid (BNA)
  source: /note="3' tri-ethylene glycol (TEG)"
tcgguaaguu

SEQ ID NO: 4110 - DNA, 9 bp, Artificial Sequence
  source: /note="Description of Artificial Sequence: Synthetic oligonucleotide"
  source: /note="Description of Combined DNA/RNA Molecule: Synthetic oligonucleotide"
  source: /note="DNA/RNA"
  modified_base (1)..(1): bicyclic nucleic acid (BNA)
  source: /note="3' tri-ethylene glycol (TEG)"
tcgguaagu

SEQ ID NO: 4111 - RNA, 20 nt, Artificial Sequence
  source: /note="Description of Artificial Sequence: Synthetic oligonucleotide"
  source: /note="RNA"
  modified_base (1)..(1): bicyclic nucleic acid (BNA)
  source: /note="3' tri-ethylene glycol (TEG)"
gucgguaaguucuguccaag

SEQ ID NO: 4112 - RNA, 19 nt, Artificial Sequence
  source: /note="Description of Artificial Sequence: Synthetic oligonucleotide"
  source: /note="RNA"
  modified_base (1)..(1): bicyclic nucleic acid (BNA)
  source: /note="3' tri-ethylene glycol (TEG)"
gucgguaaguucuguccaa

SEQ ID NO: 4113 - RNA, 18 nt, Artificial Sequence
  source: /note="Description of Artificial Sequence: Synthetic oligonucleotide"
  source: /note="RNA"
  modified_base (1)..(1): bicyclic nucleic acid (BNA)
  source: /note="3' tri-ethylene glycol (TEG)"
gucgguaaguucugucca

SEQ ID NO: 4114 - RNA, 17 nt, Artificial Sequence
  source: /note="Description of Artificial Sequence: Synthetic oligonucleotide"
  source: /note="RNA"
  modified_base (1)..(1): bicyclic nucleic acid (BNA)
  source: /note="3' tri-ethylene glycol (TEG)"
gucgguaaguucugucc

SEQ ID NO: 4115 - RNA, 16 nt, Artificial Sequence
  source: /note="Description of Artificial Sequence: Synthetic oligonucleotide"
  source: /note="RNA"
  modified_base (1)..(1): bicyclic nucleic acid (BNA)
  source: /note="3' tri-ethylene glycol (TEG)"
gucgguaaguucuguc

SEQ ID NO: 4116 - RNA, 15 nt, Artificial Sequence
  source: /note="Description of Artificial Sequence: Synthetic oligonucleotide"
  source: /note="RNA"
  modified_base (1)..(1): bicyclic nucleic acid (BNA)
  source: /note="3' tri-ethylene glycol (TEG)"
gucgguaaguucugu

SEQ ID NO: 4117 - RNA, 14 nt, Artificial Sequence
  source: /note="Description of Artificial Sequence: Synthetic oligonucleotide"
  source: /note="RNA"
  modified_base (1)..(1): bicyclic nucleic acid (BNA)
  source: /note="3' tri-ethylene glycol (TEG)"
gucgguaaguucug

SEQ ID NO: 4118 - RNA, 13 nt, Artificial Sequence
  source: /note="Description of Artificial Sequence: Synthetic oligonucleotide"
  source: /note="RNA"
  modified_base (1)..(1): bicyclic nucleic acid (BNA)
  source: /note="3' tri-ethylene glycol (TEG)"
gucgguaaguucu

SEQ ID NO: 4119 - RNA, 12 nt, Artificial Sequence
  source: /note="Description of Artificial Sequence: Synthetic oligonucleotide"
  source: /note="RNA"
  modified_base (1)..(1): bicyclic nucleic acid (BNA)
  source: /note="3' tri-ethylene glycol (TEG)"
gucgguaaguuc

SEQ ID NO: 4120 - RNA, 11 nt, Artificial Sequence
  source: /note="Description of Artificial Sequence: Synthetic oligonucleotide"
  source: /note="RNA"
  modified_base (1)..(1): bicyclic nucleic acid (BNA)
  source: /note="3' tri-ethylene glycol (TEG)"
gucgguaaguu

SEQ ID NO: 4121 - RNA, 10 nt, Artificial Sequence
  source: /note="Description of Artificial Sequence: Synthetic oligonucleotide"
  source: /note="RNA"
  modified_base (1)..(1): bicyclic nucleic acid (BNA)
  source: /note="3' tri-ethylene glycol (TEG)"
gucgguaagu

SEQ ID NO: 4122 - RNA, 20 nt, Artificial Sequence
  source: /note="Description of Artificial Sequence: Synthetic oligonucleotide"
  source: /note="RNA"
  modified_base (1)..(1): bicyclic nucleic acid (BNA)
  source: /note="3' tri-ethylene glycol (TEG)"
agucgguaaguucuguccaa

SEQ ID NO: 4123 - RNA, 19 nt, Artificial Sequence
  source: /note="Description of Artificial Sequence: Synthetic oligonucleotide"
  source: /note="RNA"
  modified_base (1)..(1): bicyclic nucleic acid (BNA)
  source: /note="3' tri-ethylene glycol (TEG)"
agucgguaaguucugucca

SEQ ID NO: 4124 - RNA, 17 nt, Artificial Sequence
  source: /note="Description of Artificial Sequence: Synthetic oligonucleotide"
  source: /note="RNA"
  modified_base (1)..(1): bicyclic nucleic acid (BNA)
  source: /note="3' tri-ethylene glycol (TEG)"
agucgguaaguucuguc

SEQ ID NO: 4125 - RNA, 16 nt, Artificial Sequence
  source: /note="Description of Artificial Sequence: Synthetic oligonucleotide"
  source: /note="RNA"
  modified_base (1)..(1): bicyclic nucleic acid (BNA)
  source: /note="3' tri-ethylene glycol (TEG)"
agucgguaaguucugu

SEQ ID NO: 4126 - RNA, 15 nt, Artificial Sequence
  source: /note="Description of Artificial Sequence: Synthetic oligonucleotide"
  source: /note="RNA"
  modified_base (1)..(1): bicyclic nucleic acid (BNA)
  source: /note="3' tri-ethylene glycol (TEG)"
agucgguaaguucug

SEQ ID NO: 4127 - RNA, 14 nt, Artificial Sequence
  source: /note="Description of Artificial Sequence: Synthetic oligonucleotide"
  source: /note="RNA"
  modified_base (1)..(1): bicyclic nucleic acid (BNA)
  source: /note="3' tri-ethylene glycol (TEG)"
agucgguaaguucu

SEQ ID NO: 4128 - RNA, 13 nt, Artificial Sequence
  source: /note="Description of Artificial Sequence: Synthetic oligonucleotide"
  source: /note="RNA"
  modified_base (1)..(1): bicyclic nucleic acid (BNA)
  source: /note="3' tri-ethylene glycol (TEG)"
agucgguaaguuc

SEQ ID NO: 4129 - RNA, 12 nt, Artificial Sequence
  source: /note="Description of Artificial Sequence: Synthetic oligonucleotide"
  source: /note="RNA"
  modified_base (1)..(1): bicyclic nucleic acid (BNA)
  source: /note="3' tri-ethylene glycol (TEG)"
agucgguaaguu

SEQ ID NO: 4130 - RNA, 11 nt, Artificial Sequence
  source: /note="Description of Artificial Sequence: Synthetic oligonucleotide"
  source: /note="RNA"
  modified_base (1)..(1): bicyclic nucleic acid (BNA)
  source: /note="3' tri-ethylene glycol (TEG)"
agucgguaagu

SEQ ID NO: 4131 - RNA, 20 nt, Artificial Sequence
  source: /note="Description of Artificial Sequence: Synthetic oligonucleotide"
  source: /note="RNA"
  modified_base (1)..(1): bicyclic nucleic acid (BNA)
  source: /note="3' tri-ethylene glycol (TEG)"
cagucgguaaguucugucca

SEQ ID NO: 4132 - RNA, 19 nt, Artificial Sequence
  source: /note="Description of Artificial Sequence: Synthetic oligonucleotide"
  source: /note="RNA"
  modified_base (1)..(1): bicyclic nucleic acid (BNA)
  source: /note="3' tri-ethylene glycol (TEG)"
cagucgguaaguucugucc

SEQ ID NO: 4133 - RNA, 18 nt, Artificial Sequence
  source: /note="Description of Artificial Sequence: Synthetic oligonucleotide"
  source: /note="RNA"
  modified_base (1)..(1): bicyclic nucleic acid (BNA)
  source: /note="3' tri-ethylene glycol (TEG)"
cagucgguaaguucuguc

SEQ ID NO: 4134 - RNA, 17 nt, Artificial Sequence
  source: /note="Description of Artificial Sequence: Synthetic oligonucleotide"
  source: /note="RNA"
  modified_base (1)..(1): bicyclic nucleic acid (BNA)
  source: /note="3' tri-ethylene glycol (TEG)"
cagucgguaaguucugu

SEQ ID NO: 4135 - RNA, 16 nt, Artificial Sequence
  source: /note="Description of Artificial Sequence: Synthetic oligonucleotide"
  source: /note="RNA"
  modified_base (1)..(1): bicyclic nucleic acid (BNA)
  source: /note="3' tri-ethylene glycol (TEG)"
cagucgguaaguucug

SEQ ID NO: 4136 - RNA, 15 nt, Artificial Sequence
  source: /note="Description of Artificial Sequence: Synthetic oligonucleotide"
  source: /note="RNA"
  modified_base (1)..(1): bicyclic nucleic acid (BNA)
  source: /note="3' tri-ethylene glycol (TEG)"
cagucgguaaguucu

SEQ ID NO: 4137 - RNA, 14 nt, Artificial Sequence
  source: /note="Description of Artificial Sequence: Synthetic oligonucleotide"
  source: /note="RNA"
  modified_base (1)..(1): bicyclic nucleic acid (BNA)
  source: /note="3' tri-ethylene glycol (TEG)"
cagucgguaaguuc

SEQ ID NO: 4138 - RNA, 13 nt, Artificial Sequence
  source: /note="Description of Artificial Sequence: Synthetic oligonucleotide"
  source: /note="RNA"
  modified_base (1)..(1): bicyclic nucleic acid (BNA)
  source: /note="3' tri-ethylene glycol (TEG)"
cagucgguaaguu

SEQ ID NO: 4139 - RNA, 12 nt, Artificial Sequence
  source: /note="Description of Artificial Sequence: Synthetic oligonucleotide"
  source: /note="RNA"
  modified_base (1)..(1): bicyclic nucleic acid (BNA)
  source: /note="3' tri-ethylene glycol (TEG)"
cagucgguaagu

SEQ ID NO: 4140 - RNA, 20 nt, Artificial Sequence
  source: /note="Description of Artificial Sequence: Synthetic oligonucleotide"
  source: /note="RNA"
  modified_base (1)..(1): bicyclic nucleic acid (BNA)
  source: /note="3' tri-ethylene glycol (TEG)"
ccagucgguaaguucugucc

SEQ ID NO: 4141 - RNA, 19 nt, Artificial Sequence
  source: /note="Description of Artificial Sequence: Synthetic oligonucleotide"
  source: /note="RNA"
  modified_base (1)..(1): bicyclic nucleic acid (BNA)
  source: /note="3' tri-ethylene glycol (TEG)"
ccagucgguaaguucuguc

SEQ ID NO: 4142 - RNA, 18 nt, Artificial Sequence
  source: /note="Description of Artificial Sequence: Synthetic oligonucleotide"
  source: /note="RNA"
  modified_base (1)..(1): bicyclic nucleic acid (BNA)
  source: /note="3' tri-ethylene glycol (TEG)"
ccagucgguaaguucugu

SEQ ID NO: 4143 - RNA, 17 nt, Artificial Sequence
  source: /note="Description of Artificial Sequence: Synthetic oligonucleotide"
  source: /note="RNA"
  modified_base (1)..(1): bicyclic nucleic acid (BNA)
  source: /note="3' tri-ethylene glycol (TEG)"
ccagucgguaaguucug

SEQ ID NO: 4144 - RNA, 16 nt, Artificial Sequence
  source: /note="Description of Artificial Sequence: Synthetic oligonucleotide"
  source: /note="RNA"
  modified_base (1)..(1): bicyclic nucleic acid (BNA)
  source: /note="3' tri-ethylene glycol (TEG)"
ccagucgguaaguucu

SEQ ID NO: 4145 - RNA, 15 nt, Artificial Sequence
  source: /note="Description of Artificial Sequence: Synthetic oligonucleotide"
  source: /note="RNA"
  modified_base (1)..(1): bicyclic nucleic acid (BNA)
  source: /note="3' tri-ethylene glycol (TEG)"
ccagucgguaaguuc

SEQ ID NO: 4146 - RNA, 14 nt, Artificial Sequence
  source: /note="Description of Artificial Sequence: Synthetic oligonucleotide"
  source: /note="RNA"
  modified_base (1)..(1): bicyclic nucleic acid (BNA)
  source: /note="3' tri-ethylene glycol (TEG)"
ccagucgguaaguu

SEQ ID NO: 4147 - RNA, 13 nt, Artificial Sequence
  source: /note="Description of Artificial Sequence: Synthetic oligonucleotide"
  source: /note="RNA"
  modified_base (1)..(1): bicyclic nucleic acid (BNA)
  source: /note="3' tri-ethylene glycol (TEG)"
ccagucgguaagu

SEQ ID NO: 4148 - RNA, 20 nt, Artificial Sequence
  source: /note="Description of Artificial Sequence: Synthetic oligonucleotide"
  source: /note="RNA"
  modified_base (1)..(1): bicyclic nucleic acid (BNA)
  source: /note="3' tri-ethylene glycol (TEG)"
gccagucgguaaguucuguc

SEQ ID NO: 4149 - RNA, 19 nt, Artificial Sequence
  source: /note="Description of Artificial Sequence: Synthetic oligonucleotide"
  source: /note="RNA"
  modified_base (1)..(1): bicyclic nucleic acid (BNA)
  source: /note="3' tri-ethylene glycol (TEG)"
gccagucgguaaguucugu

SEQ ID NO: 4150 - RNA, 18 nt, Artificial Sequence
  source: /note="Description of Artificial Sequence: Synthetic oligonucleotide"
  source: /note="RNA"
  modified_base (1)..(1): bicyclic nucleic acid (BNA)
  source: /note="3' tri-ethylene glycol (TEG)"
gccagucgguaaguucug

SEQ ID NO: 4151 - RNA, 17 nt, Artificial Sequence
  source: /note="Description of Artificial Sequence: Synthetic oligonucleotide"
  source: /note="RNA"
  modified_base (1)..(1): bicyclic nucleic acid (BNA)
  source: /note="3' tri-ethylene glycol (TEG)"
gccagucgguaaguucu

SEQ ID NO: 4152 - RNA, 16 nt, Artificial Sequence
  source: /note="Description of Artificial Sequence: Synthetic oligonucleotide"
  source: /note="RNA"
  modified_base (1)..(1): bicyclic nucleic acid (BNA)
  source: /note="3' tri-ethylene glycol (TEG)"
gccagucgguaaguuc

SEQ ID NO: 4153 - RNA, 15 nt, Artificial Sequence
  source: /note="Description of Artificial Sequence: Synthetic oligonucleotide"
  source: /note="RNA"
  modified_base (1)..(1): bicyclic nucleic acid (BNA)
  source: /note="3' tri-ethylene glycol (TEG)"
gccagucgguaaguu

SEQ ID NO: 4154 - RNA, 14 nt, Artificial Sequence
  source: /note="Description of Artificial Sequence: Synthetic oligonucleotide"
  source: /note="RNA"
  modified_base (1)..(1): bicyclic nucleic acid (BNA)
  source: /note="3' tri-ethylene glycol (TEG)"
gccagucgguaagu

SEQ ID NO: 4155 - DNA, 20 bp, Artificial Sequence
  source: /note="Description of Artificial Sequence: Synthetic oligonucleotide"
  source: /note="Description of Combined DNA/RNA Molecule: Synthetic oligonucleotide"
  source: /note="DNA/RNA"
  modified_base (1)..(1): bicyclic nucleic acid (BNA)
  source: /note="3' tri-ethylene glycol (TEG)"
tcaaggaagauggcauuucu

SEQ ID NO: 4156 - DNA, 22 bp, Artificial Sequence
  source: /note="Description of Artificial Sequence: Synthetic oligonucleotide"
  source: /note="Description of Combined DNA/RNA Molecule: Synthetic oligonucleotide"
  source: /note="DNA/RNA"
  modified_base (1)..(1): bicyclic nucleic acid (BNA)
  source: /note="3' tri-ethylene glycol (TEG)"
tcaaggaagauggcauuucuag

SEQ ID NO: 4157 - DNA, 16 bp, Artificial Sequence
  source: /note="Description of Artificial Sequence: Synthetic oligonucleotide"
  source: /note="Description of Combined DNA/RNA Molecule: Synthetic oligonucleotide"
  source: /note="DNA/RNA"
  modified_base (1)..(1): bicyclic nucleic acid (BNA)
  source: /note="3' tri-ethylene glycol (TEG)"
tcaaggaagauggcau

SEQ ID NO: 4158 - RNA, 15 nt, Artificial Sequence
  source: /note="Description of Artificial Sequence: Synthetic oligonucleotide"
  source: /note="RNA"
  modified_base (1)..(1): bicyclic nucleic acid (BNA)
  source: /note="3' tri-ethylene glycol (TEG)"
gaagauggcauuucu

SEQ ID NO: 4159 - DNA, 21 bp, Artificial Sequence
  source: /note="Description of Artificial Sequence: Synthetic oligonucleotide"
  source: /note="Description of Combined DNA/RNA Molecule: Synthetic oligonucleotide"
  source: /note="DNA/RNA"
  modified_base (1)..(1): bicyclic nucleic acid (BNA)
  source: /note="3' tri-ethylene glycol (TEG)"
tcaaggaagauggcauuucua

SEQ ID NO: 4160 - DNA, 19 bp, Artificial Sequence
  source: /note="Description of Artificial Sequence: Synthetic oligonucleotide"
  source: /note="Description of Combined DNA/RNA Molecule: Synthetic oligonucleotide"
  source: /note="DNA/RNA"
  modified_base (1)..(1): bicyclic nucleic acid (BNA)
  source: /note="3' tri-ethylene glycol (TEG)"
tcaaggaagauggcauuuc

SEQ ID NO: 4161 - DNA, 18 bp, Artificial Sequence
  source: /note="Description of Artificial Sequence: Synthetic oligonucleotide"
  source: /note="Description of Combined DNA/RNA Molecule: Synthetic oligonucleotide"
  source: /note="DNA/RNA"
  modified_base (1)..(1): bicyclic nucleic acid (BNA)
  source: /note="3' tri-ethylene glycol (TEG)"
tcaaggaagauggcauuu

SEQ ID NO: 4162 - DNA, 17 bp, Artificial Sequence
  source: /note="Description of Artificial Sequence: Synthetic oligonucleotide"
  source: /note="Description of Combined DNA/RNA Molecule: Synthetic oligonucleotide"
  source: /note="DNA/RNA"
  modified_base (1)..(1): bicyclic nucleic acid (BNA)
  source: /note="3' tri-ethylene glycol (TEG)"
tcaaggaagauggcauu

SEQ ID NO: 4163 - DNA, 15 bp, Artificial Sequence
  source: /note="Description of Artificial Sequence: Synthetic oligonucleotide"
  source: /note="Description of Combined DNA/RNA Molecule: Synthetic oligonucleotide"
  source: /note="DNA/RNA"
  modified_base (1)..(1): bicyclic nucleic acid (BNA)
  source: /note="3' tri-ethylene glycol (TEG)"
tcaaggaagauggca

SEQ ID NO: 4164 - DNA, 14 bp, Artificial Sequence
  source: /note="Description of Artificial Sequence: Synthetic oligonucleotide"
  source: /note="Description of Combined DNA/RNA Molecule: Synthetic oligonucleotide"
  source: /note="DNA/RNA"
  modified_base (1)..(1): bicyclic nucleic acid (BNA)
  source: /note="3' tri-ethylene glycol (TEG)"
tcaaggaagauggc

SEQ ID NO: 4165 - DNA, 13 bp, Artificial Sequence
  source: /note="Description of Artificial Sequence: Synthetic oligonucleotide"
  source: /note="Description of Combined DNA/RNA Molecule: Synthetic oligonucleotide"
  source: /note="DNA/RNA"
  modified_base (1)..(1): bicyclic nucleic acid (BNA)
  source: /note="3' tri-ethylene glycol (TEG)"
tcaaggaagaugg

SEQ ID NO: 4166 - DNA, 12 bp, Artificial Sequence
  source: /note="Description of Artificial Sequence: Synthetic oligonucleotide"
  source: /note="Description of Combined DNA/RNA Molecule: Synthetic oligonucleotide"
  source: /note="DNA/RNA"
  modified_base (1)..(1): bicyclic nucleic acid (BNA)
  source: /note="3' tri-ethylene glycol (TEG)"
tcaaggaagaug

SEQ ID NO: 4167 - DNA, 11 bp, Artificial Sequence
  source: /note="Description of Artificial Sequence: Synthetic oligonucleotide"
  source: /note="Description of Combined DNA/RNA Molecule: Synthetic oligonucleotide"
  source: /note="DNA/RNA"
  modified_base (1)..(1): bicyclic nucleic acid (BNA)
  source: /note="3' tri-ethylene glycol (TEG)"
tcaaggaagau

SEQ ID NO: 4168 - DNA, 10 bp, Artificial Sequence
  source: /note="Description of Artificial Sequence: Synthetic oligonucleotide"
  source: /note="DNA/RNA"
  modified_base (1)..(1): bicyclic nucleic acid (BNA)
  source: /note="3' tri-ethylene glycol (TEG)"
tcaaggaaga

SEQ ID NO: 4169 - DNA, 9 bp, Artificial Sequence
  source: /note="Description of Artificial Sequence: Synthetic oligonucleotide"
  source: /note="DNA/RNA"
  modified_base (1)..(1): bicyclic nucleic acid (BNA)
  source: /note="3' tri-ethylene glycol (TEG)"
tcaaggaag

SEQ ID NO: 4170 - RNA, 21 nt, Artificial Sequence
  source: /note="Description of Artificial Sequence: Synthetic oligonucleotide"
  source: /note="RNA"
  modified_base (1)..(1): bicyclic nucleic acid (BNA)
  source: /note="3' tri-ethylene glycol (TEG)"
caaggaagauggcauuucuag

SEQ ID NO: 4171 - RNA, 20 nt, Artificial Sequence
  source: /note="Description of Artificial Sequence: Synthetic oligonucleotide"
  source: /note="RNA"
  modified_base (1)..(1): bicyclic nucleic acid (BNA)
  source: /note="3' tri-ethylene glycol (TEG)"
caaggaagauggcauuucua

SEQ ID NO: 4172 - RNA, 19 nt, Artificial Sequence
  source: /note="Description of Artificial Sequence: Synthetic oligonucleotide"
  source: /note="RNA"
  modified_base (1)..(1): bicyclic nucleic acid (BNA)
  source: /note="3' tri-ethylene glycol (TEG)"
caaggaagauggcauuucu

SEQ ID NO: 4173 - RNA, 18 nt, Artificial Sequence
  source: /note="Description of Artificial Sequence: Synthetic oligonucleotide"
  source: /note="RNA"
  modified_base (1)..(1): bicyclic nucleic acid (BNA)
  source: /note="3' tri-ethylene glycol (TEG)"
caaggaagauggcauuuc

SEQ ID NO: 4174 - RNA, 17 nt, Artificial Sequence
  source: /note="Description of Artificial Sequence: Synthetic oligonucleotide"
  source: /note="RNA"
  modified_base (1)..(1): bicyclic nucleic acid (BNA)
  source: /note="3' tri-ethylene glycol (TEG)"
caaggaagauggcauuu

SEQ ID NO: 4175 - RNA, 16 nt, Artificial Sequence
  source: /note="Description of Artificial Sequence: Synthetic oligonucleotide"
  source: /note="RNA"
  modified_base (1)..(1): bicyclic nucleic acid (BNA)
  source: /note="3' tri-ethylene glycol (TEG)"
caaggaagauggcauu

SEQ ID NO: 4176 - RNA, 15 nt, Artificial Sequence
  source: /note="Description of Artificial Sequence: Synthetic oligonucleotide"
  source: /note="RNA"
  modified_base (1)..(1): bicyclic nucleic acid (BNA)
  source: /note="3' tri-ethylene glycol (TEG)"
caaggaagauggcau

SEQ ID NO: 4177 - RNA, 14 nt, Artificial Sequence
  source: /note="Description of Artificial Sequence: Synthetic oligonucleotide"
  source: /note="RNA"
  modified_base (1)..(1): bicyclic nucleic acid (BNA)
  source: /note="3' tri-ethylene glycol (TEG)"
caaggaagauggca

SEQ ID NO: 4178 - RNA, 13 nt, Artificial Sequence
  source: /note="Description of Artificial Sequence: Synthetic oligonucleotide"
  source: /note="RNA"
  modified_base (1)..(1): bicyclic nucleic acid (BNA)
  source: /note="3' tri-ethylene glycol (TEG)"
caaggaagauggc

SEQ ID NO: 4179 - RNA, 12 nt, Artificial Sequence
  source: /note="Description of Artificial Sequence: Synthetic oligonucleotide"
  source: /note="RNA"
  modified_base (1)..(1): bicyclic nucleic acid (BNA)
  source: /note="3' tri-ethylene glycol (TEG)"
caaggaagaugg

SEQ ID NO: 4180 - RNA, 11 nt, Artificial Sequence
  source: /note="Description of Artificial Sequence: Synthetic oligonucleotide"
  source: /note="RNA"
  modified_base (1)..(1): bicyclic nucleic acid (BNA)
  source: /note="3' tri-ethylene glycol (TEG)"
caaggaagaug

SEQ ID NO: 4181 - RNA, 10 nt, Artificial Sequence
  source: /note="Description of Artificial Sequence: Synthetic oligonucleotide"
  source: /note="RNA"
  modified_base (1)..(1): bicyclic nucleic acid (BNA)
  source: /note="3' tri-ethylene glycol (TEG)"
caaggaagau

SEQ ID NO: 4182 - RNA, 9 nt, Artificial Sequence
  source: /note="Description of Artificial Sequence: Synthetic oligonucleotide"
  source: /note="RNA/Antisense Oligonucleotide"
  modified_base (1)..(1): bicyclic nucleic acid (BNA)
  source: /note="3' tri-ethylene glycol (TEG)"
caaggaaga

SEQ ID NO: 4183 - RNA, 8 nt, Artificial Sequence
  source: /note="Description of Artificial Sequence: Synthetic oligonucleotide"
  source: /note="RNA/Antisense Oligonucleotide"
  modified_base (1)..(1): bicyclic nucleic acid (BNA)
  source: /note="3' tri-ethylene glycol (TEG)"
caaggaag

SEQ ID NO: 4184 - RNA, 20 nt, Artificial Sequence
  source: /note="Description of Artificial Sequence: Synthetic oligonucleotide"
  source: /note="RNA"
  modified_base (1)..(1): bicyclic nucleic acid (BNA)
  source: /note="3' tri-ethylene glycol (TEG)"
aaggaagauggcauuucuag

SEQ ID NO: 4185 - RNA, 19 nt, Artificial Sequence
  source: /note="Description of Artificial Sequence: Synthetic oligonucleotide"
  source: /note="RNA"
  modified_base (1)..(1): bicyclic nucleic acid (BNA)
  source: /note="3' tri-ethylene glycol (TEG)"
aaggaagauggcauuucua

SEQ ID NO: 4186 - RNA, 18 nt, Artificial Sequence
  source: /note="Description of Artificial Sequence: Synthetic oligonucleotide"
  source: /note="RNA"
  modified_base (1)..(1): bicyclic nucleic acid (BNA)
  source: /note="3' tri-ethylene glycol (TEG)"
aaggaagauggcauuucu

SEQ ID NO: 4187 - RNA, 17 nt, Artificial Sequence
  source: /note="Description of Artificial Sequence: Synthetic oligonucleotide"
  source: /note="RNA"
  modified_base (1)..(1): bicyclic nucleic acid (BNA)
  source: /note="3' tri-ethylene glycol (TEG)"
aaggaagauggcauuuc

SEQ ID NO: 4188 - RNA, 16 nt, Artificial Sequence
  source: /note="Description of Artificial Sequence: Synthetic oligonucleotide"
  source: /note="RNA"
  modified_base (1)..(1): bicyclic nucleic acid (BNA)
  source: /note="3' tri-ethylene glycol (TEG)"
aaggaagauggcauuu

SEQ ID NO: 4189 - RNA, 15 nt, Artificial Sequence
  source: /note="Description of Artificial Sequence: Synthetic oligonucleotide"
  source: /note="RNA"
  modified_base (1)..(1): bicyclic nucleic acid (BNA)
  source: /note="3' tri-ethylene glycol (TEG)"
aaggaagauggcauu

SEQ ID NO: 4190 - RNA, 14 nt, Artificial Sequence
  source: /note="Description of Artificial Sequence: Synthetic oligonucleotide"
  source: /note="RNA"
  modified_base (1)..(1): bicyclic nucleic acid (BNA)
  source: /note="3' tri-ethylene glycol (TEG)"
aaggaagauggcau

SEQ ID NO: 4191 - RNA, 13 nt, Artificial Sequence
  source: /note="Description of Artificial Sequence: Synthetic oligonucleotide"
  source: /note="RNA"
  modified_base (1)..(1): bicyclic nucleic acid (BNA)
  source: /note="3' tri-ethylene glycol (TEG)"
aaggaagauggca

SEQ ID NO: 4192 - RNA, 12 nt, Artificial Sequence
  source: /note="Description of Artificial Sequence: Synthetic oligonucleotide"
  source: /note="RNA"
  modified_base (1)..(1): bicyclic nucleic acid (BNA)
  source: /note="3' tri-ethylene glycol (TEG)"
aaggaagauggc

SEQ ID NO: 4193 - RNA, 11 nt, Artificial Sequence
  source: /note="Description of Artificial Sequence: Synthetic oligonucleotide"
  source: /note="RNA"
  modified_base (1)..(1): bicyclic nucleic acid (BNA)
  source: /note="3' tri-ethylene glycol (TEG)"
aaggaagaugg

SEQ ID NO: 4194 - RNA, 10 nt, Artificial Sequence
  source: /note="Description of Artificial Sequence: Synthetic oligonucleotide"
  source: /note="RNA"
  modified_base (1)..(1): bicyclic nucleic acid (BNA)
  source: /note="3' tri-ethylene glycol (TEG)"
aaggaagaug

SEQ ID NO: 4195 - RNA, 9 nt, Artificial Sequence
  source: /note="Description of Artificial Sequence: Synthetic oligonucleotide"
  source: /note="RNA"
  modified_base (1)..(1): bicyclic nucleic acid (BNA)
  source: /note="3' tri-ethylene glycol (TEG)"
aaggaagau

SEQ ID NO: 4196 - RNA, 8 nt, Artificial Sequence
  source: /note="Description of Artificial Sequence: Synthetic oligonucleotide"
  source: /note="RNA/Antisense Oligonucleotide"
  modified_base (1)..(1): bicyclic nucleic acid (BNA)
  source: /note="3' tri-ethylene glycol (TEG)"
aaggaaga

SEQ ID NO: 4197 - RNA, 19 nt, Artificial Sequence
  source: /note="Description of Artificial Sequence: Synthetic oligonucleotide"
  source: /note="RNA"
  modified_base (1)..(1): bicyclic nucleic acid (BNA)
  source: /note="3' tri-ethylene glycol (TEG)"
aggaagauggcauuucuag

SEQ ID NO: 4198 - RNA, 18 nt, Artificial Sequence
  source: /note="Description of Artificial Sequence: Synthetic oligonucleotide"
  source: /note="RNA"
  modified_base (1)..(1): bicyclic nucleic acid (BNA)
  source: /note="3' tri-ethylene glycol (TEG)"
aggaagauggcauuucua

SEQ ID NO: 4199 - RNA, 17 nt, Artificial Sequence
  source: /note="Description of Artificial Sequence: Synthetic oligonucleotide"
  source: /note="RNA"
  modified_base (1)..(1): bicyclic nucleic acid (BNA)
  source: /note="3' tri-ethylene glycol (TEG)"
aggaagauggcauuucu

SEQ ID NO: 4200 - RNA, 16 nt, Artificial Sequence
  source: /note="Description of Artificial Sequence: Synthetic oligonucleotide"
  source: /note="RNA"
  modified_base (1)..(1): bicyclic nucleic acid (BNA)
  source: /note="3' tri-ethylene glycol (TEG)"
aggaagauggcauuuc

SEQ ID NO: 4201 - RNA, 15 nt, Artificial Sequence
  source: /note="Description of Artificial Sequence: Synthetic oligonucleotide"
  source: /note="RNA"
  modified_base (1)..(1): bicyclic nucleic acid (BNA)
  source: /note="3' tri-ethylene glycol (TEG)"
aggaagauggcauuu

SEQ ID NO: 4202 - RNA, 14 nt, Artificial Sequence
  source: /note="Description of Artificial Sequence: Synthetic oligonucleotide"
  source: /note="RNA"
  modified_base (1)..(1): bicyclic nucleic acid (BNA)
  source: /note="3' tri-ethylene glycol (TEG)"
aggaagauggcauu

SEQ ID NO: 4203 - RNA, 13 nt, Artificial Sequence
  source: /note="Description of Artificial Sequence: Synthetic oligonucleotide"
  source: /note="RNA"
  modified_base (1)..(1): bicyclic nucleic acid (BNA)
  source: /note="3' tri-ethylene glycol (TEG)"
aggaagauggcau

SEQ ID NO: 4204 - RNA, 12 nt, Artificial Sequence
  source: /note="Description of Artificial Sequence: Synthetic oligonucleotide"
  source: /note="RNA"
  modified_base (1)..(1): bicyclic nucleic acid (BNA)
  source: /note="3' tri-ethylene glycol (TEG)"
aggaagauggca

SEQ ID NO: 4205 - RNA, 10 nt, Artificial Sequence
  source: /note="Description of Artificial Sequence: Synthetic oligonucleotide"
  source: /note="RNA"
  modified_base (1)..(1): bicyclic nucleic acid (BNA)
  source: /note="3' tri-ethylene glycol (TEG)"
aggaagaugg

SEQ ID NO: 4206 - RNA, 9 nt, Artificial Sequence
  source: /note="Description of Artificial Sequence: Synthetic oligonucleotide"
  source: /note="RNA"
  modified_base (1)..(1): bicyclic nucleic acid (BNA)
  source: /note="3' tri-ethylene glycol (TEG)"
aggaagaug

SEQ ID NO: 4207 - RNA, 8 nt, Artificial Sequence
  source: /note="Description of Artificial Sequence: Synthetic oligonucleotide"
  source: /note="RNA"
  modified_base (1)..(1): bicyclic nucleic acid (BNA)
  source: /note="3' tri-ethylene glycol (TEG)"
aggaagau

SEQ ID NO: 4208 - RNA, 18 nt, Artificial Sequence
  source: /note="Description of Artificial Sequence: Synthetic oligonucleotide"
  source: /note="RNA"
  modified_base (1)..(1): bicyclic nucleic acid (BNA)
  source: /note="3' tri-ethylene glycol (TEG)"
ggaagauggcauuucuag

SEQ ID NO: 4209 - RNA, 17 nt, Artificial Sequence
  source: /note="Description of Artificial Sequence: Synthetic oligonucleotide"
  source: /note="RNA"
  modified_base (1)..(1): bicyclic nucleic acid (BNA)
  source: /note="3' tri-ethylene glycol (TEG)"
ggaagauggcauuucua

SEQ ID NO: 4210 - RNA, 16 nt, Artificial Sequence
  source: /note="Description of Artificial Sequence: Synthetic oligonucleotide"
  source: /note="RNA"
  modified_base (1)..(1): bicyclic nucleic acid (BNA)
  source: /note="3' tri-ethylene glycol (TEG)"
ggaagauggcauuucu

SEQ ID NO: 4211 - RNA, 15 nt, Artificial Sequence
  source: /note="Description of Artificial Sequence: Synthetic oligonucleotide"
  source: /note="RNA"
  modified_base (1)..(1): bicyclic nucleic acid (BNA)
  source: /note="3' tri-ethylene glycol (TEG)"
ggaagauggcauuuc

SEQ ID NO: 4212 - RNA, 14 nt, Artificial Sequence
  source: /note="Description of Artificial Sequence: Synthetic oligonucleotide"
  source: /note="RNA"
  modified_base (1)..(1): bicyclic nucleic acid (BNA)
  source: /note="3' tri-ethylene glycol (TEG)"
ggaagauggcauuu

SEQ ID NO: 4213 - RNA, 13 nt, Artificial Sequence
  source: /note="Description of Artificial Sequence: Synthetic oligonucleotide"
  source: /note="RNA"
  modified_base (1)..(1): bicyclic nucleic acid (BNA)
  source: /note="3' tri-ethylene glycol (TEG)"
ggaagauggcauu

SEQ ID NO: 4214 - RNA, 12 nt, Artificial Sequence
  source: /note="Description of Artificial Sequence: Synthetic oligonucleotide"
  source: /note="RNA"
  modified_base (1)..(1): bicyclic nucleic acid (BNA)
  source: /note="3' tri-ethylene glycol (TEG)"
ggaagauggcau

SEQ ID NO: 4215 - RNA, 11 nt, Artificial Sequence
  source: /note="Description of Artificial Sequence: Synthetic oligonucleotide"
  source: /note="RNA"
  modified_base (1)..(1): bicyclic nucleic acid (BNA)
  source: /note="3' tri-ethylene glycol (TEG)"
ggaagauggca

SEQ ID NO: 4216 - RNA, 10 nt, Artificial Sequence
  source: /note="Description of Artificial Sequence: Synthetic oligonucleotide"
  source: /note="RNA"
  modified_base (1)..(1): bicyclic nucleic acid (BNA)
  source: /note="3' tri-ethylene glycol (TEG)"
ggaagauggc

SEQ ID NO: 4217 - RNA, 8 nt, Artificial Sequence
  source: /note="Description of Artificial Sequence: Synthetic oligonucleotide"
  source: /note="RNA"
  modified_base (1)..(1): bicyclic nucleic acid (BNA)
  source: /note="3' tri-ethylene glycol (TEG)"
ggaagaug

SEQ ID NO: 4218 - RNA, 17 nt, Artificial Sequence
  source: /note="Description of Artificial Sequence: Synthetic oligonucleotide"
  source: /note="RNA"
  modified_base (1)..(1): bicyclic nucleic acid (BNA)
  source: /note="3' tri-ethylene glycol (TEG)"
gaagauggcauuucuag

SEQ ID NO: 4219 - RNA, 16 nt, Artificial Sequence
  source: /note="Description of Artificial Sequence: Synthetic oligonucleotide"
  source: /note="RNA"
  modified_base (1)..(1): bicyclic nucleic acid (BNA)
  source: /note="3' tri-ethylene glycol (TEG)"
gaagauggcauuucua

SEQ ID NO: 4220 - RNA, 14 nt, Artificial Sequence
  source: /note="Description of Artificial Sequence: Synthetic oligonucleotide"
  source: /note="RNA"
  modified_base (1)..(1): bicyclic nucleic acid (BNA)
  source: /note="3' tri-ethylene glycol (TEG)"
gaagauggcauuuc

SEQ ID NO: 4221 - RNA, 13 nt, Artificial Sequence
  source: /note="Description of Artificial Sequence: Synthetic oligonucleotide"
  source: /note="RNA"
  modified_base (1)..(1): bicyclic nucleic acid (BNA)
  source: /note="3' tri-ethylene glycol (TEG)"
gaagauggcauuu

SEQ ID NO: 4222 - RNA, 12 nt, Artificial Sequence
  source: /note="Description of Artificial Sequence: Synthetic oligonucleotide"
  source: /note="RNA"
  modified_base (1)..(1): bicyclic nucleic acid (BNA)
  source: /note="3' tri-ethylene glycol (TEG)"
gaagauggcauu

SEQ ID NO: 4223 - RNA, 11 nt, Artificial Sequence
  source: /note="Description of Artificial Sequence: Synthetic oligonucleotide"
  source: /note="RNA"
  modified_base (1)..(1): bicyclic nucleic acid (BNA)
  source: /note="3' tri-ethylene glycol (TEG)"
gaagauggcau

SEQ ID NO: 4224 - RNA, 10 nt, Artificial Sequence
  source: /note="Description of Artificial Sequence: Synthetic oligonucleotide"
  source: /note="RNA"
  modified_base (1)..(1): bicyclic nucleic acid (BNA)
  source: /note="3' tri-ethylene glycol (TEG)"
gaagauggca

SEQ ID NO: 4225 - RNA, 9 nt, Artificial Sequence
  source: /note="Description of Artificial Sequence: Synthetic oligonucleotide"
  source: /note="RNA"
  modified_base (1)..(1): bicyclic nucleic acid (BNA)
  source: /note="3' tri-ethylene glycol (TEG)"
gaagauggc

SEQ ID NO: 4226 - RNA, 8 nt, Artificial Sequence
  source: /note="Description of Artificial Sequence: Synthetic oligonucleotide"
  source: /note="RNA"
  modified_base (1)..(1): bicyclic nucleic acid (BNA)
  source: /note="3' tri-ethylene glycol (TEG)"
gaagaugg

SEQ ID NO: 4227 - RNA, 16 nt, Artificial Sequence
  source: /note="Description of Artificial Sequence: Synthetic oligonucleotide"
  source: /note="RNA"
  modified_base (1)..(1): bicyclic nucleic acid (BNA)
  source: /note="3' tri-ethylene glycol (TEG)"
aagauggcauuucuag

SEQ ID NO: 4228 - RNA, 15 nt, Artificial Sequence
  source: /note="Description of Artificial Sequence: Synthetic oligonucleotide"
  source: /note="RNA"
  modified_base (1)..(1): bicyclic nucleic acid (BNA)
  source: /note="3' tri-ethylene glycol (TEG)"
aagauggcauuucua

SEQ ID NO: 4229 - RNA, 14 nt, Artificial Sequence
  source: /note="Description of Artificial Sequence: Synthetic oligonucleotide"
  source: /note="RNA"
  modified_base (1)..(1): bicyclic nucleic acid (BNA)
  source: /note="3' tri-ethylene glycol (TEG)"
aagauggcauuucu

SEQ ID NO: 4230 - RNA, 13 nt, Artificial Sequence
  source: /note="Description of Artificial Sequence: Synthetic oligonucleotide"
  source: /note="RNA"
  modified_base (1)..(1): bicyclic nucleic acid (BNA)
  source: /note="3' tri-ethylene glycol (TEG)"
aagauggcauuuc

SEQ ID NO: 4231 - RNA, 12 nt, Artificial Sequence
  source: /note="Description of Artificial Sequence: Synthetic oligonucleotide"
  source: /note="RNA"
  modified_base (1)..(1): bicyclic nucleic acid (BNA)
  source: /note="3' tri-ethylene glycol (TEG)"
aagauggcauuu

SEQ ID NO: 4232 - RNA, 11 nt, Artificial Sequence
  source: /note="Description of Artificial Sequence: Synthetic oligonucleotide"
  source: /note="RNA"
  modified_base (1)..(1): bicyclic nucleic acid (BNA)
  source: /note="3' tri-ethylene glycol (TEG)"
aagauggcauu

SEQ ID NO: 4233 - RNA, 10 nt, Artificial Sequence
  source: /note="Description of Artificial Sequence: Synthetic oligonucleotide"
  source: /note="RNA"
  modified_base (1)..(1): bicyclic nucleic acid (BNA)
  source: /note="3' tri-ethylene glycol (TEG)"
aagauggcau

SEQ ID NO: 4234 - RNA, 9 nt, Artificial Sequence
  source: /note="Description of Artificial Sequence: Synthetic oligonucleotide"
  source: /note="RNA"
  modified_base (1)..(1): bicyclic nucleic acid (BNA)
  source: /note="3' tri-ethylene glycol (TEG)"
aagauggca

SEQ ID NO: 4235 - RNA, 8 nt, Artificial Sequence
  source: /note="Description of Artificial Sequence: Synthetic oligonucleotide"
  source: /note="RNA"
  modified_base (1)..(1): bicyclic nucleic acid (BNA)
  source: /note="3' tri-ethylene glycol (TEG)"
aagauggc

SEQ ID NO: 4236 - RNA, 15 nt, Artificial Sequence
  source: /note="Description of Artificial Sequence: Synthetic oligonucleotide"
  source: /note="RNA"
  modified_base (1)..(1): bicyclic nucleic acid (BNA)
  source: /note="3' tri-ethylene glycol (TEG)"
agauggcauuucuag

SEQ ID NO: 4237 - RNA, 14 nt, Artificial Sequence
  source: /note="Description of Artificial Sequence: Synthetic oligonucleotide"
  source: /note="RNA"
  modified_base (1)..(1): bicyclic nucleic acid (BNA)
  source: /note="3' tri-ethylene glycol (TEG)"
agauggcauuucua

SEQ ID NO: 4238 - RNA, 13 nt, Artificial Sequence
  source: /note="Description of Artificial Sequence: Synthetic oligonucleotide"
  source: /note="RNA"
  modified_base (1)..(1): bicyclic nucleic acid (BNA)
  source: /note="3' tri-ethylene glycol (TEG)"
agauggcauuucu

SEQ ID NO: 4239 - RNA, 12 nt, Artificial Sequence
  source: /note="Description of Artificial Sequence: Synthetic oligonucleotide"
  source: /note="RNA"
  modified_base (1)..(1): bicyclic nucleic acid (BNA)
  source: /note="3' tri-ethylene glycol (TEG)"
agauggcauuuc

SEQ ID NO: 4240 - RNA, 11 nt, Artificial Sequence
  source: /note="Description of Artificial Sequence: Synthetic oligonucleotide"
  source: /note="RNA"
  modified_base (1)..(1): bicyclic nucleic acid (BNA)
  source: /note="3' tri-ethylene glycol (TEG)"
agauggcauuu

SEQ ID NO: 4241 - RNA, 10 nt, Artificial Sequence
  source: /note="Description of Artificial Sequence: Synthetic oligonucleotide"
  source: /note="RNA"
  modified_base (1)..(1): bicyclic nucleic acid (BNA)
  source: /note="3' tri-ethylene glycol (TEG)"
agauggcauu

SEQ ID NO: 4242 - RNA, 9 nt, Artificial Sequence
  source: /note="Description of Artificial Sequence: Synthetic oligonucleotide"
  source: /note="RNA"
  modified_base (1)..(1): bicyclic nucleic acid (BNA)
  source: /note="3' tri-ethylene glycol (TEG)"
agauggcau

SEQ ID NO: 4243 - RNA, 8 nt, Artificial Sequence
  source: /note="Description of Artificial Sequence: Synthetic oligonucleotide"
  source: /note="RNA"
  modified_base (1)..(1): bicyclic nucleic acid (BNA)
  source: /note="3' tri-ethylene glycol (TEG)"
agauggca

SEQ ID NO: 4244 - RNA, 30 nt, Artificial Sequence; identical to SEQ ID NO: 284
  source: /note="Description of Artificial Sequence: Synthetic oligonucleotide"
  source: /note="RNA"
  modified_base (1)..(1): bicyclic nucleic acid (BNA)
  source: /note="3' tri-ethylene glycol (TEG)"

SEQ ID NO: 4245 - RNA, 29 nt, Artificial Sequence
  source: /note="Description of Artificial Sequence: Synthetic oligonucleotide"
  source: /note="RNA"
  modified_base (1)..(1): bicyclic nucleic acid (BNA)
  source: /note="3' tri-ethylene glycol (TEG)"
cuccaacaucaaggaagauggcauuucua

SEQ ID NO: 4246 - RNA, 28 nt, Artificial Sequence
  source: /note="Description of Artificial Sequence: Synthetic oligonucleotide"
  source: /note="RNA"
  modified_base (1)..(1): bicyclic nucleic acid (BNA)
  source: /note="3' tri-ethylene glycol (TEG)"
cuccaacaucaaggaagauggcauuucu

SEQ ID NO: 4247 - RNA, 27 nt, Artificial Sequence
  source: /note="Description of Artificial Sequence: Synthetic oligonucleotide"
  source: /note="RNA"
  modified_base (1)..(1): bicyclic nucleic acid (BNA)
  source: /note="3' tri-ethylene glycol (TEG)"
cuccaacaucaaggaagauggcauuuc

SEQ ID NO: 4248 - RNA, 26 nt, Artificial Sequence
  source: /note="Description of Artificial Sequence: Synthetic oligonucleotide"
  source: /note="RNA"
  modified_base (1)..(1): bicyclic nucleic acid (BNA)
  source: /note="3' tri-ethylene glycol (TEG)"
cuccaacaucaaggaagauggcauuu

SEQ ID NO: 4249 - RNA, 25 nt, Artificial Sequence
  source: /note="Description of Artificial Sequence: Synthetic oligonucleotide"
  source: /note="RNA"
  modified_base (1)..(1): bicyclic nucleic acid (BNA)
  source: /note="3' tri-ethylene glycol (TEG)"
cuccaacaucaaggaagauggcauu

SEQ ID NO: 4250 - RNA, 24 nt, Artificial Sequence
  source: /note="Description of Artificial Sequence: Synthetic oligonucleotide"
  source: /note="RNA"
  modified_base (1)..(1): bicyclic nucleic acid (BNA)
  source: /note="3' tri-ethylene glycol (TEG)"
cuccaacaucaaggaagauggcau

SEQ ID NO: 4251 - RNA, 23 nt, Artificial Sequence
  source: /note="Description of Artificial Sequence: Synthetic oligonucleotide"
  source: /note="RNA"
  modified_base (1)..(1): bicyclic nucleic acid (BNA)
  source: /note="3' tri-ethylene glycol (TEG)"
cuccaacaucaaggaagauggca

SEQ ID NO: 4252 - RNA, 22 nt, Artificial Sequence
  source: /note="Description of Artificial Sequence: Synthetic oligonucleotide"
  source: /note="RNA"
  modified_base (1)..(1): bicyclic nucleic acid (BNA)
  source: /note="3' tri-ethylene glycol (TEG)"
cuccaacaucaaggaagauggc

SEQ ID NO: 4253 - RNA, 21 nt, Artificial Sequence
  source: /note="Description of Artificial Sequence: Synthetic oligonucleotide"
  source: /note="RNA"
  modified_base (1)..(1): bicyclic nucleic acid (BNA)
  source: /note="3' tri-ethylene glycol (TEG)"
cuccaacaucaaggaagaugg

SEQ ID NO: 4254 - RNA, 20 nt, Artificial Sequence
  source: /note="Description of Artificial Sequence: Synthetic oligonucleotide"
  source: /note="RNA"
  modified_base (1)..(1): bicyclic nucleic acid (BNA)
  source: /note="3' tri-ethylene glycol (TEG)"
cuccaacaucaaggaagaug

SEQ ID NO: 4255 - RNA, 19 nt, Artificial Sequence
  source: /note="Description of Artificial Sequence: Synthetic oligonucleotide"
  source: /note="RNA"
  modified_base (1)..(1): bicyclic nucleic acid (BNA)
  source: /note="3' tri-ethylene glycol (TEG)"
cuccaacaucaaggaagau

SEQ ID NO: 4256 - RNA, 18 nt, Artificial Sequence
  source: /note="Description of Artificial Sequence: Synthetic oligonucleotide"
  source: /note="RNA"
  modified_base (1)..(1): bicyclic nucleic acid (BNA)
  source: /note="3' tri-ethylene glycol (TEG)"
cuccaacaucaaggaaga

SEQ ID NO: 4257 - RNA, 17 nt, Artificial Sequence
  source: /note="Description of Artificial Sequence: Synthetic oligonucleotide"
  source: /note="RNA"
  modified_base (1)..(1): bicyclic nucleic acid (BNA)
  source: /note="3' tri-ethylene glycol (TEG)"
cuccaacaucaaggaag

SEQ ID NO: 4258 - DNA, 29 bp, Artificial Sequence
  source: /note="Description of Artificial Sequence: Synthetic oligonucleotide"
  source: /note="Description of Combined DNA/RNA Molecule: Synthetic oligonucleotide"
  source: /note="DNA/RNA"
  modified_base (1)..(1): bicyclic nucleic acid (BNA)
  source: /note="3' tri-ethylene glycol (TEG)"
tccaacaucaaggaagauggcauuucuag

SEQ ID NO: 4259 - DNA, 28 bp, Artificial Sequence
  source: /note="Description of Artificial Sequence: Synthetic oligonucleotide"
  source: /note="Description of Combined DNA/RNA Molecule: Synthetic oligonucleotide"
  source: /note="DNA/RNA"
  modified_base (1)..(1): bicyclic nucleic acid (BNA)
  source: /note="3' tri-ethylene glycol (TEG)"
tccaacaucaaggaagauggcauuucua

SEQ ID NO: 4260 - DNA, 27 bp, Artificial Sequence
  source: /note="Description of Artificial Sequence: Synthetic oligonucleotide"
  source: /note="Description of Combined DNA/RNA Molecule: Synthetic oligonucleotide"
  source: /note="DNA/RNA"
  modified_base (1)..(1): bicyclic nucleic acid (BNA)
  source: /note="3' tri-ethylene glycol (TEG)"
tccaacaucaaggaagauggcauuucu

SEQ ID NO: 4261 - DNA, 26 bp, Artificial Sequence
  source: /note="Description of Artificial Sequence: Synthetic oligonucleotide"
  source: /note="Description of Combined DNA/RNA Molecule: Synthetic oligonucleotide"
  source: /note="DNA/RNA"
  modified_base (1)..(1): bicyclic nucleic acid (BNA)
  source: /note="3' tri-ethylene glycol (TEG)"
tccaacaucaaggaagauggcauuuc

SEQ ID NO: 4262 - DNA, 25 bp, Artificial Sequence
  source: /note="Description of Artificial Sequence: Synthetic oligonucleotide"
  source: /note="Description of Combined DNA/RNA Molecule: Synthetic oligonucleotide"
  source: /note="DNA/RNA"
  modified_base (1)..(1): bicyclic nucleic acid (BNA)
  source: /note="3' tri-ethylene glycol (TEG)"
tccaacaucaaggaagauggcauuu

SEQ ID NO: 4263 - DNA, 24 bp, Artificial Sequence
  source: /note="Description of Artificial Sequence: Synthetic oligonucleotide"
  source: /note="Description of Combined DNA/RNA Molecule: Synthetic oligonucleotide"
  source: /note="DNA/RNA"
  modified_base (1)..(1): bicyclic nucleic acid (BNA)
  source: /note="3' tri-ethylene glycol (TEG)"
tccaacaucaaggaagauggcauu

SEQ ID NO: 4264 - DNA, 23 bp, Artificial Sequence
  source: /note="Description of Artificial Sequence: Synthetic oligonucleotide"
  source: /note="Description of Combined DNA/RNA Molecule: Synthetic oligonucleotide"
  source: /note="DNA/RNA"
  modified_base (1)..(1): bicyclic nucleic acid (BNA)
  source: /note="3' tri-ethylene glycol (TEG)"
tccaacaucaaggaagauggcau

SEQ ID NO: 4265 - DNA, 22 bp, Artificial Sequence
  source: /note="Description of Artificial Sequence: Synthetic oligonucleotide"
  source: /note="Description of Combined DNA/RNA Molecule: Synthetic oligonucleotide"
  source: /note="DNA/RNA"
  modified_base (1)..(1): bicyclic nucleic acid (BNA)
  source: /note="3' tri-ethylene glycol (TEG)"
tccaacaucaaggaagauggca

SEQ ID NO: 4266 - DNA, 21 bp, Artificial Sequence
  source: /note="Description of Artificial Sequence: Synthetic oligonucleotide"
  source: /note="Description of Combined DNA/RNA Molecule: Synthetic oligonucleotide"
  source: /note="DNA/RNA"
  modified_base (1)..(1): bicyclic nucleic acid (BNA)
  source: /note="3' tri-ethylene glycol (TEG)"
tccaacaucaaggaagauggc

SEQ ID NO: 4267 - DNA, 20 bp, Artificial Sequence
  source: /note="Description of Artificial Sequence: Synthetic oligonucleotide"
  source: /note="Description of Combined DNA/RNA Molecule: Synthetic oligonucleotide"
  source: /note="DNA/RNA"
  modified_base (1)..(1): bicyclic nucleic acid (BNA)
  source: /note="3' tri-ethylene glycol (TEG)"
tccaacaucaaggaagaugg

SEQ ID NO: 4268 - DNA, 19 bp, Artificial Sequence
  source: /note="Description of Artificial Sequence: Synthetic oligonucleotide"
  source: /note="Description of Combined DNA/RNA Molecule: Synthetic oligonucleotide"
  source: /note="DNA/RNA"
  modified_base (1)..(1): bicyclic nucleic acid (BNA)
  source: /note="3' tri-ethylene glycol (TEG)"
tccaacaucaaggaagaug

SEQ ID NO: 4269 - DNA, 18 bp, Artificial Sequence
  source: /note="Description of Artificial Sequence: Synthetic oligonucleotide"
  source: /note="Description of Combined DNA/RNA Molecule: Synthetic oligonucleotide"
  source: /note="DNA/RNA"
  modified_base (1)..(1): bicyclic nucleic acid (BNA)
  source: /note="3' tri-ethylene glycol (TEG)"
tccaacaucaaggaagau

SEQ ID NO: 4270 - DNA, 17 bp, Artificial Sequence
  source: /note="Description of Artificial Sequence: Synthetic oligonucleotide"
  source: /note="Description of Combined DNA/RNA Molecule: Synthetic oligonucleotide"
  source: /note="DNA/RNA"
  modified_base (1)..(1): bicyclic nucleic acid (BNA)
  source: /note="3' tri-ethylene glycol (TEG)"
tccaacaucaaggaaga

SEQ ID NO: 4271 - DNA, 16 bp, Artificial Sequence
  source: /note="Description of Artificial Sequence: Synthetic oligonucleotide"
  source: /note="Description of Combined DNA/RNA Molecule: Synthetic oligonucleotide"
  source: /note="DNA/RNA"
  modified_base (1)..(1): bicyclic nucleic acid (BNA)
  source: /note="3' tri-ethylene glycol (TEG)"
tccaacaucaaggaag

SEQ ID NO: 4272 - RNA, 28 nt, Artificial Sequence
  source: /note="Description of Artificial Sequence: Synthetic oligonucleotide"
  source: /note="RNA"
  modified_base (1)..(1): bicyclic nucleic acid (BNA)
  source: /note="3' tri-ethylene glycol (TEG)"
ccaacaucaaggaagauggcauuucuag

SEQ ID NO: 4273 - RNA, 27 nt, Artificial Sequence
  source: /note="Description of Artificial Sequence: Synthetic oligonucleotide"
  source: /note="RNA"
  modified_base (1)..(1): bicyclic nucleic acid (BNA)
  source: /note="3' tri-ethylene glycol (TEG)"
ccaacaucaaggaagauggcauuucua

SEQ ID NO: 4274 - RNA, 26 nt, Artificial Sequence
  source: /note="Description of Artificial Sequence: Synthetic oligonucleotide"
  source: /note="RNA"
  modified_base (1)..(1): bicyclic nucleic acid (BNA)
  source: /note="3' tri-ethylene glycol (TEG)"
ccaacaucaaggaagauggcauuucu

SEQ ID NO: 4275 - RNA, 25 nt, Artificial Sequence
  source: /note="Description of Artificial Sequence: Synthetic oligonucleotide"
  source: /note="RNA"
  modified_base (1)..(1): bicyclic nucleic acid (BNA)
  source: /note="3' tri-ethylene glycol (TEG)"
ccaacaucaaggaagauggcauuuc

SEQ ID NO: 4276 - RNA, 24 nt, Artificial Sequence
  source: /note="Description of Artificial Sequence: Synthetic oligonucleotide"
  source: /note="RNA"
  modified_base (1)..(1): bicyclic nucleic acid (BNA)
  source: /note="3' tri-ethylene glycol (TEG)"
ccaacaucaaggaagauggcauuu

SEQ ID NO: 4277 - RNA, 23 nt, Artificial Sequence
  source: /note="Description of Artificial Sequence: Synthetic oligonucleotide"
  source: /note="RNA"
  modified_base (1)..(1): bicyclic nucleic acid (BNA)
  source: /note="3' tri-ethylene glycol (TEG)"
ccaacaucaaggaagauggcauu

SEQ ID NO: 4278 - RNA, 22 nt, Artificial Sequence
  source: /note="Description of Artificial Sequence: Synthetic oligonucleotide"
  source: /note="RNA"
  modified_base (1)..(1): bicyclic nucleic acid (BNA)
  source: /note="3' tri-ethylene glycol (TEG)"
ccaacaucaaggaagauggcau

SEQ ID NO: 4279 - RNA, 21 nt, Artificial Sequence
  source: /note="Description of Artificial Sequence: Synthetic oligonucleotide"
  source: /note="RNA"
  modified_base (1)..(1): bicyclic nucleic acid (BNA)
  source: /note="3' tri-ethylene glycol (TEG)"
ccaacaucaaggaagauggca

SEQ ID NO: 4280 - RNA, 20 nt, Artificial Sequence
  source: /note="Description of Artificial Sequence: Synthetic oligonucleotide"
  source: /note="RNA"
  modified_base (1)..(1): bicyclic nucleic acid (BNA)
  source: /note="3' tri-ethylene glycol (TEG)"
ccaacaucaaggaagauggc

SEQ ID NO: 4281 - RNA, 19 nt, Artificial Sequence
  source: /note="Description of Artificial Sequence: Synthetic oligonucleotide"
  source: /note="RNA"
  modified_base (1)..(1): bicyclic nucleic acid (BNA)
  source: /note="3' tri-ethylene glycol (TEG)"
ccaacaucaaggaagaugg

SEQ ID NO: 4282 - RNA, 18 nt, Artificial Sequence
  source: /note="Description of Artificial Sequence: Synthetic oligonucleotide"
  source: /note="RNA"
  modified_base (1)..(1): bicyclic nucleic acid (BNA)
  source: /note="3' tri-ethylene glycol (TEG)"
ccaacaucaaggaagaug

SEQ ID NO: 4283 - RNA, 17 nt, Artificial Sequence
  source: /note="Description of Artificial Sequence: Synthetic oligonucleotide"
  source: /note="RNA"
  modified_base (1)..(1): bicyclic nucleic acid (BNA)
  source: /note="3' tri-ethylene glycol (TEG)"
ccaacaucaaggaagau

SEQ ID NO: 4284 - RNA, 16 nt, Artificial Sequence
  source: /note="Description of Artificial Sequence: Synthetic oligonucleotide"
  source: /note="RNA"
  modified_base (1)..(1): bicyclic nucleic acid (BNA)
  source: /note="3' tri-ethylene glycol (TEG)"
ccaacaucaaggaaga

SEQ ID NO: 4285 - RNA, 15 nt, Artificial Sequence
  source: /note="Description of Artificial Sequence: Synthetic oligonucleotide"
  source: /note="RNA"
  modified_base (1)..(1): bicyclic nucleic acid (BNA)
  source: /note="3' tri-ethylene glycol (TEG)"
ccaacaucaaggaag

SEQ ID NO: 4286 - RNA, 27 nt, Artificial Sequence
  source: /note="Description of Artificial Sequence: Synthetic oligonucleotide"
  source: /note="RNA"
  modified_base (1)..(1): bicyclic nucleic acid (BNA)
  source: /note="3' tri-ethylene glycol (TEG)"
caacaucaaggaagauggcauuucuag

SEQ ID NO: 4287 - RNA, 26 nt, Artificial Sequence
  source: /note="Description of Artificial Sequence: Synthetic oligonucleotide"
  source: /note="RNA"
  modified_base (1)..(1): bicyclic nucleic acid (BNA)
  source: /note="3' tri-ethylene glycol (TEG)"
caacaucaaggaagauggcauuucua

SEQ ID NO: 4288 - RNA, 25 nt, Artificial Sequence
  source: /note="Description of Artificial Sequence: Synthetic oligonucleotide"
  source: /note="RNA"
  modified_base (1)..(1): bicyclic nucleic acid (BNA)
  source: /note="3' tri-ethylene glycol (TEG)"
caacaucaaggaagauggcauuucu

SEQ ID NO: 4289 - RNA, 24 nt, Artificial Sequence
  source: /note="Description of Artificial Sequence: Synthetic oligonucleotide"
  source: /note="RNA"
  modified_base (1)..(1): bicyclic nucleic acid (BNA)
  source: /note="3' tri-ethylene glycol (TEG)"
caacaucaaggaagauggcauuuc

SEQ ID NO: 4290 - RNA, 23 nt, Artificial Sequence
  source: /note="Description of Artificial Sequence: Synthetic oligonucleotide"
  source: /note="RNA"
  modified_base (1)..(1): bicyclic nucleic acid (BNA)
  source: /note="3' tri-ethylene glycol (TEG)"
caacaucaaggaagauggcauuu

SEQ ID NO: 4291 - RNA, 22 nt, Artificial Sequence
  source: /note="Description of Artificial Sequence: Synthetic oligonucleotide"
  source: /note="RNA"
  modified_base (1)..(1): bicyclic nucleic acid (BNA)
  source: /note="3' tri-ethylene glycol (TEG)"
caacaucaaggaagauggcauu

SEQ ID NO: 4292 - RNA, 21 nt, Artificial Sequence
  source: /note="Description of Artificial Sequence: Synthetic oligonucleotide"
  source: /note="RNA"
  modified_base (1)..(1): bicyclic nucleic acid (BNA)
  source: /note="3' tri-ethylene glycol (TEG)"
caacaucaaggaagauggcau

SEQ ID NO: 4293 - RNA, 20 nt, Artificial Sequence
  source: /note="Description of Artificial Sequence: Synthetic oligonucleotide"
  source: /note="RNA"
  modified_base (1)..(1): bicyclic nucleic acid (BNA)
  source: /note="3' tri-ethylene glycol (TEG)"
caacaucaaggaagauggca

SEQ ID NO: 4294 - RNA, 19 nt, Artificial Sequence
  source: /note="Description of Artificial Sequence: Synthetic oligonucleotide"
  source: /note="RNA"
  modified_base (1)..(1): bicyclic nucleic acid (BNA)
  source: /note="3' tri-ethylene glycol (TEG)"
caacaucaaggaagauggc

SEQ ID NO: 4295 - RNA, 18 nt, Artificial Sequence
  source: /note="Description of Artificial Sequence: Synthetic oligonucleotide"
  source: /note="RNA"
  modified_base (1)..(1): bicyclic nucleic acid (BNA)
  source: /note="3' tri-ethylene glycol (TEG)"
caacaucaaggaagaugg

SEQ ID NO: 4296 - RNA, 17 nt, Artificial Sequence
  source: /note="Description of Artificial Sequence: Synthetic oligonucleotide"
  source: /note="RNA"
  modified_base (1)..(1): bicyclic nucleic acid (BNA)
  source: /note="3' tri-ethylene glycol (TEG)"
caacaucaaggaagaug

SEQ ID NO: 4297 - RNA, 16 nt, Artificial Sequence
  source: /note="Description of Artificial Sequence: Synthetic oligonucleotide"
  source: /note="RNA"
  modified_base (1)..(1): bicyclic nucleic acid (BNA)
  source: /note="3' tri-ethylene glycol (TEG)"
caacaucaaggaagau

SEQ ID NO: 4298 - RNA, 15 nt, Artificial Sequence
  source: /note="Description of Artificial Sequence: Synthetic oligonucleotide"
  source: /note="RNA"
  modified_base (1)..(1): bicyclic nucleic acid (BNA)
  source: /note="3' tri-ethylene glycol (TEG)"
caacaucaaggaaga

SEQ ID NO: 4299 - RNA, 14 nt, Artificial Sequence
  source: /note="Description of Artificial Sequence: Synthetic oligonucleotide"
  source: /note="RNA"
  modified_base (1)..(1): bicyclic nucleic acid (BNA)
  source: /note="3' tri-ethylene glycol (TEG)"
caacaucaaggaag

SEQ ID NO: 4300 - RNA, 26 nt, Artificial Sequence
  source: /note="Description of Artificial Sequence: Synthetic oligonucleotide"
  source: /note="RNA"
  modified_base (1)..(1): bicyclic nucleic acid (BNA)
  source: /note="3' tri-ethylene glycol (TEG)"
aacaucaaggaagauggcauuucuag

SEQ ID NO: 4301 - RNA, 25 nt, Artificial Sequence
  source: /note="Description of Artificial Sequence: Synthetic oligonucleotide"
  source: /note="RNA"
  modified_base (1)..(1): bicyclic nucleic acid (BNA)
  source: /note="3' tri-ethylene glycol (TEG)"
aacaucaaggaagauggcauuucua

SEQ ID NO: 4302 - RNA, 24 nt, Artificial Sequence
  source: /note="Description of Artificial Sequence: Synthetic oligonucleotide"
  source: /note="RNA"
  modified_base (1)..(1): bicyclic nucleic acid (BNA)
  source: /note="3' tri-ethylene glycol (TEG)"
aacaucaaggaagauggcauuucu

SEQ ID NO: 4303 - RNA, 23 nt, Artificial Sequence
  source: /note="Description of Artificial Sequence: Synthetic oligonucleotide"
  source: /note="RNA"
  modified_base (1)..(1): bicyclic nucleic acid (BNA)
  source: /note="3' tri-ethylene glycol (TEG)"
aacaucaaggaagauggcauuuc

SEQ ID NO: 4304 - RNA, 22 nt, Artificial Sequence
  source: /note="Description of Artificial Sequence: Synthetic oligonucleotide"
  source: /note="RNA"
  modified_base (1)..(1): bicyclic nucleic acid (BNA)
  source: /note="3' tri-ethylene glycol (TEG)"
aacaucaaggaagauggcauuu

SEQ ID NO: 4305 - RNA, 21 nt, Artificial Sequence
  source: /note="Description of Artificial Sequence: Synthetic oligonucleotide"
  source: /note="RNA"
  modified_base (1)..(1): bicyclic nucleic acid (BNA)
  source: /note="3' tri-ethylene glycol (TEG)"
aacaucaaggaagauggcauu

SEQ ID NO: 4306 - RNA, 20 nt, Artificial Sequence
  source: /note="Description of Artificial Sequence: Synthetic oligonucleotide"
  source: /note="RNA"
  modified_base (1)..(1): bicyclic nucleic acid (BNA)
  source: /note="3' tri-ethylene glycol (TEG)"
aacaucaaggaagauggcau

SEQ ID NO: 4307 - RNA, 19 nt, Artificial Sequence
  source: /note="Description of Artificial Sequence: Synthetic oligonucleotide"
  source: /note="RNA"
  modified_base (1)..(1): bicyclic nucleic acid (BNA)
  source: /note="3' tri-ethylene glycol (TEG)"
aacaucaaggaagauggca

SEQ ID NO: 4308 - RNA, 18 nt, Artificial Sequence
  source: /note="Description of Artificial Sequence: Synthetic oligonucleotide"
  source: /note="RNA"
  modified_base (1)..(1): bicyclic nucleic acid (BNA)
  source: /note="3' tri-ethylene glycol (TEG)"
aacaucaaggaagauggc

SEQ ID NO: 4309 - RNA, 17 nt, Artificial Sequence
  source: /note="Description of Artificial Sequence: Synthetic oligonucleotide"
  source: /note="RNA"
  modified_base (1)..(1): bicyclic nucleic acid (BNA)
  source: /note="3' tri-ethylene glycol (TEG)"
aacaucaaggaagaugg

SEQ ID NO: 4310 - RNA, 16 nt, Artificial Sequence
  source: /note="Description of Artificial Sequence: Synthetic oligonucleotide"
  source: /note="RNA"
  modified_base (1)..(1): bicyclic nucleic acid (BNA)
  source: /note="3' tri-ethylene glycol (TEG)"
aacaucaaggaagaug

SEQ ID NO: 4311 - RNA, 15 nt, Artificial Sequence
  source: /note="Description of Artificial Sequence: Synthetic oligonucleotide"
  source: /note="RNA"
  modified_base (1)..(1): bicyclic nucleic acid (BNA)
  source: /note="3' tri-ethylene glycol (TEG)"
aacaucaaggaagau

SEQ ID NO: 4312 - RNA, 14 nt, Artificial Sequence
  source: /note="Description of Artificial Sequence: Synthetic oligonucleotide"
  source: /note="RNA"
  modified_base (1)..(1): bicyclic nucleic acid (BNA)
  source: /note="3' tri-ethylene glycol (TEG)"
aacaucaaggaaga

SEQ ID NO: 4313 - RNA, 13 nt, Artificial Sequence
  source: /note="Description of Artificial Sequence: Synthetic oligonucleotide"
  source: /note="RNA"
  modified_base (1)..(1): bicyclic nucleic acid (BNA)
  source: /note="3' tri-ethylene glycol (TEG)"
aacaucaaggaag

SEQ ID NO: 4314 - RNA, 25 nt, Artificial Sequence
  source: /note="Description of Artificial Sequence: Synthetic oligonucleotide"
  source: /note="RNA"
  modified_base (1)..(1): bicyclic nucleic acid (BNA)
  source: /note="3' tri-ethylene glycol (TEG)"
acaucaaggaagauggcauuucuag

SEQ ID NO: 4315 - RNA, 24 nt, Artificial Sequence
  source: /note="Description of Artificial Sequence: Synthetic oligonucleotide"
  source: /note="RNA"
  modified_base (1)..(1): bicyclic nucleic acid (BNA)
  source: /note="3' tri-ethylene glycol (TEG)"
acaucaaggaagauggcauuucua

SEQ ID NO: 4316 - RNA, 23 nt, Artificial Sequence
  source: /note="Description of Artificial Sequence: Synthetic oligonucleotide"
  source: /note="RNA"
  modified_base (1)..(1): bicyclic nucleic acid (BNA)
  source: /note="3' tri-ethylene glycol (TEG)"
acaucaaggaagauggcauuucu

SEQ ID NO: 4317 - RNA, 22 nt, Artificial Sequence
  source: /note="Description of Artificial Sequence: Synthetic oligonucleotide"
  source: /note="RNA"
  modified_base (1)..(1): bicyclic nucleic acid (BNA)
  source: /note="3' tri-ethylene glycol (TEG)"
acaucaaggaagauggcauuuc

SEQ ID NO: 4318 - RNA, 21 nt, Artificial Sequence
  source: /note="Description of Artificial Sequence: Synthetic oligonucleotide"
  source: /note="RNA"
  modified_base (1)..(1): bicyclic nucleic acid (BNA)
  source: /note="3' tri-ethylene glycol (TEG)"
acaucaaggaagauggcauuu

SEQ ID NO: 4319 - RNA, 20 nt, Artificial Sequence
  source: /note="Description of Artificial Sequence: Synthetic oligonucleotide"
  source: /note="RNA"
  modified_base (1)..(1): bicyclic nucleic acid (BNA)
  source: /note="3' tri-ethylene glycol (TEG)"
acaucaaggaagauggcauu

SEQ ID NO: 4320 - RNA, 19 nt, Artificial Sequence
  source: /note="Description of Artificial Sequence: Synthetic oligonucleotide"
  source: /note="RNA"
  modified_base (1)..(1): bicyclic nucleic acid (BNA)
  source: /note="3' tri-ethylene glycol (TEG)"
acaucaaggaagauggcau

SEQ ID NO: 4321 - RNA, 18 nt, Artificial Sequence
  source: /note="Description of Artificial Sequence: Synthetic oligonucleotide"
  source: /note="RNA"
  modified_base (1)..(1): bicyclic nucleic acid (BNA)
  source: /note="3' tri-ethylene glycol (TEG)"
acaucaaggaagauggca

SEQ ID NO: 4322 - RNA, 17 nt, Artificial Sequence
  source: /note="Description of Artificial Sequence: Synthetic oligonucleotide"
  source: /note="RNA"
  modified_base (1)..(1): bicyclic nucleic acid (BNA)
  source: /note="3' tri-ethylene glycol (TEG)"
acaucaaggaagauggc

SEQ ID NO: 4323 - RNA, 16 nt, Artificial Sequence
  source: /note="Description of Artificial Sequence: Synthetic oligonucleotide"
  source: /note="RNA"
  modified_base (1)..(1): bicyclic nucleic acid (BNA)
  source: /note="3' tri-ethylene glycol (TEG)"
acaucaaggaagaugg

SEQ ID NO: 4324 - RNA, 15 nt, Artificial Sequence
  source: /note="Description of Artificial Sequence: Synthetic oligonucleotide"
  source: /note="RNA"
  modified_base (1)..(1): bicyclic nucleic acid (BNA)
  source: /note="3' tri-ethylene glycol (TEG)"
acaucaaggaagaug

SEQ ID NO: 4325 - RNA, 14 nt, Artificial Sequence
  source: /note="Description of Artificial Sequence: Synthetic oligonucleotide"
  source: /note="RNA"
  modified_base (1)..(1): bicyclic nucleic acid (BNA)
  source: /note="3' tri-ethylene glycol (TEG)"
acaucaaggaagau

SEQ ID NO: 4326 - RNA, 13 nt, Artificial Sequence
  source: /note="Description of Artificial Sequence: Synthetic oligonucleotide"
  source: /note="RNA"
  modified_base (1)..(1): bicyclic nucleic acid (BNA)
  source: /note="3' tri-ethylene glycol (TEG)"
acaucaaggaaga

SEQ ID NO: 4327 - RNA, 12 nt, Artificial Sequence
  source: /note="Description of Artificial Sequence: Synthetic oligonucleotide"
  source: /note="RNA"
  modified_base (1)..(1): bicyclic nucleic acid (BNA)
  source: /note="3' tri-ethylene glycol (TEG)"
acaucaaggaag

SEQ ID NO: 4328 - RNA, 24 nt, Artificial Sequence
  source: /note="Description of Artificial Sequence: Synthetic oligonucleotide"
  source: /note="RNA"
  modified_base (1)..(1): bicyclic nucleic acid (BNA)
  source: /note="3' tri-ethylene glycol (TEG)"
caucaaggaagauggcauuucuag

SEQ ID NO: 4329 - RNA, 23 nt, Artificial Sequence
  source: /note="Description of Artificial Sequence: Synthetic oligonucleotide"
  source: /note="RNA"
  modified_base (1)..(1): bicyclic nucleic acid (BNA)
  source: /note="3' tri-ethylene glycol (TEG)"
caucaaggaagauggcauuucua

SEQ ID NO: 4330 - RNA, 22 nt, Artificial Sequence
  source: /note="Description of Artificial Sequence: Synthetic oligonucleotide"
  source: /note="RNA"
  modified_base (1)..(1): bicyclic nucleic acid (BNA)
  source: /note="3' tri-ethylene glycol (TEG)"
caucaaggaagauggcauuucu

SEQ ID NO: 4331 - RNA, 21 nt, Artificial Sequence
  source: /note="Description of Artificial Sequence: Synthetic oligonucleotide"
  source: /note="RNA"
  modified_base (1)..(1): bicyclic nucleic acid (BNA)
  source: /note="3' tri-ethylene glycol (TEG)"
caucaaggaagauggcauuuc

SEQ ID NO: 4332 - RNA, 20 nt, Artificial Sequence
  source: /note="Description of Artificial Sequence: Synthetic oligonucleotide"
  source: /note="RNA"
  modified_base (1)..(1): bicyclic nucleic acid (BNA)
  source: /note="3' tri-ethylene glycol (TEG)"
caucaaggaagauggcauuu

SEQ ID NO: 4333 - RNA, 19 nt, Artificial Sequence
  source: /note="Description of Artificial Sequence: Synthetic oligonucleotide"
  source: /note="RNA"
  modified_base (1)..(1): bicyclic nucleic acid (BNA)
  source: /note="3' tri-ethylene glycol (TEG)"
caucaaggaagauggcauu

SEQ ID NO: 4334 - RNA, 18 nt, Artificial Sequence
  source: /note="Description of Artificial Sequence: Synthetic oligonucleotide"
  source: /note="RNA"
  modified_base (1)..(1): bicyclic nucleic acid (BNA)
  source: /note="3' tri-ethylene glycol (TEG)"
caucaaggaagauggcau

SEQ ID NO: 4335 - RNA, 17 nt, Artificial Sequence
  source: /note="Description of Artificial Sequence: Synthetic oligonucleotide"
  source: /note="RNA"
  modified_base (1)..(1): bicyclic nucleic acid (BNA)
  source: /note="3' tri-ethylene glycol (TEG)"
caucaaggaagauggca

SEQ ID NO: 4336 - RNA, 16 nt, Artificial Sequence
  source: /note="Description of Artificial Sequence: Synthetic oligonucleotide"
  source: /note="RNA"
  modified_base (1)..(1): bicyclic nucleic acid (BNA)
  source: /note="3' tri-ethylene glycol (TEG)"
caucaaggaagauggc

SEQ ID NO: 4337 - RNA, 15 nt, Artificial Sequence
  source: /note="Description of Artificial Sequence: Synthetic oligonucleotide"
  source: /note="RNA"
  modified_base (1)..(1): bicyclic nucleic acid (BNA)
  source: /note="3' tri-ethylene glycol (TEG)"
caucaaggaagaugg

SEQ ID NO: 4338 - RNA, 14 nt, Artificial Sequence
  source: /note="Description of Artificial Sequence: Synthetic oligonucleotide"
  source: /note="RNA"
  modified_base (1)..(1): bicyclic nucleic acid (BNA)
  source: /note="3' tri-ethylene glycol (TEG)"
caucaaggaagaug

SEQ ID NO: 4339 - RNA, 13 nt, Artificial Sequence
  source: /note="Description of Artificial Sequence: Synthetic oligonucleotide"
  source: /note="RNA"
  modified_base (1)..(1): bicyclic nucleic acid (BNA)
  source: /note="3' tri-ethylene glycol (TEG)"
caucaaggaagau

SEQ ID NO: 4340 - RNA, 12 nt, Artificial Sequence
  source: /note="Description of Artificial Sequence: Synthetic oligonucleotide"
  source: /note="RNA"
  modified_base (1)..(1): bicyclic nucleic acid (BNA)
  source: /note="3' tri-ethylene glycol (TEG)"
caucaaggaaga

SEQ ID NO: 4341 - RNA, 11 nt, Artificial Sequence
  source: /note="Description of Artificial Sequence: Synthetic oligonucleotide"
  source: /note="RNA"
  modified_base (1)..(1): bicyclic nucleic acid (BNA)
  source: /note="3' tri-ethylene glycol (TEG)"
caucaaggaag

SEQ ID NO: 4342 - RNA, 23 nt, Artificial Sequence
  source: /note="Description of Artificial Sequence: Synthetic oligonucleotide"
  source: /note="RNA"
  modified_base (1)..(1): bicyclic nucleic acid (BNA)
  source: /note="3' tri-ethylene glycol (TEG)"
aucaaggaagauggcauuucuag

SEQ ID NO: 4343 - RNA, 22 nt, Artificial Sequence
  source: /note="Description of Artificial Sequence: Synthetic oligonucleotide"
  source: /note="RNA"
  modified_base (1)..(1): bicyclic nucleic acid (BNA)
  source: /note="3' tri-ethylene glycol (TEG)"
aucaaggaagauggcauuucua

SEQ ID NO: 4344 - RNA, 21 nt, Artificial Sequence
  source: /note="Description of Artificial Sequence: Synthetic oligonucleotide"
  source: /note="RNA"
  modified_base (1)..(1): bicyclic nucleic acid (BNA)
  source: /note="3' tri-ethylene glycol (TEG)"
aucaaggaagauggcauuucu

SEQ ID NO: 4345 - RNA, 20 nt, Artificial Sequence
  source: /note="Description of Artificial Sequence: Synthetic oligonucleotide"
  source: /note="RNA"
  modified_base (1)..(1): bicyclic nucleic acid (BNA)
  source: /note="3' tri-ethylene glycol (TEG)"
aucaaggaagauggcauuuc

SEQ ID NO: 4346 - RNA, 19 nt, Artificial Sequence
  source: /note="Description of Artificial Sequence: Synthetic oligonucleotide"
  source: /note="RNA"
  modified_base (1)..(1): bicyclic nucleic acid (BNA)
  source: /note="3' tri-ethylene glycol (TEG)"
aucaaggaagauggcauuu

SEQ ID NO: 4347 - RNA, 18 nt, Artificial Sequence
  source: /note="Description of Artificial Sequence: Synthetic oligonucleotide"
  source: /note="RNA"
  modified_base (1)..(1): bicyclic nucleic acid (BNA)
  source: /note="3' tri-ethylene glycol (TEG)"
aucaaggaagauggcauu

SEQ ID NO: 4348 - RNA, 17 nt, Artificial Sequence
  source: /note="Description of Artificial Sequence: Synthetic oligonucleotide"
  source: /note="RNA"
  modified_base (1)..(1): bicyclic nucleic acid (BNA)
  source: /note="3' tri-ethylene glycol (TEG)"
aucaaggaagauggcau

SEQ ID NO: 4349 - RNA, 16 nt, Artificial Sequence
  source: /note="Description of Artificial Sequence: Synthetic oligonucleotide"
  source: /note="RNA"
  modified_base (1)..(1): bicyclic nucleic acid (BNA)
  source: /note="3' tri-ethylene glycol (TEG)"
aucaaggaagauggca

SEQ ID NO: 4350 - RNA, 15 nt, Artificial Sequence
  source: /note="Description of Artificial Sequence: Synthetic oligonucleotide"
  source: /note="RNA"
  modified_base (1)..(1): bicyclic nucleic acid (BNA)
  source: /note="3' tri-ethylene glycol (TEG)"
aucaaggaagauggc

SEQ ID NO: 4351 - RNA, 14 nt, Artificial Sequence
  source: /note="Description of Artificial Sequence: Synthetic oligonucleotide"
  source: /note="RNA"
  modified_base (1)..(1): bicyclic nucleic acid (BNA)
  source: /note="3' tri-ethylene glycol (TEG)"
aucaaggaagaugg

SEQ ID NO: 4352 - RNA, 13 nt, Artificial Sequence
  source: /note="Description of Artificial Sequence: Synthetic oligonucleotide"
  source: /note="RNA"
  modified_base (1)..(1): bicyclic nucleic acid (BNA)
  source: /note="3' tri-ethylene glycol (TEG)"
aucaaggaagaug

SEQ ID NO: 4353 - RNA, 12 nt, Artificial Sequence
  source: /note="Description of Artificial Sequence: Synthetic oligonucleotide"
  source: /note="RNA"
  modified_base (1)..(1): bicyclic nucleic acid (BNA)
  source: /note="3' tri-ethylene glycol (TEG)"
aucaaggaagau

SEQ ID NO: 4354 - RNA, 11 nt, Artificial Sequence
  source: /note="Description of Artificial Sequence: Synthetic oligonucleotide"
  source: /note="RNA"
  modified_base (1)..(1): bicyclic nucleic acid (BNA)
  source: /note="3' tri-ethylene glycol (TEG)"
aucaaggaaga

SEQ ID NO: 4355 - RNA, 10 nt, Artificial Sequence
  source: /note="Description of Artificial Sequence: Synthetic oligonucleotide"
  source: /note="RNA"
  modified_base (1)..(1): bicyclic nucleic acid (BNA)
  source: /note="3' tri-ethylene glycol (TEG)"
aucaaggaag

SEQ ID NO: 4356 - RNA, 23 nt, Artificial Sequence
  source: /note="Description of Artificial Sequence: Synthetic oligonucleotide"
  source: /note="RNA"
  modified_base (1)..(1): bicyclic nucleic acid (BNA)
  source: /note="3' tri-ethylene glycol (TEG)"
ccagagcagguaccuccaacauc

SEQ ID NO: 4357 - RNA, 18 nt, Artificial Sequence
  source: /note="Description of Artificial Sequence: Synthetic oligonucleotide"
  source: /note="RNA"
  modified_base (1)..(1): bicyclic nucleic acid (BNA)
  source: /note="3' tri-ethylene glycol (TEG)"
ccagagcagguaccucca

SEQ ID NO: 4358 - RNA, 23 nt, Artificial Sequence
  source: /note="Description of Artificial Sequence: Synthetic oligonucleotide"
  source: /note="RNA"
  modified_base (1)..(1): bicyclic nucleic acid (BNA)
  source: /note="3' tri-ethylene glycol (TEG)"
ccucugugauuuuauaacuugau

SEQ ID NO: 4359 - DNA, 17 bp, Artificial Sequence
  source: /note="Description of Artificial Sequence: Synthetic oligonucleotide"
  source: /note="Description of Combined DNA/RNA Molecule: Synthetic oligonucleotide"
  source: /note="DNA/RNA"
  modified_base (1)..(1): bicyclic nucleic acid (BNA)
  source: /note="3' tri-ethylene glycol (TEG)"
tcacccaccaucacccu

SEQ ID NO: 4360 - DNA, 20 bp, Artificial Sequence
  source: /note="Description of Artificial Sequence: Synthetic oligonucleotide"
  source: /note="Description of Combined DNA/RNA Molecule: Synthetic oligonucleotide"
  source: /note="DNA/RNA"
  modified_base (1)..(1): bicyclic nucleic acid (BNA)
  source: /note="3' tri-ethylene glycol (TEG)"
tgauauccucaaggucaccc

SEQ ID NO: 4361 - RNA, 22 nt, Artificial Sequence
  source: /note="Description of Artificial Sequence: Synthetic oligonucleotide"
  source: /note="RNA"
  modified_base (1)..(1): bicyclic nucleic acid (BNA)
  source: /note="3' tri-ethylene glycol (TEG)"
cugcuugaugaucaucucguug

SEQ ID NO: 4362 - RNA, 18 nt, Artificial Sequence
  source: /note="Description of Artificial Sequence: Synthetic oligonucleotide"
  source: /note="RNA"
  modified_base (1)..(1): bicyclic nucleic acid (BNA)
  source: /note="3' tri-ethylene glycol (TEG)"
cugcuugaugaucaucuc

SEQ ID NO: 4363 - RNA, 19 nt, Artificial Sequence
  source: /note="Description of Artificial Sequence: Synthetic oligonucleotide"
  source: /note="RNA"
  modified_base (1)..(1): bicyclic nucleic acid (BNA)
  source: /note="3' tri-ethylene glycol (TEG)"
guuuccuuaguaaccacag

SEQ ID NO: 4364 - RNA, 17 nt, Artificial Sequence
  source: /note="Description of Artificial Sequence: Synthetic oligonucleotide"
  source: /note="RNA"
  modified_base (1)..(1): bicyclic nucleic acid (BNA)
  source: /note="3' tri-ethylene glycol (TEG)"
guuuccuuaguaaccac

SEQ ID NO: 4365 - DNA, 20 bp, Artificial Sequence
  source: /note="Description of Artificial Sequence: Synthetic oligonucleotide"
  source: /note="Description of Combined DNA/RNA Molecule: Synthetic oligonucleotide"
  source: /note="DNA/RNA"
  source: /note="5' tri-ethylene glycol (TEG)"
  modified_base (1)..(1): bicyclic nucleic acid (BNA)
  source: /note="3' tri-ethylene glycol (TEG)"
tcaaggaagauggcauuucu

SEQ ID NO: 4366 - DNA, 22 bp, Artificial Sequence
  source: /note="Description of Artificial Sequence: Synthetic oligonucleotide"
  source: /note="Description of Combined DNA/RNA Molecule: Synthetic oligonucleotide"
  source: /note="DNA/RNA"
  source: /note="5' tri-ethylene glycol (TEG)"
  modified_base (1)..(1): bicyclic nucleic acid (BNA)
  source: /note="3' tri-ethylene glycol (TEG)"
tcaaggaagauggcauuucuag

SEQ ID NO: 4367 - RNA, 18 nt, Artificial Sequence
  source: /note="Description of Artificial Sequence: Synthetic oligonucleotide"
  source: /note="RNA"
  source: /note="5' tri-ethylene glycol (TEG)"
  modified_base (1)..(1): bicyclic nucleic acid (BNA)
  source: /note="3' tri-ethylene glycol (TEG)"
gguaaguucuguccaagc

SEQ ID NO: 4368 - RNA, 18 nt, Artificial Sequence
  source: /note="Description of Artificial Sequence: Synthetic oligonucleotide"
  source: /note="RNA"
  source: /note="5' tri-ethylene glycol (TEG)"
  modified_base (1)..(1): bicyclic nucleic acid (BNA)
  source: /note="3' tri-ethylene glycol (TEG)"
guaaguucuguccaagcc

SEQ ID NO: 4369 - RNA, 18 nt, Artificial Sequence
  source: /note="Description of Artificial Sequence: Synthetic oligonucleotide"
  source: /note="RNA"
  source: /note="5' tri-ethylene glycol (TEG)"
  modified_base (1)..(1): bicyclic nucleic acid (BNA)
  source: /note="3' tri-ethylene glycol (TEG)"
agucgguaaguucugucc

SEQ ID NO: 4370 - RNA, 18 nt, Artificial Sequence
  source: /note="Description of Artificial Sequence: Synthetic oligonucleotide"
  source: /note="RNA"
  source: /note="5' tri-ethylene glycol (TEG)"
  modified_base (1)..(1): bicyclic nucleic acid (BNA)
  source: /note="3' tri-ethylene glycol (TEG)"
cuguccaagcccgguuga

SEQ ID NO: 4371 - DNA, 15 bp, Artificial Sequence
  source: /note="Description of Artificial Sequence: Synthetic oligonucleotide"
  source: /note="Description of Combined DNA/RNA Molecule: Synthetic oligonucleotide"
  source: /note="DNA/RNA"
  source: /note="5' tri-ethylene glycol (TEG)"
  modified_base (1)..(1): bicyclic nucleic acid (BNA)
  source: /note="3' tri-ethylene glycol (TEG)"
taaguucuguccaag

SEQ ID NO: 4372 - DNA, 20 bp, Artificial Sequence
  source: /note="Description of Artificial Sequence: Synthetic oligonucleotide"
  source: /note="Description of Combined DNA/RNA Molecule: Synthetic oligonucleotide"
  source: /note="DNA/RNA"
  source: /note="5' tri-ethylene glycol (TEG)"
  modified_base (1)..(1): bicyclic nucleic acid (BNA)
  source: /note="3' tri-ethylene glycol (TEG)"
tucuguccaagcccgguuga

SEQ ID NO: 4373 - DNA, 19 bp, Artificial Sequence
  source: /note="Description of Artificial Sequence: Synthetic oligonucleotide"
  source: /note="Description of Combined DNA/RNA Molecule: Synthetic oligonucleotide"
  source: /note="DNA/RNA"
  source: /note="5' tri-ethylene glycol (TEG)"
  modified_base (1)..(1): bicyclic nucleic acid (BNA)
  source: /note="3' tri-ethylene glycol (TEG)"
tucuguccaagcccgguug

SEQ ID NO: 4374 - DNA, 18 bp, Artificial Sequence
  source: /note="Description of Artificial Sequence: Synthetic oligonucleotide"
  source: /note="Description of Combined DNA/RNA Molecule: Synthetic oligonucleotide"
  source: /note="DNA/RNA"
  source: /note="5' tri-ethylene glycol (TEG)"
  modified_base (1)..(1): bicyclic nucleic acid (BNA)
  source: /note="3' tri-ethylene glycol (TEG)"
tucuguccaagcccgguu

SEQ ID NO: 4375 - DNA, 17 bp, Artificial Sequence
  source: /note="Description of Artificial Sequence: Synthetic oligonucleotide"
  source: /note="Description of Combined DNA/RNA Molecule: Synthetic oligonucleotide"
  source: /note="DNA/RNA"
  source: /note="5' tri-ethylene glycol (TEG)"
  modified_base (1)..(1): bicyclic nucleic acid (BNA)
  source: /note="3' tri-ethylene glycol (TEG)"
tucuguccaagcccggu

SEQ ID NO: 4376 - DNA, 16 bp, Artificial Sequence
  source: /note="Description of Artificial Sequence: Synthetic oligonucleotide"
  source: /note="Description of Combined DNA/RNA Molecule: Synthetic oligonucleotide"
  source: /note="DNA/RNA"
  source: /note="5' tri-ethylene glycol (TEG)"
  modified_base (1)..(1): bicyclic nucleic acid (BNA)
  source: /note="3' tri-ethylene glycol (TEG)"
tucuguccaagcccgg

SEQ ID NO: 4377 - DNA, 15 bp, Artificial Sequence
  source: /note="Description of Artificial Sequence: Synthetic oligonucleotide"
  source: /note="Description of Combined DNA/RNA Molecule: Synthetic oligonucleotide"
  source: /note="DNA/RNA"
  source: /note="5' tri-ethylene glycol (TEG)"
  modified_base (1)..(1): bicyclic nucleic acid (BNA)
  source: /note="3' tri-ethylene glycol (TEG)"
tucuguccaagcccg

SEQ ID NO: 4378 - DNA, 14 bp, Artificial Sequence
  source: /note="Description of Artificial Sequence: Synthetic oligonucleotide"
  source: /note="Description of Combined DNA/RNA Molecule: Synthetic oligonucleotide"
  source: /note="DNA/RNA"
  source: /note="5' tri-ethylene glycol (TEG)"
  modified_base (1)..(1): bicyclic nucleic acid (BNA)
  source: /note="3' tri-ethylene glycol (TEG)"
tucuguccaagccc

SEQ ID NO: 4379 - DNA, 13 bp, Artificial Sequence
  source: /note="Description of Artificial Sequence: Synthetic oligonucleotide"
  source: /note="Description of Combined DNA/RNA Molecule: Synthetic oligonucleotide"
  source: /note="DNA/RNA"
  source: /note="5' tri-ethylene glycol (TEG)"
  modified_base (1)..(1): bicyclic nucleic acid (BNA)
  source: /note="3' tri-ethylene glycol (TEG)"
tucuguccaagcc

SEQ ID NO: 4380 - DNA, 12 bp, Artificial Sequence
  source: /note="Description of Artificial Sequence: Synthetic oligonucleotide"
  source: /note="Description of Combined DNA/RNA Molecule: Synthetic oligonucleotide"
  source: /note="DNA/RNA"
  source: /note="5' tri-ethylene glycol (TEG)"
  modified_base (1)..(1): bicyclic nucleic acid (BNA)
  source: /note="3' tri-ethylene glycol (TEG)"
tucuguccaagc

SEQ ID NO: 4381 - DNA, 11 bp, Artificial Sequence
  source: /note="Description of Artificial Sequence: Synthetic oligonucleotide"
  source: /note="Description of Combined DNA/RNA Molecule: Synthetic oligonucleotide"
  source: /note="DNA/RNA"
  source: /note="5' tri-ethylene glycol (TEG)"
  modified_base (1)..(1): bicyclic nucleic acid (BNA)
  source: /note="3' tri-ethylene glycol (TEG)"
tucuguccaag

SEQ ID NO: 4382 - DNA, 10 bp, Artificial Sequence
  source: /note="Description of Artificial Sequence: Synthetic oligonucleotide"
  source: /note="Description of Combined DNA/RNA Molecule: Synthetic oligonucleotide"
  source: /note="DNA/RNA"
  source: /note="5' tri-ethylene glycol (TEG)"
  modified_base (1)..(1): bicyclic nucleic acid (BNA)
  source: /note="3' tri-ethylene glycol (TEG)"
tucuguccaa

SEQ ID NO: 4383 - DNA, 9 bp, Artificial Sequence
  source: /note="Description of Artificial Sequence: Synthetic oligonucleotide"
  source: /note="Description of Combined DNA/RNA Molecule: Synthetic oligonucleotide"
  source: /note="DNA/RNA"
  source: /note="5' tri-ethylene glycol (TEG)"
  modified_base (1)..(1): bicyclic nucleic acid (BNA)
  source: /note="3' tri-ethylene glycol (TEG)"
tucugucca

SEQ ID NO: 4384 - DNA, 8 bp, Artificial Sequence
  source: /note="Description of Artificial Sequence: Synthetic oligonucleotide"
  source: /note="Description of Combined DNA/RNA Molecule: Synthetic oligonucleotide"
  source: /note="DNA/RNA"
  source: /note="5' tri-ethylene glycol (TEG)"
  modified_base (1)..(1): bicyclic nucleic acid (BNA)
  source: /note="3' tri-ethylene glycol (TEG)"
tucugucc

SEQ ID NO: 4385 - DNA, 19 bp, Artificial Sequence
  source: /note="Description of Artificial Sequence: Synthetic oligonucleotide"
  source: /note="Description of Combined DNA/RNA Molecule: Synthetic oligonucleotide"
  source: /note="DNA/RNA"
  source: /note="5' tri-ethylene glycol (TEG)"
  modified_base (1)..(1): bicyclic nucleic acid (BNA)
  source: /note="3' tri-ethylene glycol (TEG)"
tcuguccaagcccgguuga

SEQ ID NO: 4386 - DNA, 18 bp, Artificial Sequence
  source: /note="Description of Artificial Sequence: Synthetic oligonucleotide"
  source: /note="Description of Combined DNA/RNA Molecule: Synthetic oligonucleotide"
  source: /note="DNA/RNA"
  source: /note="5' tri-ethylene glycol (TEG)"
  modified_base (1)..(1): bicyclic nucleic acid (BNA)
  source: /note="3' tri-ethylene glycol (TEG)"
tcuguccaagcccgguug

SEQ ID NO: 4387 - DNA, 17 bp, Artificial Sequence
  source: /note="Description of Artificial Sequence: Synthetic oligonucleotide"
  source: /note="Description of Combined DNA/RNA Molecule: Synthetic oligonucleotide"
  source: /note="DNA/RNA"
  source: /note="5' tri-ethylene glycol (TEG)"
  modified_base (1)..(1): bicyclic nucleic acid (BNA)
  source: /note="3' tri-ethylene glycol (TEG)"
tcuguccaagcccgguu

SEQ ID NO: 4388 - DNA, 16 bp, Artificial Sequence
  source: /note="Description of Artificial Sequence: Synthetic oligonucleotide"
  source: /note="Description of Combined DNA/RNA Molecule: Synthetic oligonucleotide"
  source: /note="DNA/RNA"
  source: /note="5' tri-ethylene glycol (TEG)"
  modified_base (1)..(1): bicyclic nucleic acid (BNA)
  source: /note="3' tri-ethylene glycol (TEG)"
tcuguccaagcccggu

SEQ ID NO: 4389 - DNA, 15 bp, Artificial Sequence
  source: /note="Description of Artificial Sequence: Synthetic oligonucleotide"
  source: /note="Description of Combined DNA/RNA Molecule: Synthetic oligonucleotide"
  source: /note="DNA/RNA"
  source: /note="5' tri-ethylene glycol (TEG)"
  modified_base (1)..(1): bicyclic nucleic acid (BNA)
  source: /note="3' tri-ethylene glycol (TEG)"
tcuguccaagcccgg

SEQ ID NO: 4390 - DNA, 14 bp, Artificial Sequence
  source: /note="Description of Artificial Sequence: Synthetic oligonucleotide"
  source: /note="Description of Combined DNA/RNA Molecule: Synthetic oligonucleotide"
  source: /note="DNA/RNA"
  source: /note="5' tri-ethylene glycol (TEG)"
  modified_base (1)..(1): bicyclic nucleic acid (BNA)
  source: /note="3' tri-ethylene glycol (TEG)"
tcuguccaagcccg

SEQ ID NO: 4391 - DNA, 13 bp, Artificial Sequence
  source: /note="Description of Artificial Sequence: Synthetic oligonucleotide"
  source: /note="Description of Combined DNA/RNA Molecule: Synthetic oligonucleotide"
  source: /note="DNA/RNA"
  source: /note="5' tri-ethylene glycol (TEG)"
  modified_base (1)..(1): bicyclic nucleic acid (BNA)
  source: /note="3' tri-ethylene glycol (TEG)"
tcuguccaagccc

SEQ ID NO: 4392 - DNA, 12 bp, Artificial Sequence
  source: /note="Description of Artificial Sequence: Synthetic oligonucleotide"
  source: /note="Description of Combined DNA/RNA Molecule: Synthetic oligonucleotide"
  source: /note="DNA/RNA"
  source: /note="5' tri-ethylene glycol (TEG)"
  modified_base (1)..(1): bicyclic nucleic acid (BNA)
  source: /note="3' tri-ethylene glycol (TEG)"
tcuguccaagcc

SEQ ID NO: 4393 - DNA, 11 bp, Artificial Sequence
  source: /note="Description of Artificial Sequence: Synthetic oligonucleotide"
  source: /note="Description of Combined DNA/RNA Molecule: Synthetic oligonucleotide"
  source: /note="DNA/RNA"
  source: /note="5' tri-ethylene glycol (TEG)"
  modified_base (1)..(1): bicyclic nucleic acid (BNA)
  source: /note="3' tri-ethylene glycol (TEG)"
tcuguccaagc

SEQ ID NO: 4394 - DNA, 10 bp, Artificial Sequence
  source: /note="Description of Artificial Sequence: Synthetic oligonucleotide"
  source: /note="Description of Combined DNA/RNA Molecule: Synthetic oligonucleotide"
  source: /note="DNA/RNA"
  source: /note="5' tri-ethylene glycol (TEG)"
  modified_base (1)..(1): bicyclic nucleic acid (BNA)
  source: /note="3' tri-ethylene glycol (TEG)"
tcuguccaag

SEQ ID NO: 4395 - DNA, 9 bp, Artificial Sequence
  source: /note="Description of Artificial Sequence: Synthetic oligonucleotide"
  source: /note="Description of Combined DNA/RNA Molecule: Synthetic oligonucleotide"
  source: /note="DNA/RNA"
  source: /note="5' tri-ethylene glycol (TEG)"
  modified_base (1)..(1): bicyclic nucleic acid (BNA)
  source: /note="3' tri-ethylene glycol (TEG)"
tcuguccaa

SEQ ID NO: 4396 - DNA, 8 bp, Artificial Sequence
  source: /note="Description of Artificial Sequence: Synthetic oligonucleotide"
  source: /note="Description of Combined DNA/RNA Molecule: Synthetic oligonucleotide"
  source: /note="DNA/RNA"
  source: /note="5' tri-ethylene glycol (TEG)"
  modified_base (1)..(1): bicyclic nucleic acid (BNA)
  source: /note="3' tri-ethylene glycol (TEG)"
tcugucca

SEQ ID NO: 4397 - RNA, 17 nt, Artificial Sequence
  source: /note="Description of Artificial Sequence: Synthetic oligonucleotide"
  source: /note="RNA"
  source: /note="5' tri-ethylene glycol (TEG)"
  modified_base (1)..(1): bicyclic nucleic acid (BNA)
  source: /note="3' tri-ethylene glycol (TEG)"
cuguccaagcccgguug

SEQ ID NO: 4398 - RNA, 16 nt, Artificial Sequence
  source: /note="Description of Artificial Sequence: Synthetic oligonucleotide"
  source: /note="RNA"
  source: /note="5' tri-ethylene glycol (TEG)"
  modified_base (1)..(1): bicyclic nucleic acid (BNA)
  source: /note="3' tri-ethylene glycol (TEG)"
cuguccaagcccgguu

SEQ ID NO: 4399 - RNA, 15 nt, Artificial Sequence
  source: /note="Description of Artificial Sequence: Synthetic oligonucleotide"
  source: /note="RNA"
  source: /note="5' tri-ethylene glycol (TEG)"
  modified_base (1)..(1): bicyclic nucleic acid (BNA)
  source: /note="3' tri-ethylene glycol (TEG)"
cuguccaagcccggu

SEQ ID NO: 4400 - RNA, 14 nt, Artificial Sequence
  source: /note="Description of Artificial Sequence: Synthetic oligonucleotide"
  source: /note="RNA"
  source: /note="5' tri-ethylene glycol (TEG)"
  modified_base (1)..(1): bicyclic nucleic acid (BNA)
  source: /note="3' tri-ethylene glycol (TEG)"
cuguccaagcccgg

SEQ ID NO: 4401 - RNA, 13 nt, Artificial Sequence
  source: /note="Description of Artificial Sequence: Synthetic oligonucleotide"
  source: /note="RNA"
  source: /note="5' tri-ethylene glycol (TEG)"
  modified_base (1)..(1): bicyclic nucleic acid (BNA)
  source: /note="3' tri-ethylene glycol (TEG)"
cuguccaagcccg

SEQ ID NO: 4402 - RNA, 12 nt, Artificial Sequence
  source: /note="Description of Artificial Sequence: Synthetic oligonucleotide"
  source: /note="RNA"
  source: /note="5' tri-ethylene glycol (TEG)"
  modified_base (1)..(1): bicyclic nucleic acid (BNA)
  source: /note="3' tri-ethylene glycol (TEG)"
cuguccaagccc

SEQ ID NO: 4403 - RNA, 11 nt, Artificial Sequence
  source: /note="Description of Artificial Sequence: Synthetic oligonucleotide"
  source: /note="RNA"
  source: /note="5' tri-ethylene glycol (TEG)"
  modified_base (1)..(1): bicyclic nucleic acid (BNA)
  source: /note="3' tri-ethylene glycol (TEG)"
cuguccaagcc

SEQ ID NO: 4404 - RNA, 10 nt, Artificial Sequence
  source: /note="Description of Artificial Sequence: Synthetic oligonucleotide"
  source: /note="RNA"
  source: /note="5' tri-ethylene glycol (TEG)"
  modified_base (1)..(1): bicyclic nucleic acid (BNA)
  source: /note="3' tri-ethylene glycol (TEG)"
cuguccaagc

SEQ ID NO: 4405 - RNA, 9 nt, Artificial Sequence
  source: /note="Description of Artificial Sequence: Synthetic oligonucleotide"
  source: /note="RNA"
  source: /note="5' tri-ethylene glycol (TEG)"
  modified_base (1)..(1): bicyclic nucleic acid (BNA)
  source: /note="3' tri-ethylene glycol (TEG)"
cuguccaag

SEQ ID NO: 4406 - RNA, 8 nt, Artificial Sequence
  source: /note="Description of Artificial Sequence: Synthetic oligonucleotide"
  source: /note="RNA"
  source: /note="5' tri-ethylene glycol (TEG)"
  modified_base (1)..(1): bicyclic nucleic acid (BNA)
  source: /note="3' tri-ethylene glycol (TEG)"
cuguccaa

SEQ ID NO: 4407 - RNA, 20 nt, Artificial Sequence
  source: /note="Description of Artificial Sequence: Synthetic oligonucleotide"
  source: /note="RNA"
  source: /note="5' tri-ethylene glycol (TEG)"
  modified_base (1)..(1): bicyclic nucleic acid (BNA)
  source: /note="3' tri-ethylene glycol (TEG)"
guucuguccaagcccgguug

SEQ ID NO: 4408 - RNA, 19 nt, Artificial Sequence
  source: /note="Description of Artificial Sequence: Synthetic oligonucleotide"
  source: /note="RNA"
  source: /note="5' tri-ethylene glycol (TEG)"
  modified_base (1)..(1): bicyclic nucleic acid (BNA)
  source: /note="3' tri-ethylene glycol (TEG)"
guucuguccaagcccgguu

SEQ ID NO: 4409 - RNA, 18 nt, Artificial Sequence
  source: /note="Description of Artificial Sequence: Synthetic oligonucleotide"
  source: /note="RNA"
  source: /note="5' tri-ethylene glycol (TEG)"
  modified_base (1)..(1): bicyclic nucleic acid (BNA)
  source: /note="3' tri-ethylene glycol (TEG)"
guucuguccaagcccggu

SEQ ID NO: 4410 - RNA, 17 nt, Artificial Sequence
  source: /note="Description of Artificial Sequence: Synthetic oligonucleotide"
  source: /note="RNA"
  source: /note="5' tri-ethylene glycol (TEG)"
  modified_base (1)..(1): bicyclic nucleic acid (BNA)
  source: /note="3' tri-ethylene glycol (TEG)"
guucuguccaagcccgg

SEQ ID NO: 4411 - RNA, 16 nt, Artificial Sequence
  source: /note="Description of Artificial Sequence: Synthetic oligonucleotide"
  source: /note="RNA"
  source: /note="5' tri-ethylene glycol (TEG)"
  modified_base (1)..(1): bicyclic nucleic acid (BNA)
  source: /note="3' tri-ethylene glycol (TEG)"
guucuguccaagcccg

SEQ ID NO: 4412 - RNA, 15 nt, Artificial Sequence
  source: /note="Description of Artificial Sequence: Synthetic oligonucleotide"
  source: /note="RNA"
  source: /note="5' tri-ethylene glycol (TEG)"
  modified_base (1)..(1): bicyclic nucleic acid (BNA)
  source: /note="3' tri-ethylene glycol (TEG)"
guucuguccaagccc

SEQ ID NO: 4413 - RNA, 14 nt, Artificial Sequence
  source: /note="Description of Artificial Sequence: Synthetic oligonucleotide"
  source: /note="RNA"
  source: /note="5' tri-ethylene glycol (TEG)"
  modified_base (1)..(1): bicyclic nucleic acid (BNA)
  source: /note="3' tri-ethylene glycol (TEG)"
guucuguccaagcc

SEQ ID NO: 4414 - RNA, 13 nt, Artificial Sequence
  source: /note="Description of Artificial Sequence: Synthetic oligonucleotide"
  source: /note="RNA"
  source: /note="5' tri-ethylene glycol (TEG)"
  modified_base (1)..(1): bicyclic nucleic acid (BNA)
  source: /note="3' tri-ethylene glycol (TEG)"
guucuguccaagc

SEQ ID NO: 4415 - RNA, 12 nt, Artificial Sequence
  source: /note="Description of Artificial Sequence: Synthetic oligonucleotide"
  source: /note="RNA"
  source: /note="5' tri-ethylene glycol (TEG)"
  modified_base (1)..(1): bicyclic nucleic acid (BNA)
  source: /note="3' tri-ethylene glycol (TEG)"
guucuguccaag

SEQ ID NO: 4416 - RNA, 11 nt, Artificial Sequence
  source: /note="Description of Artificial Sequence: Synthetic oligonucleotide"
  source: /note="RNA"
  source: /note="5' tri-ethylene glycol (TEG)"
  modified_base (1)..(1): bicyclic nucleic acid (BNA)
  source: /note="3' tri-ethylene glycol (TEG)"
guucuguccaa

SEQ ID NO: 4417 - RNA, 10 nt, Artificial Sequence
  source: /note="Description of Artificial Sequence: Synthetic oligonucleotide"
  source: /note="RNA"
  source: /note="5' tri-ethylene glycol (TEG)"
  modified_base (1)..(1): bicyclic nucleic acid (BNA)
  source: /note="3' tri-ethylene glycol (TEG)"
guucugucca

SEQ ID NO: 4418 - RNA, 9 nt, Artificial Sequence
  source: /note="Description of Artificial Sequence: Synthetic oligonucleotide"
  source: /note="RNA"
  source: /note="5' tri-ethylene glycol (TEG)"
  modified_base (1)..(1): bicyclic nucleic acid (BNA)
  source: /note="3' tri-ethylene glycol (TEG)"
guucugucc

SEQ ID NO: 4419 - RNA, 8 nt, Artificial Sequence
  source: /note="Description of Artificial Sequence: Synthetic oligonucleotide"
  source: /note="RNA"
  source: /note="5' tri-ethylene glycol (TEG)"
  modified_base (1)..(1): bicyclic nucleic acid (BNA)
  source: /note="3' tri-ethylene glycol (TEG)"
guucuguc

SEQ ID NO: 4420 - RNA, 20 nt, Artificial Sequence
  source: /note="Description of Artificial Sequence: Synthetic oligonucleotide"
  source: /note="RNA"
  source: /note="5' tri-ethylene glycol (TEG)"
  modified_base (1)..(1): bicyclic nucleic acid (BNA)
  source: /note="3' tri-ethylene glycol (TEG)"
aguucuguccaagcccgguu

SEQ ID NO: 4421 - RNA, 19 nt, Artificial Sequence
  source: /note="Description of Artificial Sequence: Synthetic oligonucleotide"
  source: /note="RNA"
  source: /note="5' tri-ethylene glycol (TEG)"
  modified_base (1)..(1): bicyclic nucleic acid (BNA)
  source: /note="3' tri-ethylene glycol (TEG)"
aguucuguccaagcccggu

SEQ ID NO: 4422 - RNA, 18 nt, Artificial Sequence
  source: /note="Description of Artificial Sequence: Synthetic oligonucleotide"
  source: /note="RNA"
  source: /note="5' tri-ethylene glycol (TEG)"
  modified_base (1)..(1): bicyclic nucleic acid (BNA)
  source: /note="3' tri-ethylene glycol (TEG)"
aguucuguccaagcccgg

SEQ ID NO: 4423 - RNA, 17 nt, Artificial Sequence
  source: /note="Description of Artificial Sequence: Synthetic oligonucleotide"
  source: /note="RNA"
  source: /note="5' tri-ethylene glycol (TEG)"
  modified_base (1)..(1): bicyclic nucleic acid (BNA)
  source: /note="3' tri-ethylene glycol (TEG)"
aguucuguccaagcccg

SEQ ID NO: 4424 - RNA, 16 nt, Artificial Sequence
  source: /note="Description of Artificial Sequence: Synthetic oligonucleotide"
  source: /note="RNA"
  source: /note="5' tri-ethylene glycol (TEG)"
  modified_base (1)..(1): bicyclic nucleic acid (BNA)
  source: /note="3' tri-ethylene glycol (TEG)"
aguucuguccaagccc

SEQ ID NO: 4425 - RNA, 15 nt, Artificial Sequence
  source: /note="Description of Artificial Sequence: Synthetic oligonucleotide"
  source: /note="RNA"
  source: /note="5' tri-ethylene glycol (TEG)"
  modified_base (1)..(1): bicyclic nucleic acid (BNA)
  source: /note="3' tri-ethylene glycol (TEG)"
aguucuguccaagcc

SEQ ID NO: 4426 - RNA, 14 nt, Artificial Sequence
  source: /note="Description of Artificial Sequence: Synthetic oligonucleotide"
  source: /note="RNA"
  source: /note="5' tri-ethylene glycol (TEG)"
  modified_base (1)..(1): bicyclic nucleic acid (BNA)
  source: /note="3' tri-ethylene glycol (TEG)"
aguucuguccaagc

SEQ ID NO: 4427 - RNA, 13 nt, Artificial Sequence
  source: /note="Description of Artificial Sequence: Synthetic oligonucleotide"
  source: /note="RNA"
  source: /note="5' tri-ethylene glycol (TEG)"
  modified_base (1)..(1): bicyclic nucleic acid (BNA)
  source: /note="3' tri-ethylene glycol (TEG)"
aguucuguccaag

SEQ ID NO: 4428 - RNA, 12 nt, Artificial Sequence
  source: /note="Description of Artificial Sequence: Synthetic oligonucleotide"
  source: /note="RNA"
  source: /note="5' tri-ethylene glycol (TEG)"
  modified_base (1)..(1): bicyclic nucleic acid (BNA)
  source: /note="3' tri-ethylene glycol (TEG)"
aguucuguccaa

SEQ ID NO: 4429 - RNA, 11 nt, Artificial Sequence
  source: /note="Description of Artificial Sequence: Synthetic oligonucleotide"
  source: /note="RNA"
  source: /note="5' tri-ethylene glycol (TEG)"
  modified_base (1)..(1): bicyclic nucleic acid (BNA)
  source: /note="3' tri-ethylene glycol (TEG)"
aguucugucca

SEQ ID NO: 4430 - RNA, 10 nt, Artificial Sequence
  source: /note="Description of Artificial Sequence: Synthetic oligonucleotide"
  source: /note="RNA"
  source: /note="5' tri-ethylene glycol (TEG)"
  modified_base (1)..(1): bicyclic nucleic acid (BNA)
  source: /note="3' tri-ethylene glycol (TEG)"
aguucugucc

SEQ ID NO: 4431 - RNA, 9 nt, Artificial Sequence
  source: /note="Description of Artificial Sequence: Synthetic oligonucleotide"
  source: /note="RNA"
  source: /note="5' tri-ethylene glycol (TEG)"
  modified_base (1)..(1): bicyclic nucleic acid (BNA)
  source: /note="3' tri-ethylene glycol (TEG)"
aguucuguc

SEQ ID NO: 4432 - RNA, 8 nt, Artificial Sequence
  source: /note="Description of Artificial Sequence: Synthetic oligonucleotide"
  source: /note="RNA"
  source: /note="5' tri-ethylene glycol (TEG)"
  modified_base (1)..(1): bicyclic nucleic acid (BNA)
  source: /note="3' tri-ethylene glycol (TEG)"
aguucugu

SEQ ID NO: 4433 - RNA, 20 nt, Artificial Sequence
  source: /note="Description of Artificial Sequence: Synthetic oligonucleotide"
  source: /note="RNA"
  source: /note="5' tri-ethylene glycol (TEG)"
  modified_base (1)..(1): bicyclic nucleic acid (BNA)
  source: /note="3' tri-ethylene glycol (TEG)"
aaguucuguccaagcccggu

SEQ ID NO: 4434 - RNA, 19 nt, Artificial Sequence
  source: /note="Description of Artificial Sequence: Synthetic oligonucleotide"
  source: /note="RNA"
  source: /note="5' tri-ethylene glycol (TEG)"
  modified_base (1)..(1): bicyclic nucleic acid (BNA)
  source: /note="3' tri-ethylene glycol (TEG)"
aaguucuguccaagcccgg

SEQ ID NO: 4435 - RNA, 18 nt, Artificial Sequence
  source: /note="Description of Artificial Sequence: Synthetic oligonucleotide"
  source: /note="RNA"
  source: /note="5' tri-ethylene glycol (TEG)"
  modified_base (1)..(1): bicyclic nucleic acid (BNA)
  source: /note="3' tri-ethylene glycol (TEG)"
aaguucuguccaagcccg

SEQ ID NO: 4436 - RNA, 17 nt, Artificial Sequence
  source: /note="Description of Artificial Sequence: Synthetic oligonucleotide"
  source: /note="RNA"
  source: /note="5' tri-ethylene glycol (TEG)"
  modified_base (1)..(1): bicyclic nucleic acid (BNA)
  source: /note="3' tri-ethylene glycol (TEG)"
aaguucuguccaagccc

SEQ ID NO: 4437 - RNA, 16 nt, Artificial Sequence
  source: /note="Description of Artificial Sequence: Synthetic oligonucleotide"
  source: /note="RNA"
  source: /note="5' tri-ethylene glycol (TEG)"
  modified_base (1)..(1): bicyclic nucleic acid (BNA)
  source: /note="3' tri-ethylene glycol (TEG)"
aaguucuguccaagcc

SEQ ID NO: 4438 - RNA, 15 nt, Artificial Sequence
  source: /note="Description of Artificial Sequence: Synthetic oligonucleotide"
  source: /note="RNA"
  source: /note="5' tri-ethylene glycol (TEG)"
  modified_base (1)..(1): bicyclic nucleic acid (BNA)
  source: /note="3' tri-ethylene glycol (TEG)"
aaguucuguccaagc

SEQ ID NO: 4439 - RNA, 14 nt, Artificial Sequence
  source: /note="Description of Artificial Sequence: Synthetic oligonucleotide"
  source: /note="RNA"
  source: /note="5' tri-ethylene glycol (TEG)"
  modified_base (1)..(1): bicyclic nucleic acid (BNA)
  source: /note="3' tri-ethylene glycol (TEG)"
aaguucuguccaag

SEQ ID NO: 4440 - RNA, 13 nt, Artificial Sequence
  source: /note="Description of Artificial Sequence: Synthetic oligonucleotide"
  source: /note="RNA"
  source: /note="5' tri-ethylene glycol (TEG)"
  modified_base (1)..(1): bicyclic nucleic acid (BNA)
  source: /note="3' tri-ethylene glycol (TEG)"
aaguucuguccaa

SEQ ID NO: 4441 - RNA, 12 nt, Artificial Sequence
  source: /note="Description of Artificial Sequence: Synthetic oligonucleotide"
  source: /note="RNA"
  source: /note="5' tri-ethylene glycol (TEG)"
  modified_base (1)..(1): bicyclic nucleic acid (BNA)
  source: /note="3' tri-ethylene glycol (TEG)"
aaguucugucca

SEQ ID NO: 4442 - RNA, 11 nt, Artificial Sequence
  source: /note="Description of Artificial Sequence: Synthetic oligonucleotide"
  source: /note="RNA"
  source: /note="5' tri-ethylene glycol (TEG)"
  modified_base (1)..(1): bicyclic nucleic acid (BNA)
  source: /note="3' tri-ethylene glycol (TEG)"
aaguucugucc

SEQ ID NO: 4443 - RNA, 10 nt, Artificial Sequence
  source: /note="Description of Artificial Sequence: Synthetic oligonucleotide"
  source: /note="RNA"
  source: /note="5' tri-ethylene glycol (TEG)"
  modified_base (1)..(1): bicyclic nucleic acid (BNA)
  source: /note="3' tri-ethylene glycol (TEG)"
aaguucuguc

SEQ ID NO: 4444 - RNA, 9 nt, Artificial Sequence
  source: /note="Description of Artificial Sequence: Synthetic oligonucleotide"
  source: /note="RNA"
  source: /note="5' tri-ethylene glycol (TEG)"
  modified_base (1)..(1): bicyclic nucleic acid (BNA)
  source: /note="3' tri-ethylene glycol (TEG)"
aaguucugu

SEQ ID NO: 4445 - RNA, 8 nt, Artificial Sequence
  source: /note="Description of Artificial Sequence: Synthetic oligonucleotide"
  source: /note="RNA"
  source: /note="5' tri-ethylene glycol (TEG)"
  modified_base (1)..(1): bicyclic nucleic acid (BNA)
  source: /note="3' tri-ethylene glycol (TEG)"
aaguucug

SEQ ID NO: 4446 - DNA, 20 bp, Artificial Sequence
  source: /note="Description of Artificial Sequence: Synthetic oligonucleotide"
  source: /note="Description of Combined DNA/RNA Molecule: Synthetic oligonucleotide"
  source: /note="DNA/RNA"
  source: /note="5' tri-ethylene glycol (TEG)"
  modified_base (1)..(1): bicyclic nucleic acid (BNA)
  source: /note="3' tri-ethylene glycol (TEG)"
taaguucuguccaagcccgg

SEQ ID NO: 4447 - DNA, 19 bp, Artificial Sequence
  source: /note="Description of Artificial Sequence: Synthetic oligonucleotide"
  source: /note="Description of Combined DNA/RNA Molecule: Synthetic oligonucleotide"
  source: /note="DNA/RNA"
  source: /note="5' tri-ethylene glycol (TEG)"
  modified_base (1)..(1): bicyclic nucleic acid (BNA)
  source: /note="3' tri-ethylene glycol (TEG)"
taaguucuguccaagcccg

SEQ ID NO: 4448 - DNA, 18 bp, Artificial Sequence
  source: /note="Description of Artificial Sequence: Synthetic oligonucleotide"
  source: /note="Description of Combined DNA/RNA Molecule: Synthetic oligonucleotide"
  source: /note="DNA/RNA"
  source: /note="5' tri-ethylene glycol (TEG)"
  modified_base (1)..(1): bicyclic nucleic acid (BNA)
  source: /note="3' tri-ethylene glycol (TEG)"
taaguucuguccaagccc

SEQ ID NO: 4449 - DNA, 17 bp, Artificial Sequence
  source: /note="Description of Artificial Sequence: Synthetic oligonucleotide"
  source: /note="Description of Combined DNA/RNA Molecule: Synthetic oligonucleotide"
  source: /note="DNA/RNA"
  source: /note="5' tri-ethylene glycol (TEG)"
  modified_base (1)..(1): bicyclic nucleic acid (BNA)
  source: /note="3' tri-ethylene glycol (TEG)"
taaguucuguccaagcc

SEQ ID NO: 4450 - DNA, 16 bp, Artificial Sequence
  source: /note="Description of Artificial Sequence: Synthetic oligonucleotide"
  source: /note="Description of Combined DNA/RNA Molecule: Synthetic oligonucleotide"
  source: /note="DNA/RNA"
  source: /note="5' tri-ethylene glycol (TEG)"
  modified_base (1)..(1): bicyclic nucleic acid (BNA)
  source: /note="3' tri-ethylene glycol (TEG)"
taaguucuguccaagc

SEQ ID NO: 4451 - DNA, 14 bp, Artificial Sequence
  source: /note="Description of Artificial Sequence: Synthetic oligonucleotide"
  source: /note="Description of Combined DNA/RNA Molecule: Synthetic oligonucleotide"
  source: /note="DNA/RNA"
  source: /note="5' tri-ethylene glycol (TEG)"
  modified_base (1)..(1): bicyclic nucleic acid (BNA)
  source: /note="3' tri-ethylene glycol (TEG)"
taaguucuguccaa

SEQ ID NO: 4452 - DNA, 13 bp, Artificial Sequence
  source: /note="Description of Artificial Sequence: Synthetic oligonucleotide"
  source: /note="Description of Combined DNA/RNA Molecule: Synthetic oligonucleotide"
  source: /note="DNA/RNA"
  source: /note="5' tri-ethylene glycol (TEG)"
  modified_base (1)..(1): bicyclic nucleic acid (BNA)
  source: /note="3' tri-ethylene glycol (TEG)"
taaguucugucca

SEQ ID NO: 4453 - DNA, 12 bp, Artificial Sequence
  source: /note="Description of Artificial Sequence: Synthetic oligonucleotide"
  source: /note="Description of Combined DNA/RNA Molecule: Synthetic oligonucleotide"
  source: /note="DNA/RNA"
  source: /note="5' tri-ethylene glycol (TEG)"
  modified_base (1)..(1): bicyclic nucleic acid (BNA)
  source: /note="3' tri-ethylene glycol (TEG)"
taaguucugucc

SEQ ID NO: 4454 - DNA, 11 bp, Artificial Sequence
  source: /note="Description of Artificial Sequence: Synthetic oligonucleotide"
  source: /note="Description of Combined DNA/RNA Molecule: Synthetic oligonucleotide"
  source: /note="DNA/RNA"
  source: /note="5' tri-ethylene glycol (TEG)"
  modified_base (1)..(1): bicyclic nucleic acid (BNA)
  source: /note="3' tri-ethylene glycol (TEG)"
taaguucuguc

SEQ ID NO: 4455 - DNA, 10 bp, Artificial Sequence
  source: /note="Description of Artificial Sequence: Synthetic oligonucleotide"
  source: /note="Description of Combined DNA/RNA Molecule: Synthetic oligonucleotide"
  source: /note="DNA/RNA"
  source: /note="5' tri-ethylene glycol (TEG)"
  modified_base (1)..(1): bicyclic nucleic acid (BNA)
  source: /note="3' tri-ethylene glycol (TEG)"
taaguucugu

SEQ ID NO: 4456 - DNA, 9 bp, Artificial Sequence
  source: /note="Description of Artificial Sequence: Synthetic oligonucleotide"
  source: /note="Description of Combined DNA/RNA Molecule: Synthetic oligonucleotide"
  source: /note="DNA/RNA"
  source: /note="5' tri-ethylene glycol (TEG)"
  modified_base (1)..(1): bicyclic nucleic acid (BNA)
  source: /note="3' tri-ethylene glycol (TEG)"
taaguucug

SEQ ID NO: 4457 - DNA, 8 bp, Artificial Sequence
  source: /note="Description of Artificial Sequence: Synthetic oligonucleotide"
  source: /note="Description of Combined DNA/RNA Molecule: Synthetic oligonucleotide"
  source: /note="DNA/RNA"
  source: /note="5' tri-ethylene glycol (TEG)"
  modified_base (1)..(1): bicyclic nucleic acid (BNA)
  source: /note="3' tri-ethylene glycol (TEG)"
taaguucu

SEQ ID NO: 4458 - RNA, 20 nt, Artificial Sequence
  source: /note="Description of Artificial Sequence: Synthetic oligonucleotide"
  source: /note="RNA"
  source: /note="5' tri-ethylene glycol (TEG)"
  modified_base (1)..(1): bicyclic nucleic acid (BNA)
  source: /note="3' tri-ethylene glycol (TEG)"
guaaguucuguccaagcccg

SEQ ID NO: 4459 - RNA, 19 nt, Artificial Sequence
  source: /note="Description of Artificial Sequence: Synthetic oligonucleotide"
  source: /note="RNA"
  source: /note="5' tri-ethylene glycol (TEG)"
  modified_base (1)..(1): bicyclic nucleic acid (BNA)
  source: /note="3' tri-ethylene glycol (TEG)"
guaaguucuguccaagccc

SEQ ID NO: 4460 - RNA, 17 nt, Artificial Sequence
  source: /note="Description of Artificial Sequence: Synthetic oligonucleotide"
  source: /note="RNA"
  source: /note="5' tri-ethylene glycol (TEG)"
  modified_base (1)..(1): bicyclic nucleic acid (BNA)
  source: /note="3' tri-ethylene glycol (TEG)"
guaaguucuguccaagc

SEQ ID NO: 4461 - RNA, 16 nt, Artificial Sequence
  source: /note="Description of Artificial Sequence: Synthetic oligonucleotide"
  source: /note="RNA"
  source: /note="5' tri-ethylene glycol (TEG)"
  modified_base (1)..(1): bicyclic nucleic acid (BNA)
  source: /note="3' tri-ethylene glycol (TEG)"
guaaguucuguccaag

SEQ ID NO: 4462 - RNA, 15 nt, Artificial Sequence
  source: /note="Description of Artificial Sequence: Synthetic oligonucleotide"
  source: /note="RNA"
  source: /note="5' tri-ethylene glycol (TEG)"
  modified_base (1)..(1): bicyclic nucleic acid (BNA)
  source: /note="3' tri-ethylene glycol (TEG)"
guaaguucuguccaa

SEQ ID NO: 4463 - RNA, 14 nt, Artificial Sequence
  source: /note="Description of Artificial Sequence: Synthetic oligonucleotide"
  source: /note="RNA"
  source: /note="5' tri-ethylene glycol (TEG)"
  modified_base (1)..(1): bicyclic nucleic acid (BNA)
  source: /note="3' tri-ethylene glycol (TEG)"
guaaguucugucca

SEQ ID NO: 4464 - RNA, 13 nt, Artificial Sequence
  source: /note="Description of Artificial Sequence: Synthetic oligonucleotide"
  source: /note="RNA"
  source: /note="5' tri-ethylene glycol (TEG)"
  modified_base (1)..(1): bicyclic nucleic acid (BNA)
  source: /note="3' tri-ethylene glycol (TEG)"
guaaguucugucc

SEQ ID NO: 4465 - RNA, 12 nt, Artificial Sequence
  source: /note="Description of Artificial Sequence: Synthetic oligonucleotide"
  source: /note="RNA"
  source: /note="5' tri-ethylene glycol (TEG)"
  modified_base (1)..(1): bicyclic nucleic acid (BNA)
  source: /note="3' tri-ethylene glycol (TEG)"
guaaguucuguc

SEQ ID NO: 4466 - RNA, 11 nt, Artificial Sequence
  source: /note="Description of Artificial Sequence: Synthetic oligonucleotide"
  source: /note="RNA"
  source: /note="5' tri-ethylene glycol (TEG)"
  modified_base (1)..(1): bicyclic nucleic acid (BNA)
  source: /note="3' tri-ethylene glycol (TEG)"
guaaguucugu

SEQ ID NO: 4467 - RNA, 10 nt, Artificial Sequence
  source: /note="Description of Artificial Sequence: Synthetic oligonucleotide"
  source: /note="RNA"
  source: /note="5' tri-ethylene glycol (TEG)"
  modified_base (1)..(1): bicyclic nucleic acid (BNA)
  source: /note="3' tri-ethylene glycol (TEG)"
guaaguucug

SEQ ID NO: 4468 - RNA, 9 nt, Artificial Sequence
  source: /note="Description of Artificial Sequence: Synthetic oligonucleotide"
  source: /note="RNA"
  source: /note="5' tri-ethylene glycol (TEG)"
  modified_base (1)..(1): bicyclic nucleic acid (BNA)
  source: /note="3' tri-ethylene glycol (TEG)"
guaaguucu

SEQ ID NO: 4469 - RNA, 8 nt, Artificial Sequence
  source: /note="Description of Artificial Sequence: Synthetic oligonucleotide"
  source: /note="RNA"
  source: /note="5' tri-ethylene glycol (TEG)"
  modified_base (1)..(1): bicyclic nucleic acid (BNA)
  source: /note="3' tri-ethylene glycol (TEG)"
guaaguuc

SEQ ID NO: 4470 - RNA, 20 nt, Artificial Sequence
  source: /note="Description of Artificial Sequence: Synthetic oligonucleotide"
  source: /note="RNA"
  source: /note="5' tri-ethylene glycol (TEG)"
  modified_base (1)..(1): bicyclic nucleic acid (BNA)
  source: /note="3' tri-ethylene glycol (TEG)"
gguaaguucuguccaagccc

SEQ ID NO: 4471 - RNA, 19 nt, Artificial Sequence
  source: /note="Description of Artificial Sequence: Synthetic oligonucleotide"
  source: /note="RNA"
  source: /note="5' tri-ethylene glycol (TEG)"
  modified_base (1)..(1): bicyclic nucleic acid (BNA)
  source: /note="3' tri-ethylene glycol (TEG)"
gguaaguucuguccaagcc

SEQ ID NO: 4472 - RNA, 17 nt, Artificial Sequence
  source: /note="Description of Artificial Sequence: Synthetic oligonucleotide"
  source: /note="RNA"
  source: /note="5' tri-ethylene glycol (TEG)"
  modified_base (1)..(1): bicyclic nucleic acid (BNA)
  source: /note="3' tri-ethylene glycol (TEG)"
gguaaguucuguccaag

SEQ ID NO: 4473 - RNA, 16 nt, Artificial Sequence
  source: /note="Description of Artificial Sequence: Synthetic oligonucleotide"
  source: /note="RNA"
  source: /note="5' tri-ethylene glycol (TEG)"
  modified_base (1)..(1): bicyclic nucleic acid (BNA)
  source: /note="3' tri-ethylene glycol (TEG)"
gguaaguucuguccaa

SEQ ID NO: 4474 - RNA, 15 nt, Artificial Sequence
  source: /note="Description of Artificial Sequence: Synthetic oligonucleotide"
  source: /note="RNA"
  source: /note="5' tri-ethylene glycol (TEG)"
  modified_base (1)..(1): bicyclic nucleic acid (BNA)
  source: /note="3' tri-ethylene glycol (TEG)"
gguaaguucugucca

SEQ ID NO: 4475 - RNA, 14 nt, Artificial Sequence
  source: /note="Description of Artificial Sequence: Synthetic oligonucleotide"
  source: /note="RNA"
  source: /note="5' tri-ethylene glycol (TEG)"
  modified_base (1)..(1): bicyclic nucleic acid (BNA)
  source: /note="3' tri-ethylene glycol (TEG)"
gguaaguucugucc

SEQ ID NO: 4476 - RNA, 13 nt, Artificial Sequence
  source: /note="Description of Artificial Sequence: Synthetic oligonucleotide"
  source: /note="RNA"
  source: /note="5' tri-ethylene glycol (TEG)"
  modified_base (1)..(1): bicyclic nucleic acid (BNA)
  source: /note="3' tri-ethylene glycol (TEG)"
gguaaguucuguc

SEQ ID NO: 4477 - RNA, 12 nt, Artificial Sequence
  source: /note="Description of Artificial Sequence: Synthetic oligonucleotide"
  source: /note="RNA"
  source: /note="5' tri-ethylene glycol (TEG)"
  modified_base (1)..(1): bicyclic nucleic acid (BNA)
  source: /note="3' tri-ethylene glycol (TEG)"
gguaaguucugu

SEQ ID NO: 4478 - RNA, 11 nt, Artificial Sequence
  source: /note="Description of Artificial Sequence: Synthetic oligonucleotide"
  source: /note="RNA"
  source: /note="5' tri-ethylene glycol (TEG)"
  modified_base (1)..(1): bicyclic nucleic acid (BNA)
  source: /note="3' tri-ethylene glycol (TEG)"
gguaaguucug

SEQ ID NO: 4479 - RNA, 10 nt, Artificial Sequence
  source: /note="Description of Artificial Sequence: Synthetic oligonucleotide"
  source: /note="RNA"
  source: /note="5' tri-ethylene glycol (TEG)"
  modified_base (1)..(1): bicyclic nucleic acid (BNA)
  source: /note="3' tri-ethylene glycol (TEG)"
gguaaguucu

SEQ ID NO: 4480 - RNA, 9 nt, Artificial Sequence
  source: /note="Description of Artificial Sequence: Synthetic oligonucleotide"
  source: /note="RNA"
  source: /note="5' tri-ethylene glycol (TEG)"
  modified_base (1)..(1): bicyclic nucleic acid (BNA)
  source: /note="3' tri-ethylene glycol (TEG)"
gguaaguuc

SEQ ID NO: 4481 - RNA, 8 nt, Artificial Sequence
  source: /note="Description of Artificial Sequence: Synthetic oligonucleotide"
  source: /note="RNA"
  source: /note="5' tri-ethylene glycol (TEG)"
  modified_base (1)..(1): bicyclic nucleic acid (BNA)
  source: /note="3' tri-ethylene glycol (TEG)"
gguaaguu

SEQ ID NO: 4482 - RNA, 20 nt, Artificial Sequence
  source: /note="Description of Artificial Sequence: Synthetic oligonucleotide"
  source: /note="RNA"
  source: /note="5' tri-ethylene glycol (TEG)"
  modified_base (1)..(1): bicyclic nucleic acid (BNA)
  source: /note="3' tri-ethylene glycol (TEG)"
cgguaaguucuguccaagcc

SEQ ID NO: 4483 - RNA, 19 nt, Artificial Sequence
  source: /note="Description of Artificial Sequence: Synthetic oligonucleotide"
  source: /note="RNA"
  source: /note="5' tri-ethylene glycol (TEG)"
  modified_base (1)..(1): bicyclic nucleic acid (BNA)
  source: /note="3' tri-ethylene glycol (TEG)"
cgguaaguucuguccaagc

SEQ ID NO: 4484 - RNA, 18 nt, Artificial Sequence
  source: /note="Description of Artificial Sequence: Synthetic oligonucleotide"
  source: /note="RNA"
  source: /note="5' tri-ethylene glycol (TEG)"
  modified_base (1)..(1): bicyclic nucleic acid (BNA)
  source: /note="3' tri-ethylene glycol (TEG)"
cgguaaguucuguccaag

SEQ ID NO: 4485 - RNA, 17 nt, Artificial Sequence
  source: /note="Description of Artificial Sequence: Synthetic oligonucleotide"
  source: /note="RNA"
  source: /note="5' tri-ethylene glycol (TEG)"
  modified_base (1)..(1): bicyclic nucleic acid (BNA)
  source: /note="3' tri-ethylene glycol (TEG)"
cgguaaguucuguccaa

SEQ ID NO: 4486 - RNA, 16 nt, Artificial Sequence
  source: /note="Description of Artificial Sequence: Synthetic oligonucleotide"
  source: /note="RNA"
  source: /note="5' tri-ethylene glycol (TEG)"
  modified_base (1)..(1): bicyclic nucleic acid (BNA)
  source: /note="3' tri-ethylene glycol (TEG)"
cgguaaguucugucca

SEQ ID NO: 4487 - RNA, 15 nt, Artificial Sequence
  source: /note="Description of Artificial Sequence: Synthetic oligonucleotide"
  source: /note="RNA"
  source: /note="5' tri-ethylene glycol (TEG)"
  modified_base (1)..(1): bicyclic nucleic acid (BNA)
  source: /note="3' tri-ethylene glycol (TEG)"
cgguaaguucugucc

SEQ ID NO: 4488 - RNA, 14 nt, Artificial Sequence
  source: /note="Description of Artificial Sequence: Synthetic oligonucleotide"
  source: /note="RNA"
  source: /note="5' tri-ethylene glycol (TEG)"
  modified_base (1)..(1): bicyclic nucleic acid (BNA)
  source: /note="3' tri-ethylene glycol (TEG)"
cgguaaguucuguc

SEQ ID NO: 4489 - RNA, 13 nt, Artificial Sequence
  source: /note="Description of Artificial Sequence: Synthetic oligonucleotide"
  source: /note="RNA"
  source: /note="5' tri-ethylene glycol (TEG)"
  modified_base (1)..(1): bicyclic nucleic acid (BNA)
  source: /note="3' tri-ethylene glycol (TEG)"
cgguaaguucugu

SEQ ID NO: 4490 - RNA, 12 nt, Artificial Sequence
  source: /note="Description of Artificial Sequence: Synthetic oligonucleotide"
  source: /note="RNA"
  source: /note="5' tri-ethylene glycol (TEG)"
  modified_base (1)..(1): bicyclic nucleic acid (BNA)
  source: /note="3' tri-ethylene glycol (TEG)"
cgguaaguucug

SEQ ID NO: 4491 - RNA, 11 nt, Artificial Sequence
  source: /note="Description of Artificial Sequence: Synthetic oligonucleotide"
  source: /note="RNA"
  source: /note="5' tri-ethylene glycol (TEG)"
  modified_base (1)..(1): bicyclic nucleic acid (BNA)
  source: /note="3' tri-ethylene glycol (TEG)"
cgguaaguucu

SEQ ID NO: 4492 - RNA, 10 nt, Artificial Sequence
  source: /note="Description of Artificial Sequence: Synthetic oligonucleotide"
  source: /note="RNA"
  source: /note="5' tri-ethylene glycol (TEG)"
  modified_base (1)..(1): bicyclic nucleic acid (BNA)
  source: /note="3' tri-ethylene glycol (TEG)"
cgguaaguuc

SEQ ID NO: 4493 - RNA, 9 nt, Artificial Sequence
  source: /note="Description of Artificial Sequence: Synthetic oligonucleotide"
  source: /note="RNA"
  source: /note="5' tri-ethylene glycol (TEG)"
  modified_base (1)..(1): bicyclic nucleic acid (BNA)
  source: /note="3' tri-ethylene glycol (TEG)"
cgguaaguu

SEQ ID NO: 4494 - RNA, 8 nt, Artificial Sequence
  source: /note="Description of Artificial Sequence: Synthetic oligonucleotide"
  source: /note="RNA"
  source: /note="5' tri-ethylene glycol (TEG)"
  modified_base (1)..(1): bicyclic nucleic acid (BNA)
  source: /note="3' tri-ethylene glycol (TEG)"
cgguaagu

SEQ ID NO: 4495 - DNA, 20 bp, Artificial Sequence
  source: /note="Description of Artificial Sequence: Synthetic oligonucleotide"
  source: /note="Description of Combined DNA/RNA Molecule: Synthetic oligonucleotide"
  source: /note="DNA/RNA"
  source: /note="5' tri-ethylene glycol (TEG)"
  modified_base (1)..(1): bicyclic nucleic acid (BNA)
  source: /note="3' tri-ethylene glycol (TEG)"
tcgguaaguucuguccaagc

SEQ ID NO: 4496 - DNA, 19 bp, Artificial Sequence
  source: /note="Description of Artificial Sequence: Synthetic oligonucleotide"
  source: /note="Description of Combined DNA/RNA Molecule: Synthetic oligonucleotide"
  source: /note="DNA/RNA"
  source: /note="5' tri-ethylene glycol (TEG)"
  modified_base (1)..(1): bicyclic nucleic acid (BNA)
  source: /note="3' tri-ethylene glycol (TEG)"
tcgguaaguucuguccaag

SEQ ID NO: 4497 - DNA, 18 bp, Artificial Sequence
  source: /note="Description of Artificial Sequence: Synthetic oligonucleotide"
  source: /note="Description of Combined DNA/RNA Molecule: Synthetic oligonucleotide"
  source: /note="DNA/RNA"
  source: /note="5' tri-ethylene glycol (TEG)"
  modified_base (1)..(1): bicyclic nucleic acid (BNA)
  source: /note="3' tri-ethylene glycol (TEG)"
tcgguaaguucuguccaa

SEQ ID NO: 4498 - DNA, 17 bp, Artificial Sequence
  source: /note="Description of Artificial Sequence: Synthetic oligonucleotide"
  source: /note="Description of Combined DNA/RNA Molecule: Synthetic oligonucleotide"
  source: /note="DNA/RNA"
  source: /note="5' tri-ethylene glycol (TEG)"
  modified_base (1)..(1): bicyclic nucleic acid (BNA)
  source: /note="3' tri-ethylene glycol (TEG)"
tcgguaaguucugucca

SEQ ID NO: 4499 - DNA, 16 bp, Artificial Sequence
  source: /note="Description of Artificial Sequence: Synthetic oligonucleotide"
  source: /note="Description of Combined DNA/RNA Molecule: Synthetic oligonucleotide"
  source: /note="DNA/RNA"
  source: /note="5' tri-ethylene glycol (TEG)"
  modified_base (1)..(1): bicyclic nucleic acid (BNA)
  source: /note="3' tri-ethylene glycol (TEG)"
tcgguaaguucugucc

SEQ ID NO: 4500 - DNA, 15 bp, Artificial Sequence
  source: /note="Description of Artificial Sequence: Synthetic oligonucleotide"
  source: /note="Description of Combined DNA/RNA Molecule: Synthetic oligonucleotide"
  source: /note="DNA/RNA"
  source: /note="5' tri-ethylene glycol (TEG)"
  modified_base (1)..(1): bicyclic nucleic acid (BNA)
  source: /note="3' tri-ethylene glycol (TEG)"
tcgguaaguucuguc

SEQ ID NO: 4501 - DNA, 14 bp, Artificial Sequence
  source: /note="Description of Artificial Sequence: Synthetic oligonucleotide"
  source: /note="Description of Combined DNA/RNA Molecule: Synthetic oligonucleotide"
  source: /note="DNA/RNA"
  source: /note="5' tri-ethylene glycol (TEG)"
  modified_base (1)..(1): bicyclic nucleic acid (BNA)
  source: /note="3' tri-ethylene glycol (TEG)"
tcgguaaguucugu

SEQ ID NO: 4502 - DNA, 13 bp, Artificial Sequence
  source: /note="Description of Artificial Sequence: Synthetic oligonucleotide"
  source: /note="Description of Combined DNA/RNA Molecule: Synthetic oligonucleotide"
  source: /note="DNA/RNA"
  source: /note="5' tri-ethylene glycol (TEG)"
  modified_base (1)..(1): bicyclic nucleic acid (BNA)
  source: /note="3' tri-ethylene glycol (TEG)"
tcgguaaguucug

SEQ ID NO: 4503 - DNA, 12 bp, Artificial Sequence
  source: /note="Description of Artificial Sequence: Synthetic oligonucleotide"
  source: /note="Description of Combined DNA/RNA Molecule: Synthetic oligonucleotide"
  source: /note="DNA/RNA"
  source: /note="5' tri-ethylene glycol (TEG)"
  modified_base (1)..(1): bicyclic nucleic acid (BNA)
  source: /note="3' tri-ethylene glycol (TEG)"
tcgguaaguucu

SEQ ID NO: 4504 - DNA, 11 bp, Artificial Sequence
  source: /note="Description of Artificial Sequence: Synthetic oligonucleotide"
  source: /note="Description of Combined DNA/RNA Molecule: Synthetic oligonucleotide"
  source: /note="DNA/RNA"
  source: /note="5' tri-ethylene glycol (TEG)"
  modified_base (1)..(1): bicyclic nucleic acid (BNA)
  source: /note="3' tri-ethylene glycol (TEG)"
tcgguaaguuc

SEQ ID NO: 4505 - DNA, 10 bp, Artificial Sequence
  source: /note="Description of Artificial Sequence: Synthetic oligonucleotide"
  source: /note="Description of Combined DNA/RNA Molecule: Synthetic oligonucleotide"
  source: /note="DNA/RNA"
  source: /note="5' tri-ethylene glycol (TEG)"
  modified_base (1)..(1): bicyclic nucleic acid (BNA)
  source: /note="3' tri-ethylene glycol (TEG)"
tcgguaaguu

SEQ ID NO: 4506 - DNA, 9 bp, Artificial Sequence
  source: /note="Description of Artificial Sequence: Synthetic oligonucleotide"
  source: /note="Description of Combined DNA/RNA Molecule: Synthetic oligonucleotide"
  source: /note="DNA/RNA"
  source: /note="5' tri-ethylene glycol (TEG)"
  modified_base (1)..(1): bicyclic nucleic acid (BNA)
  source: /note="3' tri-ethylene glycol (TEG)"
tcgguaagu

SEQ ID NO: 4507 - RNA, 20 nt, Artificial Sequence
  source: /note="Description of Artificial Sequence: Synthetic oligonucleotide"
  source: /note="RNA"
  source: /note="5' tri-ethylene glycol (TEG)"
  modified_base (1)..(1): bicyclic nucleic acid (BNA)
  source: /note="3' tri-ethylene glycol (TEG)"
gucgguaaguucuguccaag

SEQ ID NO: 4508 - RNA, 19 nt, Artificial Sequence
  source: /note="Description of Artificial Sequence: Synthetic oligonucleotide"
  source: /note="RNA"
  source: /note="5' tri-ethylene glycol (TEG)"
  modified_base (1)..(1): bicyclic nucleic acid (BNA)
  source: /note="3' tri-ethylene glycol (TEG)"
gucgguaaguucuguccaa

SEQ ID NO: 4509 - RNA, 18 nt, Artificial Sequence
  source: /note="Description of Artificial Sequence: Synthetic oligonucleotide"
  source: /note="RNA"
  source: /note="5' tri-ethylene glycol (TEG)"
  modified_base (1)..(1): bicyclic nucleic acid (BNA)
  source: /note="3' tri-ethylene glycol (TEG)"
gucgguaaguucugucca

SEQ ID NO: 4510 - RNA, 17 nt, Artificial Sequence
  source: /note="Description of Artificial Sequence: Synthetic oligonucleotide"
  source: /note="RNA"
  source: /note="5' tri-ethylene glycol (TEG)"
  modified_base (1)..(1): bicyclic nucleic acid (BNA)
  source: /note="3' tri-ethylene glycol (TEG)"
gucgguaaguucugucc

SEQ ID NO: 4511 - RNA, 16 nt, Artificial Sequence
  source: /note="Description of Artificial Sequence: Synthetic oligonucleotide"
  source: /note="RNA"
  source: /note="5' tri-ethylene glycol (TEG)"
  modified_base (1)..(1): bicyclic nucleic acid (BNA)
  source: /note="3' tri-ethylene glycol (TEG)"
gucgguaaguucuguc

SEQ ID NO: 4512 - RNA, 15 nt, Artificial Sequence
  source: /note="Description of Artificial Sequence: Synthetic oligonucleotide"
  source: /note="RNA"
  source: /note="5' tri-ethylene glycol (TEG)"
  modified_base (1)..(1): bicyclic nucleic acid (BNA)
  source: /note="3' tri-ethylene glycol (TEG)"
gucgguaaguucugu

SEQ ID NO: 4513 - RNA, 14 nt, Artificial Sequence
  source: /note="Description of Artificial Sequence: Synthetic oligonucleotide"
  source: /note="RNA"
  source: /note="5' tri-ethylene glycol (TEG)"
  modified_base (1)..(1): bicyclic nucleic acid (BNA)
  source: /note="3' tri-ethylene glycol (TEG)"
gucgguaaguucug

SEQ ID NO: 4514 - RNA, 13 nt, Artificial Sequence
  source: /note="Description of Artificial Sequence: Synthetic oligonucleotide"
  source: /note="RNA"
  source: /note="5' tri-ethylene glycol (TEG)"
  modified_base (1)..(1): bicyclic nucleic acid (BNA)
  source: /note="3' tri-ethylene glycol (TEG)"
gucgguaaguucu

SEQ ID NO: 4515 - RNA, 12 nt, Artificial Sequence
  source: /note="Description of Artificial Sequence: Synthetic oligonucleotide"
  source: /note="RNA"
  source: /note="5' tri-ethylene glycol (TEG)"
  modified_base (1)..(1): bicyclic nucleic acid (BNA)
  source: /note="3' tri-ethylene glycol (TEG)"
gucgguaaguuc

SEQ ID NO: 4516 - RNA, 11 nt, Artificial Sequence
  source: /note="Description of Artificial Sequence: Synthetic oligonucleotide"
  source: /note="RNA"
  source: /note="5' tri-ethylene glycol (TEG)"
  modified_base (1)..(1): bicyclic nucleic acid (BNA)
  source: /note="3' tri-ethylene glycol (TEG)"
gucgguaaguu

SEQ ID NO: 4517 - RNA, 10 nt, Artificial Sequence
  source: /note="Description of Artificial Sequence: Synthetic oligonucleotide"
  source: /note="RNA"
  source: /note="5' tri-ethylene glycol (TEG)"
  modified_base (1)..(1): bicyclic nucleic acid (BNA)
  source: /note="3' tri-ethylene glycol (TEG)"
gucgguaagu

SEQ ID NO: 4518 - RNA, 20 nt, Artificial Sequence
  source: /note="Description of Artificial Sequence: Synthetic oligonucleotide"
  source: /note="RNA"
  source: /note="5' tri-ethylene glycol (TEG)"
  modified_base (1)..(1): bicyclic nucleic acid (BNA)
  source: /note="3' tri-ethylene glycol (TEG)"
agucgguaaguucuguccaa

SEQ ID NO: 4519 - RNA, 19 nt, Artificial Sequence
  source: /note="Description of Artificial Sequence: Synthetic oligonucleotide"
  source: /note="RNA"
  source: /note="5' tri-ethylene glycol (TEG)"
  modified_base (1)..(1): bicyclic nucleic acid (BNA)
  source: /note="3' tri-ethylene glycol (TEG)"
agucgguaaguucugucca

SEQ ID NO: 4520 - RNA, 17 nt, Artificial Sequence
  source: /note="Description of Artificial Sequence: Synthetic oligonucleotide"
  source: /note="RNA"
  source: /note="5' tri-ethylene glycol (TEG)"
  modified_base (1)..(1): bicyclic nucleic acid (BNA)
  source: /note="3' tri-ethylene glycol (TEG)"
agucgguaaguucuguc

SEQ ID NO: 4521 - RNA, 16 nt, Artificial Sequence
  source: /note="Description of Artificial Sequence: Synthetic oligonucleotide"
  source: /note="RNA"
  source: /note="5' tri-ethylene glycol (TEG)"
  modified_base (1)..(1): bicyclic nucleic acid (BNA)
  source: /note="3' tri-ethylene glycol (TEG)"
agucgguaaguucugu

SEQ ID NO: 4522 - RNA, 15 nt, Artificial Sequence
  source: /note="Description of Artificial Sequence: Synthetic oligonucleotide"
  source: /note="RNA"
  source: /note="5' tri-ethylene glycol (TEG)"
  modified_base (1)..(1): bicyclic nucleic acid (BNA)
  source: /note="3' tri-ethylene glycol (TEG)"
agucgguaaguucug

SEQ ID NO: 4523 - RNA, 14 nt, Artificial Sequence
  source: /note="Description of Artificial Sequence: Synthetic oligonucleotide"
  source: /note="RNA"
  source: /note="5' tri-ethylene glycol (TEG)"
  modified_base (1)..(1): bicyclic nucleic acid (BNA)
  source: /note="3' tri-ethylene glycol (TEG)"
agucgguaaguucu

SEQ ID NO: 4524 - RNA, 13 nt, Artificial Sequence
  source: /note="Description of Artificial Sequence: Synthetic oligonucleotide"
  source: /note="RNA"
  source: /note="5' tri-ethylene glycol (TEG)"
  modified_base (1)..(1): bicyclic nucleic acid (BNA)
  source: /note="3' tri-ethylene glycol (TEG)"
agucgguaaguuc

SEQ ID NO: 4525 - RNA, 12 nt, Artificial Sequence
  source: /note="Description of Artificial Sequence: Synthetic oligonucleotide"
  source: /note="RNA"
  source: /note="5' tri-ethylene glycol (TEG)"
  modified_base (1)..(1): bicyclic nucleic acid (BNA)
  source: /note="3' tri-ethylene glycol (TEG)"
agucgguaaguu

SEQ ID NO: 4526 - RNA, 11 nt, Artificial Sequence
  source: /note="Description of Artificial Sequence: Synthetic oligonucleotide"
  source: /note="RNA"
  source: /note="5' tri-ethylene glycol (TEG)"
  modified_base (1)..(1): bicyclic nucleic acid (BNA)
  source: /note="3' tri-ethylene glycol (TEG)"
agucgguaagu

SEQ ID NO: 4527 - RNA, 20 nt, Artificial Sequence
  source: /note="Description of Artificial Sequence: Synthetic oligonucleotide"
  source: /note="RNA"
  source: /note="5' tri-ethylene glycol (TEG)"
  modified_base (1)..(1): bicyclic nucleic acid (BNA)
  source: /note="3' tri-ethylene glycol (TEG)"
cagucgguaaguucugucca

SEQ ID NO: 4528 - RNA, 19 nt, Artificial Sequence
  source: /note="Description of Artificial Sequence: Synthetic oligonucleotide"
  source: /note="RNA"
  source: /note="5' tri-ethylene glycol (TEG)"
  modified_base (1)..(1): bicyclic nucleic acid (BNA)
  source: /note="3' tri-ethylene glycol (TEG)"
cagucgguaaguucugucc

SEQ ID NO: 4529 - RNA, 18 nt, Artificial Sequence
  source: /note="Description of Artificial Sequence: Synthetic oligonucleotide"
  source: /note="RNA"
  source: /note="5' tri-ethylene glycol (TEG)"
  modified_base (1)..(1): bicyclic nucleic acid (BNA)
  source: /note="3' tri-ethylene glycol (TEG)"
cagucgguaaguucuguc

SEQ ID NO: 4530 - RNA, 17 nt, Artificial Sequence
  source: /note="Description of Artificial Sequence: Synthetic oligonucleotide"
  source: /note="RNA"
  source: /note="5' tri-ethylene glycol (TEG)"
  modified_base (1)..(1): bicyclic nucleic acid (BNA)
  source: /note="3' tri-ethylene glycol (TEG)"
cagucgguaaguucugu

SEQ ID NO: 4531 - RNA, 16 nt, Artificial Sequence
  source: /note="Description of Artificial Sequence: Synthetic oligonucleotide"
  source: /note="RNA"
  source: /note="5' tri-ethylene glycol (TEG)"
  modified_base (1)..(1): bicyclic nucleic acid (BNA)
  source: /note="3' tri-ethylene glycol (TEG)"
cagucgguaaguucug

SEQ ID NO: 4532 - RNA, 15 nt, Artificial Sequence
  source: /note="Description of Artificial Sequence: Synthetic oligonucleotide"
  source: /note="RNA"
  source: /note="5' tri-ethylene glycol (TEG)"
  modified_base (1)..(1): bicyclic nucleic acid (BNA)
  source: /note="3' tri-ethylene glycol (TEG)"
cagucgguaaguucu

SEQ ID NO: 4533 - RNA, 14 nt, Artificial Sequence
  source: /note="Description of Artificial Sequence: Synthetic oligonucleotide"
  source: /note="RNA"
  source: /note="5' tri-ethylene glycol (TEG)"
  modified_base (1)..(1): bicyclic nucleic acid (BNA)
  source: /note="3' tri-ethylene glycol (TEG)"
cagucgguaaguuc

SEQ ID NO: 4534 - RNA, 13 nt, Artificial Sequence
  source: /note="Description of Artificial Sequence: Synthetic oligonucleotide"
  source: /note="RNA"
  source: /note="5' tri-ethylene glycol (TEG)"
  modified_base (1)..(1): bicyclic nucleic acid (BNA)
  source: /note="3' tri-ethylene glycol (TEG)"
cagucgguaaguu

SEQ ID NO: 4535 - RNA, 12 nt, Artificial Sequence
  source: /note="Description of Artificial Sequence: Synthetic oligonucleotide"
  source: /note="RNA"
  source: /note="5' tri-ethylene glycol (TEG)"
  modified_base (1)..(1): bicyclic nucleic acid (BNA)
  source: /note="3' tri-ethylene glycol (TEG)"
cagucgguaagu

SEQ ID NO: 4536 - RNA, 20 nt, Artificial Sequence
  source: /note="Description of Artificial Sequence: Synthetic oligonucleotide"
  source: /note="RNA"
  source: /note="5' tri-ethylene glycol (TEG)"
  modified_base (1)..(1): bicyclic nucleic acid (BNA)
  source: /note="3' tri-ethylene glycol (TEG)"
ccagucgguaaguucugucc

SEQ ID NO: 4537 - RNA, 19 nt, Artificial Sequence
  source: /note="Description of Artificial Sequence: Synthetic oligonucleotide"
  source: /note="RNA"
  source: /note="5' tri-ethylene glycol (TEG)"
  modified_base (1)..(1): bicyclic nucleic acid (BNA)
  source: /note="3' tri-ethylene glycol (TEG)"
ccagucgguaaguucuguc

SEQ ID NO: 4538 - RNA, 18 nt, Artificial Sequence
  source: /note="Description of Artificial Sequence: Synthetic oligonucleotide"
  source: /note="RNA"
  source: /note="5' tri-ethylene glycol (TEG)"
  modified_base (1)..(1): bicyclic nucleic acid (BNA)
  source: /note="3' tri-ethylene glycol (TEG)"
ccagucgguaaguucugu

SEQ ID NO: 4539 - RNA, 17 nt, Artificial Sequence
  source: /note="Description of Artificial Sequence: Synthetic oligonucleotide"
  source: /note="RNA"
  source: /note="5' tri-ethylene glycol (TEG)"
  modified_base (1)..(1): bicyclic nucleic acid (BNA)
  source: /note="3' tri-ethylene glycol (TEG)"
ccagucgguaaguucug

SEQ ID NO: 4540 - RNA, 16 nt, Artificial Sequence
  source: /note="Description of Artificial Sequence: Synthetic oligonucleotide"
  source: /note="RNA"
  source: /note="5' tri-ethylene glycol (TEG)"
  modified_base (1)..(1): bicyclic nucleic acid (BNA)
  source: /note="3' tri-ethylene glycol (TEG)"
ccagucgguaaguucu

SEQ ID NO: 4541 - RNA, 15 nt, Artificial Sequence
  source: /note="Description of Artificial Sequence: Synthetic oligonucleotide"
  source: /note="RNA"
  source: /note="5' tri-ethylene glycol (TEG)"
  modified_base (1)..(1): bicyclic nucleic acid (BNA)
  source: /note="3' tri-ethylene glycol (TEG)"
ccagucgguaaguuc

SEQ ID NO: 4542 - RNA, 14 nt, Artificial Sequence
  source: /note="Description of Artificial Sequence: Synthetic oligonucleotide"
  source: /note="RNA"
  source: /note="5' tri-ethylene glycol (TEG)"
  modified_base (1)..(1): bicyclic nucleic acid (BNA)
  source: /note="3' tri-ethylene glycol (TEG)"
ccagucgguaaguu

SEQ ID NO: 4543 - RNA, 13 nt, Artificial Sequence
  source: /note="Description of Artificial Sequence: Synthetic oligonucleotide"
  source: /note="RNA"
  source: /note="5' tri-ethylene glycol (TEG)"
  modified_base (1)..(1): bicyclic nucleic acid (BNA)
  source: /note="3' tri-ethylene glycol (TEG)"
ccagucgguaagu

SEQ ID NO: 4544 - RNA, 20 nt, Artificial Sequence
  source: /note="Description of Artificial Sequence: Synthetic oligonucleotide"
  source: /note="RNA"
  source: /note="5' tri-ethylene glycol (TEG)"
  modified_base (1)..(1): bicyclic nucleic acid (BNA)
  source: /note="3' tri-ethylene glycol (TEG)"
gccagucgguaaguucuguc

SEQ ID NO: 4545 - RNA, 19 nt, Artificial Sequence
  source: /note="Description of Artificial Sequence: Synthetic oligonucleotide"
  source: /note="RNA"
  source: /note="5' tri-ethylene glycol (TEG)"
  modified_base (1)..(1): bicyclic nucleic acid (BNA)
  source: /note="3' tri-ethylene glycol (TEG)"
gccagucgguaaguucugu

SEQ ID NO: 4546 - RNA, 18 nt, Artificial Sequence
  source: /note="Description of Artificial Sequence: Synthetic oligonucleotide"
  source: /note="RNA"
  source: /note="5' tri-ethylene glycol (TEG)"
  modified_base (1)..(1): bicyclic nucleic acid (BNA)
  source: /note="3' tri-ethylene glycol (TEG)"
gccagucgguaaguucug

SEQ ID NO: 4547 - RNA, 17 nt, Artificial Sequence
  source: /note="Description of Artificial Sequence: Synthetic oligonucleotide"
  source: /note="RNA"
  source: /note="5' tri-ethylene glycol (TEG)"
  modified_base (1)..(1): bicyclic nucleic acid (BNA)
  source: /note="3' tri-ethylene glycol (TEG)"
gccagucgguaaguucu

SEQ ID NO: 4548 - RNA, 16 nt, Artificial Sequence
  source: /note="Description of Artificial Sequence: Synthetic oligonucleotide"
  source: /note="RNA"
  source: /note="5' tri-ethylene glycol (TEG)"
  modified_base (1)..(1): bicyclic nucleic acid (BNA)
  source: /note="3' tri-ethylene glycol (TEG)"
gccagucgguaaguuc

SEQ ID NO: 4549 - RNA, 15 nt, Artificial Sequence
  source: /note="Description of Artificial Sequence: Synthetic oligonucleotide"
  source: /note="RNA"
  source: /note="5' tri-ethylene glycol (TEG)"
  modified_base (1)..(1): bicyclic nucleic acid (BNA)
  source: /note="3' tri-ethylene glycol (TEG)"
gccagucgguaaguu

SEQ ID NO: 4550 - RNA, 14 nt, Artificial Sequence
  source: /note="Description of Artificial Sequence: Synthetic oligonucleotide"
  source: /note="RNA"
  source: /note="5' tri-ethylene glycol (TEG)"
  modified_base (1)..(1): bicyclic nucleic acid (BNA)
  source: /note="3' tri-ethylene glycol (TEG)"
gccagucgguaagu

SEQ ID NO: 4551 - DNA, 20 bp, Artificial Sequence
  source: /note="Description of Artificial Sequence: Synthetic oligonucleotide"
  source: /note="Description of Combined DNA/RNA Molecule: Synthetic oligonucleotide"
  source: /note="DNA/RNA"
  source: /note="5' tri-ethylene glycol (TEG)"
  modified_base (1)..(1): bicyclic nucleic acid (BNA)
  source: /note="3' tri-ethylene glycol (TEG)"
tcaaggaagauggcauuucu

SEQ ID NO: 4552 - DNA, 22 bp, Artificial Sequence
  source: /note="Description of Artificial Sequence: Synthetic oligonucleotide"
  source: /note="Description of Combined DNA/RNA Molecule: Synthetic oligonucleotide"
  source: /note="DNA/RNA"
  source: /note="5' tri-ethylene glycol (TEG)"
  modified_base (1)..(1): bicyclic nucleic acid (BNA)
  source: /note="3' tri-ethylene glycol (TEG)"
tcaaggaagauggcauuucuag

SEQ ID NO: 4553 - DNA, 16 bp, Artificial Sequence
  source: /note="Description of Artificial Sequence: Synthetic oligonucleotide"
  source: /note="Description of Combined DNA/RNA Molecule: Synthetic oligonucleotide"
  source: /note="DNA/RNA"
  source: /note="5' tri-ethylene glycol (TEG)"
  modified_base (1)..(1): bicyclic nucleic acid (BNA)
  source: /note="3' tri-ethylene glycol (TEG)"
tcaaggaagauggcau

SEQ ID NO: 4554 - RNA, 15 nt, Artificial Sequence
  source: /note="Description of Artificial Sequence: Synthetic oligonucleotide"
  source: /note="RNA"
  source: /note="5' tri-ethylene glycol (TEG)"
  modified_base (1)..(1): bicyclic nucleic acid (BNA)
  source: /note="3' tri-ethylene glycol (TEG)"
gaagauggcauuucu

SEQ ID NO: 4555 - DNA, 21 bp, Artificial Sequence
  source: /note="Description of Artificial Sequence: Synthetic oligonucleotide"
  source: /note="Description of Combined DNA/RNA Molecule: Synthetic oligonucleotide"
  source: /note="DNA/RNA"
  source: /note="5' tri-ethylene glycol (TEG)"
  modified_base (1)..(1): bicyclic nucleic acid (BNA)
  source: /note="3' tri-ethylene glycol (TEG)"
tcaaggaagauggcauuucua

SEQ ID NO: 4556 - DNA, 19 bp, Artificial Sequence
  source: /note="Description of Artificial Sequence: Synthetic oligonucleotide"
  source: /note="Description of Combined DNA/RNA Molecule: Synthetic oligonucleotide"
  source: /note="DNA/RNA"
  source: /note="5' tri-ethylene glycol (TEG)"
  modified_base (1)..(1): bicyclic nucleic acid (BNA)
  source: /note="3' tri-ethylene glycol (TEG)"
tcaaggaagauggcauuuc

SEQ ID NO: 4557 - DNA, 18 bp, Artificial Sequence
  source: /note="Description of Artificial Sequence: Synthetic oligonucleotide"
  source: /note="Description of Combined DNA/RNA Molecule: Synthetic oligonucleotide"
  source: /note="DNA/RNA"
  source: /note="5' tri-ethylene glycol (TEG)"
  modified_base (1)..(1): bicyclic nucleic acid (BNA)
  source: /note="3' tri-ethylene glycol (TEG)"
tcaaggaagauggcauuu

SEQ ID NO: 4558 - DNA, 17 bp, Artificial Sequence
  source: /note="Description of Artificial Sequence: Synthetic oligonucleotide"
  source: /note="Description of Combined DNA/RNA Molecule: Synthetic oligonucleotide"
  source: /note="DNA/RNA"
  source: /note="5' tri-ethylene glycol (TEG)"
  modified_base (1)..(1): bicyclic nucleic acid (BNA)
  source: /note="3' tri-ethylene glycol (TEG)"
tcaaggaagauggcauu

SEQ ID NO: 4559 - DNA, 15 bp, Artificial Sequence
  source: /note="Description of Artificial Sequence: Synthetic oligonucleotide"
  source: /note="Description of Combined DNA/RNA Molecule: Synthetic oligonucleotide"
  source: /note="DNA/RNA"
  source: /note="5' tri-ethylene glycol (TEG)"
  modified_base (1)..(1): bicyclic nucleic acid (BNA)
  source: /note="3' tri-ethylene glycol (TEG)"
tcaaggaagauggca

SEQ ID NO: 4560 - DNA, 14 bp, Artificial Sequence
  source: /note="Description of Artificial Sequence: Synthetic oligonucleotide"
  source: /note="Description of Combined DNA/RNA Molecule: Synthetic oligonucleotide"
  source: /note="DNA/RNA"
  source: /note="5' tri-ethylene glycol (TEG)"
  modified_base (1)..(1): bicyclic nucleic acid (BNA)
  source: /note="3' tri-ethylene glycol (TEG)"
tcaaggaagauggc

SEQ ID NO: 4561 - DNA, 13 bp, Artificial Sequence
  source: /note="Description of Artificial Sequence: Synthetic oligonucleotide"
  source: /note="Description of Combined DNA/RNA Molecule: Synthetic oligonucleotide"
  source: /note="DNA/RNA"
  source: /note="5' tri-ethylene glycol (TEG)"
  modified_base (1)..(1): bicyclic nucleic acid (BNA)
  source: /note="3' tri-ethylene glycol (TEG)"
tcaaggaagaugg

SEQ ID NO: 4562 - DNA, 12 bp, Artificial Sequence
  source: /note="Description of Artificial Sequence: Synthetic oligonucleotide"
  source: /note="Description of Combined DNA/RNA Molecule: Synthetic oligonucleotide"
  source: /note="DNA/RNA"
  source: /note="5' tri-ethylene glycol (TEG)"
  modified_base (1)..(1): bicyclic nucleic acid (BNA)
  source: /note="3' tri-ethylene glycol (TEG)"
tcaaggaagaug

SEQ ID NO: 4563 - DNA, 11 bp, Artificial Sequence
  source: /note="Description of Artificial Sequence: Synthetic oligonucleotide"
  source: /note="Description of Combined DNA/RNA Molecule: Synthetic oligonucleotide"
  source: /note="DNA/RNA"
  source: /note="5' tri-ethylene glycol (TEG)"
  modified_base (1)..(1): bicyclic nucleic acid (BNA)
  source: /note="3' tri-ethylene glycol (TEG)"
tcaaggaagau

SEQ ID NO: 4564 - DNA, 10 bp, Artificial Sequence
  source: /note="Description of Artificial Sequence: Synthetic oligonucleotide"
  source: /note="DNA/RNA"
  source: /note="5' tri-ethylene glycol (TEG)"
  modified_base (1)..(1): bicyclic nucleic acid (BNA)
  source: /note="3' tri-ethylene glycol (TEG)"
tcaaggaaga

SEQ ID NO: 4565 - DNA, 9 bp, Artificial Sequence
  source: /note="Description of Artificial Sequence: Synthetic oligonucleotide"
  source: /note="DNA/RNA"
  source: /note="5' tri-ethylene glycol (TEG)"
  modified_base (1)..(1): bicyclic nucleic acid (BNA)
  source: /note="3' tri-ethylene glycol (TEG)"
tcaaggaag

SEQ ID NO: 4566 - RNA, 21 nt, Artificial Sequence
  source: /note="Description of Artificial Sequence: Synthetic oligonucleotide"
  source: /note="RNA"
  source: /note="5' tri-ethylene glycol (TEG)"
  modified_base (1)..(1): bicyclic nucleic acid (BNA)
  source: /note="3' tri-ethylene glycol (TEG)"
caaggaagauggcauuucuag

SEQ ID NO: 4567 - RNA, 20 nt, Artificial Sequence
  source: /note="Description of Artificial Sequence: Synthetic oligonucleotide"
  source: /note="RNA"
  source: /note="5' tri-ethylene glycol (TEG)"
  modified_base (1)..(1): bicyclic nucleic acid (BNA)
  source: /note="3' tri-ethylene glycol (TEG)"
caaggaagauggcauuucua

SEQ ID NO: 4568 - RNA, 19 nt, Artificial Sequence
  source: /note="Description of Artificial Sequence: Synthetic oligonucleotide"
  source: /note="RNA"
  source: /note="5' tri-ethylene glycol (TEG)"
  modified_base (1)..(1): bicyclic nucleic acid (BNA)
  source: /note="3' tri-ethylene glycol (TEG)"
caaggaagauggcauuucu

SEQ ID NO: 4569 - RNA, 18 nt, Artificial Sequence
  source: /note="Description of Artificial Sequence: Synthetic oligonucleotide"
  source: /note="RNA"
  source: /note="5' tri-ethylene glycol (TEG)"
  modified_base (1)..(1): bicyclic nucleic acid (BNA)
  source: /note="3' tri-ethylene glycol (TEG)"
caaggaagauggcauuuc

SEQ ID NO: 4570 - RNA, 17 nt, Artificial Sequence
  source: /note="Description of Artificial Sequence: Synthetic oligonucleotide"
  source: /note="RNA"
  source: /note="5' tri-ethylene glycol (TEG)"
  modified_base (1)..(1): bicyclic nucleic acid (BNA)
  source: /note="3' tri-ethylene glycol (TEG)"
caaggaagauggcauuu

SEQ ID NO: 4571 - RNA, 16 nt, Artificial Sequence
  source: /note="Description of Artificial Sequence: Synthetic oligonucleotide"
  source: /note="RNA"
  source: /note="5' tri-ethylene glycol (TEG)"
  modified_base (1)..(1): bicyclic nucleic acid (BNA)
  source: /note="3' tri-ethylene glycol (TEG)"
caaggaagauggcauu

SEQ ID NO: 4572 - RNA, 15 nt, Artificial Sequence
  source: /note="Description of Artificial Sequence: Synthetic oligonucleotide"
  source: /note="RNA"
  source: /note="5' tri-ethylene glycol (TEG)"
  modified_base (1)..(1): bicyclic nucleic acid (BNA)
  source: /note="3' tri-ethylene glycol (TEG)"
caaggaagauggcau

SEQ ID NO: 4573 - RNA, 14 nt, Artificial Sequence
  source: /note="Description of Artificial Sequence: Synthetic oligonucleotide"
  source: /note="RNA"
  source: /note="5' tri-ethylene glycol (TEG)"
  modified_base (1)..(1): bicyclic nucleic acid (BNA)
  source: /note="3' tri-ethylene glycol (TEG)"
caaggaagauggca

SEQ ID NO: 4574 - RNA, 13 nt, Artificial Sequence
  source: /note="Description of Artificial Sequence: Synthetic oligonucleotide"
  source: /note="RNA"
  source: /note="5' tri-ethylene glycol (TEG)"
  modified_base (1)..(1): bicyclic nucleic acid (BNA)
  source: /note="3' tri-ethylene glycol (TEG)"
caaggaagauggc

SEQ ID NO: 4575 - RNA, 12 nt, Artificial Sequence
  source: /note="Description of Artificial Sequence: Synthetic oligonucleotide"
  source: /note="RNA"
  source: /note="5' tri-ethylene glycol (TEG)"
  modified_base (1)..(1): bicyclic nucleic acid (BNA)
  source: /note="3' tri-ethylene glycol (TEG)"
caaggaagaugg

SEQ ID NO: 4576 - RNA, 11 nt, Artificial Sequence
  source: /note="Description of Artificial Sequence: Synthetic oligonucleotide"
  source: /note="RNA"
  source: /note="5' tri-ethylene glycol (TEG)"
  modified_base (1)..(1): bicyclic nucleic acid (BNA)
  source: /note="3' tri-ethylene glycol (TEG)"
caaggaagaug

SEQ ID NO: 4577 - RNA, 10 nt, Artificial Sequence
  source: /note="Description of Artificial Sequence: Synthetic oligonucleotide"
  source: /note="RNA"
  source: /note="5' tri-ethylene glycol (TEG)"
  modified_base (1)..(1): bicyclic nucleic acid (BNA)
  source: /note="3' tri-ethylene glycol (TEG)"
caaggaagau

SEQ ID NO: 4578 - RNA, 9 nt, Artificial Sequence
  source: /note="Description of Artificial Sequence: Synthetic oligonucleotide"
  source: /note="RNA/Antisense Oligonucleotide"
  source: /note="5' tri-ethylene glycol (TEG)"
  modified_base (1)..(1): bicyclic nucleic acid (BNA)
  source: /note="3' tri-ethylene glycol (TEG)"
caaggaaga

SEQ ID NO: 4579 - RNA, 8 nt, Artificial Sequence
  source: /note="Description of Artificial Sequence: Synthetic oligonucleotide"
  source: /note="RNA/Antisense Oligonucleotide"
  source: /note="5' tri-ethylene glycol (TEG)"
  modified_base (1)..(1): bicyclic nucleic acid (BNA)
  source: /note="3' tri-ethylene glycol (TEG)"
caaggaag

SEQ ID NO: 4580 - RNA, 20 nt, Artificial Sequence
  source: /note="Description of Artificial Sequence: Synthetic oligonucleotide"
  source: /note="RNA"
  source: /note="5' tri-ethylene glycol (TEG)"
  modified_base (1)..(1): bicyclic nucleic acid (BNA)
  source: /note="3' tri-ethylene glycol (TEG)"
aaggaagauggcauuucuag

SEQ ID NO: 4581 - RNA, 19 nt, Artificial Sequence
  source: /note="Description of Artificial Sequence: Synthetic oligonucleotide"
  source: /note="RNA"
  source: /note="5' tri-ethylene glycol (TEG)"
  modified_base (1)..(1): bicyclic nucleic acid (BNA)
  source: /note="3' tri-ethylene glycol (TEG)"
aaggaagauggcauuucua

SEQ ID NO: 4582 - RNA, 18 nt, Artificial Sequence
  source: /note="Description of Artificial Sequence: Synthetic oligonucleotide"
  source: /note="RNA"
  source: /note="5' tri-ethylene glycol (TEG)"
  modified_base (1)..(1): bicyclic nucleic acid (BNA)
  source: /note="3' tri-ethylene glycol (TEG)"
aaggaagauggcauuucu

SEQ ID NO: 4583 - RNA, 17 nt, Artificial Sequence
  source: /note="Description of Artificial Sequence: Synthetic oligonucleotide"
  source: /note="RNA"
  source: /note="5' tri-ethylene glycol (TEG)"
  modified_base (1)..(1): bicyclic nucleic acid (BNA)
  source: /note="3' tri-ethylene glycol (TEG)"
aaggaagauggcauuuc

SEQ ID NO: 4584 - RNA, 16 nt, Artificial Sequence
  source: /note="Description of Artificial Sequence: Synthetic oligonucleotide"
  source: /note="RNA"
  source: /note="5' tri-ethylene glycol (TEG)"
  modified_base (1)..(1): bicyclic nucleic acid (BNA)
  source: /note="3' tri-ethylene glycol (TEG)"
aaggaagauggcauuu

SEQ ID NO: 4585 - RNA, 15 nt, Artificial Sequence
  source: /note="Description of Artificial Sequence: Synthetic oligonucleotide"
  source: /note="RNA"
  source: /note="5' tri-ethylene glycol (TEG)"
  modified_base (1)..(1): bicyclic nucleic acid (BNA)
  source: /note="3' tri-ethylene glycol (TEG)"
aaggaagauggcauu

SEQ ID NO: 4586 - RNA, 14 nt, Artificial Sequence
  source: /note="Description of Artificial Sequence: Synthetic oligonucleotide"
  source: /note="RNA"
  source: /note="5' tri-ethylene glycol (TEG)"
  modified_base (1)..(1): bicyclic nucleic acid (BNA)
  source: /note="3' tri-ethylene glycol (TEG)"
aaggaagauggcau

SEQ ID NO: 4587 - RNA, 13 nt, Artificial Sequence
  source: /note="Description of Artificial Sequence: Synthetic oligonucleotide"
  source: /note="RNA"
  source: /note="5' tri-ethylene glycol (TEG)"
  modified_base (1)..(1): bicyclic nucleic acid (BNA)
  source: /note="3' tri-ethylene glycol (TEG)"
aaggaagauggca

SEQ ID NO: 4588 - RNA, 12 nt, Artificial Sequence
  source: /note="Description of Artificial Sequence: Synthetic oligonucleotide"
  source: /note="RNA"
  source: /note="5' tri-ethylene glycol (TEG)"
  modified_base (1)..(1): bicyclic nucleic acid (BNA)
  source: /note="3' tri-ethylene glycol (TEG)"
aaggaagauggc

SEQ ID NO: 4589 - RNA, 11 nt, Artificial Sequence
  source: /note="Description of Artificial Sequence: Synthetic oligonucleotide"
  source: /note="RNA"
  source: /note="5' tri-ethylene glycol (TEG)"
  modified_base (1)..(1): bicyclic nucleic acid (BNA)
  source: /note="3' tri-ethylene glycol (TEG)"
aaggaagaugg

SEQ ID NO: 4590 - RNA, 10 nt, Artificial Sequence
  source: /note="Description of Artificial Sequence: Synthetic oligonucleotide"
  source: /note="RNA"
  source: /note="5' tri-ethylene glycol (TEG)"
  modified_base (1)..(1): bicyclic nucleic acid (BNA)
  source: /note="3' tri-ethylene glycol (TEG)"
aaggaagaug

SEQ ID NO: 4591 - RNA, 9 nt, Artificial Sequence
  source: /note="Description of Artificial Sequence: Synthetic oligonucleotide"
  source: /note="RNA"
  source: /note="5' tri-ethylene glycol (TEG)"
  modified_base (1)..(1): bicyclic nucleic acid (BNA)
  source: /note="3' tri-ethylene glycol (TEG)"
aaggaagau

SEQ ID NO: 4592 - RNA, 8 nt, Artificial Sequence
  source: /note="Description of Artificial Sequence: Synthetic oligonucleotide"
  source: /note="RNA/Antisense Oligonucleotide"
  source: /note="5' tri-ethylene glycol (TEG)"
  modified_base (1)..(1): bicyclic nucleic acid (BNA)
  source: /note="3' tri-ethylene glycol (TEG)"
aaggaaga

SEQ ID NO: 4593 - RNA, 19 nt, Artificial Sequence
  source: /note="Description of Artificial Sequence: Synthetic oligonucleotide"
  source: /note="RNA"
  source: /note="5' tri-ethylene glycol (TEG)"
  modified_base (1)..(1): bicyclic nucleic acid (BNA)
  source: /note="3' tri-ethylene glycol (TEG)"
aggaagauggcauuucuag

SEQ ID NO: 4594 - RNA, 18 nt, Artificial Sequence
  source: /note="Description of Artificial Sequence: Synthetic oligonucleotide"
  source: /note="RNA"
  source: /note="5' tri-ethylene glycol (TEG)"
  modified_base (1)..(1): bicyclic nucleic acid (BNA)
  source: /note="3' tri-ethylene glycol (TEG)"
aggaagauggcauuucua

SEQ ID NO: 4595 - RNA, 17 nt, Artificial Sequence
  source: /note="Description of Artificial Sequence: Synthetic oligonucleotide"
  source: /note="RNA"
  source: /note="5' tri-ethylene glycol (TEG)"
  modified_base (1)..(1): bicyclic nucleic acid (BNA)
  source: /note="3' tri-ethylene glycol (TEG)"
aggaagauggcauuucu

SEQ ID NO: 4596 - RNA, 16 nt, Artificial Sequence
  source: /note="Description of Artificial Sequence: Synthetic oligonucleotide"
  source: /note="RNA"
  source: /note="5' tri-ethylene glycol (TEG)"
  modified_base (1)..(1): bicyclic nucleic acid (BNA)
  source: /note="3' tri-ethylene glycol (TEG)"
aggaagauggcauuuc

SEQ ID NO: 4597 - RNA, 15 nt, Artificial Sequence
  source: /note="Description of Artificial Sequence: Synthetic oligonucleotide"
  source: /note="RNA"
  source: /note="5' tri-ethylene glycol (TEG)"
  modified_base (1)..(1): bicyclic nucleic acid (BNA)
  source: /note="3' tri-ethylene glycol (TEG)"
aggaagauggcauuu

SEQ ID NO: 4598 - RNA, 14 nt, Artificial Sequence
  source: /note="Description of Artificial Sequence: Synthetic oligonucleotide"
  source: /note="RNA"
  source: /note="5' tri-ethylene glycol (TEG)"
  modified_base (1)..(1): bicyclic nucleic acid (BNA)
  source: /note="3' tri-ethylene glycol (TEG)"
aggaagauggcauu

SEQ ID NO: 4599 - RNA, 13 nt, Artificial Sequence
  source: /note="Description of Artificial Sequence: Synthetic oligonucleotide"
  source: /note="RNA"
  source: /note="5' tri-ethylene glycol (TEG)"
  modified_base (1)..(1): bicyclic nucleic acid (BNA)
  source: /note="3' tri-ethylene glycol (TEG)"
aggaagauggcau

SEQ ID NO: 4600 - RNA, 12 nt, Artificial Sequence
  source: /note="Description of Artificial Sequence: Synthetic oligonucleotide"
  source: /note="RNA"
  source: /note="5' tri-ethylene glycol (TEG)"
  modified_base (1)..(1): bicyclic nucleic acid (BNA)
  source: /note="3' tri-ethylene glycol (TEG)"
aggaagauggca

SEQ ID NO: 4601 - RNA, 10 nt, Artificial Sequence
  source: /note="Description of Artificial Sequence: Synthetic oligonucleotide"
  source: /note="RNA"
  source: /note="5' tri-ethylene glycol (TEG)"
  modified_base (1)..(1): bicyclic nucleic acid (BNA)
  source: /note="3' tri-ethylene glycol (TEG)"
aggaagaugg

SEQ ID NO: 4602 - RNA, 9 nt, Artificial Sequence
  source: /note="Description of Artificial Sequence: Synthetic oligonucleotide"
  source: /note="RNA"
  source: /note="5' tri-ethylene glycol (TEG)"
  modified_base (1)..(1): bicyclic nucleic acid (BNA)
  source: /note="3' tri-ethylene glycol (TEG)"
aggaagaug

SEQ ID NO: 4603 - RNA, 8 nt, Artificial Sequence
  source: /note="Description of Artificial Sequence: Synthetic oligonucleotide"
  source: /note="RNA"
  source: /note="5' tri-ethylene glycol (TEG)"
  modified_base (1)..(1): bicyclic nucleic acid (BNA)
  source: /note="3' tri-ethylene glycol (TEG)"
aggaagau

SEQ ID NO: 4604 - RNA, 18 nt, Artificial Sequence
  source: /note="Description of Artificial Sequence: Synthetic oligonucleotide"
  source: /note="RNA"
  source: /note="5' tri-ethylene glycol (TEG)"
  modified_base (1)..(1): bicyclic nucleic acid (BNA)
  source: /note="3' tri-ethylene glycol (TEG)"
ggaagauggcauuucuag

SEQ ID NO: 4605 - RNA, 17 nt, Artificial Sequence
  source: /note="Description of Artificial Sequence: Synthetic oligonucleotide"
  source: /note="RNA"
  source: /note="5' tri-ethylene glycol (TEG)"
  modified_base (1)..(1): bicyclic nucleic acid (BNA)
  source: /note="3' tri-ethylene glycol (TEG)"
ggaagauggcauuucua

SEQ ID NO: 4606 - RNA, 16 nt, Artificial Sequence
  source: /note="Description of Artificial Sequence: Synthetic oligonucleotide"
  source: /note="RNA"
  source: /note="5' tri-ethylene glycol (TEG)"
  modified_base (1)..(1): bicyclic nucleic acid (BNA)
  source: /note="3' tri-ethylene glycol (TEG)"
ggaagauggcauuucu

SEQ ID NO: 4607 - RNA, 15 nt, Artificial Sequence
  source: /note="Description of Artificial Sequence: Synthetic oligonucleotide"
  source: /note="RNA"
  source: /note="5' tri-ethylene glycol (TEG)"
  modified_base (1)..(1): bicyclic nucleic acid (BNA)
  source: /note="3' tri-ethylene glycol (TEG)"
ggaagauggcauuuc

SEQ ID NO: 4608 - RNA, 14 nt, Artificial Sequence
  source: /note="Description of Artificial Sequence: Synthetic oligonucleotide"
  source: /note="RNA"
  source: /note="5' tri-ethylene glycol (TEG)"
  modified_base (1)..(1): bicyclic nucleic acid (BNA)
  source: /note="3' tri-ethylene glycol (TEG)"
ggaagauggcauuu

SEQ ID NO: 4609 - RNA, 13 nt, Artificial Sequence
  source: /note="Description of Artificial Sequence: Synthetic oligonucleotide"
  source: /note="RNA"
  source: /note="5' tri-ethylene glycol (TEG)"
  modified_base (1)..(1): bicyclic nucleic acid (BNA)
  source: /note="3' tri-ethylene glycol (TEG)"
ggaagauggcauu

SEQ ID NO: 4610 - RNA, 12 nt, Artificial Sequence
  source: /note="Description of Artificial Sequence: Synthetic oligonucleotide"
  source: /note="RNA"
  source: /note="5' tri-ethylene glycol (TEG)"
  modified_base (1)..(1): bicyclic nucleic acid (BNA)
  source: /note="3' tri-ethylene glycol (TEG)"
ggaagauggcau

SEQ ID NO: 4611 - RNA, 11 nt, Artificial Sequence
  source: /note="Description of Artificial Sequence: Synthetic oligonucleotide"
  source: /note="RNA"
  source: /note="5' tri-ethylene glycol (TEG)"
  modified_base (1)..(1): bicyclic nucleic acid (BNA)
  source: /note="3' tri-ethylene glycol (TEG)"
ggaagauggca

SEQ ID NO: 4612 - RNA, 10 nt, Artificial Sequence
  source: /note="Description of Artificial Sequence: Synthetic oligonucleotide"
  source: /note="RNA"
  source: /note="5' tri-ethylene glycol (TEG)"
  modified_base (1)..(1): bicyclic nucleic acid (BNA)
  source: /note="3' tri-ethylene glycol (TEG)"
ggaagauggc

SEQ ID NO: 4613 - RNA, 8 nt, Artificial Sequence
  source: /note="Description of Artificial Sequence: Synthetic oligonucleotide"
  source: /note="RNA"
  source: /note="5' tri-ethylene glycol (TEG)"
  modified_base (1)..(1): bicyclic nucleic acid (BNA)
  source: /note="3' tri-ethylene glycol (TEG)"
ggaagaug

SEQ ID NO: 4614 - RNA, 17 nt, Artificial Sequence
  source: /note="Description of Artificial Sequence: Synthetic oligonucleotide"
  source: /note="RNA"
  source: /note="5' tri-ethylene glycol (TEG)"
  modified_base (1)..(1): bicyclic nucleic acid (BNA)
  source: /note="3' tri-ethylene glycol (TEG)"
gaagauggcauuucuag

SEQ ID NO: 4615 - RNA, 16 nt, Artificial Sequence
  source: /note="Description of Artificial Sequence: Synthetic oligonucleotide"
  source: /note="RNA"
  source: /note="5' tri-ethylene glycol (TEG)"
  modified_base (1)..(1): bicyclic nucleic acid (BNA)
  source: /note="3' tri-ethylene glycol (TEG)"
gaagauggcauuucua

SEQ ID NO: 4616 - RNA, 14 nt, Artificial Sequence
  source: /note="Description of Artificial Sequence: Synthetic oligonucleotide"
  source: /note="RNA"
  source: /note="5' tri-ethylene glycol (TEG)"
  modified_base (1)..(1): bicyclic nucleic acid (BNA)
  source: /note="3' tri-ethylene glycol (TEG)"
gaagauggcauuuc

SEQ ID NO: 4617 - RNA, 13 nt, Artificial Sequence
  source: /note="Description of Artificial Sequence: Synthetic oligonucleotide"
  source: /note="RNA"
  source: /note="5' tri-ethylene glycol (TEG)"
  modified_base (1)..(1): bicyclic nucleic acid (BNA)
  source: /note="3' tri-ethylene glycol (TEG)"
gaagauggcauuu

SEQ ID NO: 4618 - RNA, 12 nt, Artificial Sequence
  source: /note="Description of Artificial Sequence: Synthetic oligonucleotide"
  source: /note="RNA"
  source: /note="5' tri-ethylene glycol (TEG)"
  modified_base (1)..(1): bicyclic nucleic acid (BNA)
  source: /note="3' tri-ethylene glycol (TEG)"
gaagauggcauu

SEQ ID NO: 4619 - RNA, 11 nt, Artificial Sequence
  source: /note="Description of Artificial Sequence: Synthetic oligonucleotide"
  source: /note="RNA"
  source: /note="5' tri-ethylene glycol (TEG)"
  modified_base (1)..(1): bicyclic nucleic acid (BNA)
  source: /note="3' tri-ethylene glycol (TEG)"
gaagauggcau

SEQ ID NO: 4620 - RNA, 10 nt, Artificial Sequence
  source: /note="Description of Artificial Sequence: Synthetic oligonucleotide"
  source: /note="RNA"
  source: /note="5' tri-ethylene glycol (TEG)"
  modified_base (1)..(1): bicyclic nucleic acid (BNA)
  source: /note="3' tri-ethylene glycol (TEG)"
gaagauggca

SEQ ID NO: 4621 - RNA, 9 nt, Artificial Sequence
  source: /note="Description of Artificial Sequence: Synthetic oligonucleotide"
  source: /note="RNA"
  source: /note="5' tri-ethylene glycol (TEG)"
  modified_base (1)..(1): bicyclic nucleic acid (BNA)
  source: /note="3' tri-ethylene glycol (TEG)"
gaagauggc

SEQ ID NO: 4622 - RNA, 8 nt, Artificial Sequence
  source: /note="Description of Artificial Sequence: Synthetic oligonucleotide"
  source: /note="RNA"
  source: /note="5' tri-ethylene glycol (TEG)"
  modified_base (1)..(1): bicyclic nucleic acid (BNA)
  source: /note="3' tri-ethylene glycol (TEG)"
gaagaugg

SEQ ID NO: 4623 - RNA, 16 nt, Artificial Sequence
  source: /note="Description of Artificial Sequence: Synthetic oligonucleotide"
  source: /note="RNA"
  source: /note="5' tri-ethylene glycol (TEG)"
  modified_base (1)..(1): bicyclic nucleic acid (BNA)
  source: /note="3' tri-ethylene glycol (TEG)"
aagauggcauuucuag

SEQ ID NO: 4624 - RNA, 15 nt, Artificial Sequence
  source: /note="Description of Artificial Sequence: Synthetic oligonucleotide"
  source: /note="RNA"
  source: /note="5' tri-ethylene glycol (TEG)"
  modified_base (1)..(1): bicyclic nucleic acid (BNA)
  source: /note="3' tri-ethylene glycol (TEG)"
aagauggcauuucua

SEQ ID NO: 4625 - RNA, 14 nt, Artificial Sequence
  source: /note="Description of Artificial Sequence: Synthetic oligonucleotide"
  source: /note="RNA"
  source: /note="5' tri-ethylene glycol (TEG)"
  modified_base (1)..(1): bicyclic nucleic acid (BNA)
  source: /note="3' tri-ethylene glycol (TEG)"
aagauggcauuucu

SEQ ID NO: 4626 - RNA, 13 nt, Artificial Sequence
  source: /note="Description of Artificial Sequence: Synthetic oligonucleotide"
  source: /note="RNA"
  source: /note="5' tri-ethylene glycol (TEG)"
  modified_base (1)..(1): bicyclic nucleic acid (BNA)
  source: /note="3' tri-ethylene glycol (TEG)"
aagauggcauuuc

SEQ ID NO: 4627 - RNA, 12 nt, Artificial Sequence
  source: /note="Description of Artificial Sequence: Synthetic oligonucleotide"
  source: /note="RNA"
  source: /note="5' tri-ethylene glycol (TEG)"
  modified_base (1)..(1): bicyclic nucleic acid (BNA)
  source: /note="3' tri-ethylene glycol (TEG)"
aagauggcauuu

SEQ ID NO: 4628 - RNA, 11 nt, Artificial Sequence
  source: /note="Description of Artificial Sequence: Synthetic oligonucleotide"
  source: /note="RNA"
  source: /note="5' tri-ethylene glycol (TEG)"
  modified_base (1)..(1): bicyclic nucleic acid (BNA)
  source: /note="3' tri-ethylene glycol (TEG)"
aagauggcauu

SEQ ID NO: 4629 - RNA, 10 nt, Artificial Sequence
  source: /note="Description of Artificial Sequence: Synthetic oligonucleotide"
  source: /note="RNA"
  source: /note="5' tri-ethylene glycol (TEG)"
  modified_base (1)..(1): bicyclic nucleic acid (BNA)
  source: /note="3' tri-ethylene glycol (TEG)"
aagauggcau

SEQ ID NO: 4630 - RNA, 9 nt, Artificial Sequence
  source: /note="Description of Artificial Sequence: Synthetic oligonucleotide"
  source: /note="RNA"
  source: /note="5' tri-ethylene glycol (TEG)"
  modified_base (1)..(1): bicyclic nucleic acid (BNA)
  source: /note="3' tri-ethylene glycol (TEG)"
aagauggca

SEQ ID NO: 4631 - RNA, 8 nt, Artificial Sequence
  source: /note="Description of Artificial Sequence: Synthetic oligonucleotide"
  source: /note="RNA"
  source: /note="5' tri-ethylene glycol (TEG)"
  modified_base (1)..(1): bicyclic nucleic acid (BNA)
  source: /note="3' tri-ethylene glycol (TEG)"
aagauggc

SEQ ID NO: 4632 - RNA, 15 nt, Artificial Sequence
  source: /note="Description of Artificial Sequence: Synthetic oligonucleotide"
  source: /note="RNA"
  source: /note="5' tri-ethylene glycol (TEG)"
  modified_base (1)..(1): bicyclic nucleic acid (BNA)
  source: /note="3' tri-ethylene glycol (TEG)"
agauggcauuucuag

SEQ ID NO: 4633 - RNA, 14 nt, Artificial Sequence
  source: /note="Description of Artificial Sequence: Synthetic oligonucleotide"
  source: /note="RNA"
  source: /note="5' tri-ethylene glycol (TEG)"
  modified_base (1)..(1): bicyclic nucleic acid (BNA)
  source: /note="3' tri-ethylene glycol (TEG)"
agauggcauuucua

SEQ ID NO: 4634 - RNA, 13 nt, Artificial Sequence
  source: /note="Description of Artificial Sequence: Synthetic oligonucleotide"
  source: /note="RNA"
  source: /note="5' tri-ethylene glycol (TEG)"
  modified_base (1)..(1): bicyclic nucleic acid (BNA)
  source: /note="3' tri-ethylene glycol (TEG)"
agauggcauuucu

SEQ ID NO: 4635 - RNA, 12 nt, Artificial Sequence
  source: /note="Description of Artificial Sequence: Synthetic oligonucleotide"
  source: /note="RNA"
  source: /note="5' tri-ethylene glycol (TEG)"
  modified_base (1)..(1): bicyclic nucleic acid (BNA)
  source: /note="3' tri-ethylene glycol (TEG)"
agauggcauuuc

SEQ ID NO: 4636 - RNA, 11 nt, Artificial Sequence
  source: /note="Description of Artificial Sequence: Synthetic oligonucleotide"
  source: /note="RNA"
  source: /note="5' tri-ethylene glycol (TEG)"
  modified_base (1)..(1): bicyclic nucleic acid (BNA)
  source: /note="3' tri-ethylene glycol (TEG)"
agauggcauuu

SEQ ID NO: 4637 - RNA, 10 nt, Artificial Sequence
  source: /note="Description of Artificial Sequence: Synthetic oligonucleotide"
  source: /note="RNA"
  source: /note="5' tri-ethylene glycol (TEG)"
  modified_base (1)..(1): bicyclic nucleic acid (BNA)
  source: /note="3' tri-ethylene glycol (TEG)"
agauggcauu

SEQ ID NO: 4638 - RNA, 9 nt, Artificial Sequence
  source: /note="Description of Artificial Sequence: Synthetic oligonucleotide"
  source: /note="RNA"
  source: /note="5' tri-ethylene glycol (TEG)"
  modified_base (1)..(1): bicyclic nucleic acid (BNA)
  source: /note="3' tri-ethylene glycol (TEG)"
agauggcau

SEQ ID NO: 4639 - RNA, 8 nt, Artificial Sequence
  source: /note="Description of Artificial Sequence: Synthetic oligonucleotide"
  source: /note="RNA"
  source: /note="5' tri-ethylene glycol (TEG)"
  modified_base (1)..(1): bicyclic nucleic acid (BNA)
  source: /note="3' tri-ethylene glycol (TEG)"
agauggca

SEQ ID NO: 4640 - RNA, 30 nt, Artificial Sequence; identical to SEQ ID NO: 284
  source: /note="Description of Artificial Sequence: Synthetic oligonucleotide"
  source: /note="RNA"
  source: /note="5' tri-ethylene glycol (TEG)"
  modified_base (1)..(1): bicyclic nucleic acid (BNA)
  source: /note="3' tri-ethylene glycol (TEG)"

SEQ ID NO: 4641 - RNA, 29 nt, Artificial Sequence
  source: /note="Description of Artificial Sequence: Synthetic oligonucleotide"
  source: /note="RNA"
  source: /note="5' tri-ethylene glycol (TEG)"
  modified_base (1)..(1): bicyclic nucleic acid (BNA)
  source: /note="3' tri-ethylene glycol (TEG)"
cuccaacaucaaggaagauggcauuucua

SEQ ID NO: 4642 - RNA, 28 nt, Artificial Sequence
  source: /note="Description of Artificial Sequence: Synthetic oligonucleotide"
  source: /note="RNA"
  source: /note="5' tri-ethylene glycol (TEG)"
  modified_base (1)..(1): bicyclic nucleic acid (BNA)
  source: /note="3' tri-ethylene glycol (TEG)"
cuccaacaucaaggaagauggcauuucu

SEQ ID NO: 4643 - RNA, 27 nt, Artificial Sequence
  source: /note="Description of Artificial Sequence: Synthetic oligonucleotide"
  source: /note="RNA"
  source: /note="5' tri-ethylene glycol (TEG)"
  modified_base (1)..(1): bicyclic nucleic acid (BNA)
  source: /note="3' tri-ethylene glycol (TEG)"
cuccaacaucaaggaagauggcauuuc

SEQ ID NO: 4644 - RNA, 26 nt, Artificial Sequence
  source: /note="Description of Artificial Sequence: Synthetic oligonucleotide"
  source: /note="RNA"
  source: /note="5' tri-ethylene glycol (TEG)"
  modified_base (1)..(1): bicyclic nucleic acid (BNA)
  source: /note="3' tri-ethylene glycol (TEG)"
cuccaacaucaaggaagauggcauuu

SEQ ID NO: 4645 - RNA, 25 nt, Artificial Sequence
  source: /note="Description of Artificial Sequence: Synthetic oligonucleotide"
  source: /note="RNA"
  source: /note="5' tri-ethylene glycol (TEG)"
  modified_base (1)..(1): bicyclic nucleic acid (BNA)
  source: /note="3' tri-ethylene glycol (TEG)"
cuccaacaucaaggaagauggcauu

SEQ ID NO: 4646 - RNA, 24 nt, Artificial Sequence
  source: /note="Description of Artificial Sequence: Synthetic oligonucleotide"
  source: /note="RNA"
  source: /note="5' tri-ethylene glycol (TEG)"
  modified_base (1)..(1): bicyclic nucleic acid (BNA)
  source: /note="3' tri-ethylene glycol (TEG)"
cuccaacaucaaggaagauggcau

SEQ ID NO: 4647 - RNA, 23 nt, Artificial Sequence
  source: /note="Description of Artificial Sequence: Synthetic oligonucleotide"
  source: /note="RNA"
  source: /note="5' tri-ethylene glycol (TEG)"
  modified_base (1)..(1): bicyclic nucleic acid (BNA)
  source: /note="3' tri-ethylene glycol (TEG)"
cuccaacaucaaggaagauggca

SEQ ID NO: 4648 - RNA, 22 nt, Artificial Sequence
  source: /note="Description of Artificial Sequence: Synthetic oligonucleotide"
  source: /note="RNA"
  source: /note="5' tri-ethylene glycol (TEG)"
  modified_base (1)..(1): bicyclic nucleic acid (BNA)
  source: /note="3' tri-ethylene glycol (TEG)"
cuccaacaucaaggaagauggc

SEQ ID NO: 4649 - RNA, 21 nt, Artificial Sequence
  source: /note="Description of Artificial Sequence: Synthetic oligonucleotide"
  source: /note="RNA"
  source: /note="5' tri-ethylene glycol (TEG)"
  modified_base (1)..(1): bicyclic nucleic acid (BNA)
  source: /note="3' tri-ethylene glycol (TEG)"
cuccaacaucaaggaagaugg

SEQ ID NO: 4650 - RNA, 20 nt, Artificial Sequence
  source: /note="Description of Artificial Sequence: Synthetic oligonucleotide"
  source: /note="RNA"
  source: /note="5' tri-ethylene glycol (TEG)"
  modified_base (1)..(1): bicyclic nucleic acid (BNA)
  source: /note="3' tri-ethylene glycol (TEG)"
cuccaacaucaaggaagaug

SEQ ID NO: 4651 - RNA, 19 nt, Artificial Sequence
  source: /note="Description of Artificial Sequence: Synthetic oligonucleotide"
  source: /note="RNA"
  source: /note="5' tri-ethylene glycol (TEG)"
  modified_base (1)..(1): bicyclic nucleic acid (BNA)
  source: /note="3' tri-ethylene glycol (TEG)"
cuccaacaucaaggaagau

SEQ ID NO: 4652 - RNA, 18 nt, Artificial Sequence
  source: /note="Description of Artificial Sequence: Synthetic oligonucleotide"
  source: /note="RNA"
  source: /note="5' tri-ethylene glycol (TEG)"
  modified_base (1)..(1): bicyclic nucleic acid (BNA)
  source: /note="3' tri-ethylene glycol (TEG)"
cuccaacaucaaggaaga

SEQ ID NO: 4653 - RNA, 17 nt, Artificial Sequence
  source: /note="Description of Artificial Sequence: Synthetic oligonucleotide"
  source: /note="RNA"
  source: /note="5' tri-ethylene glycol (TEG)"
  modified_base (1)..(1): bicyclic nucleic acid (BNA)
  source: /note="3' tri-ethylene glycol (TEG)"
cuccaacaucaaggaag

SEQ ID NO: 4654 - DNA, 29 bp, Artificial Sequence
  source: /note="Description of Artificial Sequence: Synthetic oligonucleotide"
  source: /note="Description of Combined DNA/RNA Molecule: Synthetic oligonucleotide"
  source: /note="DNA/RNA"
  source: /note="5' tri-ethylene glycol (TEG)"
  modified_base (1)..(1): bicyclic nucleic acid (BNA)
  source: /note="3' tri-ethylene glycol (TEG)"
tccaacaucaaggaagauggcauuucuag

SEQ ID NO: 4655 - DNA, 28 bp, Artificial Sequence
  source: /note="Description of Artificial Sequence: Synthetic oligonucleotide"
  source: /note="Description of Combined DNA/RNA Molecule: Synthetic oligonucleotide"
  source: /note="DNA/RNA"
  source: /note="5' tri-ethylene glycol (TEG)"
  modified_base (1)..(1): bicyclic nucleic acid (BNA)
  source: /note="3' tri-ethylene glycol (TEG)"
tccaacaucaaggaagauggcauuucua

SEQ ID NO: 4656 - DNA, 27 bp, Artificial Sequence
  source: /note="Description of Artificial Sequence: Synthetic oligonucleotide"
  source: /note="Description of Combined DNA/RNA Molecule: Synthetic oligonucleotide"
  source: /note="DNA/RNA"
  source: /note="5' tri-ethylene glycol (TEG)"
  modified_base (1)..(1): bicyclic nucleic acid (BNA)
  source: /note="3' tri-ethylene glycol (TEG)"
tccaacaucaaggaagauggcauuucu

SEQ ID NO: 4657 - DNA, 26 bp, Artificial Sequence
  source: /note="Description of Artificial Sequence: Synthetic oligonucleotide"
  source: /note="Description of Combined DNA/RNA Molecule: Synthetic oligonucleotide"
  source: /note="DNA/RNA"
  source: /note="5' tri-ethylene glycol (TEG)"
  modified_base (1)..(1): bicyclic nucleic acid (BNA)
  source: /note="3' tri-ethylene glycol (TEG)"
tccaacaucaaggaagauggcauuuc

SEQ ID NO: 4658 - DNA, 25 bp, Artificial Sequence
  source: /note="Description of Artificial Sequence: Synthetic oligonucleotide"
  source: /note="Description of Combined DNA/RNA Molecule: Synthetic oligonucleotide"
  source: /note="DNA/RNA"
  source: /note="5' tri-ethylene glycol (TEG)"
  modified_base (1)..(1): bicyclic nucleic acid (BNA)
  source: /note="3' tri-ethylene glycol (TEG)"
tccaacaucaaggaagauggcauuu

SEQ ID NO: 4659 - DNA, 24 bp, Artificial Sequence
  source: /note="Description of Artificial Sequence: Synthetic oligonucleotide"
  source: /note="Description of Combined DNA/RNA Molecule: Synthetic oligonucleotide"
  source: /note="DNA/RNA"
  source: /note="5' tri-ethylene glycol (TEG)"
  modified_base (1)..(1): bicyclic nucleic acid (BNA)
  source: /note="3' tri-ethylene glycol (TEG)"
tccaacaucaaggaagauggcauu

SEQ ID NO: 4660 - DNA, 23 bp, Artificial Sequence
  source: /note="Description of Artificial Sequence: Synthetic oligonucleotide"
  source: /note="Description of Combined DNA/RNA Molecule: Synthetic oligonucleotide"
  source: /note="DNA/RNA"
  source: /note="5' tri-ethylene glycol (TEG)"
  modified_base (1)..(1): bicyclic nucleic acid (BNA)
  source: /note="3' tri-ethylene glycol (TEG)"
tccaacaucaaggaagauggcau

SEQ ID NO: 4661 - DNA, 22 bp, Artificial Sequence
  source: /note="Description of Artificial Sequence: Synthetic oligonucleotide"
  source: /note="Description of Combined DNA/RNA Molecule: Synthetic oligonucleotide"
  source: /note="DNA/RNA"
  source: /note="5' tri-ethylene glycol (TEG)"
  modified_base (1)..(1): bicyclic nucleic acid (BNA)
  source: /note="3' tri-ethylene glycol (TEG)"
tccaacaucaaggaagauggca

SEQ ID NO: 4662 - DNA, 21 bp, Artificial Sequence
  source: /note="Description of Artificial Sequence: Synthetic oligonucleotide"
  source: /note="Description of Combined DNA/RNA Molecule: Synthetic oligonucleotide"
  source: /note="DNA/RNA"
  source: /note="5' tri-ethylene glycol (TEG)"
  modified_base (1)..(1): bicyclic nucleic acid (BNA)
  source: /note="3' tri-ethylene glycol (TEG)"
tccaacaucaaggaagauggc

SEQ ID NO: 4663 - DNA, 20 bp, Artificial Sequence
  source: /note="Description of Artificial Sequence: Synthetic oligonucleotide"
  source: /note="Description of Combined DNA/RNA Molecule: Synthetic oligonucleotide"
  source: /note="DNA/RNA"
  source: /note="5' tri-ethylene glycol (TEG)"
  modified_base (1)..(1): bicyclic nucleic acid (BNA)
  source: /note="3' tri-ethylene glycol (TEG)"
tccaacaucaaggaagaugg

SEQ ID NO: 4664 - DNA, 19 bp, Artificial Sequence
  source: /note="Description of Artificial Sequence: Synthetic oligonucleotide"
  source: /note="Description of Combined DNA/RNA Molecule: Synthetic oligonucleotide"
  source: /note="DNA/RNA"
  source: /note="5' tri-ethylene glycol (TEG)"
  modified_base (1)..(1): bicyclic nucleic acid (BNA)
  source: /note="3' tri-ethylene glycol (TEG)"
tccaacaucaaggaagaug

SEQ ID NO: 4665 - DNA, 18 bp, Artificial Sequence
  source: /note="Description of Artificial Sequence: Synthetic oligonucleotide"
  source: /note="Description of Combined DNA/RNA Molecule: Synthetic oligonucleotide"
  source: /note="DNA/RNA"
  source: /note="5' tri-ethylene glycol (TEG)"
  modified_base (1)..(1): bicyclic nucleic acid (BNA)
  source: /note="3' tri-ethylene glycol (TEG)"
tccaacaucaaggaagau

SEQ ID NO: 4666 - DNA, 17 bp, Artificial Sequence
  source: /note="Description of Artificial Sequence: Synthetic oligonucleotide"
  source: /note="Description of Combined DNA/RNA Molecule: Synthetic oligonucleotide"
  source: /note="DNA/RNA"
  source: /note="5' tri-ethylene glycol (TEG)"
  modified_base (1)..(1): bicyclic nucleic acid (BNA)
  source: /note="3' tri-ethylene glycol (TEG)"
tccaacaucaaggaaga

SEQ ID NO: 4667 - DNA, 16 bp, Artificial Sequence
  source: /note="Description of Artificial Sequence: Synthetic oligonucleotide"
  source: /note="Description of Combined DNA/RNA Molecule: Synthetic oligonucleotide"
  source: /note="DNA/RNA"
  source: /note="5' tri-ethylene glycol (TEG)"
  modified_base (1)..(1): bicyclic nucleic acid (BNA)
  source: /note="3' tri-ethylene glycol (TEG)"
tccaacaucaaggaag

SEQ ID NO: 4668 - RNA, 28 nt, Artificial Sequence
  source: /note="Description of Artificial Sequence: Synthetic oligonucleotide"
  source: /note="RNA"
  source: /note="5' tri-ethylene glycol (TEG)"
  modified_base (1)..(1): bicyclic nucleic acid (BNA)
  source: /note="3' tri-ethylene glycol (TEG)"
ccaacaucaaggaagauggcauuucuag

SEQ ID NO: 4669 - RNA, 27 nt, Artificial Sequence
  source: /note="Description of Artificial Sequence: Synthetic oligonucleotide"
  source: /note="RNA"
  source: /note="5' tri-ethylene glycol (TEG)"
  modified_base (1)..(1): bicyclic nucleic acid (BNA)
  source: /note="3' tri-ethylene glycol (TEG)"
ccaacaucaaggaagauggcauuucua

SEQ ID NO: 4670 - RNA, 26 nt, Artificial Sequence
  source: /note="Description of Artificial Sequence: Synthetic oligonucleotide"
  source: /note="RNA"
  source: /note="5' tri-ethylene glycol (TEG)"
  modified_base (1)..(1): bicyclic nucleic acid (BNA)
  source: /note="3' tri-ethylene glycol (TEG)"
ccaacaucaaggaagauggcauuucu

SEQ ID NO: 4671 - RNA, 25 nt, Artificial Sequence
  source: /note="Description of Artificial Sequence: Synthetic oligonucleotide"
  source: /note="RNA"
  source: /note="5' tri-ethylene glycol (TEG)"
  modified_base (1)..(1): bicyclic nucleic acid (BNA)
  source: /note="3' tri-ethylene glycol (TEG)"
ccaacaucaaggaagauggcauuuc

SEQ ID NO: 4672 - RNA, 24 nt, Artificial Sequence
  source: /note="Description of Artificial Sequence: Synthetic oligonucleotide"
  source: /note="RNA"
  source: /note="5' tri-ethylene glycol (TEG)"
  modified_base (1)..(1): bicyclic nucleic acid (BNA)
  source: /note="3' tri-ethylene glycol (TEG)"
ccaacaucaaggaagauggcauuu

SEQ ID NO: 4673 - RNA, 23 nt, Artificial Sequence
  source: /note="Description of Artificial Sequence: Synthetic oligonucleotide"
  source: /note="RNA"
  source: /note="5' tri-ethylene glycol (TEG)"
  modified_base (1)..(1): bicyclic nucleic acid (BNA)
  source: /note="3' tri-ethylene glycol (TEG)"
ccaacaucaaggaagauggcauu

SEQ ID NO: 4674 - RNA, 22 nt, Artificial Sequence
  source: /note="Description of Artificial Sequence: Synthetic oligonucleotide"
  source: /note="RNA"
  source: /note="5' tri-ethylene glycol (TEG)"
  modified_base (1)..(1): bicyclic nucleic acid (BNA)
  source: /note="3' tri-ethylene glycol (TEG)"
ccaacaucaaggaagauggcau

SEQ ID NO: 4675 - RNA, 21 nt, Artificial Sequence
  source: /note="Description of Artificial Sequence: Synthetic oligonucleotide"
  source: /note="RNA"
  source: /note="5' tri-ethylene glycol (TEG)"
  modified_base (1)..(1): bicyclic nucleic acid (BNA)
  source: /note="3' tri-ethylene glycol (TEG)"
ccaacaucaaggaagauggca

SEQ ID NO: 4676 - RNA, 20 nt, Artificial Sequence
  source: /note="Description of Artificial Sequence: Synthetic oligonucleotide"
  source: /note="RNA"
  source: /note="5' tri-ethylene glycol (TEG)"
  modified_base (1)..(1): bicyclic nucleic acid (BNA)
  source: /note="3' tri-ethylene glycol (TEG)"
ccaacaucaaggaagauggc

SEQ ID NO: 4677 - RNA, 19 nt, Artificial Sequence
  source: /note="Description of Artificial Sequence: Synthetic oligonucleotide"
  source: /note="RNA"
  source: /note="5' tri-ethylene glycol (TEG)"
  modified_base (1)..(1): bicyclic nucleic acid (BNA)
  source: /note="3' tri-ethylene glycol (TEG)"
ccaacaucaaggaagaugg

SEQ ID NO: 4678 - RNA, 18 nt, Artificial Sequence
  source: /note="Description of Artificial Sequence: Synthetic oligonucleotide"
  source: /note="RNA"
  source: /note="5' tri-ethylene glycol (TEG)"
  modified_base (1)..(1): bicyclic nucleic acid (BNA)
  source: /note="3' tri-ethylene glycol (TEG)"
ccaacaucaaggaagaug

SEQ ID NO: 4679 - RNA, 17 nt, Artificial Sequence
  source: /note="Description of Artificial Sequence: Synthetic oligonucleotide"
  source: /note="RNA"
  source: /note="5' tri-ethylene glycol (TEG)"
  modified_base (1)..(1): bicyclic nucleic acid (BNA)
  source: /note="3' tri-ethylene glycol (TEG)"
ccaacaucaaggaagau

SEQ ID NO: 4680 - RNA, 16 nt, Artificial Sequence
  source: /note="Description of Artificial Sequence: Synthetic oligonucleotide"
  source: /note="RNA"
  source: /note="5' tri-ethylene glycol (TEG)"
  modified_base (1)..(1): bicyclic nucleic acid (BNA)
  source: /note="3' tri-ethylene glycol (TEG)"
ccaacaucaaggaaga

SEQ ID NO: 4681 - RNA, 15 nt, Artificial Sequence
  source: /note="Description of Artificial Sequence: Synthetic oligonucleotide"
  source: /note="RNA"
  source: /note="5' tri-ethylene glycol (TEG)"
  modified_base (1)..(1): bicyclic nucleic acid (BNA)
  source: /note="3' tri-ethylene glycol (TEG)"
ccaacaucaaggaag

SEQ ID NO: 4682 - RNA, 27 nt, Artificial Sequence
  source: /note="Description of Artificial Sequence: Synthetic oligonucleotide"
  source: /note="RNA"
  source: /note="5' tri-ethylene glycol (TEG)"
  modified_base (1)..(1): bicyclic nucleic acid (BNA)
  source: /note="3' tri-ethylene glycol (TEG)"
caacaucaaggaagauggcauuucuag

SEQ ID NO: 4683 - RNA, 26 nt, Artificial Sequence
  source: /note="Description of Artificial Sequence: Synthetic oligonucleotide"
  source: /note="RNA"
  source: /note="5' tri-ethylene glycol (TEG)"
  modified_base (1)..(1): bicyclic nucleic acid (BNA)
  source: /note="3' tri-ethylene glycol (TEG)"
caacaucaaggaagauggcauuucua

SEQ ID NO: 4684 - RNA, 25 nt, Artificial Sequence
  source: /note="Description of Artificial Sequence: Synthetic oligonucleotide"
  source: /note="RNA"
  source: /note="5' tri-ethylene glycol (TEG)"
  modified_base (1)..(1): bicyclic nucleic acid (BNA)
  source: /note="3' tri-ethylene glycol (TEG)"
caacaucaaggaagauggcauuucu

SEQ ID NO: 4685 - RNA, 24 nt, Artificial Sequence
  source: /note="Description of Artificial Sequence: Synthetic oligonucleotide"
  source: /note="RNA"
  source: /note="5' tri-ethylene glycol (TEG)"
  modified_base (1)..(1): bicyclic nucleic acid (BNA)
  source: /note="3' tri-ethylene glycol (TEG)"
caacaucaaggaagauggcauuuc

SEQ ID NO: 4686 - RNA, 23 nt, Artificial Sequence
  source: /note="Description of Artificial Sequence: Synthetic oligonucleotide"
  source: /note="RNA"
  source: /note="5' tri-ethylene glycol (TEG)"
  modified_base (1)..(1): bicyclic nucleic acid (BNA)
  source: /note="3' tri-ethylene glycol (TEG)"
caacaucaaggaagauggcauuu

SEQ ID NO: 4687 - RNA, 22 nt, Artificial Sequence
  source: /note="Description of Artificial Sequence: Synthetic oligonucleotide"
  source: /note="RNA"
  source: /note="5' tri-ethylene glycol (TEG)"
  modified_base (1)..(1): bicyclic nucleic acid (BNA)
  source: /note="3' tri-ethylene glycol (TEG)"
caacaucaaggaagauggcauu

SEQ ID NO: 4688 - RNA, 21 nt, Artificial Sequence
  source: /note="Description of Artificial Sequence: Synthetic oligonucleotide"
  source: /note="RNA"
  source: /note="5' tri-ethylene glycol (TEG)"
  modified_base (1)..(1): bicyclic nucleic acid (BNA)
  source: /note="3' tri-ethylene glycol (TEG)"
caacaucaaggaagauggcau

SEQ ID NO: 4689 - RNA, 20 nt, Artificial Sequence
  source: /note="Description of Artificial Sequence: Synthetic oligonucleotide"
  source: /note="RNA"
  source: /note="5' tri-ethylene glycol (TEG)"
  modified_base (1)..(1): bicyclic nucleic acid (BNA)
  source: /note="3' tri-ethylene glycol (TEG)"
caacaucaaggaagauggca

SEQ ID NO: 4690 - RNA, 19 nt, Artificial Sequence
  source: /note="Description of Artificial Sequence: Synthetic oligonucleotide"
  source: /note="RNA"
  source: /note="5' tri-ethylene glycol (TEG)"
  modified_base (1)..(1): bicyclic nucleic acid (BNA)
  source: /note="3' tri-ethylene glycol (TEG)"
caacaucaaggaagauggc

SEQ ID NO: 4691 - RNA, 18 nt, Artificial Sequence
  source: /note="Description of Artificial Sequence: Synthetic oligonucleotide"
  source: /note="RNA"
  source: /note="5' tri-ethylene glycol (TEG)"
  modified_base (1)..(1): bicyclic nucleic acid (BNA)
  source: /note="3' tri-ethylene glycol (TEG)"
caacaucaaggaagaugg

SEQ ID NO: 4692 - RNA, 17 nt, Artificial Sequence
  source: /note="Description of Artificial Sequence: Synthetic oligonucleotide"
  source: /note="RNA"
  source: /note="5' tri-ethylene glycol (TEG)"
  modified_base (1)..(1): bicyclic nucleic acid (BNA)
  source: /note="3' tri-ethylene glycol (TEG)"
caacaucaaggaagaug

SEQ ID NO: 4693 - RNA, 16 nt, Artificial Sequence
  source: /note="Description of Artificial Sequence: Synthetic oligonucleotide"
  source: /note="RNA"
  source: /note="5' tri-ethylene glycol (TEG)"
  modified_base (1)..(1): bicyclic nucleic acid (BNA)
  source: /note="3' tri-ethylene glycol (TEG)"
caacaucaaggaagau

SEQ ID NO: 4694 - RNA, 15 nt, Artificial Sequence
  source: /note="Description of Artificial Sequence: Synthetic oligonucleotide"
  source: /note="RNA"
  source: /note="5' tri-ethylene glycol (TEG)"
  modified_base (1)..(1): bicyclic nucleic acid (BNA)
  source: /note="3' tri-ethylene glycol (TEG)"
caacaucaaggaaga

SEQ ID NO: 4695 - RNA, 14 nt, Artificial Sequence
  source: /note="Description of Artificial Sequence: Synthetic oligonucleotide"
  source: /note="RNA"
  source: /note="5' tri-ethylene glycol (TEG)"
  modified_base (1)..(1): bicyclic nucleic acid (BNA)
  source: /note="3' tri-ethylene glycol (TEG)"
caacaucaaggaag

SEQ ID NO: 4696 - RNA, 26 nt, Artificial Sequence
  source: /note="Description of Artificial Sequence: Synthetic oligonucleotide"
  source: /note="RNA"
  source: /note="5' tri-ethylene glycol (TEG)"
  modified_base (1)..(1): bicyclic nucleic acid (BNA)
  source: /note="3' tri-ethylene glycol (TEG)"
aacaucaaggaagauggcauuucuag

SEQ ID NO: 4697 - RNA, 25 nt, Artificial Sequence
  source: /note="Description of Artificial Sequence: Synthetic oligonucleotide"
  source: /note="RNA"
  source: /note="5' tri-ethylene glycol (TEG)"
  modified_base (1)..(1): bicyclic nucleic acid (BNA)
  source: /note="3' tri-ethylene glycol (TEG)"
aacaucaaggaagauggcauuucua

SEQ ID NO: 4698 - RNA, 24 nt, Artificial Sequence
  source: /note="Description of Artificial Sequence: Synthetic oligonucleotide"
  source: /note="RNA"
  source: /note="5' tri-ethylene glycol (TEG)"
  modified_base (1)..(1): bicyclic nucleic acid (BNA)
  source: /note="3' tri-ethylene glycol (TEG)"
aacaucaaggaagauggcauuucu

SEQ ID NO: 4699 - RNA, 23 nt, Artificial Sequence
  source: /note="Description of Artificial Sequence: Synthetic oligonucleotide"
  source: /note="RNA"
  source: /note="5' tri-ethylene glycol (TEG)"
  modified_base (1)..(1): bicyclic nucleic acid (BNA)
  source: /note="3' tri-ethylene glycol (TEG)"
aacaucaaggaagauggcauuuc

SEQ ID NO: 4700 - RNA, 22 nt, Artificial Sequence
  source: /note="Description of Artificial Sequence: Synthetic oligonucleotide"
  source: /note="RNA"
  source: /note="5' tri-ethylene glycol (TEG)"
  modified_base (1)..(1): bicyclic nucleic acid (BNA)
  source: /note="3' tri-ethylene glycol (TEG)"
aacaucaaggaagauggcauuu

SEQ ID NO: 4701 - RNA, 21 nt, Artificial Sequence
  source: /note="Description of Artificial Sequence: Synthetic oligonucleotide"
  source: /note="RNA"
  source: /note="5' tri-ethylene glycol (TEG)"
  modified_base (1)..(1): bicyclic nucleic acid (BNA)
  source: /note="3' tri-ethylene glycol (TEG)"
aacaucaaggaagauggcauu

SEQ ID NO: 4702 - RNA, 20 nt, Artificial Sequence
  source: /note="Description of Artificial Sequence: Synthetic oligonucleotide"
  source: /note="RNA"
  source: /note="5' tri-ethylene glycol (TEG)"
  modified_base (1)..(1): bicyclic nucleic acid (BNA)
  source: /note="3' tri-ethylene glycol (TEG)"
aacaucaaggaagauggcau

SEQ ID NO: 4703 - RNA, 19 nt, Artificial Sequence
  source: /note="Description of Artificial Sequence: Synthetic oligonucleotide"
  source: /note="RNA"
  source: /note="5' tri-ethylene glycol (TEG)"
  modified_base (1)..(1): bicyclic nucleic acid (BNA)
  source: /note="3' tri-ethylene glycol (TEG)"
aacaucaaggaagauggca

SEQ ID NO: 4704 - RNA, 18 nt, Artificial Sequence
  source: /note="Description of Artificial Sequence: Synthetic oligonucleotide"
  source: /note="RNA"
  source: /note="5' tri-ethylene glycol (TEG)"
  modified_base (1)..(1): bicyclic nucleic acid (BNA)
  source: /note="3' tri-ethylene glycol (TEG)"
aacaucaaggaagauggc

SEQ ID NO: 4705 - RNA, 17 nt, Artificial Sequence
  source: /note="Description of Artificial Sequence: Synthetic oligonucleotide"
  source: /note="RNA"
  source: /note="5' tri-ethylene glycol (TEG)"
  modified_base (1)..(1): bicyclic nucleic acid (BNA)
  source: /note="3' tri-ethylene glycol (TEG)"
aacaucaaggaagaugg

SEQ ID NO: 4706 - RNA, 16 nt, Artificial Sequence
  source: /note="Description of Artificial Sequence: Synthetic oligonucleotide"
  source: /note="RNA"
  source: /note="5' tri-ethylene glycol (TEG)"
  modified_base (1)..(1): bicyclic nucleic acid (BNA)
  source: /note="3' tri-ethylene glycol (TEG)"
aacaucaaggaagaug

SEQ ID NO: 4707 - RNA, 15 nt, Artificial Sequence
  source: /note="Description of Artificial Sequence: Synthetic oligonucleotide"
  source: /note="RNA"
  source: /note="5' tri-ethylene glycol (TEG)"
  modified_base (1)..(1): bicyclic nucleic acid (BNA)
  source: /note="3' tri-ethylene glycol (TEG)"
aacaucaaggaagau

SEQ ID NO: 4708 - RNA, 14 nt, Artificial Sequence
  source: /note="Description of Artificial Sequence: Synthetic oligonucleotide"
  source: /note="RNA"
  source: /note="5' tri-ethylene glycol (TEG)"
  modified_base (1)..(1): bicyclic nucleic acid (BNA)
  source: /note="3' tri-ethylene glycol (TEG)"
aacaucaaggaaga

SEQ ID NO: 4709 - RNA, 13 nt, Artificial Sequence
  source: /note="Description of Artificial Sequence: Synthetic oligonucleotide"
  source: /note="RNA"
  source: /note="5' tri-ethylene glycol (TEG)"
  modified_base (1)..(1): bicyclic nucleic acid (BNA)
  source: /note="3' tri-ethylene glycol (TEG)"
aacaucaaggaag

SEQ ID NO: 4710 - RNA, 25 nt, Artificial Sequence
  source: /note="Description of Artificial Sequence: Synthetic oligonucleotide"
  source: /note="RNA"
  source: /note="5' tri-ethylene glycol (TEG)"
  modified_base (1)..(1): bicyclic nucleic acid (BNA)
  source: /note="3' tri-ethylene glycol (TEG)"
acaucaaggaagauggcauuucuag

SEQ ID NO: 4711 - RNA, 24 nt, Artificial Sequence
  source: /note="Description of Artificial Sequence: Synthetic oligonucleotide"
  source: /note="RNA"
  source: /note="5' tri-ethylene glycol (TEG)"
  modified_base (1)..(1): bicyclic nucleic acid (BNA)
  source: /note="3' tri-ethylene glycol (TEG)"
acaucaaggaagauggcauuucua

SEQ ID NO: 4712 - RNA, 23 nt, Artificial Sequence
  source: /note="Description of Artificial Sequence: Synthetic oligonucleotide"
  source: /note="RNA"
  source: /note="5' tri-ethylene glycol (TEG)"
  modified_base (1)..(1): bicyclic nucleic acid (BNA)
  source: /note="3' tri-ethylene glycol (TEG)"
acaucaaggaagauggcauuucu

SEQ ID NO: 4713 - RNA, 22 nt, Artificial Sequence
  source: /note="Description of Artificial Sequence: Synthetic oligonucleotide"
  source: /note="RNA"
  source: /note="5' tri-ethylene glycol (TEG)"
  modified_base (1)..(1): bicyclic nucleic acid (BNA)
  source: /note="3' tri-ethylene glycol (TEG)"
acaucaaggaagauggcauuuc

SEQ ID NO: 4714 - RNA, 21 nt, Artificial Sequence
  source: /note="Description of Artificial Sequence: Synthetic oligonucleotide"
  source: /note="RNA"
  source: /note="5' tri-ethylene glycol (TEG)"
  modified_base (1)..(1): bicyclic nucleic acid (BNA)
  source: /note="3' tri-ethylene glycol (TEG)"
acaucaaggaagauggcauuu

SEQ ID NO: 4715 - RNA, 20 nt, Artificial Sequence
  source: /note="Description of Artificial Sequence: Synthetic oligonucleotide"
  source: /note="RNA"
  source: /note="5' tri-ethylene glycol (TEG)"
  modified_base (1)..(1): bicyclic nucleic acid (BNA)
  source: /note="3' tri-ethylene glycol (TEG)"
acaucaaggaagauggcauu

SEQ ID NO: 4716 - RNA, 19 nt, Artificial Sequence
  source: /note="Description of Artificial Sequence: Synthetic oligonucleotide"
  source: /note="RNA"
  source: /note="5' tri-ethylene glycol (TEG)"
  modified_base (1)..(1): bicyclic nucleic acid (BNA)
  source: /note="3' tri-ethylene glycol (TEG)"
acaucaaggaagauggcau

SEQ ID NO: 4717 - RNA, 18 nt, Artificial Sequence
  source: /note="Description of Artificial Sequence: Synthetic oligonucleotide"
  source: /note="RNA"
  source: /note="5' tri-ethylene glycol (TEG)"
  modified_base (1)..(1): bicyclic nucleic acid (BNA)
  source: /note="3' tri-ethylene glycol (TEG)"
acaucaaggaagauggca

SEQ ID NO: 4718 - RNA, 17 nt, Artificial Sequence
  source: /note="Description of Artificial Sequence: Synthetic oligonucleotide"
  source: /note="RNA"
  source: /note="5' tri-ethylene glycol (TEG)"
  modified_base (1)..(1): bicyclic nucleic acid (BNA)
  source: /note="3' tri-ethylene glycol (TEG)"
acaucaaggaagauggc

SEQ ID NO: 4719 - RNA, 16 nt, Artificial Sequence
  source: /note="Description of Artificial Sequence: Synthetic oligonucleotide"
  source: /note="RNA"
  source: /note="5' tri-ethylene glycol (TEG)"
  modified_base (1)..(1): bicyclic nucleic acid (BNA)
  source: /note="3' tri-ethylene glycol (TEG)"
acaucaaggaagaugg

SEQ ID NO: 4720 - RNA, 15 nt, Artificial Sequence
  source: /note="Description of Artificial Sequence: Synthetic oligonucleotide"
  source: /note="RNA"
  source: /note="5' tri-ethylene glycol (TEG)"
  modified_base (1)..(1): bicyclic nucleic acid (BNA)
  source: /note="3' tri-ethylene glycol (TEG)"
acaucaaggaagaug

SEQ ID NO: 4721 - RNA, 14 nt, Artificial Sequence
  source: /note="Description of Artificial Sequence: Synthetic oligonucleotide"
  source: /note="RNA"
  source: /note="5' tri-ethylene glycol (TEG)"
  modified_base (1)..(1): bicyclic nucleic acid (BNA)
  source: /note="3' tri-ethylene glycol (TEG)"
acaucaaggaagau

SEQ ID NO: 4722 - RNA, 13 nt, Artificial Sequence
  source: /note="Description of Artificial Sequence: Synthetic oligonucleotide"
  source: /note="RNA"
  source: /note="5' tri-ethylene glycol (TEG)"
  modified_base (1)..(1): bicyclic nucleic acid (BNA)
  source: /note="3' tri-ethylene glycol (TEG)"
acaucaaggaaga

SEQ ID NO: 4723 - RNA, 12 nt, Artificial Sequence
  source: /note="Description of Artificial Sequence: Synthetic oligonucleotide"
  source: /note="RNA"
  source: /note="5' tri-ethylene glycol (TEG)"
  modified_base (1)..(1): bicyclic nucleic acid (BNA)
  source: /note="3' tri-ethylene glycol (TEG)"
acaucaaggaag

SEQ ID NO: 4724 - RNA, 24 nt, Artificial Sequence
  source: /note="Description of Artificial Sequence: Synthetic oligonucleotide"
  source: /note="RNA"
  source: /note="5' tri-ethylene glycol (TEG)"
  modified_base (1)..(1): bicyclic nucleic acid (BNA)
  source: /note="3' tri-ethylene glycol (TEG)"
caucaaggaagauggcauuucuag

SEQ ID NO: 4725 - RNA, 23 nt, Artificial Sequence
  source: /note="Description of Artificial Sequence: Synthetic oligonucleotide"
  source: /note="RNA"
  source: /note="5' tri-ethylene glycol (TEG)"
  modified_base (1)..(1): bicyclic nucleic acid (BNA)
  source: /note="3' tri-ethylene glycol (TEG)"
caucaaggaagauggcauuucua

SEQ ID NO: 4726 - RNA, 22 nt, Artificial Sequence
  source: /note="Description of Artificial Sequence: Synthetic oligonucleotide"
  source: /note="RNA"
  source: /note="5' tri-ethylene glycol (TEG)"
  modified_base (1)..(1): bicyclic nucleic acid (BNA)
  source: /note="3' tri-ethylene glycol (TEG)"
caucaaggaagauggcauuucu

SEQ ID NO: 4727 - RNA, 21 nt, Artificial Sequence
  source: /note="Description of Artificial Sequence: Synthetic oligonucleotide"
  source: /note="RNA"
  source: /note="5' tri-ethylene glycol (TEG)"
  modified_base (1)..(1): bicyclic nucleic acid (BNA)
  source: /note="3' tri-ethylene glycol (TEG)"
caucaaggaagauggcauuuc

SEQ ID NO: 4728 - RNA, 20 nt, Artificial Sequence
  source: /note="Description of Artificial Sequence: Synthetic oligonucleotide"
  source: /note="RNA"
  source: /note="5' tri-ethylene glycol (TEG)"
  modified_base (1)..(1): bicyclic nucleic acid (BNA)
  source: /note="3' tri-ethylene glycol (TEG)"
caucaaggaagauggcauuu

SEQ ID NO: 4729 - RNA, 19 nt, Artificial Sequence
  source: /note="Description of Artificial Sequence: Synthetic oligonucleotide"
  source: /note="RNA"
  source: /note="5' tri-ethylene glycol (TEG)"
  modified_base (1)..(1): bicyclic nucleic acid (BNA)
  source: /note="3' tri-ethylene glycol (TEG)"
caucaaggaagauggcauu

SEQ ID NO: 4730 - RNA, 18 nt, Artificial Sequence
  source: /note="Description of Artificial Sequence: Synthetic oligonucleotide"
  source: /note="RNA"
  source: /note="5' tri-ethylene glycol (TEG)"
  modified_base (1)..(1): bicyclic nucleic acid (BNA)
  source: /note="3' tri-ethylene glycol (TEG)"
caucaaggaagauggcau

SEQ ID NO: 4731 - RNA, 17 nt, Artificial Sequence
  source: /note="Description of Artificial Sequence: Synthetic oligonucleotide"
  source: /note="RNA"
  source: /note="5' tri-ethylene glycol (TEG)"
  modified_base (1)..(1): bicyclic nucleic acid (BNA)
  source: /note="3' tri-ethylene glycol (TEG)"
caucaaggaagauggca

SEQ ID NO: 4732 - RNA, 16 nt, Artificial Sequence
  source: /note="Description of Artificial Sequence: Synthetic oligonucleotide"
  source: /note="RNA"
  source: /note="5' tri-ethylene glycol (TEG)"
  modified_base (1)..(1): bicyclic nucleic acid (BNA)
  source: /note="3' tri-ethylene glycol (TEG)"
caucaaggaagauggc

SEQ ID NO: 4733 - RNA, 15 nt, Artificial Sequence
  source: /note="Description of Artificial Sequence: Synthetic oligonucleotide"
  source: /note="RNA"
  source: /note="5' tri-ethylene glycol (TEG)"
  modified_base (1)..(1): bicyclic nucleic acid (BNA)
  source: /note="3' tri-ethylene glycol (TEG)"
caucaaggaagaugg

SEQ ID NO: 4734 - RNA, 14 nt, Artificial Sequence
  source: /note="Description of Artificial Sequence: Synthetic oligonucleotide"
  source: /note="RNA"
  source: /note="5' tri-ethylene glycol (TEG)"
  modified_base (1)..(1): bicyclic nucleic acid (BNA)
  source: /note="3' tri-ethylene glycol (TEG)"
caucaaggaagaug

SEQ ID NO: 4735 - RNA, 13 nt, Artificial Sequence
  source: /note="Description of Artificial Sequence: Synthetic oligonucleotide"
  source: /note="RNA"
  source: /note="5' tri-ethylene glycol (TEG)"
  modified_base (1)..(1): bicyclic nucleic acid (BNA)
  source: /note="3' tri-ethylene glycol (TEG)"
caucaaggaagau

SEQ ID NO: 4736 - RNA, 12 nt, Artificial Sequence
  source: /note="Description of Artificial Sequence: Synthetic oligonucleotide"
  source: /note="RNA"
  source: /note="5' tri-ethylene glycol (TEG)"
  modified_base (1)..(1): bicyclic nucleic acid (BNA)
  source: /note="3' tri-ethylene glycol (TEG)"
caucaaggaaga

SEQ ID NO: 4737 - RNA, 11 nt, Artificial Sequence
  source: /note="Description of Artificial Sequence: Synthetic oligonucleotide"
  source: /note="RNA"
  source: /note="5' tri-ethylene glycol (TEG)"
  modified_base (1)..(1): bicyclic nucleic acid (BNA)
  source: /note="3' tri-ethylene glycol (TEG)"
caucaaggaag

SEQ ID NO: 4738 - RNA, 23 nt, Artificial Sequence
  source: /note="Description of Artificial Sequence: Synthetic oligonucleotide"
  source: /note="RNA"
  source: /note="5' tri-ethylene glycol (TEG)"
  modified_base (1)..(1): bicyclic nucleic acid (BNA)
  source: /note="3' tri-ethylene glycol (TEG)"
aucaaggaagauggcauuucuag

SEQ ID NO: 4739 - RNA, 22 nt, Artificial Sequence
  source: /note="Description of Artificial Sequence: Synthetic oligonucleotide"
  source: /note="RNA"
  source: /note="5' tri-ethylene glycol (TEG)"
  modified_base (1)..(1): bicyclic nucleic acid (BNA)
  source: /note="3' tri-ethylene glycol (TEG)"
aucaaggaagauggcauuucua

SEQ ID NO: 4740 - RNA, 21 nt, Artificial Sequence
  source: /note="Description of Artificial Sequence: Synthetic oligonucleotide"
  source: /note="RNA"
  source: /note="5' tri-ethylene glycol (TEG)"
  modified_base (1)..(1): bicyclic nucleic acid (BNA)
  source: /note="3' tri-ethylene glycol (TEG)"
aucaaggaagauggcauuucu

SEQ ID NO: 4741 - RNA, 20 nt, Artificial Sequence
  source: /note="Description of Artificial Sequence: Synthetic oligonucleotide"
  source: /note="RNA"
  source: /note="5' tri-ethylene glycol (TEG)"
  modified_base (1)..(1): bicyclic nucleic acid (BNA)
  source: /note="3' tri-ethylene glycol (TEG)"
aucaaggaagauggcauuuc

SEQ ID NO: 4742 - RNA, 19 nt, Artificial Sequence
  source: /note="Description of Artificial Sequence: Synthetic oligonucleotide"
  source: /note="RNA"
  source: /note="5' tri-ethylene glycol (TEG)"
  modified_base (1)..(1): bicyclic nucleic acid (BNA)
  source: /note="3' tri-ethylene glycol (TEG)"
aucaaggaagauggcauuu

SEQ ID NO: 4743 - RNA, 18 nt, Artificial Sequence
  source: /note="Description of Artificial Sequence: Synthetic oligonucleotide"
  source: /note="RNA"
  source: /note="5' tri-ethylene glycol (TEG)"
  modified_base (1)..(1): bicyclic nucleic acid (BNA)
  source: /note="3' tri-ethylene glycol (TEG)"
aucaaggaagauggcauu

SEQ ID NO: 4744 - RNA, 17 nt, Artificial Sequence
  source: /note="Description of Artificial Sequence: Synthetic oligonucleotide"
  source: /note="RNA"
  source: /note="5' tri-ethylene glycol (TEG)"
  modified_base (1)..(1): bicyclic nucleic acid (BNA)
  source: /note="3' tri-ethylene glycol (TEG)"
aucaaggaagauggcau

SEQ ID NO: 4745 - RNA, 16 nt, Artificial Sequence
  source: /note="Description of Artificial Sequence: Synthetic oligonucleotide"
  source: /note="RNA"
  source: /note="5' tri-ethylene glycol (TEG)"
  modified_base (1)..(1): bicyclic nucleic acid (BNA)
  source: /note="3' tri-ethylene glycol (TEG)"
aucaaggaagauggca

SEQ ID NO: 4746 - RNA, 15 nt, Artificial Sequence
  source: /note="Description of Artificial Sequence: Synthetic oligonucleotide"
  source: /note="RNA"
  source: /note="5' tri-ethylene glycol (TEG)"
  modified_base (1)..(1): bicyclic nucleic acid (BNA)
  source: /note="3' tri-ethylene glycol (TEG)"
aucaaggaagauggc

SEQ ID NO: 4747 - RNA, 14 nt, Artificial Sequence
  source: /note="Description of Artificial Sequence: Synthetic oligonucleotide"
  source: /note="RNA"
  source: /note="5' tri-ethylene glycol (TEG)"
  modified_base (1)..(1): bicyclic nucleic acid (BNA)
  source: /note="3' tri-ethylene glycol (TEG)"
aucaaggaagaugg

SEQ ID NO: 4748 - RNA, 13 nt, Artificial Sequence
  source: /note="Description of Artificial Sequence: Synthetic oligonucleotide"
  source: /note="RNA"
  source: /note="5' tri-ethylene glycol (TEG)"
  modified_base (1)..(1): bicyclic nucleic acid (BNA)
  source: /note="3' tri-ethylene glycol (TEG)"
aucaaggaagaug

SEQ ID NO: 4749 - RNA, 12 nt, Artificial Sequence
  source: /note="Description of Artificial Sequence: Synthetic oligonucleotide"
  source: /note="RNA"
  source: /note="5' tri-ethylene glycol (TEG)"
  modified_base (1)..(1): bicyclic nucleic acid (BNA)
  source: /note="3' tri-ethylene glycol (TEG)"
aucaaggaagau

SEQ ID NO: 4750 - RNA, 11 nt, Artificial Sequence
  source: /note="Description of Artificial Sequence: Synthetic oligonucleotide"
  source: /note="RNA"
  source: /note="5' tri-ethylene glycol (TEG)"
  modified_base (1)..(1): bicyclic nucleic acid (BNA)
  source: /note="3' tri-ethylene glycol (TEG)"
aucaaggaaga

SEQ ID NO: 4751 - RNA, 10 nt, Artificial Sequence
  source: /note="Description of Artificial Sequence: Synthetic oligonucleotide"
  source: /note="RNA"
  source: /note="5' tri-ethylene glycol (TEG)"
  modified_base (1)..(1): bicyclic nucleic acid (BNA)
  source: /note="3' tri-ethylene glycol (TEG)"
aucaaggaag

SEQ ID NO: 4752 - RNA, 23 nt, Artificial Sequence
  source: /note="Description of Artificial Sequence: Synthetic oligonucleotide"
  source: /note="RNA"
  source: /note="5' tri-ethylene glycol (TEG)"
  modified_base (1)..(1): bicyclic nucleic acid (BNA)
  source: /note="3' tri-ethylene glycol (TEG)"
ccagagcagguaccuccaacauc

SEQ ID NO: 4753 - RNA, 18 nt, Artificial Sequence
  source: /note="Description of Artificial Sequence: Synthetic oligonucleotide"
  source: /note="RNA"
  source: /note="5' tri-ethylene glycol (TEG)"
  modified_base (1)..(1): bicyclic nucleic acid (BNA)
  source: /note="3' tri-ethylene glycol (TEG)"
ccagagcagguaccucca

SEQ ID NO: 4754 - RNA, 23 nt, Artificial Sequence
  source: /note="Description of Artificial Sequence: Synthetic oligonucleotide"
  source: /note="RNA"
  source: /note="5' tri-ethylene glycol (TEG)"
  modified_base (1)..(1): bicyclic nucleic acid (BNA)
  source: /note="3' tri-ethylene glycol (TEG)"
ccucugugauuuuauaacuugau

SEQ ID NO: 4755 - DNA, 17 bp, Artificial Sequence
  source: /note="Description of Artificial Sequence: Synthetic oligonucleotide"
  source: /note="Description of Combined DNA/RNA Molecule: Synthetic oligonucleotide"
  source: /note="DNA/RNA"
  source: /note="5' tri-ethylene glycol (TEG)"
  modified_base (1)..(1): bicyclic nucleic acid (BNA)
  source: /note="3' tri-ethylene glycol (TEG)"
tcacccaccaucacccu

SEQ ID NO: 4756 - DNA, 20 bp, Artificial Sequence
  source: /note="Description of Artificial Sequence: Synthetic oligonucleotide"
  source: /note="Description of Combined DNA/RNA Molecule: Synthetic oligonucleotide"
  source: /note="DNA/RNA"
  source: /note="5' tri-ethylene glycol (TEG)"
  modified_base (1)..(1): bicyclic nucleic acid (BNA)
  source: /note="3' tri-ethylene glycol (TEG)"
tgauauccucaaggucaccc

SEQ ID NO: 4757 - RNA, 22 nt, Artificial Sequence
  source: /note="Description of Artificial Sequence: Synthetic oligonucleotide"
  source: /note="RNA"
  source: /note="5' tri-ethylene glycol (TEG)"
  modified_base (1)..(1): bicyclic nucleic acid (BNA)
  source: /note="3' tri-ethylene glycol (TEG)"
cugcuugaugaucaucucguug

SEQ ID NO: 4758 - RNA, 18 nt, Artificial Sequence
  source: /note="Description of Artificial Sequence: Synthetic oligonucleotide"
  source: /note="RNA"
  source: /note="5' tri-ethylene glycol (TEG)"
  modified_base (1)..(1): bicyclic nucleic acid (BNA)
  source: /note="3' tri-ethylene glycol (TEG)"
cugcuugaugaucaucuc

SEQ ID NO: 4759 - RNA, 19 nt, Artificial Sequence
  source: /note="Description of Artificial Sequence: Synthetic oligonucleotide"
  source: /note="RNA"
  source: /note="5' tri-ethylene glycol (TEG)"
  modified_base (1)..(1): bicyclic nucleic acid (BNA)
  source: /note="3' tri-ethylene glycol (TEG)"
guuuccuuaguaaccacag

SEQ ID NO: 4760 - RNA, 17 nt, Artificial Sequence
  source: /note="Description of Artificial Sequence: Synthetic oligonucleotide"
  source: /note="RNA"
  source: /note="5' tri-ethylene glycol (TEG)"
  modified_base (1)..(1): bicyclic nucleic acid (BNA)
  source: /note="3' tri-ethylene glycol (TEG)"
guuuccuuaguaaccac

SEQ ID NO: 4761 - DNA, 20 bp, Artificial Sequence
  source: /note="Description of Artificial Sequence: Synthetic oligonucleotide"
  source: /note="Description of Combined DNA/RNA Molecule: Synthetic oligonucleotide"
  source: /note="DNA/RNA"
  modified_base (20)..(20): bicyclic nucleic acid (BNA)
ucaaggaagauggcauuuct

SEQ ID NO: 4762 - RNA, 22 nt, Artificial Sequence
  source: /note="Description of Artificial Sequence: Synthetic oligonucleotide"
  source: /note="RNA"
  modified_base (22)..(22): bicyclic nucleic acid (BNA)
ucaaggaagauggcauuucuag

SEQ ID NO: 4763 - RNA, 18 nt, Artificial Sequence
  source: /note="Description of Artificial Sequence: Synthetic oligonucleotide"
  source: /note="RNA"
  modified_base (18)..(18): bicyclic nucleic acid (BNA)
gguaaguucuguccaagc

SEQ ID NO: 4764 - RNA, 18 nt, Artificial Sequence
  source: /note="Description of Artificial Sequence: Synthetic oligonucleotide"
  source: /note="RNA"
  modified_base (18)..(18): bicyclic nucleic acid (BNA)
guaaguucuguccaagcc

SEQ ID NO: 4765 - RNA, 18 nt, Artificial Sequence
  source: /note="Description of Artificial Sequence: Synthetic oligonucleotide"
  source: /note="RNA"
  modified_base (18)..(18): bicyclic nucleic acid (BNA)
agucgguaaguucugucc

SEQ ID NO: 4766 - RNA, 18 nt, Artificial Sequence
  source: /note="Description of Artificial Sequence: Synthetic oligonucleotide"
  source: /note="RNA"
  modified_base (18)..(18): bicyclic nucleic acid (BNA)
cuguccaagcccgguuga

SEQ ID NO: 4767 - RNA, 15 nt, Artificial Sequence
  source: /note="Description of Artificial Sequence: Synthetic oligonucleotide"
  source: /note="RNA"
  modified_base (15)..(15): bicyclic nucleic acid (BNA)
uaaguucuguccaag

SEQ ID NO: 4768 - RNA, 20 nt, Artificial Sequence
  source: /note="Description of Artificial Sequence: Synthetic oligonucleotide"
  source: /note="RNA"
  modified_base (20)..(20): bicyclic nucleic acid (BNA)
uucuguccaagcccgguuga

SEQ ID NO: 4769 - RNA, 19 nt, Artificial Sequence
  source: /note="Description of Artificial Sequence: Synthetic oligonucleotide"
  source: /note="RNA"
  modified_base (19)..(19): bicyclic nucleic acid (BNA)
uucuguccaagcccgguug

SEQ ID NO: 4770 - DNA, 18 bp, Artificial Sequence
  source: /note="Description of Artificial Sequence: Synthetic oligonucleotide"
  source: /note="Description of Combined DNA/RNA Molecule: Synthetic oligonucleotide"
  source: /note="DNA/RNA"
  modified_base (18)..(18): bicyclic nucleic acid (BNA)
uucuguccaagcccggut

SEQ ID NO: 4771 - DNA, 17 bp, Artificial Sequence
  source: /note="Description of Artificial Sequence: Synthetic oligonucleotide"
  source: /note="Description of Combined DNA/RNA Molecule: Synthetic oligonucleotide"
  source: /note="DNA/RNA"
  modified_base (17)..(17): bicyclic nucleic acid (BNA)
uucuguccaagcccggt

SEQ ID NO: 4772 - RNA, 16 nt, Artificial Sequence
  source: /note="Description of Artificial Sequence: Synthetic oligonucleotide"
  source: /note="RNA"
  modified_base (16)..(16): bicyclic nucleic acid (BNA)
uucuguccaagcccgg

SEQ ID NO: 4773 - RNA, 15 nt, Artificial Sequence
  source: /note="Description of Artificial Sequence: Synthetic oligonucleotide"
  source: /note="RNA"
  modified_base (15)..(15): bicyclic nucleic acid (BNA)
uucuguccaagcccg

SEQ ID NO: 4774 - RNA, 14 nt, Artificial Sequence
  source: /note="Description of Artificial Sequence: Synthetic oligonucleotide"
  source: /note="RNA"
  modified_base (14)..(14): bicyclic nucleic acid (BNA)
uucuguccaagccc

SEQ ID NO: 4775 - RNA, 13 nt, Artificial Sequence
  source: /note="Description of Artificial Sequence: Synthetic oligonucleotide"
  source: /note="RNA"
  modified_base (13)..(13): bicyclic nucleic acid (BNA)
uucuguccaagcc

SEQ ID NO: 4776 - RNA, 12 nt, Artificial Sequence
  source: /note="Description of Artificial Sequence: Synthetic oligonucleotide"
  source: /note="RNA"
  modified_base (12)..(12): bicyclic nucleic acid (BNA)
uucuguccaagc

SEQ ID NO: 4777 - RNA, 11 nt, Artificial Sequence
  source: /note="Description of Artificial Sequence: Synthetic oligonucleotide"
  source: /note="RNA"
  modified_base (11)..(11): bicyclic nucleic acid (BNA)
uucuguccaag

SEQ ID NO: 4778 - RNA, 10 nt, Artificial Sequence
  source: /note="Description of Artificial Sequence: Synthetic oligonucleotide"
  source: /note="RNA"
  modified_base (10)..(10): bicyclic nucleic acid (BNA)
uucuguccaa

SEQ ID NO: 4779 - RNA, 9 nt, Artificial Sequence
  source: /note="Description of Artificial Sequence: Synthetic oligonucleotide"
  source: /note="RNA"
  modified_base (9)..(9): bicyclic nucleic acid (BNA)
uucugucca

SEQ ID NO: 4780 - RNA, 8 nt, Artificial Sequence
  source: /note="Description of Artificial Sequence: Synthetic oligonucleotide"
  source: /note="RNA"
  modified_base (8)..(8): bicyclic nucleic acid (BNA)
uucugucc

SEQ ID NO: 4781 - RNA, 19 nt, Artificial Sequence
  source: /note="Description of Artificial Sequence: Synthetic oligonucleotide"
  source: /note="RNA"
  modified_base (19)..(19): bicyclic nucleic acid (BNA)
ucuguccaagcccgguuga

SEQ ID NO: 4782 - RNA, 18 nt, Artificial Sequence
  source: /note="Description of Artificial Sequence: Synthetic oligonucleotide"
  source: /note="RNA"
  modified_base (18)..(18): bicyclic nucleic acid (BNA)
ucuguccaagcccgguug

SEQ ID NO: 4783 - DNA, 17 bp, Artificial Sequence
  source: /note="Description of Artificial Sequence: Synthetic oligonucleotide"
  source: /note="Description of Combined DNA/RNA Molecule: Synthetic oligonucleotide"
  source: /note="DNA/RNA"
  modified_base (17)..(17): bicyclic nucleic acid (BNA)
ucuguccaagcccggut

SEQ ID NO: 4784 - DNA, 16 bp, Artificial Sequence
  source: /note="Description of Artificial Sequence: Synthetic oligonucleotide"
  source: /note="Description of Combined DNA/RNA Molecule: Synthetic oligonucleotide"
  source: /note="DNA/RNA"
  modified_base (16)..(16): bicyclic nucleic acid (BNA)
ucuguccaagcccggt

SEQ ID NO: 4785 - RNA, 15 nt, Artificial Sequence
  source: /note="Description of Artificial Sequence: Synthetic oligonucleotide"
  source: /note="RNA"
  modified_base (15)..(15): bicyclic nucleic acid (BNA)
ucuguccaagcccgg

SEQ ID NO: 4786 - RNA, 14 nt, Artificial Sequence
  source: /note="Description of Artificial Sequence: Synthetic oligonucleotide"
  source: /note="RNA"
  modified_base (14)..(14): bicyclic nucleic acid (BNA)
ucuguccaagcccg

SEQ ID NO: 4787 - RNA, 13 nt, Artificial Sequence
  source: /note="Description of Artificial Sequence: Synthetic oligonucleotide"
  source: /note="RNA"
  modified_base (13)..(13): bicyclic nucleic acid (BNA)
ucuguccaagccc

SEQ ID NO: 4788 - RNA, 12 nt, Artificial Sequence
  source: /note="Description of Artificial Sequence: Synthetic oligonucleotide"
  source: /note="RNA"
  modified_base (12)..(12): bicyclic nucleic acid (BNA)
ucuguccaagcc

SEQ ID NO: 4789 - RNA, 11 nt, Artificial Sequence
  source: /note="Description of Artificial Sequence: Synthetic oligonucleotide"
  source: /note="RNA"
  modified_base (11)..(11): bicyclic nucleic acid (BNA)
ucuguccaagc

SEQ ID NO: 4790 - RNA, 10 nt, Artificial Sequence
  source: /note="Description of Artificial Sequence: Synthetic oligonucleotide"
  source: /note="RNA"
  modified_base (10)..(10): bicyclic nucleic acid (BNA)
ucuguccaag

SEQ ID NO: 4791 - RNA, 9 nt, Artificial Sequence
  source: /note="Description of Artificial Sequence: Synthetic oligonucleotide"
  source: /note="RNA"
  modified_base (9)..(9): bicyclic nucleic acid (BNA)
ucuguccaa

SEQ ID NO: 4792 - RNA, 8 nt, Artificial Sequence
  source: /note="Description of Artificial Sequence: Synthetic oligonucleotide"
  source: /note="RNA"
  modified_base (8)..(8): bicyclic nucleic acid (BNA)
ucugucca

SEQ ID NO: 4793 - RNA, 17 nt, Artificial Sequence
  source: /note="Description of Artificial Sequence: Synthetic oligonucleotide"
  source: /note="RNA"
  modified_base (17)..(17): bicyclic nucleic acid (BNA)
cuguccaagcccgguug

SEQ ID NO: 4794 - DNA, 16 bp, Artificial Sequence
  source: /note="Description of Artificial Sequence: Synthetic oligonucleotide"
  source: /note="Description of Combined DNA/RNA Molecule: Synthetic oligonucleotide"
  source: /note="DNA/RNA"
  modified_base (16)..(16): bicyclic nucleic acid (BNA)
cuguccaagcccggut

SEQ ID NO: 4795 - DNA, 15 bp, Artificial Sequence
  source: /note="Description of Artificial Sequence: Synthetic oligonucleotide"
  source: /note="Description of Combined DNA/RNA Molecule: Synthetic oligonucleotide"
  source: /note="DNA/RNA"
  modified_base (15)..(15): bicyclic nucleic acid (BNA)
cuguccaagcccggt

SEQ ID NO: 4796 - RNA, 14 nt, Artificial Sequence
  source: /note="Description of Artificial Sequence: Synthetic oligonucleotide"
  source: /note="RNA"
  modified_base (14)..(14): bicyclic nucleic acid (BNA)
cuguccaagcccgg

SEQ ID NO: 4797 - RNA, 13 nt, Artificial Sequence
  source: /note="Description of Artificial Sequence: Synthetic oligonucleotide"
  source: /note="RNA"
  modified_base (13)..(13): bicyclic nucleic acid (BNA)
cuguccaagcccg

SEQ ID NO: 4798 - RNA, 12 nt, Artificial Sequence
  source: /note="Description of Artificial Sequence: Synthetic oligonucleotide"
  source: /note="RNA"
  modified_base (12)..(12): bicyclic nucleic acid (BNA)
cuguccaagccc

SEQ ID NO: 4799 - RNA, 11 nt, Artificial Sequence
  source: /note="Description of Artificial Sequence: Synthetic oligonucleotide"
  source: /note="RNA"
  modified_base (11)..(11): bicyclic nucleic acid (BNA)
cuguccaagcc

SEQ ID NO: 4800 - RNA, 10 nt, Artificial Sequence
  source: /note="Description of Artificial Sequence: Synthetic oligonucleotide"
  source: /note="RNA"
  modified_base (10)..(10): bicyclic nucleic acid (BNA)
cuguccaagc

SEQ ID NO: 4801 - RNA, 9 nt, Artificial Sequence
  source: /note="Description of Artificial Sequence: Synthetic oligonucleotide"
  source: /note="RNA"
  modified_base (9)..(9): bicyclic nucleic acid (BNA)
cuguccaag

SEQ ID NO: 4802 - RNA, 8 nt, Artificial Sequence
  source: /note="Description of Artificial Sequence: Synthetic oligonucleotide"
  source: /note="RNA"
  modified_base (8)..(8): bicyclic nucleic acid (BNA)
cuguccaa

SEQ ID NO: 4803 - RNA, 20 nt, Artificial Sequence
  source: /note="Description of Artificial Sequence: Synthetic oligonucleotide"
  source: /note="RNA"
  modified_base (20)..(20): bicyclic nucleic acid (BNA)
guucuguccaagcccgguug

SEQ ID NO: 4804 - DNA, 19 bp, Artificial Sequence
  source: /note="Description of Artificial Sequence: Synthetic oligonucleotide"
  source: /note="Description of Combined DNA/RNA Molecule: Synthetic oligonucleotide"
  source: /note="DNA/RNA"
  modified_base (19)..(19): bicyclic nucleic acid (BNA)
guucuguccaagcccggut

SEQ ID NO: 4805 - DNA, 18 bp, Artificial Sequence
  source: /note="Description of Artificial Sequence: Synthetic oligonucleotide"
  source: /note="Description of Combined DNA/RNA Molecule: Synthetic oligonucleotide"
  source: /note="DNA/RNA"
  modified_base (18)..(18): bicyclic nucleic acid (BNA)
guucuguccaagcccggt

SEQ ID NO: 4806 - RNA, 17 nt, Artificial Sequence
  source: /note="Description of Artificial Sequence: Synthetic oligonucleotide"
  source: /note="RNA"
  modified_base (17)..(17): bicyclic nucleic acid (BNA)
guucuguccaagcccgg

SEQ ID NO: 4807 - RNA, 16 nt, Artificial Sequence
  source: /note="Description of Artificial Sequence: Synthetic oligonucleotide"
  source: /note="RNA"
  modified_base (16)..(16): bicyclic nucleic acid (BNA)
guucuguccaagcccg

SEQ ID NO: 4808 - RNA, 15 nt, Artificial Sequence
  source: /note="Description of Artificial Sequence: Synthetic oligonucleotide"
  source: /note="RNA"
  modified_base (15)..(15): bicyclic nucleic acid (BNA)
guucuguccaagccc

SEQ ID NO: 4809 - RNA, 14 nt, Artificial Sequence
  source: /note="Description of Artificial Sequence: Synthetic oligonucleotide"
  source: /note="RNA"
  modified_base (14)..(14): bicyclic nucleic acid (BNA)
guucuguccaagcc

SEQ ID NO: 4810 - RNA, 13 nt, Artificial Sequence
  source: /note="Description of Artificial Sequence: Synthetic oligonucleotide"
  source: /note="RNA"
  modified_base (13)..(13): bicyclic nucleic acid (BNA)
guucuguccaagc

SEQ ID NO: 4811 - RNA, 12 nt, Artificial Sequence
  source: /note="Description of Artificial Sequence: Synthetic oligonucleotide"
  source: /note="RNA"
  modified_base (12)..(12): bicyclic nucleic acid (BNA)
guucuguccaag

SEQ ID NO: 4812 - RNA, 11 nt, Artificial Sequence
  source: /note="Description of Artificial Sequence: Synthetic oligonucleotide"
  source: /note="RNA"
  modified_base (11)..(11): bicyclic nucleic acid (BNA)
guucuguccaa

SEQ ID NO: 4813 - RNA, 10 nt, Artificial Sequence
  source: /note="Description of Artificial Sequence: Synthetic oligonucleotide"
  source: /note="RNA"
  modified_base (10)..(10): bicyclic nucleic acid (BNA)
guucugucca

SEQ ID NO: 4814 - RNA, 9 nt, Artificial Sequence
  source: /note="Description of Artificial Sequence: Synthetic oligonucleotide"
  source: /note="RNA"
  modified_base (9)..(9): bicyclic nucleic acid (BNA)
guucugucc

SEQ ID NO: 4815 - RNA, 8 nt, Artificial Sequence
  source: /note="Description of Artificial Sequence: Synthetic oligonucleotide"
  source: /note="RNA"
  modified_base (8)..(8): bicyclic nucleic acid (BNA)
guucuguc

SEQ ID NO: 4816 - DNA, 20 bp, Artificial Sequence
  source: /note="Description of Artificial Sequence: Synthetic oligonucleotide"
  source: /note="Description of Combined DNA/RNA Molecule: Synthetic oligonucleotide"
  source: /note="DNA/RNA"
  modified_base (20)..(20): bicyclic nucleic acid (BNA)
aguucuguccaagcccggut

SEQ ID NO: 4817 - DNA, 19 bp, Artificial Sequence
  source: /note="Description of Artificial Sequence: Synthetic oligonucleotide"
  source: /note="Description of Combined DNA/RNA Molecule: Synthetic oligonucleotide"
  source: /note="DNA/RNA"
  modified_base (19)..(19): bicyclic nucleic acid (BNA)
aguucuguccaagcccggt

SEQ ID NO: 4818 - RNA, 18 nt, Artificial Sequence
  source: /note="Description of Artificial Sequence: Synthetic oligonucleotide"
  source: /note="RNA"
  modified_base (18)..(18): bicyclic nucleic acid (BNA)
aguucuguccaagcccgg

SEQ ID NO: 4819 - RNA, 17 nt, Artificial Sequence
  source: /note="Description of Artificial Sequence: Synthetic oligonucleotide"
  source: /note="RNA"
  modified_base (17)..(17): bicyclic nucleic acid (BNA)
aguucuguccaagcccg

SEQ ID NO: 4820 - RNA, 16 nt, Artificial Sequence
  source: /note="Description of Artificial Sequence: Synthetic oligonucleotide"
  source: /note="RNA"
  modified_base (16)..(16): bicyclic nucleic acid (BNA)
aguucuguccaagccc

SEQ ID NO: 4821 - RNA, 15 nt, Artificial Sequence
  source: /note="Description of Artificial Sequence: Synthetic oligonucleotide"
  source: /note="RNA"
  modified_base (15)..(15): bicyclic nucleic acid (BNA)
aguucuguccaagcc

SEQ ID NO: 4822 - RNA, 14 nt, Artificial Sequence
  source: /note="Description of Artificial Sequence: Synthetic oligonucleotide"
  source: /note="RNA"
  modified_base (14)..(14): bicyclic nucleic acid (BNA)
aguucuguccaagc

SEQ ID NO: 4823 - RNA, 13 nt, Artificial Sequence
  source: /note="Description of Artificial Sequence: Synthetic oligonucleotide"
  source: /note="RNA"
  modified_base (13)..(13): bicyclic nucleic acid (BNA)
aguucuguccaag

SEQ ID NO: 4824 - RNA, 12 nt, Artificial Sequence
  source: /note="Description of Artificial Sequence: Synthetic oligonucleotide"
  source: /note="RNA"
  modified_base (12)..(12): bicyclic nucleic acid (BNA)
aguucuguccaa

SEQ ID NO: 4825 - RNA, 11 nt, Artificial Sequence
  source: /note="Description of Artificial Sequence: Synthetic oligonucleotide"
  source: /note="RNA"
  modified_base (11)..(11): bicyclic nucleic acid (BNA)
aguucugucca

SEQ ID NO: 4826 - RNA, 10 nt, Artificial Sequence
  source: /note="Description of Artificial Sequence: Synthetic oligonucleotide"
  source: /note="RNA"
  modified_base (10)..(10): bicyclic nucleic acid (BNA)
aguucugucc

SEQ ID NO: 4827 - RNA, 9 nt, Artificial Sequence
  source: /note="Description of Artificial Sequence: Synthetic oligonucleotide"
  source: /note="RNA"
  modified_base (9)..(9): bicyclic nucleic acid (BNA)
aguucuguc

SEQ ID NO: 4828 - DNA, 8 bp, Artificial Sequence
  source: /note="Description of Artificial Sequence: Synthetic oligonucleotide"
  source: /note="Description of Combined DNA/RNA Molecule: Synthetic oligonucleotide"
  source: /note="DNA/RNA"
  modified_base (8)..(8): bicyclic nucleic acid (BNA)
aguucugt

SEQ ID NO: 4829 - DNA, 20 bp, Artificial Sequence
  source: /note="Description of Artificial Sequence: Synthetic oligonucleotide"
  source: /note="Description of Combined DNA/RNA Molecule: Synthetic oligonucleotide"
  source: /note="DNA/RNA"
  modified_base (20)..(20): bicyclic nucleic acid (BNA)
aaguucuguccaagcccggt

SEQ ID NO: 4830 - RNA, 19 nt, Artificial Sequence
  source: /note="Description of Artificial Sequence: Synthetic oligonucleotide"
  source: /note="RNA"
  modified_base (19)..(19): bicyclic nucleic acid (BNA)
aaguucuguccaagcccgg

SEQ ID NO: 4831 - RNA, 18 nt, Artificial Sequence
  source: /note="Description of Artificial Sequence: Synthetic oligonucleotide"
  source: /note="RNA"
  modified_base (18)..(18): bicyclic nucleic acid (BNA)
aaguucuguccaagcccg

SEQ ID NO: 4832 - RNA, 17 nt, Artificial Sequence
  source: /note="Description of Artificial Sequence: Synthetic oligonucleotide"
  source: /note="RNA"
  modified_base (17)..(17): bicyclic nucleic acid (BNA)
aaguucuguccaagccc

SEQ ID NO: 4833 - RNA, 16 nt, Artificial Sequence
  source: /note="Description of Artificial Sequence: Synthetic oligonucleotide"
  source: /note="RNA"
  modified_base (16)..(16): bicyclic nucleic acid (BNA)
aaguucuguccaagcc

SEQ ID NO: 4834 - RNA, 15 nt, Artificial Sequence
  source: /note="Description of Artificial Sequence: Synthetic oligonucleotide"
  source: /note="RNA"
  modified_base (15)..(15): bicyclic nucleic acid (BNA)
aaguucuguccaagc

SEQ ID NO: 4835 - RNA, 14 nt, Artificial Sequence
  source: /note="Description of Artificial Sequence: Synthetic oligonucleotide"
  source: /note="RNA"
  modified_base (14)..(14): bicyclic nucleic acid (BNA)
aaguucuguccaag

SEQ ID NO: 4836 - RNA, 13 nt, Artificial Sequence
  source: /note="Description of Artificial Sequence: Synthetic oligonucleotide"
  source: /note="RNA"
  modified_base (13)..(13): bicyclic nucleic acid (BNA)
aaguucuguccaa

SEQ ID NO: 4837 - RNA, 12 nt, Artificial Sequence
  source: /note="Description of Artificial Sequence: Synthetic oligonucleotide"
  source: /note="RNA"
  modified_base (12)..(12): bicyclic nucleic acid (BNA)
aaguucugucca

SEQ ID NO: 4838 - RNA, 11 nt, Artificial Sequence
  source: /note="Description of Artificial Sequence: Synthetic oligonucleotide"
  source: /note="RNA"
  modified_base (11)..(11): bicyclic nucleic acid (BNA)
aaguucugucc

SEQ ID NO: 4839 - RNA, 10 nt, Artificial Sequence
  source: /note="Description of Artificial Sequence: Synthetic oligonucleotide"
  source: /note="RNA"
  modified_base (10)..(10): bicyclic nucleic acid (BNA)
aaguucuguc

SEQ ID NO: 4840 - DNA, 9 bp, Artificial Sequence
  source: /note="Description of Artificial Sequence: Synthetic oligonucleotide"
  source: /note="Description of Combined DNA/RNA Molecule: Synthetic oligonucleotide"
  source: /note="DNA/RNA"
  modified_base (9)..(9): bicyclic nucleic acid (BNA)
aaguucugt

SEQ ID NO: 4841 - RNA, 8 nt, Artificial Sequence
  source: /note="Description of Artificial Sequence: Synthetic oligonucleotide"
  source: /note="RNA"
  modified_base (8)..(8): bicyclic nucleic acid (BNA)
aaguucug

SEQ ID NO: 4842 - RNA, 20 nt, Artificial Sequence
  source: /note="Description of Artificial Sequence: Synthetic oligonucleotide"
  source: /note="RNA"
  modified_base (20)..(20): bicyclic nucleic acid (BNA)
uaaguucuguccaagcccgg

SEQ ID NO: 4843 - RNA, 19 nt, Artificial Sequence
  source: /note="Description of Artificial Sequence: Synthetic oligonucleotide"
  source: /note="RNA"
  modified_base (19)..(19): bicyclic nucleic acid (BNA)
uaaguucuguccaagcccg

SEQ ID NO: 4844 - RNA, 18 nt, Artificial Sequence
  source: /note="Description of Artificial Sequence: Synthetic oligonucleotide"
  source: /note="RNA"
  modified_base (18)..(18): bicyclic nucleic acid (BNA)
uaaguucuguccaagccc

SEQ ID NO: 4845 - RNA, 17 nt, Artificial Sequence
  source: /note="Description of Artificial Sequence: Synthetic oligonucleotide"
  source: /note="RNA"
  modified_base (17)..(17): bicyclic nucleic acid (BNA)
uaaguucuguccaagcc

SEQ ID NO: 4846 - RNA, 16 nt, Artificial Sequence
  source: /note="Description of Artificial Sequence: Synthetic oligonucleotide"
  source: /note="RNA"
  modified_base (16)..(16): bicyclic nucleic acid (BNA)
uaaguucuguccaagc

SEQ ID NO: 4847 - RNA, 14 nt, Artificial Sequence
  source: /note="Description of Artificial Sequence: Synthetic oligonucleotide"
  source: /note="RNA"
  modified_base (14)..(14): bicyclic nucleic acid (BNA)
uaaguucuguccaa

SEQ ID NO: 4848 - RNA, 13 nt, Artificial Sequence
  source: /note="Description of Artificial Sequence: Synthetic oligonucleotide"
  source: /note="RNA"
  modified_base (13)..(13): bicyclic nucleic acid (BNA)
uaaguucugucca

SEQ ID NO: 4849 - RNA, 12 nt, Artificial Sequence
  source: /note="Description of Artificial Sequence: Synthetic oligonucleotide"
  source: /note="RNA"
  modified_base (12)..(12): bicyclic nucleic acid (BNA)
uaaguucugucc

SEQ ID NO: 4850 - RNA, 11 nt, Artificial Sequence
  source: /note="Description of Artificial Sequence: Synthetic oligonucleotide"
  source: /note="RNA"
  modified_base (11)..(11): bicyclic nucleic acid (BNA)
uaaguucuguc

SEQ ID NO: 4851 - DNA, 10 bp, Artificial Sequence
  source: /note="Description of Artificial Sequence: Synthetic oligonucleotide"
  source: /note="Description of Combined DNA/RNA Molecule: Synthetic oligonucleotide"
  source: /note="DNA/RNA"
  modified_base (10)..(10): bicyclic nucleic acid (BNA)
uaaguucugt

SEQ ID NO: 4852 - RNA, 9 nt, Artificial Sequence
  source: /note="Description of Artificial Sequence: Synthetic oligonucleotide"
  source: /note="RNA"
  modified_base (9)..(9): bicyclic nucleic acid (BNA)
uaaguucug

SEQ ID NO: 4853 - DNA, 8 bp, Artificial Sequence
  source: /note="Description of Artificial Sequence: Synthetic oligonucleotide"
  source: /note="Description of Combined DNA/RNA Molecule: Synthetic oligonucleotide"
  source: /note="DNA/RNA"
  modified_base (8)..(8): bicyclic nucleic acid (BNA)
uaaguuct

SEQ ID NO: 4854 - RNA, 20 nt, Artificial Sequence
  source: /note="Description of Artificial Sequence: Synthetic oligonucleotide"
  source: /note="RNA"
  modified_base (20)..(20): bicyclic nucleic acid (BNA)
guaaguucuguccaagcccg

SEQ ID NO: 4855 - RNA, 19 nt, Artificial Sequence
  source: /note="Description of Artificial Sequence: Synthetic oligonucleotide"
  source: /note="RNA"
  modified_base (19)..(19): bicyclic nucleic acid (BNA)
guaaguucuguccaagccc

SEQ ID NO: 4856 - RNA, 17 nt, Artificial Sequence
  source: /note="Description of Artificial Sequence: Synthetic oligonucleotide"
  source: /note="RNA"
  modified_base (17)..(17): bicyclic nucleic acid (BNA)
guaaguucuguccaagc

SEQ ID NO: 4857 - RNA, 16 nt, Artificial Sequence
  source: /note="Description of Artificial Sequence: Synthetic oligonucleotide"
  source: /note="RNA"
  modified_base (16)..(16): bicyclic nucleic acid (BNA)
guaaguucuguccaag

SEQ ID NO: 4858 - RNA, 15 nt, Artificial Sequence
  source: /note="Description of Artificial Sequence: Synthetic oligonucleotide"
  source: /note="RNA"
  modified_base (15)..(15): bicyclic nucleic acid (BNA)
guaaguucuguccaa

SEQ ID NO: 4859 - RNA, 14 nt, Artificial Sequence
  source: /note="Description of Artificial Sequence: Synthetic oligonucleotide"
  source: /note="RNA"
  modified_base (14)..(14): bicyclic nucleic acid (BNA)
guaaguucugucca

SEQ ID NO: 4860 - RNA, 13 nt, Artificial Sequence
  source: /note="Description of Artificial Sequence: Synthetic oligonucleotide"
  source: /note="RNA"
  modified_base (13)..(13): bicyclic nucleic acid (BNA)
guaaguucugucc

SEQ ID NO: 4861 - RNA, 12 nt, Artificial Sequence
  source: /note="Description of Artificial Sequence: Synthetic oligonucleotide"
  source: /note="RNA"
  modified_base (12)..(12): bicyclic nucleic acid (BNA)
guaaguucuguc

SEQ ID NO: 4862 - DNA, 11 bp, Artificial Sequence
  source: /note="Description of Artificial Sequence: Synthetic oligonucleotide"
  source: /note="Description of Combined DNA/RNA Molecule: Synthetic oligonucleotide"
  source: /note="DNA/RNA"
  modified_base (11)..(11): bicyclic nucleic acid (BNA)
guaaguucugt

SEQ ID NO: 4863 - RNA, 10 nt, Artificial Sequence
  source: /note="Description of Artificial Sequence: Synthetic oligonucleotide"
  source: /note="RNA"
  modified_base (10)..(10): bicyclic nucleic acid (BNA)
guaaguucug

SEQ ID NO: 4864 - DNA, 9 bp, Artificial Sequence
  source: /note="Description of Artificial Sequence: Synthetic oligonucleotide"
  source: /note="Description of Combined DNA/RNA Molecule: Synthetic oligonucleotide"
  source: /note="DNA/RNA"
  modified_base (9)..(9): bicyclic nucleic acid (BNA)
guaaguuct

SEQ ID NO: 4865 - RNA, 8 nt, Artificial Sequence
  source: /note="Description of Artificial Sequence: Synthetic oligonucleotide"
  source: /note="RNA"
  modified_base (8)..(8): bicyclic nucleic acid (BNA)
guaaguuc

SEQ ID NO: 4866 - RNA, 20 nt, Artificial Sequence
  source: /note="Description of Artificial Sequence: Synthetic oligonucleotide"
  source: /note="RNA"
  modified_base (20)..(20): bicyclic nucleic acid (BNA)
gguaaguucuguccaagccc

SEQ ID NO: 4867 - RNA, 19 nt, Artificial Sequence
  source: /note="Description of Artificial Sequence: Synthetic oligonucleotide"
  source: /note="RNA"
  modified_base (19)..(19): bicyclic nucleic acid (BNA)
gguaaguucuguccaagcc

SEQ ID NO: 4868 - RNA, 17 nt, Artificial Sequence
  source: /note="Description of Artificial Sequence: Synthetic oligonucleotide"
  source: /note="RNA"
  modified_base (17)..(17): bicyclic nucleic acid (BNA)
gguaaguucuguccaag

SEQ ID NO: 4869 - RNA, 16 nt, Artificial Sequence
  source: /note="Description of Artificial Sequence: Synthetic oligonucleotide"
  source: /note="RNA"
  modified_base (16)..(16): bicyclic nucleic acid (BNA)
gguaaguucuguccaa

SEQ ID NO: 4870 - RNA, 15 nt, Artificial Sequence
  source: /note="Description of Artificial Sequence: Synthetic oligonucleotide"
  source: /note="RNA"
  modified_base (15)..(15): bicyclic nucleic acid (BNA)
gguaaguucugucca

SEQ ID NO: 4871 - RNA, 14 nt, Artificial Sequence
  source: /note="Description of Artificial Sequence: Synthetic oligonucleotide"
  source: /note="RNA"
  modified_base (14)..(14): bicyclic nucleic acid (BNA)
gguaaguucugucc

SEQ ID NO: 4872 - RNA, 13 nt, Artificial Sequence
  source: /note="Description of Artificial Sequence: Synthetic oligonucleotide"
  source: /note="RNA"
  modified_base (13)..(13): bicyclic nucleic acid (BNA)
gguaaguucuguc

SEQ ID NO: 4873 - DNA, 12 bp, Artificial Sequence
  source: /note="Description of Artificial Sequence: Synthetic oligonucleotide"
  source: /note="Description of Combined DNA/RNA Molecule: Synthetic oligonucleotide"
  source: /note="DNA/RNA"
  modified_base (12)..(12): bicyclic nucleic acid (BNA)
gguaaguucugt

SEQ ID NO: 4874 - RNA, 11 nt, Artificial Sequence
  source: /note="Description of Artificial Sequence: Synthetic oligonucleotide"
  source: /note="RNA"
  modified_base (11)..(11): bicyclic nucleic acid (BNA)
gguaaguucug

SEQ ID NO: 4875 - DNA, 10 bp, Artificial Sequence
  source: /note="Description of Artificial Sequence: Synthetic oligonucleotide"
  source: /note="Description of Combined DNA/RNA Molecule: Synthetic oligonucleotide"
  source: /note="DNA/RNA"
  modified_base (10)..(10): bicyclic nucleic acid (BNA)
gguaaguuct

SEQ ID NO: 4876 - RNA, 9 nt, Artificial Sequence
  source: /note="Description of Artificial Sequence: Synthetic oligonucleotide"
  source: /note="RNA"
  modified_base (9)..(9): bicyclic nucleic acid (BNA)
gguaaguuc

SEQ ID NO: 4877 - DNA, 8 bp, Artificial Sequence
  source: /note="Description of Artificial Sequence: Synthetic oligonucleotide"
  source: /note="Description of Combined DNA/RNA Molecule: Synthetic oligonucleotide"
  source: /note="DNA/RNA"
  modified_base (8)..(8): bicyclic nucleic acid (BNA)
gguaagut

SEQ ID NO: 4878 - RNA, 20 nt, Artificial Sequence
  source: /note="Description of Artificial Sequence: Synthetic oligonucleotide"
  source: /note="RNA"
  modified_base (20)..(20): bicyclic nucleic acid (BNA)
cgguaaguucuguccaagcc

SEQ ID NO: 4879 - RNA, 19 nt, Artificial Sequence
  source: /note="Description of Artificial Sequence: Synthetic oligonucleotide"
  source: /note="RNA"
  modified_base (19)..(19): bicyclic nucleic acid (BNA)
cgguaaguucuguccaagc

SEQ ID NO: 4880 - RNA, 18 nt, Artificial Sequence
  source: /note="Description of Artificial Sequence: Synthetic oligonucleotide"
  source: /note="RNA"
  modified_base (18)..(18): bicyclic nucleic acid (BNA)
cgguaaguucuguccaag

SEQ ID NO: 4881 - RNA, 17 nt, Artificial Sequence
  source: /note="Description of Artificial Sequence: Synthetic oligonucleotide"
  source: /note="RNA"
  modified_base (17)..(17): bicyclic nucleic acid (BNA)
cgguaaguucuguccaa

SEQ ID NO: 4882 - RNA, 16 nt, Artificial Sequence
  source: /note="Description of Artificial Sequence: Synthetic oligonucleotide"
  source: /note="RNA"
  modified_base (16)..(16): bicyclic nucleic acid (BNA)
cgguaaguucugucca

SEQ ID NO: 4883 - RNA, 15 nt, Artificial Sequence
  source: /note="Description of Artificial Sequence: Synthetic oligonucleotide"
  source: /note="RNA"
  modified_base (15)..(15): bicyclic nucleic acid (BNA)
cgguaaguucugucc

SEQ ID NO: 4884 - RNA, 14 nt, Artificial Sequence
  source: /note="Description of Artificial Sequence: Synthetic oligonucleotide"
  source: /note="RNA"
  modified_base (14)..(14): bicyclic nucleic acid (BNA)
cgguaaguucuguc

SEQ ID NO: 4885 - DNA, 13 bp, Artificial Sequence
  source: /note="Description of Artificial Sequence: Synthetic oligonucleotide"
  source: /note="Description of Combined DNA/RNA Molecule: Synthetic oligonucleotide"
  source: /note="DNA/RNA"
  modified_base (13)..(13): bicyclic nucleic acid (BNA)
cgguaaguucugt

SEQ ID NO: 4886 - RNA, 12 nt, Artificial Sequence
  source: /note="Description of Artificial Sequence: Synthetic oligonucleotide"
  source: /note="RNA"
  modified_base (12)..(12): bicyclic nucleic acid (BNA)
cgguaaguucug

SEQ ID NO: 4887 - DNA, 11 bp, Artificial Sequence
  source: /note="Description of Artificial Sequence: Synthetic oligonucleotide"
  source: /note="Description of Combined DNA/RNA Molecule: Synthetic oligonucleotide"
  source: /note="DNA/RNA"
  modified_base (11)..(11): bicyclic nucleic acid (BNA)
cgguaaguuct

SEQ ID NO: 4888 - RNA, 10 nt, Artificial Sequence
  source: /note="Description of Artificial Sequence: Synthetic oligonucleotide"
  source: /note="RNA"
  modified_base (10)..(10): bicyclic nucleic acid (BNA)
cgguaaguuc

SEQ ID NO: 4889 - DNA, 9 bp, Artificial Sequence
  source: /note="Description of Artificial Sequence: Synthetic oligonucleotide"
  source: /note="Description of Combined DNA/RNA Molecule: Synthetic oligonucleotide"
  source: /note="DNA/RNA"
  modified_base (9)..(9): bicyclic nucleic acid (BNA)
cgguaagut

SEQ ID NO: 4890 - DNA, 8 bp, Artificial Sequence
  source: /note="Description of Artificial Sequence: Synthetic oligonucleotide"
  source: /note="Description of Combined DNA/RNA Molecule: Synthetic oligonucleotide"
  source: /note="DNA/RNA"
  modified_base (8)..(8): bicyclic nucleic acid (BNA)
cgguaagt

SEQ ID NO: 4891 - RNA, 20 nt, Artificial Sequence
  source: /note="Description of Artificial Sequence: Synthetic oligonucleotide"
  source: /note="RNA"
  modified_base (20)..(20): bicyclic nucleic acid (BNA)
ucgguaaguucuguccaagc

SEQ ID NO: 4892 - RNA, 19 nt, Artificial Sequence
  source: /note="Description of Artificial Sequence: Synthetic oligonucleotide"
  source: /note="RNA"
  modified_base (19)..(19): bicyclic nucleic acid (BNA)
ucgguaaguucuguccaag

SEQ ID NO: 4893 - RNA, 18 nt, Artificial Sequence
  source: /note="Description of Artificial Sequence: Synthetic oligonucleotide"
  source: /note="RNA"
  modified_base (18)..(18): bicyclic nucleic acid (BNA)
ucgguaaguucuguccaa

SEQ ID NO: 4894 - RNA, 17 nt, Artificial Sequence
  source: /note="Description of Artificial Sequence: Synthetic oligonucleotide"
  source: /note="RNA"
  modified_base (17)..(17): bicyclic nucleic acid (BNA)
ucgguaaguucugucca

SEQ ID NO: 4895 - RNA, 16 nt, Artificial Sequence
  source: /note="Description of Artificial Sequence: Synthetic oligonucleotide"
  source: /note="RNA"
  modified_base (16)..(16): bicyclic nucleic acid (BNA)
ucgguaaguucugucc

SEQ ID NO: 4896 - RNA, 15 nt, Artificial Sequence
  source: /note="Description of Artificial Sequence: Synthetic oligonucleotide"
  source: /note="RNA"
  modified_base (15)..(15): bicyclic nucleic acid (BNA)
ucgguaaguucuguc

SEQ ID NO: 4897 - DNA, 14 bp, Artificial Sequence
  source: /note="Description of Artificial Sequence: Synthetic oligonucleotide"
  source: /note="Description of Combined DNA/RNA Molecule: Synthetic oligonucleotide"
  source: /note="DNA/RNA"
  modified_base (14)..(14): bicyclic nucleic acid (BNA)
ucgguaaguucugt

SEQ ID NO: 4898 - RNA, 13 nt, Artificial Sequence
  source: /note="Description of Artificial Sequence: Synthetic oligonucleotide"
  source: /note="RNA"
  modified_base (13)..(13): bicyclic nucleic acid (BNA)
ucgguaaguucug

SEQ ID NO: 4899 - DNA, 12 bp, Artificial Sequence
  source: /note="Description of Artificial Sequence: Synthetic oligonucleotide"
  source: /note="Description of Combined DNA/RNA Molecule: Synthetic oligonucleotide"
  source: /note="DNA/RNA"
  modified_base (12)..(12): bicyclic nucleic acid (BNA)
ucgguaaguuct

SEQ ID NO: 4900 - RNA, 11 nt, Artificial Sequence
  source: /note="Description of Artificial Sequence: Synthetic oligonucleotide"
  source: /note="RNA"
  modified_base (11)..(11): bicyclic nucleic acid (BNA)
ucgguaaguuc

SEQ ID NO: 4901 - DNA, 10 bp, Artificial Sequence
  source: /note="Description of Artificial Sequence: Synthetic oligonucleotide"
  source: /note="Description of Combined DNA/RNA Molecule: Synthetic oligonucleotide"
  source: /note="DNA/RNA"
  modified_base (10)..(10): bicyclic nucleic acid (BNA)
ucgguaagut

SEQ ID NO: 4902 - DNA, 9 bp, Artificial Sequence
  source: /note="Description of Artificial Sequence: Synthetic oligonucleotide"
  source: /note="Description of Combined DNA/RNA Molecule: Synthetic oligonucleotide"
  source: /note="DNA/RNA"
  modified_base (9)..(9): bicyclic nucleic acid (BNA)
ucgguaagt

SEQ ID NO: 4903 - RNA, 20 nt, Artificial Sequence
  source: /note="Description of Artificial Sequence: Synthetic oligonucleotide"
  source: /note="RNA"
  modified_base (20)..(20): bicyclic nucleic acid (BNA)
gucgguaaguucuguccaag

SEQ ID NO: 4904 - RNA, 19 nt, Artificial Sequence
  source: /note="Description of Artificial Sequence: Synthetic oligonucleotide"
  source: /note="RNA"
  modified_base (19)..(19): bicyclic nucleic acid (BNA)
gucgguaaguucuguccaa

SEQ ID NO: 4905 - RNA, 18 nt, Artificial Sequence
  source: /note="Description of Artificial Sequence: Synthetic oligonucleotide"
  source: /note="RNA"
  modified_base (18)..(18): bicyclic nucleic acid (BNA)
gucgguaaguucugucca

SEQ ID NO: 4906 - RNA, 17 nt, Artificial Sequence
  source: /note="Description of Artificial Sequence: Synthetic oligonucleotide"
  source: /note="RNA"
  modified_base (17)..(17): bicyclic nucleic acid (BNA)
gucgguaaguucugucc

SEQ ID NO: 4907 - RNA, 16 nt, Artificial Sequence
  source: /note="Description of Artificial Sequence: Synthetic oligonucleotide"
  source: /note="RNA"
  modified_base (16)..(16): bicyclic nucleic acid (BNA)
gucgguaaguucuguc

SEQ ID NO: 4908 - DNA, 15 bp, Artificial Sequence
  source: /note="Description of Artificial Sequence: Synthetic oligonucleotide"
  source: /note="Description of Combined DNA/RNA Molecule: Synthetic oligonucleotide"
  source: /note="DNA/RNA"
  modified_base (15)..(15): bicyclic nucleic acid (BNA)
gucgguaaguucugt

SEQ ID NO: 4909 - RNA, 14 nt, Artificial Sequence
  source: /note="Description of Artificial Sequence: Synthetic oligonucleotide"
  source: /note="RNA"
  modified_base (14)..(14): bicyclic nucleic acid (BNA)
gucgguaaguucug

SEQ ID NO: 4910 - DNA, 13 bp, Artificial Sequence
  source: /note="Description of Artificial Sequence: Synthetic oligonucleotide"
  source: /note="Description of Combined DNA/RNA Molecule: Synthetic oligonucleotide"
  source: /note="DNA/RNA"
  modified_base (13)..(13): bicyclic nucleic acid (BNA)
gucgguaaguuct

SEQ ID NO: 4911 - RNA, 12 nt, Artificial Sequence
  source: /note="Description of Artificial Sequence: Synthetic oligonucleotide"
  source: /note="RNA"
  modified_base (12)..(12): bicyclic nucleic acid (BNA)
gucgguaaguuc

SEQ ID NO: 4912 - DNA, 11 bp, Artificial Sequence
  source: /note="Description of Artificial Sequence: Synthetic oligonucleotide"
  source: /note="Description of Combined DNA/RNA Molecule: Synthetic oligonucleotide"
  source: /note="DNA/RNA"
  modified_base (11)..(11): bicyclic nucleic acid (BNA)
gucgguaagut

SEQ ID NO: 4913 - DNA, 10 bp, Artificial Sequence
  source: /note="Description of Artificial Sequence: Synthetic oligonucleotide"
  source: /note="Description of Combined DNA/RNA Molecule: Synthetic oligonucleotide"
  source: /note="DNA/RNA"
  modified_base (10)..(10): bicyclic nucleic acid (BNA)
gucgguaagt

SEQ ID NO: 4914 - RNA, 20 nt, Artificial Sequence
  source: /note="Description of Artificial Sequence: Synthetic oligonucleotide"
  source: /note="RNA"
  modified_base (20)..(20): bicyclic nucleic acid (BNA)
agucgguaaguucuguccaa

SEQ ID NO: 4915 - RNA, 19 nt, Artificial Sequence
  source: /note="Description of Artificial Sequence: Synthetic oligonucleotide"
  source: /note="RNA"
  modified_base (19)..(19): bicyclic nucleic acid (BNA)
agucgguaaguucugucca

SEQ ID NO: 4916 - RNA, 17 nt, Artificial Sequence
  source: /note="Description of Artificial Sequence: Synthetic oligonucleotide"
  source: /note="RNA"
  modified_base (17)..(17): bicyclic nucleic acid (BNA)
agucgguaaguucuguc

SEQ ID NO: 4917 - DNA, 16 bp, Artificial Sequence
  source: /note="Description of Artificial Sequence: Synthetic oligonucleotide"
  source: /note="Description of Combined DNA/RNA Molecule: Synthetic oligonucleotide"
  source: /note="DNA/RNA"
  modified_base (16)..(16): bicyclic nucleic acid (BNA)
agucgguaaguucugt

SEQ ID NO: 4918 - RNA, 15 nt, Artificial Sequence
  source: /note="Description of Artificial Sequence: Synthetic oligonucleotide"
  source: /note="RNA"
  modified_base (15)..(15): bicyclic nucleic acid (BNA)
agucgguaaguucug

SEQ ID NO: 4919 - DNA, 14 bp, Artificial Sequence
  source: /note="Description of Artificial Sequence: Synthetic oligonucleotide"
  source: /note="Description of Combined DNA/RNA Molecule: Synthetic oligonucleotide"
  source: /note="DNA/RNA"
  modified_base (14)..(14): bicyclic nucleic acid (BNA)
agucgguaaguuct

SEQ ID NO: 4920 - RNA, 13 nt, Artificial Sequence
  source: /note="Description of Artificial Sequence: Synthetic oligonucleotide"
  source: /note="RNA"
  modified_base (13)..(13): bicyclic nucleic acid (BNA)
agucgguaaguuc

SEQ ID NO: 4921 - DNA, 12 bp, Artificial Sequence
  source: /note="Description of Artificial Sequence: Synthetic oligonucleotide"
  source: /note="Description of Combined DNA/RNA Molecule: Synthetic oligonucleotide"
  source: /note="DNA/RNA"
  modified_base (12)..(12): bicyclic nucleic acid (BNA)
agucgguaagut

SEQ ID NO: 4922 - DNA, 11 bp, Artificial Sequence
  source: /note="Description of Artificial Sequence: Synthetic oligonucleotide"
  source: /note="Description of Combined DNA/RNA Molecule: Synthetic oligonucleotide"
  source: /note="DNA/RNA"
  modified_base (11)..(11): bicyclic nucleic acid (BNA)
agucgguaagt

SEQ ID NO: 4923 - RNA, 20 nt, Artificial Sequence
  source: /note="Description of Artificial Sequence: Synthetic oligonucleotide"
  source: /note="RNA"
  modified_base (20)..(20): bicyclic nucleic acid (BNA)
cagucgguaaguucugucca

SEQ ID NO: 4924 - RNA, 19 nt, Artificial Sequence
  source: /note="Description of Artificial Sequence: Synthetic oligonucleotide"
  source: /note="RNA"
  modified_base (19)..(19): bicyclic nucleic acid (BNA)
cagucgguaaguucugucc

SEQ ID NO: 4925 - RNA, 18 nt, Artificial Sequence
  source: /note="Description of Artificial Sequence: Synthetic oligonucleotide"
  source: /note="RNA"
  modified_base (18)..(18): bicyclic nucleic acid (BNA)
cagucgguaaguucuguc

SEQ ID NO: 4926 - DNA, 17 bp, Artificial Sequence
  source: /note="Description of Artificial Sequence: Synthetic oligonucleotide"
  source: /note="Description of Combined DNA/RNA Molecule: Synthetic oligonucleotide"
  source: /note="DNA/RNA"
  modified_base (17)..(17): bicyclic nucleic acid (BNA)
cagucgguaaguucugt

SEQ ID NO: 4927 - RNA, 16 nt, Artificial Sequence
  source: /note="Description of Artificial Sequence: Synthetic oligonucleotide"
  source: /note="RNA"
  modified_base (16)..(16): bicyclic nucleic acid (BNA)
cagucgguaaguucug

SEQ ID NO: 4928 - DNA, 15 bp, Artificial Sequence
  source: /note="Description of Artificial Sequence: Synthetic oligonucleotide"
  source: /note="Description of Combined DNA/RNA Molecule: Synthetic oligonucleotide"
  source: /note="DNA/RNA"
  modified_base (15)..(15): bicyclic nucleic acid (BNA)
cagucgguaaguuct

SEQ ID NO: 4929 - RNA, 14 nt, Artificial Sequence
  source: /note="Description of Artificial Sequence: Synthetic oligonucleotide"
  source: /note="RNA"
  modified_base (14)..(14): bicyclic nucleic acid (BNA)
cagucgguaaguuc

SEQ ID NO: 4930 - DNA, 13 bp, Artificial Sequence
  source: /note="Description of Artificial Sequence: Synthetic oligonucleotide"
  source: /note="Description of Combined DNA/RNA Molecule: Synthetic oligonucleotide"
  source: /note="DNA/RNA"
  modified_base (13)..(13): bicyclic nucleic acid (BNA)
cagucgguaagut

SEQ ID NO: 4931 - DNA, 12 bp, Artificial Sequence
  source: /note="Description of Artificial Sequence: Synthetic oligonucleotide"
  source: /note="Description of Combined DNA/RNA Molecule: Synthetic oligonucleotide"
  source: /note="DNA/RNA"
  modified_base (12)..(12): bicyclic nucleic acid (BNA)
cagucgguaagt

SEQ ID NO: 4932 - RNA, 20 nt, Artificial Sequence
  source: /note="Description of Artificial Sequence: Synthetic oligonucleotide"
  source: /note="RNA"
  modified_base (20)..(20): bicyclic nucleic acid (BNA)
ccagucgguaaguucugucc

SEQ ID NO: 4933 - RNA, 19 nt, Artificial Sequence
  source: /note="Description of Artificial Sequence: Synthetic oligonucleotide"
  source: /note="RNA"
  modified_base (19)..(19): bicyclic nucleic acid (BNA)
ccagucgguaaguucuguc

SEQ ID NO: 4934 - DNA, 18 bp, Artificial Sequence
  source: /note="Description of Artificial Sequence: Synthetic oligonucleotide"
  source: /note="Description of Combined DNA/RNA Molecule: Synthetic oligonucleotide"
  source: /note="DNA/RNA"
  modified_base (18)..(18): bicyclic nucleic acid (BNA)
ccagucgguaaguucugt

SEQ ID NO: 4935 - RNA, 17 nt, Artificial Sequence
  source: /note="Description of Artificial Sequence: Synthetic oligonucleotide"
  source: /note="RNA"
  modified_base (17)..(17): bicyclic nucleic acid (BNA)
ccagucgguaaguucug

SEQ ID NO: 4936 - DNA, 16 bp, Artificial Sequence
  source: /note="Description of Artificial Sequence: Synthetic oligonucleotide"
  source: /note="Description of Combined DNA/RNA Molecule: Synthetic oligonucleotide"
  source: /note="DNA/RNA"
  modified_base (16)..(16): bicyclic nucleic acid (BNA)
ccagucgguaaguuct

SEQ ID NO: 4937 - RNA, 15 nt, Artificial Sequence
  source: /note="Description of Artificial Sequence: Synthetic oligonucleotide"
  source: /note="RNA"
  modified_base (15)..(15): bicyclic nucleic acid (BNA)
ccagucgguaaguuc

SEQ ID NO: 4938 - DNA, 14 bp, Artificial Sequence
  source: /note="Description of Artificial Sequence: Synthetic oligonucleotide"
  source: /note="Description of Combined DNA/RNA Molecule: Synthetic oligonucleotide"
  source: /note="DNA/RNA"
  modified_base (14)..(14): bicyclic nucleic acid (BNA)
ccagucgguaagut

SEQ ID NO: 4939 - DNA, 13 bp, Artificial Sequence
  source: /note="Description of Artificial Sequence: Synthetic oligonucleotide"
  source: /note="Description of Combined DNA/RNA Molecule: Synthetic oligonucleotide"
  source: /note="DNA/RNA"
  modified_base (13)..(13): bicyclic nucleic acid (BNA)
ccagucgguaagt

SEQ ID NO: 4940 - RNA, 20 nt, Artificial Sequence
  source: /note="Description of Artificial Sequence: Synthetic oligonucleotide"
  source: /note="RNA"
  modified_base (20)..(20): bicyclic nucleic acid (BNA)
gccagucgguaaguucuguc

SEQ ID NO: 4941 - DNA, 19 bp, Artificial Sequence
  source: /note="Description of Artificial Sequence: Synthetic oligonucleotide"
  source: /note="Description of Combined DNA/RNA Molecule: Synthetic oligonucleotide"
  source: /note="DNA/RNA"
  modified_base (19)..(19): bicyclic nucleic acid (BNA)
gccagucgguaaguucugt

SEQ ID NO: 4942 - RNA, 18 nt, Artificial Sequence
  source: /note="Description of Artificial Sequence: Synthetic oligonucleotide"
  source: /note="RNA"
  modified_base (18)..(18): bicyclic nucleic acid (BNA)
gccagucgguaaguucug

SEQ ID NO: 4943 - DNA, 17 bp, Artificial Sequence
  source: /note="Description of Artificial Sequence: Synthetic oligonucleotide"
  source: /note="Description of Combined DNA/RNA Molecule: Synthetic oligonucleotide"
  source: /note="DNA/RNA"
  modified_base (17)..(17): bicyclic nucleic acid (BNA)
gccagucgguaaguuct

SEQ ID NO: 4944 - RNA, 16 nt, Artificial Sequence
  source: /note="Description of Artificial Sequence: Synthetic oligonucleotide"
  source: /note="RNA"
  modified_base (16)..(16): bicyclic nucleic acid (BNA)
gccagucgguaaguuc

SEQ ID NO: 4945 - DNA, 15 bp, Artificial Sequence
  source: /note="Description of Artificial Sequence: Synthetic oligonucleotide"
  source: /note="Description of Combined DNA/RNA Molecule: Synthetic oligonucleotide"
  source: /note="DNA/RNA"
  modified_base (15)..(15): bicyclic nucleic acid (BNA)
gccagucgguaagut

SEQ ID NO: 4946 - DNA, 14 bp, Artificial Sequence
  source: /note="Description of Artificial Sequence: Synthetic oligonucleotide"
  source: /note="Description of Combined DNA/RNA Molecule: Synthetic oligonucleotide"
  source: /note="DNA/RNA"
  modified_base (14)..(14): bicyclic nucleic acid (BNA)
gccagucgguaagt

SEQ ID NO: 4947 - DNA, 20 bp, Artificial Sequence
  source: /note="Description of Artificial Sequence: Synthetic oligonucleotide"
  source: /note="Description of Combined DNA/RNA Molecule: Synthetic oligonucleotide"
  source: /note="DNA/RNA"
  modified_base (20)..(20): bicyclic nucleic acid (BNA)
ucaaggaagauggcauuuct

SEQ ID NO: 4948 - RNA, 22 nt, Artificial Sequence
  source: /note="Description of Artificial Sequence: Synthetic oligonucleotide"
  source: /note="RNA"
  modified_base (22)..(22): bicyclic nucleic acid (BNA)
ucaaggaagauggcauuucuag

SEQ ID NO: 4949 - DNA, 16 bp, Artificial Sequence
  source: /note="Description of Artificial Sequence: Synthetic oligonucleotide"
  source: /note="Description of Combined DNA/RNA Molecule: Synthetic oligonucleotide"
  source: /note="DNA/RNA"
  modified_base (16)..(16): bicyclic nucleic acid (BNA)
ucaaggaagauggcat

SEQ ID NO: 4950 - DNA, 15 bp, Artificial Sequence
  source: /note="Description of Artificial Sequence: Synthetic oligonucleotide"
  source: /note="Description of Combined DNA/RNA Molecule: Synthetic oligonucleotide"
  source: /note="DNA/RNA"
  modified_base (15)..(15): bicyclic nucleic acid (BNA)
gaagauggcauuuct

SEQ ID NO: 4951 - RNA, 21 nt, Artificial Sequence
  source: /note="Description of Artificial Sequence: Synthetic oligonucleotide"
  source: /note="RNA"
  modified_base (21)..(21): bicyclic nucleic acid (BNA)
ucaaggaagauggcauuucua

SEQ ID NO: 4952 - RNA, 19 nt, Artificial Sequence
  source: /note="Description of Artificial Sequence: Synthetic oligonucleotide"
  source: /note="RNA"
  modified_base (19)..(19): bicyclic nucleic acid (BNA)
ucaaggaagauggcauuuc

SEQ ID NO: 4953 - DNA, 18 bp, Artificial Sequence
  source: /note="Description of Artificial Sequence: Synthetic oligonucleotide"
  source: /note="Description of Combined DNA/RNA Molecule: Synthetic oligonucleotide"
  source: /note="DNA/RNA"
  modified_base (18)..(18): bicyclic nucleic acid (BNA)
ucaaggaagauggcauut

SEQ ID NO: 4954 - DNA, 17 bp, Artificial Sequence
  source: /note="Description of Artificial Sequence: Synthetic oligonucleotide"
  source: /note="Description of Combined DNA/RNA Molecule: Synthetic oligonucleotide"
  source: /note="DNA/RNA"
  modified_base (17)..(17): bicyclic nucleic acid (BNA)
ucaaggaagauggcaut

SEQ ID NO: 4955 - RNA, 15 nt, Artificial Sequence
  source: /note="Description of Artificial Sequence: Synthetic oligonucleotide"
  source: /note="RNA"
  modified_base (15)..(15): bicyclic nucleic acid (BNA)
ucaaggaagauggca

SEQ ID NO: 4956 - RNA, 14 nt, Artificial Sequence
  source: /note="Description of Artificial Sequence: Synthetic oligonucleotide"
  source: /note="RNA"
  modified_base (14)..(14): bicyclic nucleic acid (BNA)
ucaaggaagauggc

SEQ ID NO: 4957 - RNA, 13 nt, Artificial Sequence
  source: /note="Description of Artificial Sequence: Synthetic oligonucleotide"
  source: /note="RNA"
  modified_base (13)..(13): bicyclic nucleic acid (BNA)
ucaaggaagaugg

SEQ ID NO: 4958 - RNA, 12 nt, Artificial Sequence
  source: /note="Description of Artificial Sequence: Synthetic oligonucleotide"
  source: /note="RNA"
  modified_base (12)..(12): bicyclic nucleic acid (BNA)
ucaaggaagaug

SEQ ID NO: 4959 - DNA, 11 bp, Artificial Sequence
  source: /note="Description of Artificial Sequence: Synthetic oligonucleotide"
  source: /note="Description of Combined DNA/RNA Molecule: Synthetic oligonucleotide"
  source: /note="DNA/RNA"
  modified_base (11)..(11): bicyclic nucleic acid (BNA)
ucaaggaagat

SEQ ID NO: 4960 - RNA, 10 nt, Artificial Sequence
  source: /note="Description of Artificial Sequence: Synthetic oligonucleotide"
  source: /note="RNA"
  modified_base (10)..(10): bicyclic nucleic acid (BNA)
ucaaggaaga

SEQ ID NO: 4961 - RNA, 9 nt, Artificial Sequence
  source: /note="Description of Artificial Sequence: Synthetic oligonucleotide"
  source: /note="RNA"
  modified_base (9)..(9): bicyclic nucleic acid (BNA)
ucaaggaag

SEQ ID NO: 4962 - RNA, 21 nt, Artificial Sequence
  source: /note="Description of Artificial Sequence: Synthetic oligonucleotide"
  source: /note="RNA"
  modified_base (21)..(21): bicyclic nucleic acid (BNA)
caaggaagauggcauuucuag

SEQ ID NO: 4963 - RNA, 20 nt, Artificial Sequence
  source: /note="Description of Artificial Sequence: Synthetic oligonucleotide"
  source: /note="RNA"
  modified_base (20)..(20): bicyclic nucleic acid (BNA)
caaggaagauggcauuucua

SEQ ID NO: 4964 - DNA, 19 bp, Artificial Sequence
  source: /note="Description of Artificial Sequence: Synthetic oligonucleotide"
  source: /note="Description of Combined DNA/RNA Molecule: Synthetic oligonucleotide"
  source: /note="DNA/RNA"
  modified_base (19)..(19): bicyclic nucleic acid (BNA)
caaggaagauggcauuuct

SEQ ID NO: 4965 - RNA, 18 nt, Artificial Sequence
  source: /note="Description of Artificial Sequence: Synthetic oligonucleotide"
  source: /note="RNA"
  modified_base (18)..(18): bicyclic nucleic acid (BNA)
caaggaagauggcauuuc

SEQ ID NO: 4966 - DNA, 17 bp, Artificial Sequence
  source: /note="Description of Artificial Sequence: Synthetic oligonucleotide"
  source: /note="Description of Combined DNA/RNA Molecule: Synthetic oligonucleotide"
  source: /note="DNA/RNA"
  modified_base (17)..(17): bicyclic nucleic acid (BNA)
caaggaagauggcauut

SEQ ID NO: 4967 - DNA, 16 bp, Artificial Sequence
  source: /note="Description of Artificial Sequence: Synthetic oligonucleotide"
  source: /note="Description of Combined DNA/RNA Molecule: Synthetic oligonucleotide"
  source: /note="DNA/RNA"
  modified_base (16)..(16): bicyclic nucleic acid (BNA)
caaggaagauggcaut

SEQ ID NO: 4968 - DNA, 15 bp, Artificial Sequence
  source: /note="Description of Artificial Sequence: Synthetic oligonucleotide"
  source: /note="Description of Combined DNA/RNA Molecule: Synthetic oligonucleotide"
  source: /note="DNA/RNA"
  modified_base (15)..(15): bicyclic nucleic acid (BNA)
caaggaagauggcat

SEQ ID NO: 4969 - RNA, 14 nt, Artificial Sequence
  source: /note="Description of Artificial Sequence: Synthetic oligonucleotide"
  source: /note="RNA"
  modified_base (14)..(14): bicyclic nucleic acid (BNA)
caaggaagauggca

SEQ ID NO: 4970 - RNA, 13 nt, Artificial Sequence
  source: /note="Description of Artificial Sequence: Synthetic oligonucleotide"
  source: /note="RNA"
  modified_base (13)..(13): bicyclic nucleic acid (BNA)
caaggaagauggc

SEQ ID NO: 4971 - RNA, 12 nt, Artificial Sequence
  source: /note="Description of Artificial Sequence: Synthetic oligonucleotide"
  source: /note="RNA"
  modified_base (12)..(12): bicyclic nucleic acid (BNA)
caaggaagaugg

SEQ ID NO: 4972 - RNA, 11 nt, Artificial Sequence
  source: /note="Description of Artificial Sequence: Synthetic oligonucleotide"
  source: /note="RNA"
  modified_base (11)..(11): bicyclic nucleic acid (BNA)
caaggaagaug

SEQ ID NO: 4973 - DNA, 10 bp, Artificial Sequence
  source: /note="Description of Artificial Sequence: Synthetic oligonucleotide"
  source: /note="DNA/RNA"
  modified_base (10)..(10): bicyclic nucleic acid (BNA)
caaggaagat

SEQ ID NO: 4974 - RNA, 9 nt, Artificial Sequence
  source: /note="Description of Artificial Sequence: Synthetic oligonucleotide"
  source: /note="RNA/Antisense Oligonucleotide"
  modified_base (9)..(9): bicyclic nucleic acid (BNA)
caaggaaga

SEQ ID NO: 4975 - RNA, 8 nt, Artificial Sequence
  source: /note="Description of Artificial Sequence: Synthetic oligonucleotide"
  source: /note="RNA/Antisense Oligonucleotide"
  modified_base (8)..(8): bicyclic nucleic acid (BNA)
caaggaag

SEQ ID NO: 4976 - RNA, 20 nt, Artificial Sequence
  source: /note="Description of Artificial Sequence: Synthetic oligonucleotide"
  source: /note="RNA"
  modified_base (20)..(20): bicyclic nucleic acid (BNA)
aaggaagauggcauuucuag

SEQ ID NO: 4977 - RNA, 19 nt, Artificial Sequence
  source: /note="Description of Artificial Sequence: Synthetic oligonucleotide"
  source: /note="RNA"
  modified_base (19)..(19): bicyclic nucleic acid (BNA)
aaggaagauggcauuucua

SEQ ID NO: 4978 - DNA, 18 bp, Artificial Sequence
  source: /note="Description of Artificial Sequence: Synthetic oligonucleotide"
  source: /note="Description of Combined DNA/RNA Molecule: Synthetic oligonucleotide"
  source: /note="DNA/RNA"
  modified_base (18)..(18): bicyclic nucleic acid (BNA)
aaggaagauggcauuuct

SEQ ID NO: 4979 - RNA, 17 nt, Artificial Sequence
  source: /note="Description of Artificial Sequence: Synthetic oligonucleotide"
  source: /note="RNA"
  modified_base (17)..(17): bicyclic nucleic acid (BNA)
aaggaagauggcauuuc

SEQ ID NO: 4980 - DNA, 16 bp, Artificial Sequence
  source: /note="Description of Artificial Sequence: Synthetic oligonucleotide"
  source: /note="Description of Combined DNA/RNA Molecule: Synthetic oligonucleotide"
  source: /note="DNA/RNA"
  modified_base (16)..(16): bicyclic nucleic acid (BNA)
aaggaagauggcauut

SEQ ID NO: 4981 - DNA, 15 bp, Artificial Sequence
  source: /note="Description of Artificial Sequence: Synthetic oligonucleotide"
  source: /note="Description of Combined DNA/RNA Molecule: Synthetic oligonucleotide"
  source: /note="DNA/RNA"
  modified_base (15)..(15): bicyclic nucleic acid (BNA)
aaggaagauggcaut

SEQ ID NO: 4982 - DNA, 14 bp, Artificial Sequence
  source: /note="Description of Artificial Sequence: Synthetic oligonucleotide"
  source: /note="Description of Combined DNA/RNA Molecule: Synthetic oligonucleotide"
  source: /note="DNA/RNA"
  modified_base (14)..(14): bicyclic nucleic acid (BNA)
aaggaagauggcat

SEQ ID NO: 4983 - RNA, 13 nt, Artificial Sequence
  source: /note="Description of Artificial Sequence: Synthetic oligonucleotide"
  source: /note="RNA"
  modified_base (13)..(13): bicyclic nucleic acid (BNA)
aaggaagauggca

SEQ ID NO: 4984 - RNA, 12 nt, Artificial Sequence
  source: /note="Description of Artificial Sequence: Synthetic oligonucleotide"
  source: /note="RNA"
  modified_base (12)..(12): bicyclic nucleic acid (BNA)
aaggaagauggc

SEQ ID NO: 4985 - RNA, 11 nt, Artificial Sequence
  source: /note="Description of Artificial Sequence: Synthetic oligonucleotide"
  source: /note="RNA"
  modified_base (11)..(11): bicyclic nucleic acid (BNA)
aaggaagaugg

SEQ ID NO: 4986 - RNA, 10 nt, Artificial Sequence
  source: /note="Description of Artificial Sequence: Synthetic oligonucleotide"
  source: /note="RNA"
  modified_base (10)..(10): bicyclic nucleic acid (BNA)
aaggaagaug

SEQ ID NO: 4987 - DNA, 9 bp, Artificial Sequence
  source: /note="Description of Artificial Sequence: Synthetic oligonucleotide"
  source: /note="DNA/RNA"
  modified_base (9)..(9): bicyclic nucleic acid (BNA)
aaggaagat

SEQ ID NO: 4988 - RNA, 8 nt, Artificial Sequence
  source: /note="Description of Artificial Sequence: Synthetic oligonucleotide"
  source: /note="RNA/Antisense Oligonucleotide"
  modified_base (8)..(8): bicyclic nucleic acid (BNA)
aaggaaga

SEQ ID NO: 4989 - RNA, 19 nt, Artificial Sequence
  source: /note="Description of Artificial Sequence: Synthetic oligonucleotide"
  source: /note="RNA"
  modified_base (19)..(19): bicyclic nucleic acid (BNA)
aggaagauggcauuucuag

SEQ ID NO: 4990 - RNA, 18 nt, Artificial Sequence
  source: /note="Description of Artificial Sequence: Synthetic oligonucleotide"
  source: /note="RNA"
  modified_base (18)..(18): bicyclic nucleic acid (BNA)
aggaagauggcauuucua

SEQ ID NO: 4991 - DNA, 17 bp, Artificial Sequence
  source: /note="Description of Artificial Sequence: Synthetic oligonucleotide"
  source: /note="Description of Combined DNA/RNA Molecule: Synthetic oligonucleotide"
  source: /note="DNA/RNA"
  modified_base (17)..(17): bicyclic nucleic acid (BNA)
aggaagauggcauuuct

SEQ ID NO: 4992 - RNA, 16 nt, Artificial Sequence
  source: /note="Description of Artificial Sequence: Synthetic oligonucleotide"
  source: /note="RNA"
  modified_base (16)..(16): bicyclic nucleic acid (BNA)
aggaagauggcauuuc

SEQ ID NO: 4993 - DNA, 15 bp, Artificial Sequence
  source: /note="Description of Artificial Sequence: Synthetic oligonucleotide"
  source: /note="Description of Combined DNA/RNA Molecule: Synthetic oligonucleotide"
  source: /note="DNA/RNA"
  modified_base (15)..(15): bicyclic nucleic acid (BNA)
aggaagauggcauut

SEQ ID NO: 4994 - DNA, 14 bp, Artificial Sequence
  source: /note="Description of Artificial Sequence: Synthetic oligonucleotide"
  source: /note="Description of Combined DNA/RNA Molecule: Synthetic oligonucleotide"
  source: /note="DNA/RNA"
  modified_base (14)..(14): bicyclic nucleic acid (BNA)
aggaagauggcaut

SEQ ID NO: 4995 - DNA, 13 bp, Artificial Sequence
  source: /note="Description of Artificial Sequence: Synthetic oligonucleotide"
  source: /note="Description of Combined DNA/RNA Molecule: Synthetic oligonucleotide"
  source: /note="DNA/RNA"
  modified_base (13)..(13): bicyclic nucleic acid (BNA)
aggaagauggcat

SEQ ID NO: 4996 - RNA, 12 nt, Artificial Sequence
  source: /note="Description of Artificial Sequence: Synthetic oligonucleotide"
  source: /note="RNA"
  modified_base (12)..(12): bicyclic nucleic acid (BNA)
aggaagauggca

SEQ ID NO: 4997 - RNA, 10 nt, Artificial Sequence
  source: /note="Description of Artificial Sequence: Synthetic oligonucleotide"
  source: /note="RNA"
  modified_base (10)..(10): bicyclic nucleic acid (BNA)
aggaagaugg

SEQ ID NO: 4998 - RNA, 9 nt, Artificial Sequence
  source: /note="Description of Artificial Sequence: Synthetic oligonucleotide"
  source: /note="RNA"
  modified_base (9)..(9): bicyclic nucleic acid (BNA)
aggaagaug

SEQ ID NO: 4999 - DNA, 8 bp, Artificial Sequence
  source: /note="Description of Artificial Sequence: Synthetic oligonucleotide"
  source: /note="DNA/RNA"
  modified_base (8)..(8): bicyclic nucleic acid (BNA)
aggaagat

SEQ ID NO: 5000 - RNA, 18 nt, Artificial Sequence
  /note="Description of Artificial Sequence: Synthetic oligonucleotide"
  source: /note="RNA"
  modified_base (18)..(18): bicyclic nucleic acid (BNA)
ggaagauggcauuucuag

SEQ ID NO: 5001 - RNA, 17 nt, Artificial Sequence
  source: /note="Description of Artificial Sequence: Synthetic oligonucleotide"
  source: /note="RNA"
  modified_base (17)..(17): bicyclic nucleic acid (BNA)
ggaagauggcauuucua

SEQ ID NO: 5002 - DNA, 16 bp, Artificial Sequence
  source: /note="Description of Artificial Sequence: Synthetic oligonucleotide"
  source: /note="Description of Combined DNA/RNA Molecule: Synthetic oligonucleotide"
  source: /note="DNA/RNA"
  modified_base (16)..(16): bicyclic nucleic acid (BNA)
ggaagauggcauuuct

SEQ ID NO: 5003 - RNA, 15 nt, Artificial Sequence
  source: /note="Description of Artificial Sequence: Synthetic oligonucleotide"
  source: /note="RNA"
  modified_base (15)..(15): bicyclic nucleic acid (BNA)
ggaagauggcauuuc

SEQ ID NO: 5004 - DNA, 14 bp, Artificial Sequence
  source: /note="Description of Artificial Sequence: Synthetic oligonucleotide"
  source: /note="Description of Combined DNA/RNA Molecule: Synthetic oligonucleotide"
  source: /note="DNA/RNA"
  modified_base (14)..(14): bicyclic nucleic acid (BNA)
ggaagauggcauut

SEQ ID NO: 5005 - DNA, 13 bp, Artificial Sequence
  source: /note="Description of Artificial Sequence: Synthetic oligonucleotide"
  source: /note="Description of Combined DNA/RNA Molecule: Synthetic oligonucleotide"
  source: /note="DNA/RNA"
  modified_base (13)..(13): bicyclic nucleic acid (BNA)
ggaagauggcaut

SEQ ID NO: 5006 - DNA, 12 bp, Artificial Sequence
  source: /note="Description of Artificial Sequence: Synthetic oligonucleotide"
  source: /note="Description of Combined DNA/RNA Molecule: Synthetic oligonucleotide"
  source: /note="DNA/RNA"
  modified_base (12)..(12): bicyclic nucleic acid (BNA)
ggaagauggcat

SEQ ID NO: 5007 - RNA, 11 nt, Artificial Sequence
  source: /note="Description of Artificial Sequence: Synthetic oligonucleotide"
  source: /note="RNA"
  modified_base (11)..(11): bicyclic nucleic acid (BNA)
ggaagauggca

SEQ ID NO: 5008 - RNA, 10 nt, Artificial Sequence
  source: /note="Description of Artificial Sequence: Synthetic oligonucleotide"
  source: /note="RNA"
  modified_base (10)..(10): bicyclic nucleic acid (BNA)
ggaagauggc

SEQ ID NO: 5009 - RNA, 8 nt, Artificial Sequence
  source: /note="Description of Artificial Sequence: Synthetic oligonucleotide"
  source: /note="RNA"
  modified_base (8)..(8): bicyclic nucleic acid (BNA)
ggaagaug

SEQ ID NO: 5010 - RNA, 17 nt, Artificial Sequence
  source: /note="Description of Artificial Sequence: Synthetic oligonucleotide"
  source: /note="RNA"
  modified_base (17)..(17): bicyclic nucleic acid (BNA)
gaagauggcauuucuag

SEQ ID NO: 5011 - RNA, 16 nt, Artificial Sequence
  source: /note="Description of Artificial Sequence: Synthetic oligonucleotide"
  source: /note="RNA"
  modified_base (16)..(16): bicyclic nucleic acid (BNA)
gaagauggcauuucua

SEQ ID NO: 5012 - RNA, 14 nt, Artificial Sequence
  source: /note="Description of Artificial Sequence: Synthetic oligonucleotide"
  source: /note="RNA"
  modified_base (14)..(14): bicyclic nucleic acid (BNA)
gaagauggcauuuc

SEQ ID NO: 5013 - DNA, 13 bp, Artificial Sequence
  source: /note="Description of Artificial Sequence: Synthetic oligonucleotide"
  source: /note="Description of Combined DNA/RNA Molecule: Synthetic oligonucleotide"
  source: /note="DNA/RNA"
  modified_base (13)..(13): bicyclic nucleic acid (BNA)
gaagauggcauut

SEQ ID NO: 5014 - DNA, 12 bp, Artificial Sequence
  source: /note="Description of Artificial Sequence: Synthetic oligonucleotide"
  source: /note="Description of Combined DNA/RNA Molecule: Synthetic oligonucleotide"
  source: /note="DNA/RNA"
  modified_base (12)..(12): bicyclic nucleic acid (BNA)
gaagauggcaut

SEQ ID NO: 5015 - DNA, 11 bp, Artificial Sequence
  source: /note="Description of Artificial Sequence: Synthetic oligonucleotide"
  source: /note="Description of Combined DNA/RNA Molecule: Synthetic oligonucleotide"
  source: /note="DNA/RNA"
  modified_base (11)..(11): bicyclic nucleic acid (BNA)
gaagauggcat

SEQ ID NO: 5016 - RNA, 10 nt, Artificial Sequence
  source: /note="Description of Artificial Sequence: Synthetic oligonucleotide"
  source: /note="RNA"
  modified_base (10)..(10): bicyclic nucleic acid (BNA)
gaagauggca

SEQ ID NO: 5017 - RNA, 9 nt, Artificial Sequence
  source: /note="Description of Artificial Sequence: Synthetic oligonucleotide"
  source: /note="RNA"
  modified_base (9)..(9): bicyclic nucleic acid (BNA)
gaagauggc

SEQ ID NO: 5018 - RNA, 8 nt, Artificial Sequence
  source: /note="Description of Artificial Sequence: Synthetic oligonucleotide"
  source: /note="RNA"
  modified_base (8)..(8): bicyclic nucleic acid (BNA)
gaagaugg

SEQ ID NO: 5019 - RNA, 16 nt, Artificial Sequence
  source: /note="Description of Artificial Sequence: Synthetic oligonucleotide"
  source: /note="RNA"
  modified_base (16)..(16): bicyclic nucleic acid (BNA)
aagauggcauuucuag

SEQ ID NO: 5020 - RNA, 15 nt, Artificial Sequence
  source: /note="Description of Artificial Sequence: Synthetic oligonucleotide"
  source: /note="RNA"
  modified_base (15)..(15): bicyclic nucleic acid (BNA)
aagauggcauuucua

SEQ ID NO: 5021 - DNA, 14 bp, Artificial Sequence
  source: /note="Description of Artificial Sequence: Synthetic oligonucleotide"
  source: /note="Description of Combined DNA/RNA Molecule: Synthetic oligonucleotide"
  source: /note="DNA/RNA"
  modified_base (14)..(14): bicyclic nucleic acid (BNA)
aagauggcauuuct

SEQ ID NO: 5022 - RNA, 13 nt, Artificial Sequence
  source: /note="Description of Artificial Sequence: Synthetic oligonucleotide"
  source: /note="RNA"
  modified_base (13)..(13): bicyclic nucleic acid (BNA)
aagauggcauuuc

SEQ ID NO: 5023 - DNA, 12 bp, Artificial Sequence
  source: /note="Description of Artificial Sequence: Synthetic oligonucleotide"
  source: /note="Description of Combined DNA/RNA Molecule: Synthetic oligonucleotide"
  source: /note="DNA/RNA"
  modified_base (12)..(12): bicyclic nucleic acid (BNA)
aagauggcauut

SEQ ID NO: 5024 - DNA, 11 bp, Artificial Sequence
  source: /note="Description of Artificial Sequence: Synthetic oligonucleotide"
  source: /note="Description of Combined DNA/RNA Molecule: Synthetic oligonucleotide"
  source: /note="DNA/RNA"
  modified_base (11)..(11): bicyclic nucleic acid (BNA)
aagauggcaut

SEQ ID NO: 5025 - DNA, 10 bp, Artificial Sequence
  source: /note="Description of Artificial Sequence: Synthetic oligonucleotide"
  source: /note="Description of Combined DNA/RNA Molecule: Synthetic oligonucleotide"
  source: /note="DNA/RNA"
  modified_base (10)..(10): bicyclic nucleic acid (BNA)
aagauggcat

SEQ ID NO: 5026 - RNA, 9 nt, Artificial Sequence
  source: /note="Description of Artificial Sequence: Synthetic oligonucleotide"
  source: /note="RNA"
  modified_base (9)..(9): bicyclic nucleic acid (BNA)
aagauggca

SEQ ID NO: 5027 - RNA, 8 nt, Artificial Sequence
  source: /note="Description of Artificial Sequence: Synthetic oligonucleotide"
  source: /note="RNA"
  modified_base (8)..(8): bicyclic nucleic acid (BNA)
aagauggc

SEQ ID NO: 5028 - RNA, 15 nt, Artificial Sequence
  source: /note="Description of Artificial Sequence: Synthetic oligonucleotide"
  source: /note="RNA"
  modified_base (15)..(15): bicyclic nucleic acid (BNA)
agauggcauuucuag

SEQ ID NO: 5029 - RNA, 14 nt, Artificial Sequence
  source: /note="Description of Artificial Sequence: Synthetic oligonucleotide"
  source: /note="RNA"
  modified_base (14)..(14): bicyclic nucleic acid (BNA)
agauggcauuucua

SEQ ID NO: 5030 - DNA, 13 bp, Artificial Sequence
  source: /note="Description of Artificial Sequence: Synthetic oligonucleotide"
  source: /note="Description of Combined DNA/RNA Molecule: Synthetic oligonucleotide"
  source: /note="DNA/RNA"
  modified_base (13)..(13): bicyclic nucleic acid (BNA)
agauggcauuuct

SEQ ID NO: 5031 - RNA, 12 nt, Artificial Sequence
  source: /note="Description of Artificial Sequence: Synthetic oligonucleotide"
  source: /note="RNA"
  modified_base (12)..(12): bicyclic nucleic acid (BNA)
agauggcauuuc

SEQ ID NO: 5032 - DNA, 11 bp, Artificial Sequence
  source: /note="Description of Artificial Sequence: Synthetic oligonucleotide"
  source: /note="Description of Combined DNA/RNA Molecule: Synthetic oligonucleotide"
  source: /note="DNA/RNA"
  modified_base (11)..(11): bicyclic nucleic acid (BNA)
agauggcauut

SEQ ID NO: 5033 - DNA, 10 bp, Artificial Sequence
  source: /note="Description of Artificial Sequence: Synthetic oligonucleotide"
  source: /note="Description of Combined DNA/RNA Molecule: Synthetic oligonucleotide"
  source: /note="DNA/RNA"
  modified_base (10)..(10): bicyclic nucleic acid (BNA)
agauggcaut

SEQ ID NO: 5034 - DNA, 9 bp, Artificial Sequence
  source: /note="Description of Artificial Sequence: Synthetic oligonucleotide"
  source: /note="Description of Combined DNA/RNA Molecule: Synthetic oligonucleotide"
  source: /note="DNA/RNA"
  modified_base (9)..(9): bicyclic nucleic acid (BNA)
agauggcat

SEQ ID NO: 5035 - RNA, 8 nt, Artificial Sequence
  source: /note="Description of Artificial Sequence: Synthetic oligonucleotide"
  source: /note="RNA"
  modified_base (8)..(8): bicyclic nucleic acid (BNA)
agauggca

SEQ ID NO: 5036 - RNA, 30 nt, Artificial Sequence; identical to SEQ ID NO: 284
  source: /note="Description of Artificial Sequence: Synthetic oligonucleotide"
  source: /note="RNA"
  modified_base (30)..(30): bicyclic nucleic acid (BNA)

SEQ ID NO: 5037 - RNA, 29 nt, Artificial Sequence
  source: /note="Description of Artificial Sequence: Synthetic oligonucleotide"
  source: /note="RNA"
  modified_base (29)..(29): bicyclic nucleic acid (BNA)
cuccaacaucaaggaagauggcauuucua

SEQ ID NO: 5038 - DNA, 28 bp, Artificial Sequence
  source: /note="Description of Artificial Sequence: Synthetic oligonucleotide"
  source: /note="Description of Combined DNA/RNA Molecule: Synthetic oligonucleotide"
  source: /note="DNA/RNA"
  modified_base (28)..(28): bicyclic nucleic acid (BNA)
cuccaacaucaaggaagauggcauuuct

SEQ ID NO: 5039 - RNA, 27 nt, Artificial Sequence
  source: /note="Description of Artificial Sequence: Synthetic oligonucleotide"
  source: /note="RNA"
  modified_base (27)..(27): bicyclic nucleic acid (BNA)
cuccaacaucaaggaagauggcauuuc

SEQ ID NO: 5040 - DNA, 26 bp, Artificial Sequence
  source: /note="Description of Artificial Sequence: Synthetic oligonucleotide"
  source: /note="Description of Combined DNA/RNA Molecule: Synthetic oligonucleotide"
  source: /note="DNA/RNA"
  modified_base (26)..(26): bicyclic nucleic acid (BNA)
cuccaacaucaaggaagauggcauut

SEQ ID NO: 5041 - DNA, 25 bp, Artificial Sequence
  source: /note="Description of Artificial Sequence: Synthetic oligonucleotide"
  source: /note="Description of Combined DNA/RNA Molecule: Synthetic oligonucleotide"
  source: /note="DNA/RNA"
  modified_base (25)..(25): bicyclic nucleic acid (BNA)
cuccaacaucaaggaagauggcaut

SEQ ID NO: 5042 - DNA, 24 bp, Artificial Sequence
  source: /note="Description of Artificial Sequence: Synthetic oligonucleotide"
  source: /note="Description of Combined DNA/RNA Molecule: Synthetic oligonucleotide"
  source: /note="DNA/RNA"
  modified_base (24)..(24): bicyclic nucleic acid (BNA)
cuccaacaucaaggaagauggcat

SEQ ID NO: 5043 - RNA, 23 nt, Artificial Sequence
  source: /note="Description of Artificial Sequence: Synthetic oligonucleotide"
  source: /note="RNA"
  modified_base (23)..(23): bicyclic nucleic acid (BNA)
cuccaacaucaaggaagauggca

SEQ ID NO: 5044 - RNA, 22 nt, Artificial Sequence
  source: /note="Description of Artificial Sequence: Synthetic oligonucleotide"
  source: /note="RNA"
  modified_base (22)..(22): bicyclic nucleic acid (BNA)
cuccaacaucaaggaagauggc

SEQ ID NO: 5045 - RNA, 21 nt, Artificial Sequence
  source: /note="Description of Artificial Sequence: Synthetic oligonucleotide"
  source: /note="RNA"
  modified_base (21)..(21): bicyclic nucleic acid (BNA)
cuccaacaucaaggaagaugg

SEQ ID NO: 5046 - RNA, 20 nt, Artificial Sequence
  source: /note="Description of Artificial Sequence: Synthetic oligonucleotide"
  source: /note="RNA"
  modified_base (20)..(20): bicyclic nucleic acid (BNA)
cuccaacaucaaggaagaug

SEQ ID NO: 5047 - DNA, 19 bp, Artificial Sequence
  source: /note="Description of Artificial Sequence: Synthetic oligonucleotide"
  source: /note="Description of Combined DNA/RNA Molecule: Synthetic oligonucleotide"
  source: /note="DNA/RNA"
  modified_base (19)..(19): bicyclic nucleic acid (BNA)
cuccaacaucaaggaagat

SEQ ID NO: 5048 - RNA, 18 nt, Artificial Sequence
  source: /note="Description of Artificial Sequence: Synthetic oligonucleotide"
  source: /note="RNA"
  modified_base (18)..(18): bicyclic nucleic acid (BNA)
cuccaacaucaaggaaga

SEQ ID NO: 5049 - RNA, 17 nt, Artificial Sequence
  source: /note="Description of Artificial Sequence: Synthetic oligonucleotide"
  source: /note="RNA"
  modified_base (17)..(17): bicyclic nucleic acid (BNA)
cuccaacaucaaggaag

SEQ ID NO: 5050 - RNA, 29 nt, Artificial Sequence
  source: /note="Description of Artificial Sequence: Synthetic oligonucleotide"
  source: /note="RNA"
  modified_base (29)..(29): bicyclic nucleic acid (BNA)
uccaacaucaaggaagauggcauuucuag

SEQ ID NO: 5051 - RNA, 28 nt, Artificial Sequence
  source: /note="Description of Artificial Sequence: Synthetic oligonucleotide"
  source: /note="RNA"
  modified_base (28)..(28): bicyclic nucleic acid (BNA)
uccaacaucaaggaagauggcauuucua

SEQ ID NO: 5052 - DNA, 27 bp, Artificial Sequence
  source: /note="Description of Artificial Sequence: Synthetic oligonucleotide"
  source: /note="Description of Combined DNA/RNA Molecule: Synthetic oligonucleotide"
  source: /note="DNA/RNA"
  modified_base (27)..(27): bicyclic nucleic acid (BNA)
uccaacaucaaggaagauggcauuuct

SEQ ID NO: 5053 - RNA, 26 nt, Artificial Sequence
  source: /note="Description of Artificial Sequence: Synthetic oligonucleotide"
  source: /note="RNA"
  modified_base (26)..(26): bicyclic nucleic acid (BNA)
uccaacaucaaggaagauggcauuuc

SEQ ID NO: 5054 - DNA, 25 bp, Artificial Sequence
  source: /note="Description of Artificial Sequence: Synthetic oligonucleotide"
  source: /note="Description of Combined DNA/RNA Molecule: Synthetic oligonucleotide"
  source: /note="DNA/RNA"
  modified_base (25)..(25): bicyclic nucleic acid (BNA)
uccaacaucaaggaagauggcauut

SEQ ID NO: 5055 - DNA, 24 bp, Artificial Sequence
  source: /note="Description of Artificial Sequence: Synthetic oligonucleotide"
  source: /note="Description of Combined DNA/RNA Molecule: Synthetic oligonucleotide"
  source: /note="DNA/RNA"
  modified_base (24)..(24): bicyclic nucleic acid (BNA)
uccaacaucaaggaagauggcaut

SEQ ID NO: 5056 - DNA, 23 bp, Artificial Sequence
  source: /note="Description of Artificial Sequence: Synthetic oligonucleotide"
  source: /note="Description of Combined DNA/RNA Molecule: Synthetic oligonucleotide"
  source: /note="DNA/RNA"
  modified_base (23)..(23): bicyclic nucleic acid (BNA)
uccaacaucaaggaagauggcat

SEQ ID NO: 5057 - RNA, 22 nt, Artificial Sequence
  source: /note="Description of Artificial Sequence: Synthetic oligonucleotide"
  source: /note="RNA"
  modified_base (22)..(22): bicyclic nucleic acid (BNA)
uccaacaucaaggaagauggca

SEQ ID NO: 5058 - RNA, 21 nt, Artificial Sequence
  source: /note="Description of Artificial Sequence: Synthetic oligonucleotide"
  source: /note="RNA"
  modified_base (21)..(21): bicyclic nucleic acid (BNA)
uccaacaucaaggaagauggc

SEQ ID NO: 5059 - RNA, 20 nt, Artificial Sequence
  source: /note="Description of Artificial Sequence: Synthetic oligonucleotide"
  source: /note="RNA"
  modified_base (20)..(20): bicyclic nucleic acid (BNA)
uccaacaucaaggaagaugg

SEQ ID NO: 5060 - RNA, 19 nt, Artificial Sequence
  source: /note="Description of Artificial Sequence: Synthetic oligonucleotide"
  source: /note="RNA"
  modified_base (19)..(19): bicyclic nucleic acid (BNA)
uccaacaucaaggaagaug

SEQ ID NO: 5061 - DNA, 18 bp, Artificial Sequence
  source: /note="Description of Artificial Sequence: Synthetic oligonucleotide"
  source: /note="Description of Combined DNA/RNA Molecule: Synthetic oligonucleotide"
  source: /note="DNA/RNA"
  modified_base (18)..(18): bicyclic nucleic acid (BNA)
uccaacaucaaggaagat

SEQ ID NO: 5062 - RNA, 17 nt, Artificial Sequence
  source: /note="Description of Artificial Sequence: Synthetic oligonucleotide"
  source: /note="RNA"
  modified_base (17)..(17): bicyclic nucleic acid (BNA)
uccaacaucaaggaaga

SEQ ID NO: 5063 - RNA, 16 nt, Artificial Sequence
  source: /note="Description of Artificial Sequence: Synthetic oligonucleotide"
  source: /note="RNA"
  modified_base (16)..(16): bicyclic nucleic acid (BNA)
uccaacaucaaggaag

SEQ ID NO: 5064 - RNA, 28 nt, Artificial Sequence
  source: /note="Description of Artificial Sequence: Synthetic oligonucleotide"
  source: /note="RNA"
  modified_base (28)..(28): bicyclic nucleic acid (BNA)
ccaacaucaaggaagauggcauuucuag

SEQ ID NO: 5065 - RNA, 27 nt, Artificial Sequence
  source: /note="Description of Artificial Sequence: Synthetic oligonucleotide"
  source: /note="RNA"
  modified_base (27)..(27): bicyclic nucleic acid (BNA)
ccaacaucaaggaagauggcauuucua

SEQ ID NO: 5066 - DNA, 26 bp, Artificial Sequence
  source: /note="Description of Artificial Sequence: Synthetic oligonucleotide"
  source: /note="Description of Combined DNA/RNA Molecule: Synthetic oligonucleotide"
  source: /note="DNA/RNA"
  modified_base (26)..(26): bicyclic nucleic acid (BNA)
ccaacaucaaggaagauggcauuuct

SEQ ID NO: 5067 - RNA, 25 nt, Artificial Sequence
  source: /note="Description of Artificial Sequence: Synthetic oligonucleotide"
  source: /note="RNA"
  modified_base (25)..(25): bicyclic nucleic acid (BNA)
ccaacaucaaggaagauggcauuuc

SEQ ID NO: 5068 - DNA, 24 bp, Artificial Sequence
  source: /note="Description of Artificial Sequence: Synthetic oligonucleotide"
  source: /note="Description of Combined DNA/RNA Molecule: Synthetic oligonucleotide"
  source: /note="DNA/RNA"
  modified_base (24)..(24): bicyclic nucleic acid (BNA)
ccaacaucaaggaagauggcauut

SEQ ID NO: 5069 - DNA, 23 bp, Artificial Sequence
  source: /note="Description of Artificial Sequence: Synthetic oligonucleotide"
  source: /note="Description of Combined DNA/RNA Molecule: Synthetic oligonucleotide"
  source: /note="DNA/RNA"
  modified_base (23)..(23): bicyclic nucleic acid (BNA)
ccaacaucaaggaagauggcaut

SEQ ID NO: 5070 - DNA, 22 bp, Artificial Sequence
  source: /note="Description of Artificial Sequence: Synthetic oligonucleotide"
  source: /note="Description of Combined DNA/RNA Molecule: Synthetic oligonucleotide"
  source: /note="DNA/RNA"
  modified_base (22)..(22): bicyclic nucleic acid (BNA)
ccaacaucaaggaagauggcat

SEQ ID NO: 5071 - RNA, 21 nt, Artificial Sequence
  source: /note="Description of Artificial Sequence: Synthetic oligonucleotide"
  source: /note="RNA"
  modified_base (21)..(21): bicyclic nucleic acid (BNA)
ccaacaucaaggaagauggca

SEQ ID NO: 5072 - RNA, 20 nt, Artificial Sequence
  source: /note="Description of Artificial Sequence: Synthetic oligonucleotide"
  source: /note="RNA"
  modified_base (20)..(20): bicyclic nucleic acid (BNA)
ccaacaucaaggaagauggc

SEQ ID NO: 5073 - RNA, 19 nt, Artificial Sequence
  source: /note="Description of Artificial Sequence: Synthetic oligonucleotide"
  source: /note="RNA"
  modified_base (19)..(19): bicyclic nucleic acid (BNA)
ccaacaucaaggaagaugg

SEQ ID NO: 5074 - RNA, 18 nt, Artificial Sequence
  source: /note="Description of Artificial Sequence: Synthetic oligonucleotide"
  source: /note="RNA"
  modified_base (18)..(18): bicyclic nucleic acid (BNA)
ccaacaucaaggaagaug

SEQ ID NO: 5075 - DNA, 17 bp, Artificial Sequence
  source: /note="Description of Artificial Sequence: Synthetic oligonucleotide"
  source: /note="Description of Combined DNA/RNA Molecule: Synthetic oligonucleotide"
  source: /note="DNA/RNA"
  modified_base (17)..(17): bicyclic nucleic acid (BNA)
ccaacaucaaggaagat

SEQ ID NO: 5076 - RNA, 16 nt, Artificial Sequence
  source: /note="Description of Artificial Sequence: Synthetic oligonucleotide"
  source: /note="RNA"
  modified_base (16)..(16): bicyclic nucleic acid (BNA)
ccaacaucaaggaaga

SEQ ID NO: 5077 - RNA, 15 nt, Artificial Sequence
  source: /note="Description of Artificial Sequence: Synthetic oligonucleotide"
  source: /note="RNA"
  modified_base (15)..(15): bicyclic nucleic acid (BNA)
ccaacaucaaggaag

SEQ ID NO: 5078 - RNA, 27 nt, Artificial Sequence
  source: /note="Description of Artificial Sequence: Synthetic oligonucleotide"
  source: /note="RNA"
  modified_base (27)..(27): bicyclic nucleic acid (BNA)
caacaucaaggaagauggcauuucuag

SEQ ID NO: 5079 - RNA, 26 nt, Artificial Sequence
  source: /note="Description of Artificial Sequence: Synthetic oligonucleotide"
  source: /note="RNA"
  modified_base (26)..(26): bicyclic nucleic acid (BNA)
caacaucaaggaagauggcauuucua

SEQ ID NO: 5080 - DNA, 25 bp, Artificial Sequence
  source: /note="Description of Artificial Sequence: Synthetic oligonucleotide"
  source: /note="Description of Combined DNA/RNA Molecule: Synthetic oligonucleotide"
  source: /note="DNA/RNA"
  modified_base (25)..(25): bicyclic nucleic acid (BNA)
caacaucaaggaagauggcauuuct

SEQ ID NO: 5081 - RNA, 24 nt, Artificial Sequence
  source: /note="Description of Artificial Sequence: Synthetic oligonucleotide"
  source: /note="RNA"
  modified_base (24)..(24): bicyclic nucleic acid (BNA)
caacaucaaggaagauggcauuuc

SEQ ID NO: 5082 - DNA, 23 bp, Artificial Sequence
  source: /note="Description of Artificial Sequence: Synthetic oligonucleotide"
  source: /note="Description of Combined DNA/RNA Molecule: Synthetic oligonucleotide"
  source: /note="DNA/RNA"
  modified_base (23)..(23): bicyclic nucleic acid (BNA)
caacaucaaggaagauggcauut

SEQ ID NO: 5083 - DNA, 22 bp, Artificial Sequence
  source: /note="Description of Artificial Sequence: Synthetic oligonucleotide"
  source: /note="Description of Combined DNA/RNA Molecule: Synthetic oligonucleotide"
  source: /note="DNA/RNA"
  modified_base (22)..(22): bicyclic nucleic acid (BNA)
caacaucaaggaagauggcaut

SEQ ID NO: 5084 - DNA, 21 bp, Artificial Sequence
  source: /note="Description of Artificial Sequence: Synthetic oligonucleotide"
  source: /note="Description of Combined DNA/RNA Molecule: Synthetic oligonucleotide"
  source: /note="DNA/RNA"
  modified_base (21)..(21): bicyclic nucleic acid (BNA)
caacaucaaggaagauggcat

SEQ ID NO: 5085 - RNA, 20 nt, Artificial Sequence
  source: /note="Description of Artificial Sequence: Synthetic oligonucleotide"
  source: /note="RNA"
  modified_base (20)..(20): bicyclic nucleic acid (BNA)
caacaucaaggaagauggca

SEQ ID NO: 5086 - RNA, 19 nt, Artificial Sequence
  source: /note="Description of Artificial Sequence: Synthetic oligonucleotide"
  source: /note="RNA"
  modified_base (19)..(19): bicyclic nucleic acid (BNA)
caacaucaaggaagauggc

SEQ ID NO: 5087 - RNA, 18 nt, Artificial Sequence
  source: /note="Description of Artificial Sequence: Synthetic oligonucleotide"
  source: /note="RNA"
  modified_base (18)..(18): bicyclic nucleic acid (BNA)
caacaucaaggaagaugg

SEQ ID NO: 5088 - RNA, 17 nt, Artificial Sequence
  source: /note="Description of Artificial Sequence: Synthetic oligonucleotide"
  source: /note="RNA"
  modified_base (17)..(17): bicyclic nucleic acid (BNA)
caacaucaaggaagaug

SEQ ID NO: 5089 - DNA, 16 bp, Artificial Sequence
  source: /note="Description of Artificial Sequence: Synthetic oligonucleotide"
  source: /note="Description of Combined DNA/RNA Molecule: Synthetic oligonucleotide"
  source: /note="DNA/RNA"
  modified_base (16)..(16): bicyclic nucleic acid (BNA)
caacaucaaggaagat

SEQ ID NO: 5090 - RNA, 15 nt, Artificial Sequence
  source: /note="Description of Artificial Sequence: Synthetic oligonucleotide"
  source: /note="RNA"
  modified_base (15)..(15): bicyclic nucleic acid (BNA)
caacaucaaggaaga

SEQ ID NO: 5091 - RNA, 14 nt, Artificial Sequence
  source: /note="Description of Artificial Sequence: Synthetic oligonucleotide"
  source: /note="RNA"
  modified_base (14)..(14): bicyclic nucleic acid (BNA)
caacaucaaggaag

SEQ ID NO: 5092 - RNA, 26 nt, Artificial Sequence
  source: /note="Description of Artificial Sequence: Synthetic oligonucleotide"
  source: /note="RNA"
  modified_base (26)..(26): bicyclic nucleic acid (BNA)
aacaucaaggaagauggcauuucuag

SEQ ID NO: 5093 - RNA, 25 nt, Artificial Sequence
  source: /note="Description of Artificial Sequence: Synthetic oligonucleotide"
  source: /note="RNA"
  modified_base (25)..(25): bicyclic nucleic acid (BNA)
aacaucaaggaagauggcauuucua

SEQ ID NO: 5094 - DNA, 24 bp, Artificial Sequence
  source: /note="Description of Artificial Sequence: Synthetic oligonucleotide"
  source: /note="Description of Combined DNA/RNA Molecule: Synthetic oligonucleotide"
  source: /note="DNA/RNA"
  modified_base (24)..(24): bicyclic nucleic acid (BNA)
aacaucaaggaagauggcauuuct

SEQ ID NO: 5095 - RNA, 23 nt, Artificial Sequence
  source: /note="Description of Artificial Sequence: Synthetic oligonucleotide"
  source: /note="RNA"
  modified_base (23)..(23): bicyclic nucleic acid (BNA)
aacaucaaggaagauggcauuuc

SEQ ID NO: 5096 - DNA, 22 bp, Artificial Sequence
  source: /note="Description of Artificial Sequence: Synthetic oligonucleotide"
  source: /note="Description of Combined DNA/RNA Molecule: Synthetic oligonucleotide"
  source: /note="DNA/RNA"
  modified_base (22)..(22): bicyclic nucleic acid (BNA)
aacaucaaggaagauggcauut

SEQ ID NO: 5097 - DNA, 21 bp, Artificial Sequence
  source: /note="Description of Artificial Sequence: Synthetic oligonucleotide"
  source: /note="Description of Combined DNA/RNA Molecule: Synthetic oligonucleotide"
  source: /note="DNA/RNA"
  modified_base (21)..(21): bicyclic nucleic acid (BNA)
aacaucaaggaagauggcaut

SEQ ID NO: 5098 - DNA, 20 bp, Artificial Sequence
  source: /note="Description of Artificial Sequence: Synthetic oligonucleotide"
  source: /note="Description of Combined DNA/RNA Molecule: Synthetic oligonucleotide"
  source: /note="DNA/RNA"
  modified_base (20)..(20): bicyclic nucleic acid (BNA)
aacaucaaggaagauggcat

SEQ ID NO: 5099 - RNA, 19 nt, Artificial Sequence
  source: /note="Description of Artificial Sequence: Synthetic oligonucleotide"
  source: /note="RNA"
  modified_base (19)..(19): bicyclic nucleic acid (BNA)
aacaucaaggaagauggca

SEQ ID NO: 5100 - RNA, 18 nt, Artificial Sequence
  source: /note="Description of Artificial Sequence: Synthetic oligonucleotide"
  source: /note="RNA"
  modified_base (18)..(18): bicyclic nucleic acid (BNA)
aacaucaaggaagauggc

SEQ ID NO: 5101 - RNA, 17 nt, Artificial Sequence
  source: /note="Description of Artificial Sequence: Synthetic oligonucleotide"
  source: /note="RNA"
  modified_base (17)..(17): bicyclic nucleic acid (BNA)
aacaucaaggaagaugg

SEQ ID NO: 5102 - RNA, 16 nt, Artificial Sequence
  source: /note="Description of Artificial Sequence: Synthetic oligonucleotide"
  source: /note="RNA"
  modified_base (16)..(16): bicyclic nucleic acid (BNA)
aacaucaaggaagaug

SEQ ID NO: 5103 - DNA, 15 bp, Artificial Sequence
  source: /note="Description of Artificial Sequence: Synthetic oligonucleotide"
  source: /note="Description of Combined DNA/RNA Molecule: Synthetic oligonucleotide"
  source: /note="DNA/RNA"
  modified_base (15)..(15): bicyclic nucleic acid (BNA)
aacaucaaggaagat

SEQ ID NO: 5104 - RNA, 14 nt, Artificial Sequence
  source: /note="Description of Artificial Sequence: Synthetic oligonucleotide"
  source: /note="RNA"
  modified_base (14)..(14): bicyclic nucleic acid (BNA)
aacaucaaggaaga

SEQ ID NO: 5105 - RNA, 13 nt, Artificial Sequence
  source: /note="Description of Artificial Sequence: Synthetic oligonucleotide"
  source: /note="RNA"
  modified_base (13)..(13): bicyclic nucleic acid (BNA)
aacaucaaggaag

SEQ ID NO: 5106 - RNA, 25 nt, Artificial Sequence
  source: /note="Description of Artificial Sequence: Synthetic oligonucleotide"
  source: /note="RNA"
  modified_base (25)..(25): bicyclic nucleic acid (BNA)
acaucaaggaagauggcauuucuag

SEQ ID NO: 5107 - RNA, 24 nt, Artificial Sequence
  source: /note="Description of Artificial Sequence: Synthetic oligonucleotide"
  source: /note="RNA"
  modified_base (24)..(24): bicyclic nucleic acid (BNA)
acaucaaggaagauggcauuucua

SEQ ID NO: 5108 - DNA, 23 bp, Artificial Sequence
  source: /note="Description of Artificial Sequence: Synthetic oligonucleotide"
  source: /note="Description of Combined DNA/RNA Molecule: Synthetic oligonucleotide"
  source: /note="DNA/RNA"
  modified_base (23)..(23): bicyclic nucleic acid (BNA)
acaucaaggaagauggcauuuct

SEQ ID NO: 5109 - RNA, 22 nt, Artificial Sequence
  source: /note="Description of Artificial Sequence: Synthetic oligonucleotide"
  source: /note="RNA"
  modified_base (22)..(22): bicyclic nucleic acid (BNA)
acaucaaggaagauggcauuuc

SEQ ID NO: 5110 - DNA, 21 bp, Artificial Sequence
  source: /note="Description of Artificial Sequence: Synthetic oligonucleotide"
  source: /note="Description of Combined DNA/RNA Molecule: Synthetic oligonucleotide"
  source: /note="DNA/RNA"
  modified_base (21)..(21): bicyclic nucleic acid (BNA)
acaucaaggaagauggcauut

SEQ ID NO: 5111 - DNA, 20 bp, Artificial Sequence
  source: /note="Description of Artificial Sequence: Synthetic oligonucleotide"
  source: /note="Description of Combined DNA/RNA Molecule: Synthetic oligonucleotide"
  source: /note="DNA/RNA"
  modified_base (20)..(20): bicyclic nucleic acid (BNA)
acaucaaggaagauggcaut

SEQ ID NO: 5112 - DNA, 19 bp, Artificial Sequence
  source: /note="Description of Artificial Sequence: Synthetic oligonucleotide"
  source: /note="Description of Combined DNA/RNA Molecule: Synthetic oligonucleotide"
  source: /note="DNA/RNA"
  modified_base (19)..(19): bicyclic nucleic acid (BNA)
acaucaaggaagauggcat

SEQ ID NO: 5113 - RNA, 18 nt, Artificial Sequence
  source: /note="Description of Artificial Sequence: Synthetic oligonucleotide"
  source: /note="RNA"
  modified_base (18)..(18): bicyclic nucleic acid (BNA)
acaucaaggaagauggca

SEQ ID NO: 5114 - RNA, 17 nt, Artificial Sequence
  source: /note="Description of Artificial Sequence: Synthetic oligonucleotide"
  source: /note="RNA"
  modified_base (17)..(17): bicyclic nucleic acid (BNA)
acaucaaggaagauggc

SEQ ID NO: 5115 - RNA, 16 nt, Artificial Sequence
  source: /note="Description of Artificial Sequence: Synthetic oligonucleotide"
  source: /note="RNA"
  modified_base (16)..(16): bicyclic nucleic acid (BNA)
acaucaaggaagaugg

SEQ ID NO: 5116 - RNA, 15 nt, Artificial Sequence
  source: /note="Description of Artificial Sequence: Synthetic oligonucleotide"
  source: /note="RNA"
  modified_base (15)..(15): bicyclic nucleic acid (BNA)
acaucaaggaagaug

SEQ ID NO: 5117 - DNA, 14 bp, Artificial Sequence
  source: /note="Description of Artificial Sequence: Synthetic oligonucleotide"
  source: /note="Description of Combined DNA/RNA Molecule: Synthetic oligonucleotide"
  source: /note="DNA/RNA"
  modified_base (14)..(14): bicyclic nucleic acid (BNA)
acaucaaggaagat

SEQ ID NO: 5118 - RNA, 13 nt, Artificial Sequence
  source: /note="Description of Artificial Sequence: Synthetic oligonucleotide"
  source: /note="RNA"
  modified_base (13)..(13): bicyclic nucleic acid (BNA)
acaucaaggaaga

SEQ ID NO: 5119 - RNA, 12 nt, Artificial Sequence
  source: /note="Description of Artificial Sequence: Synthetic oligonucleotide"
  source: /note="RNA"
  modified_base (12)..(12): bicyclic nucleic acid (BNA)
acaucaaggaag

SEQ ID NO: 5120 - RNA, 24 nt, Artificial Sequence
  source: /note="Description of Artificial Sequence: Synthetic oligonucleotide"
  source: /note="RNA"
  modified_base (24)..(24): bicyclic nucleic acid (BNA)
caucaaggaagauggcauuucuag

SEQ ID NO: 5121 - RNA, 23 nt, Artificial Sequence
  source: /note="Description of Artificial Sequence: Synthetic oligonucleotide"
  source: /note="RNA"
  modified_base (23)..(23): bicyclic nucleic acid (BNA)
caucaaggaagauggcauuucua

SEQ ID NO: 5122 - DNA, 22 bp, Artificial Sequence
  source: /note="Description of Artificial Sequence: Synthetic oligonucleotide"
  source: /note="Description of Combined DNA/RNA Molecule: Synthetic oligonucleotide"
  source: /note="DNA/RNA"
  modified_base (22)..(22): bicyclic nucleic acid (BNA)
caucaaggaagauggcauuuct

SEQ ID NO: 5123 - RNA, 21 nt, Artificial Sequence
  source: /note="Description of Artificial Sequence: Synthetic oligonucleotide"
  source: /note="RNA"
  modified_base (21)..(21): bicyclic nucleic acid (BNA)
caucaaggaagauggcauuuc

SEQ ID NO: 5124 - DNA, 20 bp, Artificial Sequence
  source: /note="Description of Artificial Sequence: Synthetic oligonucleotide"
  source: /note="Description of Combined DNA/RNA Molecule: Synthetic oligonucleotide"
  source: /note="DNA/RNA"
  modified_base (20)..(20): bicyclic nucleic acid (BNA)
caucaaggaagauggcauut

SEQ ID NO: 5125 - DNA, 19 bp, Artificial Sequence
  source: /note="Description of Artificial Sequence: Synthetic oligonucleotide"
  source: /note="Description of Combined DNA/RNA Molecule: Synthetic oligonucleotide"
  source: /note="DNA/RNA"
  modified_base (19)..(19): bicyclic nucleic acid (BNA)
caucaaggaagauggcaut

SEQ ID NO: 5126 - DNA, 18 bp, Artificial Sequence
  source: /note="Description of Artificial Sequence: Synthetic oligonucleotide"
  source: /note="Description of Combined DNA/RNA Molecule: Synthetic oligonucleotide"
  source: /note="DNA/RNA"
  modified_base (18)..(18): bicyclic nucleic acid (BNA)
caucaaggaagauggcat

SEQ ID NO: 5127 - RNA, 17 nt, Artificial Sequence
  source: /note="Description of Artificial Sequence: Synthetic oligonucleotide"
  source: /note="RNA"
  modified_base (17)..(17): bicyclic nucleic acid (BNA)
caucaaggaagauggca

SEQ ID NO: 5128 - RNA, 16 nt, Artificial Sequence
  source: /note="Description of Artificial Sequence: Synthetic oligonucleotide"
  source: /note="RNA"
  modified_base (16)..(16): bicyclic nucleic acid (BNA)
caucaaggaagauggc

SEQ ID NO: 5129 - RNA, 15 nt, Artificial Sequence
  source: /note="Description of Artificial Sequence: Synthetic oligonucleotide"
  source: /note="RNA"
  modified_base (15)..(15): bicyclic nucleic acid (BNA)
caucaaggaagaugg

SEQ ID NO: 5130 - RNA, 14 nt, Artificial Sequence
  source: /note="Description of Artificial Sequence: Synthetic oligonucleotide"
  source: /note="RNA"
  modified_base (14)..(14): bicyclic nucleic acid (BNA)
caucaaggaagaug

SEQ ID NO: 5131 - DNA, 13 bp, Artificial Sequence
  source: /note="Description of Artificial Sequence: Synthetic oligonucleotide"
  source: /note="Description of Combined DNA/RNA Molecule: Synthetic oligonucleotide"
  source: /note="DNA/RNA"
  modified_base (13)..(13): bicyclic nucleic acid (BNA)
caucaaggaagat

SEQ ID NO: 5132 - RNA, 12 nt, Artificial Sequence
  source: /note="Description of Artificial Sequence: Synthetic oligonucleotide"
  source: /note="RNA"
  modified_base (12)..(12): bicyclic nucleic acid (BNA)
caucaaggaaga

SEQ ID NO: 5133 - RNA, 11 nt, Artificial Sequence
  source: /note="Description of Artificial Sequence: Synthetic oligonucleotide"
  source: /note="RNA"
  modified_base (11)..(11): bicyclic nucleic acid (BNA)
caucaaggaag

SEQ ID NO: 5134 - RNA, 23 nt, Artificial Sequence
  source: /note="Description of Artificial Sequence: Synthetic oligonucleotide"
  source: /note="RNA"
  modified_base (23)..(23): bicyclic nucleic acid (BNA)
aucaaggaagauggcauuucuag

SEQ ID NO: 5135 - RNA, 22 nt, Artificial Sequence
  source: /note="Description of Artificial Sequence: Synthetic oligonucleotide"
  source: /note="RNA"
  modified_base (22)..(22): bicyclic nucleic acid (BNA)
aucaaggaagauggcauuucua

SEQ ID NO: 5136 - DNA, 21 bp, Artificial Sequence
  source: /note="Description of Artificial Sequence: Synthetic oligonucleotide"
  source: /note="Description of Combined DNA/RNA Molecule: Synthetic oligonucleotide"
  source: /note="DNA/RNA"
  modified_base (21)..(21): bicyclic nucleic acid (BNA)
aucaaggaagauggcauuuct

SEQ ID NO: 5137 - RNA, 20 nt, Artificial Sequence
  source: /note="Description of Artificial Sequence: Synthetic oligonucleotide"
  source: /note="RNA"
  modified_base (20)..(20): bicyclic nucleic acid (BNA)
aucaaggaagauggcauuuc

SEQ ID NO: 5138 - DNA, 19 bp, Artificial Sequence
  source: /note="Description of Artificial Sequence: Synthetic oligonucleotide"
  source: /note="Description of Combined DNA/RNA Molecule: Synthetic oligonucleotide"
  source: /note="DNA/RNA"
  modified_base (19)..(19): bicyclic nucleic acid (BNA)
aucaaggaagauggcauut

SEQ ID NO: 5139 - DNA, 18 bp, Artificial Sequence
  source: /note="Description of Artificial Sequence: Synthetic oligonucleotide"
  source: /note="Description of Combined DNA/RNA Molecule: Synthetic oligonucleotide"
  source: /note="DNA/RNA"
  modified_base (18)..(18): bicyclic nucleic acid (BNA)
aucaaggaagauggcaut

SEQ ID NO: 5140 - DNA, 17 bp, Artificial Sequence
  source: /note="Description of Artificial Sequence: Synthetic oligonucleotide"
  source: /note="Description of Combined DNA/RNA Molecule: Synthetic oligonucleotide"
  source: /note="DNA/RNA"
  modified_base (17)..(17): bicyclic nucleic acid (BNA)
aucaaggaagauggcat

SEQ ID NO: 5141 - RNA, 16 nt, Artificial Sequence
  source: /note="Description of Artificial Sequence: Synthetic oligonucleotide"
  source: /note="RNA"
  modified_base (16)..(16): bicyclic nucleic acid (BNA)
aucaaggaagauggca

SEQ ID NO: 5142 - RNA, 15 nt, Artificial Sequence
  source: /note="Description of Artificial Sequence: Synthetic oligonucleotide"
  source: /note="RNA"
  modified_base (15)..(15): bicyclic nucleic acid (BNA)
aucaaggaagauggc

SEQ ID NO: 5143 - RNA, 14 nt, Artificial Sequence
  source: /note="Description of Artificial Sequence: Synthetic oligonucleotide"
  source: /note="RNA"
  modified_base (14)..(14): bicyclic nucleic acid (BNA)
aucaaggaagaugg

SEQ ID NO: 5144 - RNA, 13 nt, Artificial Sequence
  source: /note="Description of Artificial Sequence: Synthetic oligonucleotide"
  source: /note="RNA"
  modified_base (13)..(13): bicyclic nucleic acid (BNA)
aucaaggaagaug

SEQ ID NO: 5145 - DNA, 12 bp, Artificial Sequence
  source: /note="Description of Artificial Sequence: Synthetic oligonucleotide"
  source: /note="Description of Combined DNA/RNA Molecule: Synthetic oligonucleotide"
  source: /note="DNA/RNA"
  modified_base (12)..(12): bicyclic nucleic acid (BNA)
aucaaggaagat

SEQ ID NO: 5146 - RNA, 11 nt, Artificial Sequence
  source: /note="Description of Artificial Sequence: Synthetic oligonucleotide"
  source: /note="RNA"
  modified_base (11)..(11): bicyclic nucleic acid (BNA)
aucaaggaaga

SEQ ID NO: 5147 - RNA, 10 nt, Artificial Sequence
  source: /note="Description of Artificial Sequence: Synthetic oligonucleotide"
  source: /note="RNA"
  modified_base (10)..(10): bicyclic nucleic acid (BNA)
aucaaggaag

SEQ ID NO: 5148 - RNA, 23 nt, Artificial Sequence
  source: /note="Description of Artificial Sequence: Synthetic oligonucleotide"
  source: /note="RNA"
  modified_base (23)..(23): bicyclic nucleic acid (BNA)
ccagagcagguaccuccaacauc

SEQ ID NO: 5149 - RNA, 18 nt, Artificial Sequence
  source: /note="Description of Artificial Sequence: Synthetic oligonucleotide"
  source: /note="RNA"
  modified_base (18)..(18): bicyclic nucleic acid (BNA)
ccagagcagguaccucca

SEQ ID NO: 5150 - DNA, 23 bp, Artificial Sequence
  source: /note="Description of Artificial Sequence: Synthetic oligonucleotide"
  source: /note="Description of Combined DNA/RNA Molecule: Synthetic oligonucleotide"
  source: /note="DNA/RNA"
  modified_base (23)..(23): bicyclic nucleic acid (BNA)
ccucugugauuuuauaacuugat

SEQ ID NO: 5151 - DNA, 17 bp, Artificial Sequence
  source: /note="Description of Artificial Sequence: Synthetic oligonucleotide"
  source: /note="Description of Combined DNA/RNA Molecule: Synthetic oligonucleotide"
  source: /note="DNA/RNA"
  modified_base (17)..(17): bicyclic nucleic acid (BNA)
ucacccaccaucaccct

SEQ ID NO: 5152 - RNA, 20 nt, Artificial Sequence
  source: /note="Description of Artificial Sequence: Synthetic oligonucleotide"
  source: /note="RNA"
  modified_base (20)..(20): bicyclic nucleic acid (BNA)
ugauauccucaaggucaccc

SEQ ID NO: 5153 - RNA, 22 nt, Artificial Sequence
  source: /note="Description of Artificial Sequence: Synthetic oligonucleotide"
  source: /note="RNA"
  modified_base (22)..(22): bicyclic nucleic acid (BNA)
cugcuugaugaucaucucguug

SEQ ID NO: 5154 - RNA, 18 nt, Artificial Sequence
  source: /note="Description of Artificial Sequence: Synthetic oligonucleotide"
  source: /note="RNA"
  modified_base (18)..(18): bicyclic nucleic acid (BNA)
cugcuugaugaucaucuc

SEQ ID NO: 5155 - RNA, 19 nt, Artificial Sequence
  source: /note="Description of Artificial Sequence: Synthetic oligonucleotide"
  source: /note="RNA"
  modified_base (19)..(19): bicyclic nucleic acid (BNA)
guuuccuuaguaaccacag

SEQ ID NO: 5156 - RNA, 17 nt, Artificial Sequence
  source: /note="Description of Artificial Sequence: Synthetic oligonucleotide"
  source: /note="RNA"
  modified_base (17)..(17): bicyclic nucleic acid (BNA)
guuuccuuaguaaccac

SEQ ID NO: 5157 - DNA, 20 bp, Artificial Sequence
  source: /note="Description of Artificial Sequence: Synthetic oligonucleotide"
  source: /note="Description of Combined DNA/RNA Molecule: Synthetic oligonucleotide"
  source: /note="DNA/RNA"
  source: /note="5' tri-ethylene glycol (TEG)"
  modified_base (20)..(20): bicyclic nucleic acid (BNA)
ucaaggaagauggcauuuct

SEQ ID NO: 5158 - RNA, 22 nt, Artificial Sequence
  source: /note="Description of Artificial Sequence: Synthetic oligonucleotide"
  source: /note="RNA"
  source: /note="5' tri-ethylene glycol (TEG)"
  modified_base (22)..(22): bicyclic nucleic acid (BNA)
ucaaggaagauggcauuucuag

SEQ ID NO: 5159 - RNA, 18 nt, Artificial Sequence
  source: /note="Description of Artificial Sequence: Synthetic oligonucleotide"
  source: /note="RNA"
  source: /note="5' tri-ethylene glycol (TEG)"
  modified_base (18)..(18): bicyclic nucleic acid (BNA)
gguaaguucuguccaagc

SEQ ID NO: 5160 - RNA, 18 nt, Artificial Sequence
  source: /note="Description of Artificial Sequence: Synthetic oligonucleotide"
  source: /note="RNA"
  source: /note="5' tri-ethylene glycol (TEG)"
  modified_base (18)..(18): bicyclic nucleic acid (BNA)
guaaguucuguccaagcc

SEQ ID NO: 5161 - RNA, 18 nt, Artificial Sequence
  source: /note="Description of Artificial Sequence: Synthetic oligonucleotide"
  source: /note="RNA"
  source: /note="5' tri-ethylene glycol (TEG)"
  modified_base (18)..(18): bicyclic nucleic acid (BNA)
agucgguaaguucugucc

SEQ ID NO: 5162 - RNA, 18 nt, Artificial Sequence
  source: /note="Description of Artificial Sequence: Synthetic oligonucleotide"
  source: /note="RNA"
  source: /note="5' tri-ethylene glycol (TEG)"
  modified_base (18)..(18): bicyclic nucleic acid (BNA)
cuguccaagcccgguuga

SEQ ID NO: 5163 - RNA, 15 nt, Artificial Sequence
  source: /note="Description of Artificial Sequence: Synthetic oligonucleotide"
  source: /note="RNA"
  source: /note="5' tri-ethylene glycol (TEG)"
  modified_base (15)..(15): bicyclic nucleic acid (BNA)
uaaguucuguccaag

SEQ ID NO: 5164 - RNA, 20 nt, Artificial Sequence
  source: /note="Description of Artificial Sequence: Synthetic oligonucleotide"
  source: /note="RNA"
  source: /note="5' tri-ethylene glycol (TEG)"
  modified_base (20)..(20): bicyclic nucleic acid (BNA)
uucuguccaagcccgguuga

SEQ ID NO: 5165 - RNA, 19 nt, Artificial Sequence
  source: /note="Description of Artificial Sequence: Synthetic oligonucleotide"
  source: /note="RNA"
  source: /note="5' tri-ethylene glycol (TEG)"
  modified_base (19)..(19): bicyclic nucleic acid (BNA)
uucuguccaagcccgguug

SEQ ID NO: 5166 - DNA, 18 bp, Artificial Sequence
  source: /note="Description of Artificial Sequence: Synthetic oligonucleotide"
  source: /note="Description of Combined DNA/RNA Molecule: Synthetic oligonucleotide"
  source: /note="DNA/RNA"
  source: /note="5' tri-ethylene glycol (TEG)"
  modified_base (18)..(18): bicyclic nucleic acid (BNA)
uucuguccaagcccggut

SEQ ID NO: 5167 - DNA, 17 bp, Artificial Sequence
  source: /note="Description of Artificial Sequence: Synthetic oligonucleotide"
  source: /note="Description of Combined DNA/RNA Molecule: Synthetic oligonucleotide"
  source: /note="DNA/RNA"
  source: /note="5' tri-ethylene glycol (TEG)"
  modified_base (17)..(17): bicyclic nucleic acid (BNA)
uucuguccaagcccggt

SEQ ID NO: 5168 - RNA, 16 nt, Artificial Sequence
  source: /note="Description of Artificial Sequence: Synthetic oligonucleotide"
  source: /note="RNA"
  source: /note="5' tri-ethylene glycol (TEG)"
  modified_base (16)..(16): bicyclic nucleic acid (BNA)
uucuguccaagcccgg

SEQ ID NO: 5169 - RNA, 15 nt, Artificial Sequence
  source: /note="Description of Artificial Sequence: Synthetic oligonucleotide"
  source: /note="RNA"
  source: /note="5' tri-ethylene glycol (TEG)"
  modified_base (15)..(15): bicyclic nucleic acid (BNA)
uucuguccaagcccg

SEQ ID NO: 5170 - RNA, 14 nt, Artificial Sequence
  source: /note="Description of Artificial Sequence: Synthetic oligonucleotide"
  source: /note="RNA"
  source: /note="5' tri-ethylene glycol (TEG)"
  modified_base (14)..(14): bicyclic nucleic acid (BNA)
uucuguccaagccc

SEQ ID NO: 5171 - RNA, 13 nt, Artificial Sequence
  source: /note="Description of Artificial Sequence: Synthetic oligonucleotide"
  source: /note="RNA"
  source: /note="5' tri-ethylene glycol (TEG)"
  modified_base (13)..(13): bicyclic nucleic acid (BNA)
uucuguccaagcc

SEQ ID NO: 5172 - RNA, 12 nt, Artificial Sequence
  source: /note="Description of Artificial Sequence: Synthetic oligonucleotide"
  source: /note="RNA"
  source: /note="5' tri-ethylene glycol (TEG)"
  modified_base (12)..(12): bicyclic nucleic acid (BNA)
uucuguccaagc

SEQ ID NO: 5173 - RNA, 11 nt, Artificial Sequence
  source: /note="Description of Artificial Sequence: Synthetic oligonucleotide"
  source: /note="RNA"
  source: /note="5' tri-ethylene glycol (TEG)"
  modified_base (11)..(11): bicyclic nucleic acid (BNA)
uucuguccaag

SEQ ID NO: 5174 - RNA, 10 nt, Artificial Sequence
  source: /note="Description of Artificial Sequence: Synthetic oligonucleotide"
  source: /note="RNA"
  source: /note="5' tri-ethylene glycol (TEG)"
  modified_base (10)..(10): bicyclic nucleic acid (BNA)
uucuguccaa

SEQ ID NO: 5175 - RNA, 9 nt, Artificial Sequence
  source: /note="Description of Artificial Sequence: Synthetic oligonucleotide"
  source: /note="RNA"
  source: /note="5' tri-ethylene glycol (TEG)"
  modified_base (9)..(9): bicyclic nucleic acid (BNA)
uucugucca

SEQ ID NO: 5176 - RNA, 8 nt, Artificial Sequence
  source: /note="Description of Artificial Sequence: Synthetic oligonucleotide"
  source: /note="RNA"
  source: /note="5' tri-ethylene glycol (TEG)"
  modified_base (8)..(8): bicyclic nucleic acid (BNA)
uucugucc

SEQ ID NO: 5177 - RNA, 19 nt, Artificial Sequence
  source: /note="Description of Artificial Sequence: Synthetic oligonucleotide"
  source: /note="RNA"
  source: /note="5' tri-ethylene glycol (TEG)"
  modified_base (19)..(19): bicyclic nucleic acid (BNA)
ucuguccaagcccgguuga

SEQ ID NO: 5178 - RNA, 18 nt, Artificial Sequence
  source: /note="Description of Artificial Sequence: Synthetic oligonucleotide"
  source: /note="RNA"
  source: /note="5' tri-ethylene glycol (TEG)"
  modified_base (18)..(18): bicyclic nucleic acid (BNA)
ucuguccaagcccgguug

SEQ ID NO: 5179 - DNA, 17 bp, Artificial Sequence
  source: /note="Description of Artificial Sequence: Synthetic oligonucleotide"
  source: /note="Description of Combined DNA/RNA Molecule: Synthetic oligonucleotide"
  source: /note="DNA/RNA"
  source: /note="5' tri-ethylene glycol (TEG)"
  modified_base (17)..(17): bicyclic nucleic acid (BNA)
ucuguccaagcccggut

SEQ ID NO: 5180 - DNA, 16 bp, Artificial Sequence
  source: /note="Description of Artificial Sequence: Synthetic oligonucleotide"
  source: /note="Description of Combined DNA/RNA Molecule: Synthetic oligonucleotide"
  source: /note="DNA/RNA"
  source: /note="5' tri-ethylene glycol (TEG)"
  modified_base (16)..(16): bicyclic nucleic acid (BNA)
ucuguccaagcccggt

SEQ ID NO: 5181 - RNA, 15 nt, Artificial Sequence
  source: /note="Description of Artificial Sequence: Synthetic oligonucleotide"
  source: /note="RNA"
  source: /note="5' tri-ethylene glycol (TEG)"
  modified_base (15)..(15): bicyclic nucleic acid (BNA)
ucuguccaagcccgg

SEQ ID NO: 5182 - RNA, 14 nt, Artificial Sequence
  source: /note="Description of Artificial Sequence: Synthetic oligonucleotide"
  source: /note="RNA"
  source: /note="5' tri-ethylene glycol (TEG)"
  modified_base (14)..(14): bicyclic nucleic acid (BNA)
ucuguccaagcccg

SEQ ID NO: 5183 - RNA, 13 nt, Artificial Sequence
  source: /note="Description of Artificial Sequence: Synthetic oligonucleotide"
  source: /note="RNA"
  source: /note="5' tri-ethylene glycol (TEG)"
  modified_base (13)..(13): bicyclic nucleic acid (BNA)
ucuguccaagccc

SEQ ID NO: 5184 - RNA, 12 nt, Artificial Sequence
  source: /note="Description of Artificial Sequence: Synthetic oligonucleotide"
  source: /note="RNA"
  source: /note="5' tri-ethylene glycol (TEG)"
  modified_base (12)..(12): bicyclic nucleic acid (BNA)
ucuguccaagcc

SEQ ID NO: 5185 - RNA, 11 nt, Artificial Sequence
  source: /note="Description of Artificial Sequence: Synthetic oligonucleotide"
  source: /note="RNA"
  source: /note="5' tri-ethylene glycol (TEG)"
  modified_base (11)..(11): bicyclic nucleic acid (BNA)
ucuguccaagc

SEQ ID NO: 5186 - RNA, 10 nt, Artificial Sequence
  source: /note="Description of Artificial Sequence: Synthetic oligonucleotide"
  source: /note="RNA"
  source: /note="5' tri-ethylene glycol (TEG)"
  modified_base (10)..(10): bicyclic nucleic acid (BNA)
ucuguccaag

SEQ ID NO: 5187 - RNA, 9 nt, Artificial Sequence
  source: /note="Description of Artificial Sequence: Synthetic oligonucleotide"
  source: /note="RNA"
  source: /note="5' tri-ethylene glycol (TEG)"
  modified_base (9)..(9): bicyclic nucleic acid (BNA)
ucuguccaa

SEQ ID NO: 5188 - RNA, 8 nt, Artificial Sequence
  source: /note="Description of Artificial Sequence: Synthetic oligonucleotide"
  source: /note="RNA"
  source: /note="5' tri-ethylene glycol (TEG)"
  modified_base (8)..(8): bicyclic nucleic acid (BNA)
ucugucca

SEQ ID NO: 5189 - RNA, 17 nt, Artificial Sequence
  source: /note="Description of Artificial Sequence: Synthetic oligonucleotide"
  source: /note="RNA"
  source: /note="5' tri-ethylene glycol (TEG)"
  modified_base (17)..(17): bicyclic nucleic acid (BNA)
cuguccaagcccgguug

SEQ ID NO: 5190 - DNA, 16 bp, Artificial Sequence
  source: /note="Description of Artificial Sequence: Synthetic oligonucleotide"
  source: /note="Description of Combined DNA/RNA Molecule: Synthetic oligonucleotide"
  source: /note="DNA/RNA"
  source: /note="5' tri-ethylene glycol (TEG)"
  modified_base (16)..(16): bicyclic nucleic acid (BNA)
cuguccaagcccggut

SEQ ID NO: 5191 - DNA, 15 bp, Artificial Sequence
  source: /note="Description of Artificial Sequence: Synthetic oligonucleotide"
  source: /note="Description of Combined DNA/RNA Molecule: Synthetic oligonucleotide"
  source: /note="DNA/RNA"
  source: /note="5' tri-ethylene glycol (TEG)"
  modified_base (15)..(15): bicyclic nucleic acid (BNA)
cuguccaagcccggt

SEQ ID NO: 5192 - RNA, 14 nt, Artificial Sequence
  source: /note="Description of Artificial Sequence: Synthetic oligonucleotide"
  source: /note="RNA"
  source: /note="5' tri-ethylene glycol (TEG)"
  modified_base (14)..(14): bicyclic nucleic acid (BNA)
cuguccaagcccgg

SEQ ID NO: 5193 - RNA, 13 nt, Artificial Sequence
  source: /note="Description of Artificial Sequence: Synthetic oligonucleotide"
  source: /note="RNA"
  source: /note="5' tri-ethylene glycol (TEG)"
  modified_base (13)..(13): bicyclic nucleic acid (BNA)
cuguccaagcccg

SEQ ID NO: 5194 - RNA, 12 nt, Artificial Sequence
  source: /note="Description of Artificial Sequence: Synthetic oligonucleotide"
  source: /note="RNA"
  source: /note="5' tri-ethylene glycol (TEG)"
  modified_base (12)..(12): bicyclic nucleic acid (BNA)
cuguccaagccc

SEQ ID NO: 5195 - RNA, 11 nt, Artificial Sequence
  source: /note="Description of Artificial Sequence: Synthetic oligonucleotide"
  source: /note="RNA"
  source: /note="5' tri-ethylene glycol (TEG)"
  modified_base (11)..(11): bicyclic nucleic acid (BNA)
cuguccaagcc

SEQ ID NO: 5196 - RNA, 10 nt, Artificial Sequence
  source: /note="Description of Artificial Sequence: Synthetic oligonucleotide"
  source: /note="RNA"
  source: /note="5' tri-ethylene glycol (TEG)"
  modified_base (10)..(10): bicyclic nucleic acid (BNA)
cuguccaagc

SEQ ID NO: 5197 - RNA, 9 nt, Artificial Sequence
  source: /note="Description of Artificial Sequence: Synthetic oligonucleotide"
  source: /note="RNA"
  source: /note="5' tri-ethylene glycol (TEG)"
  modified_base (9)..(9): bicyclic nucleic acid (BNA)
cuguccaag

SEQ ID NO: 5198 - RNA, 8 nt, Artificial Sequence
  source: /note="Description of Artificial Sequence: Synthetic oligonucleotide"
  source: /note="RNA"
  source: /note="5' tri-ethylene glycol (TEG)"
  modified_base (8)..(8): bicyclic nucleic acid (BNA)
cuguccaa

SEQ ID NO: 5199 - RNA, 20 nt, Artificial Sequence
  source: /note="Description of Artificial Sequence: Synthetic oligonucleotide"
  source: /note="RNA"
  source: /note="5' tri-ethylene glycol (TEG)"
  modified_base (20)..(20): bicyclic nucleic acid (BNA)
guucuguccaagcccgguug

SEQ ID NO: 5200 - DNA, 19 bp, Artificial Sequence
  source: /note="Description of Artificial Sequence: Synthetic oligonucleotide"
  source: /note="Description of Combined DNA/RNA Molecule: Synthetic oligonucleotide"
  source: /note="DNA/RNA"
  source: /note="5' tri-ethylene glycol (TEG)"
  modified_base (19)..(19): bicyclic nucleic acid (BNA)
guucuguccaagcccggut

SEQ ID NO: 5201 - DNA, 18 bp, Artificial Sequence
  source: /note="Description of Artificial Sequence: Synthetic oligonucleotide"
  source: /note="Description of Combined DNA/RNA Molecule: Synthetic oligonucleotide"
  source: /note="DNA/RNA"
  source: /note="5' tri-ethylene glycol (TEG)"
  modified_base (18)..(18): bicyclic nucleic acid (BNA)
guucuguccaagcccggt

SEQ ID NO: 5202 - RNA, 17 nt, Artificial Sequence
  source: /note="Description of Artificial Sequence: Synthetic oligonucleotide"
  source: /note="RNA"
  source: /note="5' tri-ethylene glycol (TEG)"
  modified_base (17)..(17): bicyclic nucleic acid (BNA)
guucuguccaagcccgg

SEQ ID NO: 5203 - RNA, 16 nt, Artificial Sequence
  source: /note="Description of Artificial Sequence: Synthetic oligonucleotide"
  source: /note="RNA"
  source: /note="5' tri-ethylene glycol (TEG)"
  modified_base (16)..(16): bicyclic nucleic acid (BNA)
guucuguccaagcccg

SEQ ID NO: 5204 - RNA, 15 nt, Artificial Sequence
  source: /note="Description of Artificial Sequence: Synthetic oligonucleotide"
  source: /note="RNA"
  source: /note="5' tri-ethylene glycol (TEG)"
  modified_base (15)..(15): bicyclic nucleic acid (BNA)
guucuguccaagccc

SEQ ID NO: 5205 - RNA, 14 nt, Artificial Sequence
  source: /note="Description of Artificial Sequence: Synthetic oligonucleotide"
  source: /note="RNA"
  source: /note="5' tri-ethylene glycol (TEG)"
  modified_base (14)..(14): bicyclic nucleic acid (BNA)
guucuguccaagcc

SEQ ID NO: 5206 - RNA, 13 nt, Artificial Sequence
  source: /note="Description of Artificial Sequence: Synthetic oligonucleotide"
  source: /note="RNA"
  source: /note="5' tri-ethylene glycol (TEG)"
  modified_base (13)..(13): bicyclic nucleic acid (BNA)
guucuguccaagc

SEQ ID NO: 5207 - RNA, 12 nt, Artificial Sequence
  source: /note="Description of Artificial Sequence: Synthetic oligonucleotide"
  source: /note="RNA"
  source: /note="5' tri-ethylene glycol (TEG)"
  modified_base (12)..(12): bicyclic nucleic acid (BNA)
guucuguccaag

SEQ ID NO: 5208 - RNA, 11 nt, Artificial Sequence
  source: /note="Description of Artificial Sequence: Synthetic oligonucleotide"
  source: /note="RNA"
  source: /note="5' tri-ethylene glycol (TEG)"
  modified_base (11)..(11): bicyclic nucleic acid (BNA)
guucuguccaa

SEQ ID NO: 5209 - RNA, 10 nt, Artificial Sequence
  source: /note="Description of Artificial Sequence: Synthetic oligonucleotide"
  source: /note="RNA"
  source: /note="5' tri-ethylene glycol (TEG)"
  modified_base (10)..(10): bicyclic nucleic acid (BNA)
guucugucca

SEQ ID NO: 5210 - RNA, 9 nt, Artificial Sequence
  source: /note="Description of Artificial Sequence: Synthetic oligonucleotide"
  source: /note="RNA"
  source: /note="5' tri-ethylene glycol (TEG)"
  modified_base (9)..(9): bicyclic nucleic acid (BNA)
guucugucc

SEQ ID NO: 5211 - RNA, 8 nt, Artificial Sequence
  source: /note="Description of Artificial Sequence: Synthetic oligonucleotide"
  source: /note="RNA"
  source: /note="5' tri-ethylene glycol (TEG)"
  modified_base (8)..(8): bicyclic nucleic acid (BNA)
guucuguc

SEQ ID NO: 5212 - DNA, 20 bp, Artificial Sequence
  source: /note="Description of Artificial Sequence: Synthetic oligonucleotide"
  source: /note="Description of Combined DNA/RNA Molecule: Synthetic oligonucleotide"
  source: /note="DNA/RNA"
  source: /note="5' tri-ethylene glycol (TEG)"
  modified_base (20)..(20): bicyclic nucleic acid (BNA)
aguucuguccaagcccggut

SEQ ID NO: 5213 - DNA, 19 bp, Artificial Sequence
  source: /note="Description of Artificial Sequence: Synthetic oligonucleotide"
  source: /note="Description of Combined DNA/RNA Molecule: Synthetic oligonucleotide"
  source: /note="DNA/RNA"
  source: /note="5' tri-ethylene glycol (TEG)"
  modified_base (19)..(19): bicyclic nucleic acid (BNA)
aguucuguccaagcccggt

SEQ ID NO: 5214 - RNA, 18 nt, Artificial Sequence
  source: /note="Description of Artificial Sequence: Synthetic oligonucleotide"
  source: /note="RNA"
  source: /note="5' tri-ethylene glycol (TEG)"
  modified_base (18)..(18): bicyclic nucleic acid (BNA)
aguucuguccaagcccgg

SEQ ID NO: 5215 - RNA, 17 nt, Artificial Sequence
  source: /note="Description of Artificial Sequence: Synthetic oligonucleotide"
  source: /note="RNA"
  source: /note="5' tri-ethylene glycol (TEG)"
  modified_base (17)..(17): bicyclic nucleic acid (BNA)
aguucuguccaagcccg

SEQ ID NO: 5216 - RNA, 16 nt, Artificial Sequence
  source: /note="Description of Artificial Sequence: Synthetic oligonucleotide"
  source: /note="RNA"
  source: /note="5' tri-ethylene glycol (TEG)"
  modified_base (16)..(16): bicyclic nucleic acid (BNA)
aguucuguccaagccc

SEQ ID NO: 5217 - RNA, 15 nt, Artificial Sequence
  source: /note="Description of Artificial Sequence: Synthetic oligonucleotide"
  source: /note="RNA"
  source: /note="5' tri-ethylene glycol (TEG)"
  modified_base (15)..(15): bicyclic nucleic acid (BNA)
aguucuguccaagcc

SEQ ID NO: 5218 - RNA, 14 nt, Artificial Sequence
  source: /note="Description of Artificial Sequence: Synthetic oligonucleotide"
  source: /note="RNA"
  source: /note="5' tri-ethylene glycol (TEG)"
  modified_base (14)..(14): bicyclic nucleic acid (BNA)
aguucuguccaagc

SEQ ID NO: 5219 - RNA, 13 nt, Artificial Sequence
  source: /note="Description of Artificial Sequence: Synthetic oligonucleotide"
  source: /note="RNA"
  source: /note="5' tri-ethylene glycol (TEG)"
  modified_base (13)..(13): bicyclic nucleic acid (BNA)
aguucuguccaag

SEQ ID NO: 5220 - RNA, 12 nt, Artificial Sequence
  source: /note="Description of Artificial Sequence: Synthetic oligonucleotide"
  source: /note="RNA"
  source: /note="5' tri-ethylene glycol (TEG)"
  modified_base (12)..(12): bicyclic nucleic acid (BNA)
aguucuguccaa

SEQ ID NO: 5221 - RNA, 11 nt, Artificial Sequence
  source: /note="Description of Artificial Sequence: Synthetic oligonucleotide"
  source: /note="RNA"
  source: /note="5' tri-ethylene glycol (TEG)"
  modified_base (11)..(11): bicyclic nucleic acid (BNA)
aguucugucca

SEQ ID NO: 5222 - RNA, 10 nt, Artificial Sequence
  source: /note="Description of Artificial Sequence: Synthetic oligonucleotide"
  source: /note="RNA"
  source: /note="5' tri-ethylene glycol (TEG)"
  modified_base (10)..(10): bicyclic nucleic acid (BNA)
aguucugucc

SEQ ID NO: 5223 - RNA, 9 nt, Artificial Sequence
  source: /note="Description of Artificial Sequence: Synthetic oligonucleotide"
  source: /note="RNA"
  source: /note="5' tri-ethylene glycol (TEG)"
  modified_base (9)..(9): bicyclic nucleic acid (BNA)
aguucuguc

SEQ ID NO: 5224 - DNA, 8 bp, Artificial Sequence
  source: /note="Description of Artificial Sequence: Synthetic oligonucleotide"
  source: /note="Description of Combined DNA/RNA Molecule: Synthetic oligonucleotide"
  source: /note="DNA/RNA"
  source: /note="5' tri-ethylene glycol (TEG)"
  modified_base (8)..(8): bicyclic nucleic acid (BNA)
aguucugt

SEQ ID NO: 5225 - DNA, 20 bp, Artificial Sequence
  source: /note="Description of Artificial Sequence: Synthetic oligonucleotide"
  source: /note="Description of Combined DNA/RNA Molecule: Synthetic oligonucleotide"
  source: /note="DNA/RNA"
  source: /note="5' tri-ethylene glycol (TEG)"
  modified_base (20)..(20): bicyclic nucleic acid (BNA)
aaguucuguccaagcccggt

SEQ ID NO: 5226 - RNA, 19 nt, Artificial Sequence
  source: /note="Description of Artificial Sequence: Synthetic oligonucleotide"
  source: /note="RNA"
  source: /note="5' tri-ethylene glycol (TEG)"
  modified_base (19)..(19): bicyclic nucleic acid (BNA)
aaguucuguccaagcccgg

SEQ ID NO: 5227 - RNA, 18 nt, Artificial Sequence
  source: /note="Description of Artificial Sequence: Synthetic oligonucleotide"
  source: /note="RNA"
  source: /note="5' tri-ethylene glycol (TEG)"
  modified_base (18)..(18): bicyclic nucleic acid (BNA)
aaguucuguccaagcccg

SEQ ID NO: 5228 - RNA, 17 nt, Artificial Sequence
  source: /note="Description of Artificial Sequence: Synthetic oligonucleotide"
  source: /note="RNA"
  source: /note="5' tri-ethylene glycol (TEG)"
  modified_base (17)..(17): bicyclic nucleic acid (BNA)
aaguucuguccaagccc

SEQ ID NO: 5229 - RNA, 16 nt, Artificial Sequence
  source: /note="Description of Artificial Sequence: Synthetic oligonucleotide"
  source: /note="RNA"
  source: /note="5' tri-ethylene glycol (TEG)"
  modified_base (16)..(16): bicyclic nucleic acid (BNA)
aaguucuguccaagcc

SEQ ID NO: 5230 - RNA, 15 nt, Artificial Sequence
  source: /note="Description of Artificial Sequence: Synthetic oligonucleotide"
  source: /note="RNA"
  source: /note="5' tri-ethylene glycol (TEG)"
  modified_base (15)..(15): bicyclic nucleic acid (BNA)
aaguucuguccaagc

SEQ ID NO: 5231 - RNA, 14 nt, Artificial Sequence
  source: /note="Description of Artificial Sequence: Synthetic oligonucleotide"
  source: /note="RNA"
  source: /note="5' tri-ethylene glycol (TEG)"
  modified_base (14)..(14): bicyclic nucleic acid (BNA)
aaguucuguccaag

SEQ ID NO: 5232 - RNA, 13 nt, Artificial Sequence
  source: /note="Description of Artificial Sequence: Synthetic oligonucleotide"
  source: /note="RNA"
  source: /note="5' tri-ethylene glycol (TEG)"
  modified_base (13)..(13): bicyclic nucleic acid (BNA)
aaguucuguccaa

SEQ ID NO: 5233 - RNA, 12 nt, Artificial Sequence
  source: /note="Description of Artificial Sequence: Synthetic oligonucleotide"
  source: /note="RNA"
  source: /note="5' tri-ethylene glycol (TEG)"
  modified_base (12)..(12): bicyclic nucleic acid (BNA)
aaguucugucca

SEQ ID NO: 5234 - RNA, 11 nt, Artificial Sequence
  source: /note="Description of Artificial Sequence: Synthetic oligonucleotide"
  source: /note="RNA"
  source: /note="5' tri-ethylene glycol (TEG)"
  modified_base (11)..(11): bicyclic nucleic acid (BNA)
aaguucugucc

SEQ ID NO: 5235 - RNA, 10 nt, Artificial Sequence
  source: /note="Description of Artificial Sequence: Synthetic oligonucleotide"
  source: /note="RNA"
  source: /note="5' tri-ethylene glycol (TEG)"
  modified_base (10)..(10): bicyclic nucleic acid (BNA)
aaguucuguc

SEQ ID NO: 5236 - DNA, 9 bp, Artificial Sequence
  source: /note="Description of Artificial Sequence: Synthetic oligonucleotide"
  source: /note="Description of Combined DNA/RNA Molecule: Synthetic oligonucleotide"
  source: /note="DNA/RNA"
  source: /note="5' tri-ethylene glycol (TEG)"
  modified_base (9)..(9): bicyclic nucleic acid (BNA)
aaguucugt

SEQ ID NO: 5237 - RNA, 8 nt, Artificial Sequence
  source: /note="Description of Artificial Sequence: Synthetic oligonucleotide"
  source: /note="RNA"
  source: /note="5' tri-ethylene glycol (TEG)"
  modified_base (8)..(8): bicyclic nucleic acid (BNA)
aaguucug

SEQ ID NO: 5238 - RNA, 20 nt, Artificial Sequence
  source: /note="Description of Artificial Sequence: Synthetic oligonucleotide"
  source: /note="RNA"
  source: /note="5' tri-ethylene glycol (TEG)"
  modified_base (20)..(20): bicyclic nucleic acid (BNA)
uaaguucuguccaagcccgg

SEQ ID NO: 5239 - RNA, 19 nt, Artificial Sequence
  source: /note="Description of Artificial Sequence: Synthetic oligonucleotide"
  source: /note="RNA"
  source: /note="5' tri-ethylene glycol (TEG)"
  modified_base (19)..(19): bicyclic nucleic acid (BNA)
uaaguucuguccaagcccg

SEQ ID NO: 5240 - RNA, 18 nt, Artificial Sequence
  source: /note="Description of Artificial Sequence: Synthetic oligonucleotide"
  source: /note="RNA"
  source: /note="5' tri-ethylene glycol (TEG)"
  modified_base (18)..(18): bicyclic nucleic acid (BNA)
uaaguucuguccaagccc

SEQ ID NO: 5241 - RNA, 17 nt, Artificial Sequence
  source: /note="Description of Artificial Sequence: Synthetic oligonucleotide"
  source: /note="RNA"
  source: /note="5' tri-ethylene glycol (TEG)"
  modified_base (17)..(17): bicyclic nucleic acid (BNA)
uaaguucuguccaagcc

SEQ ID NO: 5242 - RNA, 16 nt, Artificial Sequence
  source: /note="Description of Artificial Sequence: Synthetic oligonucleotide"
  source: /note="RNA"
  source: /note="5' tri-ethylene glycol (TEG)"
  modified_base (16)..(16): bicyclic nucleic acid (BNA)
uaaguucuguccaagc

SEQ ID NO: 5243 - RNA, 14 nt, Artificial Sequence
  source: /note="Description of Artificial Sequence: Synthetic oligonucleotide"
  source: /note="RNA"
  source: /note="5' tri-ethylene glycol (TEG)"
  modified_base (14)..(14): bicyclic nucleic acid (BNA)
uaaguucuguccaa

SEQ ID NO: 5244 - RNA, 13 nt, Artificial Sequence
  source: /note="Description of Artificial Sequence: Synthetic oligonucleotide"
  source: /note="RNA"
  source: /note="5' tri-ethylene glycol (TEG)"
  modified_base (13)..(13): bicyclic nucleic acid (BNA)
uaaguucugucca

SEQ ID NO: 5245 - RNA, 12 nt, Artificial Sequence
  source: /note="Description of Artificial Sequence: Synthetic oligonucleotide"
  source: /note="RNA"
  source: /note="5' tri-ethylene glycol (TEG)"
  modified_base (12)..(12): bicyclic nucleic acid (BNA)
uaaguucugucc

SEQ ID NO: 5246 - RNA, 11 nt, Artificial Sequence
  source: /note="Description of Artificial Sequence: Synthetic oligonucleotide"
  source: /note="RNA"
  source: /note="5' tri-ethylene glycol (TEG)"
  modified_base (11)..(11): bicyclic nucleic acid (BNA)
uaaguucuguc

SEQ ID NO: 5247 - DNA, 10 bp, Artificial Sequence
  source: /note="Description of Artificial Sequence: Synthetic oligonucleotide"
  source: /note="Description of Combined DNA/RNA Molecule: Synthetic oligonucleotide"
  source: /note="DNA/RNA"
  source: /note="5' tri-ethylene glycol (TEG)"
  modified_base (10)..(10): bicyclic nucleic acid (BNA)
uaaguucugt

SEQ ID NO: 5248 - RNA, 9 nt, Artificial Sequence
  source: /note="Description of Artificial Sequence: Synthetic oligonucleotide"
  source: /note="RNA"
  source: /note="5' tri-ethylene glycol (TEG)"
  modified_base (9)..(9): bicyclic nucleic acid (BNA)
uaaguucug

SEQ ID NO: 5249 - DNA, 8 bp, Artificial Sequence
  source: /note="Description of Artificial Sequence: Synthetic oligonucleotide"
  source: /note="Description of Combined DNA/RNA Molecule: Synthetic oligonucleotide"
  source: /note="DNA/RNA"
  source: /note="5' tri-ethylene glycol (TEG)"
  modified_base (8)..(8): bicyclic nucleic acid (BNA)
uaaguuct

SEQ ID NO: 5250 - RNA, 20 nt, Artificial Sequence
  source: /note="Description of Artificial Sequence: Synthetic oligonucleotide"
  source: /note="RNA"
  source: /note="5' tri-ethylene glycol (TEG)"
  modified_base (20)..(20): bicyclic nucleic acid (BNA)
guaaguucuguccaagcccg

SEQ ID NO: 5251 - RNA, 19 nt, Artificial Sequence
  source: /note="Description of Artificial Sequence: Synthetic oligonucleotide"
  source: /note="RNA"
  source: /note="5' tri-ethylene glycol (TEG)"
  modified_base (19)..(19): bicyclic nucleic acid (BNA)
guaaguucuguccaagccc

SEQ ID NO: 5252 - RNA, 17 nt, Artificial Sequence
  source: /note="Description of Artificial Sequence: Synthetic oligonucleotide"
  source: /note="RNA"
  source: /note="5' tri-ethylene glycol (TEG)"
  modified_base (17)..(17): bicyclic nucleic acid (BNA)
guaaguucuguccaagc

SEQ ID NO: 5253 - RNA, 16 nt, Artificial Sequence
  source: /note="Description of Artificial Sequence: Synthetic oligonucleotide"
  source: /note="RNA"
  source: /note="5' tri-ethylene glycol (TEG)"
  modified_base (16)..(16): bicyclic nucleic acid (BNA)
guaaguucuguccaag

SEQ ID NO: 5254 - RNA, 15 nt, Artificial Sequence
  source: /note="Description of Artificial Sequence: Synthetic oligonucleotide"
  source: /note="RNA"
  source: /note="5' tri-ethylene glycol (TEG)"
  modified_base (15)..(15): bicyclic nucleic acid (BNA)
guaaguucuguccaa

SEQ ID NO: 5255 - RNA, 14 nt, Artificial Sequence
  source: /note="Description of Artificial Sequence: Synthetic oligonucleotide"
  source: /note="RNA"
  source: /note="5' tri-ethylene glycol (TEG)"
  modified_base (14)..(14): bicyclic nucleic acid (BNA)
guaaguucugucca

SEQ ID NO: 5256 - RNA, 13 nt, Artificial Sequence
  source: /note="Description of Artificial Sequence: Synthetic oligonucleotide"
  source: /note="RNA"
  source: /note="5' tri-ethylene glycol (TEG)"
  modified_base (13)..(13): bicyclic nucleic acid (BNA)
guaaguucugucc

SEQ ID NO: 5257 - RNA, 12 nt, Artificial Sequence
  source: /note="Description of Artificial Sequence: Synthetic oligonucleotide"
  source: /note="RNA"
  source: /note="5' tri-ethylene glycol (TEG)"
  modified_base (12)..(12): bicyclic nucleic acid (BNA)
guaaguucuguc

SEQ ID NO: 5258 - DNA, 11 bp, Artificial Sequence
  source: /note="Description of Artificial Sequence: Synthetic oligonucleotide"
  source: /note="Description of Combined DNA/RNA Molecule: Synthetic oligonucleotide"
  source: /note="DNA/RNA"
  source: /note="5' tri-ethylene glycol (TEG)"
  modified_base (11)..(11): bicyclic nucleic acid (BNA)
guaaguucugt

SEQ ID NO: 5259 - RNA, 10 nt, Artificial Sequence
  source: /note="Description of Artificial Sequence: Synthetic oligonucleotide"
  source: /note="RNA"
  source: /note="5' tri-ethylene glycol (TEG)"
  modified_base (10)..(10): bicyclic nucleic acid (BNA)
guaaguucug

SEQ ID NO: 5260 - DNA, 9 bp, Artificial Sequence
  source: /note="Description of Artificial Sequence: Synthetic oligonucleotide"
  source: /note="Description of Combined DNA/RNA Molecule: Synthetic oligonucleotide"
  source: /note="DNA/RNA"
  source: /note="5' tri-ethylene glycol (TEG)"
  modified_base (9)..(9): bicyclic nucleic acid (BNA)
guaaguuct

SEQ ID NO: 5261 - RNA, 8 nt, Artificial Sequence
  source: /note="Description of Artificial Sequence: Synthetic oligonucleotide"
  source: /note="RNA"
  source: /note="5' tri-ethylene glycol (TEG)"
  modified_base (8)..(8): bicyclic nucleic acid (BNA)
guaaguuc

SEQ ID NO: 5262 - RNA, 20 nt, Artificial Sequence
  source: /note="Description of Artificial Sequence: Synthetic oligonucleotide"
  source: /note="RNA"
  source: /note="5' tri-ethylene glycol (TEG)"
  modified_base (20)..(20): bicyclic nucleic acid (BNA)
gguaaguucuguccaagccc

SEQ ID NO: 5263 - RNA, 19 nt, Artificial Sequence
  source: /note="Description of Artificial Sequence: Synthetic oligonucleotide"
  source: /note="RNA"
  source: /note="5' tri-ethylene glycol (TEG)"
  modified_base (19)..(19): bicyclic nucleic acid (BNA)
gguaaguucuguccaagcc

SEQ ID NO: 5264 - RNA, 17 nt, Artificial Sequence
  source: /note="Description of Artificial Sequence: Synthetic oligonucleotide"
  source: /note="RNA"
  source: /note="5' tri-ethylene glycol (TEG)"
  modified_base (17)..(17): bicyclic nucleic acid (BNA)
gguaaguucuguccaag

SEQ ID NO: 5265 - RNA, 16 nt, Artificial Sequence
  source: /note="Description of Artificial Sequence: Synthetic oligonucleotide"
  source: /note="RNA"
  source: /note="5' tri-ethylene glycol (TEG)"
  modified_base (16)..(16): bicyclic nucleic acid (BNA)
gguaaguucuguccaa

SEQ ID NO: 5266 - RNA, 15 nt, Artificial Sequence
  source: /note="Description of Artificial Sequence: Synthetic oligonucleotide"
  source: /note="RNA"
  source: /note="5' tri-ethylene glycol (TEG)"
  modified_base (15)..(15): bicyclic nucleic acid (BNA)
gguaaguucugucca

SEQ ID NO: 5267 - RNA, 14 nt, Artificial Sequence
  source: /note="Description of Artificial Sequence: Synthetic oligonucleotide"
  source: /note="RNA"
  source: /note="5' tri-ethylene glycol (TEG)"
  modified_base (14)..(14): bicyclic nucleic acid (BNA)
gguaaguucugucc

SEQ ID NO: 5268 - RNA, 13 nt, Artificial Sequence
  source: /note="Description of Artificial Sequence: Synthetic oligonucleotide"
  source: /note="RNA"
  source: /note="5' tri-ethylene glycol (TEG)"
  modified_base (13)..(13): bicyclic nucleic acid (BNA)
gguaaguucuguc

SEQ ID NO: 5269 - DNA, 12 bp, Artificial Sequence
  source: /note="Description of Artificial Sequence: Synthetic oligonucleotide"
  source: /note="Description of Combined DNA/RNA Molecule: Synthetic oligonucleotide"
  source: /note="DNA/RNA"
  source: /note="5' tri-ethylene glycol (TEG)"
  modified_base (12)..(12): bicyclic nucleic acid (BNA)
gguaaguucugt

SEQ ID NO: 5270 - RNA, 11 nt, Artificial Sequence
  source: /note="Description of Artificial Sequence: Synthetic oligonucleotide"
  source: /note="RNA"
  source: /note="5' tri-ethylene glycol (TEG)"
  modified_base (11)..(11): bicyclic nucleic acid (BNA)
gguaaguucug

SEQ ID NO: 5271 - DNA, 10 bp, Artificial Sequence
  source: /note="Description of Artificial Sequence: Synthetic oligonucleotide"
  source: /note="Description of Combined DNA/RNA Molecule: Synthetic oligonucleotide"
  source: /note="DNA/RNA"
  source: /note="5' tri-ethylene glycol (TEG)"
  modified_base (10)..(10): bicyclic nucleic acid (BNA)
gguaaguuct

SEQ ID NO: 5272 - RNA, 9 nt, Artificial Sequence
  source: /note="Description of Artificial Sequence: Synthetic oligonucleotide"
  source: /note="RNA"
  source: /note="5' tri-ethylene glycol (TEG)"
  modified_base (9)..(9): bicyclic nucleic acid (BNA)
gguaaguuc

SEQ ID NO: 5273 - DNA, 8 bp, Artificial Sequence
  source: /note="Description of Artificial Sequence: Synthetic oligonucleotide"
  source: /note="Description of Combined DNA/RNA Molecule: Synthetic oligonucleotide"
  source: /note="DNA/RNA"
  source: /note="5' tri-ethylene glycol (TEG)"
  modified_base (8)..(8): bicyclic nucleic acid (BNA)
gguaagut

SEQ ID NO: 5274 - RNA, 20 nt, Artificial Sequence
  source: /note="Description of Artificial Sequence: Synthetic oligonucleotide"
  source: /note="RNA"
  source: /note="5' tri-ethylene glycol (TEG)"
  modified_base (20)..(20): bicyclic nucleic acid (BNA)
cgguaaguucuguccaagcc

SEQ ID NO: 5275 - RNA, 19 nt, Artificial Sequence
  source: /note="Description of Artificial Sequence: Synthetic oligonucleotide"
  source: /note="RNA"
  source: /note="5' tri-ethylene glycol (TEG)"
  modified_base (19)..(19): bicyclic nucleic acid (BNA)
cgguaaguucuguccaagc

SEQ ID NO: 5276 - RNA, 18 nt, Artificial Sequence
  source: /note="Description of Artificial Sequence: Synthetic oligonucleotide"
  source: /note="RNA"
  source: /note="5' tri-ethylene glycol (TEG)"
  modified_base (18)..(18): bicyclic nucleic acid (BNA)
cgguaaguucuguccaag

SEQ ID NO: 5277 - RNA, 17 nt, Artificial Sequence
  source: /note="Description of Artificial Sequence: Synthetic oligonucleotide"
  source: /note="RNA"
  source: /note="5' tri-ethylene glycol (TEG)"
  modified_base (17)..(17): bicyclic nucleic acid (BNA)
cgguaaguucuguccaa

SEQ ID NO: 5278 - RNA, 16 nt, Artificial Sequence
  source: /note="Description of Artificial Sequence: Synthetic oligonucleotide"
  source: /note="RNA"
  source: /note="5' tri-ethylene glycol (TEG)"
  modified_base (16)..(16): bicyclic nucleic acid (BNA)
cgguaaguucugucca

SEQ ID NO: 5279 - RNA, 15 nt, Artificial Sequence
  source: /note="Description of Artificial Sequence: Synthetic oligonucleotide"
  source: /note="RNA"
  source: /note="5' tri-ethylene glycol (TEG)"
  modified_base (15)..(15): bicyclic nucleic acid (BNA)
cgguaaguucugucc

SEQ ID NO: 5280 - RNA, 14 nt, Artificial Sequence
  source: /note="Description of Artificial Sequence: Synthetic oligonucleotide"
  source: /note="RNA"
  source: /note="5' tri-ethylene glycol (TEG)"
  modified_base (14)..(14): bicyclic nucleic acid (BNA)
cgguaaguucuguc

SEQ ID NO: 5281 - DNA, 13 bp, Artificial Sequence
  source: /note="Description of Artificial Sequence: Synthetic oligonucleotide"
  source: /note="Description of Combined DNA/RNA Molecule: Synthetic oligonucleotide"
  source: /note="DNA/RNA"
  source: /note="5' tri-ethylene glycol (TEG)"
  modified_base (13)..(13): bicyclic nucleic acid (BNA)
cgguaaguucugt

SEQ ID NO: 5282 - RNA, 12 nt, Artificial Sequence
  source: /note="Description of Artificial Sequence: Synthetic oligonucleotide"
  source: /note="RNA"
  source: /note="5' tri-ethylene glycol (TEG)"
  modified_base (12)..(12): bicyclic nucleic acid (BNA)
cgguaaguucug

SEQ ID NO: 5283 - DNA, 11 bp, Artificial Sequence
  source: /note="Description of Artificial Sequence: Synthetic oligonucleotide"
  source: /note="Description of Combined DNA/RNA Molecule: Synthetic oligonucleotide"
  source: /note="DNA/RNA"
  source: /note="5' tri-ethylene glycol (TEG)"
  modified_base (11)..(11): bicyclic nucleic acid (BNA)
cgguaaguuct

SEQ ID NO: 5284 - RNA, 10 nt, Artificial Sequence
  source: /note="Description of Artificial Sequence: Synthetic oligonucleotide"
  source: /note="RNA"
  source: /note="5' tri-ethylene glycol (TEG)"
  modified_base (10)..(10): bicyclic nucleic acid (BNA)
cgguaaguuc

SEQ ID NO: 5285 - DNA, 9 bp, Artificial Sequence
  source: /note="Description of Artificial Sequence: Synthetic oligonucleotide"
  source: /note="Description of Combined DNA/RNA Molecule: Synthetic oligonucleotide"
  source: /note="DNA/RNA"
  source: /note="5' tri-ethylene glycol (TEG)"
  modified_base (9)..(9): bicyclic nucleic acid (BNA)
cgguaagut

SEQ ID NO: 5286 - DNA, 8 bp, Artificial Sequence
  source: /note="Description of Artificial Sequence: Synthetic oligonucleotide"
  source: /note="Description of Combined DNA/RNA Molecule: Synthetic oligonucleotide"
  source: /note="DNA/RNA"
  source: /note="5' tri-ethylene glycol (TEG)"
  modified_base (8)..(8): bicyclic nucleic acid (BNA)
cgguaagt

SEQ ID NO: 5287 - RNA, 20 nt, Artificial Sequence
  source: /note="Description of Artificial Sequence: Synthetic oligonucleotide"
  source: /note="RNA"
  source: /note="5' tri-ethylene glycol (TEG)"
  modified_base (20)..(20): bicyclic nucleic acid (BNA)
ucgguaaguucuguccaagc

SEQ ID NO: 5288 - RNA, 19 nt, Artificial Sequence
  source: /note="Description of Artificial Sequence: Synthetic oligonucleotide"
  source: /note="RNA"
  source: /note="5' tri-ethylene glycol (TEG)"
  modified_base (19)..(19): bicyclic nucleic acid (BNA)
ucgguaaguucuguccaag

SEQ ID NO: 5289 - RNA, 18 nt, Artificial Sequence
  source: /note="Description of Artificial Sequence: Synthetic oligonucleotide"
  source: /note="RNA"
  source: /note="5' tri-ethylene glycol (TEG)"
  modified_base (18)..(18): bicyclic nucleic acid (BNA)
ucgguaaguucuguccaa

SEQ ID NO: 5290 - RNA, 17 nt, Artificial Sequence
  source: /note="Description of Artificial Sequence: Synthetic oligonucleotide"
  source: /note="RNA"
  source: /note="5' tri-ethylene glycol (TEG)"
  modified_base (17)..(17): bicyclic nucleic acid (BNA)
ucgguaaguucugucca

SEQ ID NO: 5291 - RNA, 16 nt, Artificial Sequence
  source: /note="Description of Artificial Sequence: Synthetic oligonucleotide"
  source: /note="RNA"
  source: /note="5' tri-ethylene glycol (TEG)"
  modified_base (16)..(16): bicyclic nucleic acid (BNA)
ucgguaaguucugucc

SEQ ID NO: 5292 - RNA, 15 nt, Artificial Sequence
  source: /note="Description of Artificial Sequence: Synthetic oligonucleotide"
  source: /note="RNA"
  source: /note="5' tri-ethylene glycol (TEG)"
  modified_base (15)..(15): bicyclic nucleic acid (BNA)
ucgguaaguucuguc

SEQ ID NO: 5293 - DNA, 14 bp, Artificial Sequence
  source: /note="Description of Artificial Sequence: Synthetic oligonucleotide"
  source: /note="Description of Combined DNA/RNA Molecule: Synthetic oligonucleotide"
  source: /note="DNA/RNA"
  source: /note="5' tri-ethylene glycol (TEG)"
  modified_base (14)..(14): bicyclic nucleic acid (BNA)
ucgguaaguucugt

SEQ ID NO: 5294 - RNA, 13 nt, Artificial Sequence
  source: /note="Description of Artificial Sequence: Synthetic oligonucleotide"
  source: /note="RNA"
  source: /note="5' tri-ethylene glycol (TEG)"
  modified_base (13)..(13): bicyclic nucleic acid (BNA)
ucgguaaguucug

SEQ ID NO: 5295 - DNA, 12 bp, Artificial Sequence
  source: /note="Description of Artificial Sequence: Synthetic oligonucleotide"
  source: /note="Description of Combined DNA/RNA Molecule: Synthetic oligonucleotide"
  source: /note="DNA/RNA"
  source: /note="5' tri-ethylene glycol (TEG)"
  modified_base (12)..(12): bicyclic nucleic acid (BNA)
ucgguaaguuct

SEQ ID NO: 5296 - RNA, 11 nt, Artificial Sequence
  source: /note="Description of Artificial Sequence: Synthetic oligonucleotide"
  source: /note="RNA"
  source: /note="5' tri-ethylene glycol (TEG)"
  modified_base (11)..(11): bicyclic nucleic acid (BNA)
ucgguaaguuc

SEQ ID NO: 5297 - DNA, 10 bp, Artificial Sequence
  source: /note="Description of Artificial Sequence: Synthetic oligonucleotide"
  source: /note="Description of Combined DNA/RNA Molecule: Synthetic oligonucleotide"
  source: /note="DNA/RNA"
  source: /note="5' tri-ethylene glycol (TEG)"
  modified_base (10)..(10): bicyclic nucleic acid (BNA)
ucgguaagut

SEQ ID NO: 5298 - DNA, 9 bp, Artificial Sequence
  source: /note="Description of Artificial Sequence: Synthetic oligonucleotide"
  source: /note="Description of Combined DNA/RNA Molecule: Synthetic oligonucleotide"
  source: /note="DNA/RNA"
  source: /note="5' tri-ethylene glycol (TEG)"
  modified_base (9)..(9): bicyclic nucleic acid (BNA)
ucgguaagt

SEQ ID NO: 5299 - RNA, 20 nt, Artificial Sequence
  source: /note="Description of Artificial Sequence: Synthetic oligonucleotide"
  source: /note="RNA"
  source: /note="5' tri-ethylene glycol (TEG)"
  modified_base (20)..(20): bicyclic nucleic acid (BNA)
gucgguaaguucuguccaag

SEQ ID NO: 5300 - RNA, 19 nt, Artificial Sequence
  source: /note="Description of Artificial Sequence: Synthetic oligonucleotide"
  source: /note="RNA"
  source: /note="5' tri-ethylene glycol (TEG)"
  modified_base (19)..(19): bicyclic nucleic acid (BNA)
gucgguaaguucuguccaa

SEQ ID NO: 5301 - RNA, 18 nt, Artificial Sequence
  source: /note="Description of Artificial Sequence: Synthetic oligonucleotide"
  source: /note="RNA"
  source: /note="5' tri-ethylene glycol (TEG)"
  modified_base (18)..(18): bicyclic nucleic acid (BNA)
gucgguaaguucugucca

SEQ ID NO: 5302 - RNA, 17 nt, Artificial Sequence
  source: /note="Description of Artificial Sequence: Synthetic oligonucleotide"
  source: /note="RNA"
  source: /note="5' tri-ethylene glycol (TEG)"
  modified_base (17)..(17): bicyclic nucleic acid (BNA)
gucgguaaguucugucc

SEQ ID NO: 5303 - RNA, 16 nt, Artificial Sequence
  source: /note="Description of Artificial Sequence: Synthetic oligonucleotide"
  source: /note="RNA"
  source: /note="5' tri-ethylene glycol (TEG)"
  modified_base (16)..(16): bicyclic nucleic acid (BNA)
gucgguaaguucuguc

SEQ ID NO: 5304 - DNA, 15 bp, Artificial Sequence
  source: /note="Description of Artificial Sequence: Synthetic oligonucleotide"
  source: /note="Description of Combined DNA/RNA Molecule: Synthetic oligonucleotide"
  source: /note="DNA/RNA"
  source: /note="5' tri-ethylene glycol (TEG)"
  modified_base (15)..(15): bicyclic nucleic acid (BNA)
gucgguaaguucugt

SEQ ID NO: 5305 - RNA, 14 nt, Artificial Sequence
  source: /note="Description of Artificial Sequence: Synthetic oligonucleotide"
  source: /note="RNA"
  source: /note="5' tri-ethylene glycol (TEG)"
  modified_base (14)..(14): bicyclic nucleic acid (BNA)
gucgguaaguucug

SEQ ID NO: 5306 - DNA, 13 bp, Artificial Sequence
  source: /note="Description of Artificial Sequence: Synthetic oligonucleotide"
  source: /note="Description of Combined DNA/RNA Molecule: Synthetic oligonucleotide"
  source: /note="DNA/RNA"
  source: /note="5' tri-ethylene glycol (TEG)"
  modified_base (13)..(13): bicyclic nucleic acid (BNA)
gucgguaaguuct

SEQ ID NO: 5307 - RNA, 12 nt, Artificial Sequence
  source: /note="Description of Artificial Sequence: Synthetic oligonucleotide"
  source: /note="RNA"
  source: /note="5' tri-ethylene glycol (TEG)"
  modified_base (12)..(12): bicyclic nucleic acid (BNA)
gucgguaaguuc

SEQ ID NO: 5308 - DNA, 11 bp, Artificial Sequence
  source: /note="Description of Artificial Sequence: Synthetic oligonucleotide"
  source: /note="Description of Combined DNA/RNA Molecule: Synthetic oligonucleotide"
  source: /note="DNA/RNA"
  source: /note="5' tri-ethylene glycol (TEG)"
  modified_base (11)..(11): bicyclic nucleic acid (BNA)
gucgguaagut

SEQ ID NO: 5309 - DNA, 10 bp, Artificial Sequence
  source: /note="Description of Artificial Sequence: Synthetic oligonucleotide"
  source: /note="Description of Combined DNA/RNA Molecule: Synthetic oligonucleotide"
  source: /note="DNA/RNA"
  source: /note="5' tri-ethylene glycol (TEG)"
  modified_base (10)..(10): bicyclic nucleic acid (BNA)
gucgguaagt

SEQ ID NO: 5310 - RNA, 20 nt, Artificial Sequence
  source: /note="Description of Artificial Sequence: Synthetic oligonucleotide"
  source: /note="RNA"
  source: /note="5' tri-ethylene glycol (TEG)"
  modified_base (20)..(20): bicyclic nucleic acid (BNA)
agucgguaaguucuguccaa

SEQ ID NO: 5311 - RNA, 19 nt, Artificial Sequence
  source: /note="Description of Artificial Sequence: Synthetic oligonucleotide"
  source: /note="RNA"
  source: /note="5' tri-ethylene glycol (TEG)"
  modified_base (19)..(19): bicyclic nucleic acid (BNA)
agucgguaaguucugucca

SEQ ID NO: 5312 - RNA, 17 nt, Artificial Sequence
  source: /note="Description of Artificial Sequence: Synthetic oligonucleotide"
  source: /note="RNA"
  source: /note="5' tri-ethylene glycol (TEG)"
  modified_base (17)..(17): bicyclic nucleic acid (BNA)
agucgguaaguucuguc

SEQ ID NO: 5313 - DNA, 16 bp, Artificial Sequence
  source: /note="Description of Artificial Sequence: Synthetic oligonucleotide"
  source: /note="Description of Combined DNA/RNA Molecule: Synthetic oligonucleotide"
  source: /note="DNA/RNA"
  source: /note="5' tri-ethylene glycol (TEG)"
  modified_base (16)..(16): bicyclic nucleic acid (BNA)
agucgguaaguucugt

SEQ ID NO: 5314 - RNA, 15 nt, Artificial Sequence
  source: /note="Description of Artificial Sequence: Synthetic oligonucleotide"
  source: /note="RNA"
  source: /note="5' tri-ethylene glycol (TEG)"
  modified_base (15)..(15): bicyclic nucleic acid (BNA)
agucgguaaguucug

SEQ ID NO: 5315 - DNA, 14 bp, Artificial Sequence
  source: /note="Description of Artificial Sequence: Synthetic oligonucleotide"
  source: /note="Description of Combined DNA/RNA Molecule: Synthetic oligonucleotide"
  source: /note="DNA/RNA"
  source: /note="5' tri-ethylene glycol (TEG)"
  modified_base (14)..(14): bicyclic nucleic acid (BNA)
agucgguaaguuct

SEQ ID NO: 5316 - RNA, 13 nt, Artificial Sequence
  source: /note="Description of Artificial Sequence: Synthetic oligonucleotide"
  source: /note="RNA"
  source: /note="5' tri-ethylene glycol (TEG)"
  modified_base (13)..(13): bicyclic nucleic acid (BNA)
agucgguaaguuc

SEQ ID NO: 5317 - DNA, 12 bp, Artificial Sequence
  source: /note="Description of Artificial Sequence: Synthetic oligonucleotide"
  source: /note="Description of Combined DNA/RNA Molecule: Synthetic oligonucleotide"
  source: /note="DNA/RNA"
  source: /note="5' tri-ethylene glycol (TEG)"
  modified_base (12)..(12): bicyclic nucleic acid (BNA)
agucgguaagut

SEQ ID NO: 5318 - DNA, 11 bp, Artificial Sequence
  source: /note="Description of Artificial Sequence: Synthetic oligonucleotide"
  source: /note="Description of Combined DNA/RNA Molecule: Synthetic oligonucleotide"
  source: /note="DNA/RNA"
  source: /note="5' tri-ethylene glycol (TEG)"
  modified_base (11)..(11): bicyclic nucleic acid (BNA)
agucgguaagt

SEQ ID NO: 5319 - RNA, 20 nt, Artificial Sequence
  source: /note="Description of Artificial Sequence: Synthetic oligonucleotide"
  source: /note="RNA"
  source: /note="5' tri-ethylene glycol (TEG)"
  modified_base (20)..(20): bicyclic nucleic acid (BNA)
cagucgguaaguucugucca

SEQ ID NO: 5320 - RNA, 19 nt, Artificial Sequence
  source: /note="Description of Artificial Sequence: Synthetic oligonucleotide"
  source: /note="RNA"
  source: /note="5' tri-ethylene glycol (TEG)"
  modified_base (19)..(19): bicyclic nucleic acid (BNA)
cagucgguaaguucugucc

SEQ ID NO: 5321 - RNA, 18 nt, Artificial Sequence
  source: /note="Description of Artificial Sequence: Synthetic oligonucleotide"
  source: /note="RNA"
  source: /note="5' tri-ethylene glycol (TEG)"
  modified_base (18)..(18): bicyclic nucleic acid (BNA)
cagucgguaaguucuguc

SEQ ID NO: 5322 - DNA, 17 bp, Artificial Sequence
  source: /note="Description of Artificial Sequence: Synthetic oligonucleotide"
  source: /note="Description of Combined DNA/RNA Molecule: Synthetic oligonucleotide"
  source: /note="DNA/RNA"
  source: /note="5' tri-ethylene glycol (TEG)"
  modified_base (17)..(17): bicyclic nucleic acid (BNA)
cagucgguaaguucugt

SEQ ID NO: 5323 - RNA, 16 nt, Artificial Sequence
  source: /note="Description of Artificial Sequence: Synthetic oligonucleotide"
  source: /note="RNA"
  source: /note="5' tri-ethylene glycol (TEG)"
  modified_base (16)..(16): bicyclic nucleic acid (BNA)
cagucgguaaguucug

SEQ ID NO: 5324 - DNA, 15 bp, Artificial Sequence
  source: /note="Description of Artificial Sequence: Synthetic oligonucleotide"
  source: /note="Description of Combined DNA/RNA Molecule: Synthetic oligonucleotide"
  source: /note="DNA/RNA"
  source: /note="5' tri-ethylene glycol (TEG)"
  modified_base (15)..(15): bicyclic nucleic acid (BNA)
cagucgguaaguuct

SEQ ID NO: 5325 - RNA, 14 nt, Artificial Sequence
  source: /note="Description of Artificial Sequence: Synthetic oligonucleotide"
  source: /note="RNA"
  source: /note="5' tri-ethylene glycol (TEG)"
  modified_base (14)..(14): bicyclic nucleic acid (BNA)
cagucgguaaguuc

SEQ ID NO: 5326 - DNA, 13 bp, Artificial Sequence
  source: /note="Description of Artificial Sequence: Synthetic oligonucleotide"
  source: /note="Description of Combined DNA/RNA Molecule: Synthetic oligonucleotide"
  source: /note="DNA/RNA"
  source: /note="5' tri-ethylene glycol (TEG)"
  modified_base (13)..(13): bicyclic nucleic acid (BNA)
cagucgguaagut

SEQ ID NO: 5327 - DNA, 12 bp, Artificial Sequence
  source: /note="Description of Artificial Sequence: Synthetic oligonucleotide"
  source: /note="Description of Combined DNA/RNA Molecule: Synthetic oligonucleotide"
  source: /note="DNA/RNA"
  source: /note="5' tri-ethylene glycol (TEG)"
  modified_base (12)..(12): bicyclic nucleic acid (BNA)
cagucgguaagt

SEQ ID NO: 5328 - RNA, 20 nt, Artificial Sequence
  source: /note="Description of Artificial Sequence: Synthetic oligonucleotide"
  source: /note="RNA"
  source: /note="5' tri-ethylene glycol (TEG)"
  modified_base (20)..(20): bicyclic nucleic acid (BNA)
ccagucgguaaguucugucc

SEQ ID NO: 5329 - RNA, 19 nt, Artificial Sequence
  source: /note="Description of Artificial Sequence: Synthetic oligonucleotide"
  source: /note="RNA"
  source: /note="5' tri-ethylene glycol (TEG)"
  modified_base (19)..(19): bicyclic nucleic acid (BNA)
ccagucgguaaguucuguc

SEQ ID NO: 5330 - DNA, 18 bp, Artificial Sequence
  source: /note="Description of Artificial Sequence: Synthetic oligonucleotide"
  source: /note="Description of Combined DNA/RNA Molecule: Synthetic oligonucleotide"
  source: /note="DNA/RNA"
  source: /note="5' tri-ethylene glycol (TEG)"
  modified_base (18)..(18): bicyclic nucleic acid (BNA)
ccagucgguaaguucugt

SEQ ID NO: 5331 - RNA, 17 nt, Artificial Sequence
  source: /note="Description of Artificial Sequence: Synthetic oligonucleotide"
  source: /note="RNA"
  source: /note="5' tri-ethylene glycol (TEG)"
  modified_base (17)..(17): bicyclic nucleic acid (BNA)
ccagucgguaaguucug

SEQ ID NO: 5332 - DNA, 16 bp, Artificial Sequence
  source: /note="Description of Artificial Sequence: Synthetic oligonucleotide"
  source: /note="Description of Combined DNA/RNA Molecule: Synthetic oligonucleotide"
  source: /note="DNA/RNA"
  source: /note="5' tri-ethylene glycol (TEG)"
  modified_base (16)..(16): bicyclic nucleic acid (BNA)
ccagucgguaaguuct

SEQ ID NO: 5333 - RNA, 15 nt, Artificial Sequence
  source: /note="Description of Artificial Sequence: Synthetic oligonucleotide"
  source: /note="RNA"
  source: /note="5' tri-ethylene glycol (TEG)"
  modified_base (15)..(15): bicyclic nucleic acid (BNA)
ccagucgguaaguuc

SEQ ID NO: 5334 - DNA, 14 bp, Artificial Sequence
  source: /note="Description of Artificial Sequence: Synthetic oligonucleotide"
  source: /note="Description of Combined DNA/RNA Molecule: Synthetic oligonucleotide"
  source: /note="DNA/RNA"
  source: /note="5' tri-ethylene glycol (TEG)"
  modified_base (14)..(14): bicyclic nucleic acid (BNA)
ccagucgguaagut

SEQ ID NO: 5335 - DNA, 13 bp, Artificial Sequence
  source: /note="Description of Artificial Sequence: Synthetic oligonucleotide"
  source: /note="Description of Combined DNA/RNA Molecule: Synthetic oligonucleotide"
  source: /note="DNA/RNA"
  source: /note="5' tri-ethylene glycol (TEG)"
  modified_base (13)..(13): bicyclic nucleic acid (BNA)
ccagucgguaagt

SEQ ID NO: 5336 - RNA, 20 nt, Artificial Sequence
  source: /note="Description of Artificial Sequence: Synthetic oligonucleotide"
  source: /note="RNA"
  source: /note="5' tri-ethylene glycol (TEG)"
  modified_base (20)..(20): bicyclic nucleic acid (BNA)
gccagucgguaaguucuguc

SEQ ID NO: 5337 - DNA, 19 bp, Artificial Sequence
  source: /note="Description of Artificial Sequence: Synthetic oligonucleotide"
  source: /note="Description of Combined DNA/RNA Molecule: Synthetic oligonucleotide"
  source: /note="DNA/RNA"
  source: /note="5' tri-ethylene glycol (TEG)"
  modified_base (19)..(19): bicyclic nucleic acid (BNA)
gccagucgguaaguucugt

SEQ ID NO: 5338 - RNA, 18 nt, Artificial Sequence
  source: /note="Description of Artificial Sequence: Synthetic oligonucleotide"
  source: /note="RNA"
  source: /note="5' tri-ethylene glycol (TEG)"
  modified_base (18)..(18): bicyclic nucleic acid (BNA)
gccagucgguaaguucug

SEQ ID NO: 5339 - DNA, 17 bp, Artificial Sequence
  source: /note="Description of Artificial Sequence: Synthetic oligonucleotide"
  source: /note="Description of Combined DNA/RNA Molecule: Synthetic oligonucleotide"
  source: /note="DNA/RNA"
  source: /note="5' tri-ethylene glycol (TEG)"
  modified_base (17)..(17): bicyclic nucleic acid (BNA)
gccagucgguaaguuct

SEQ ID NO: 5340 - RNA, 16 nt, Artificial Sequence
  source: /note="Description of Artificial Sequence: Synthetic oligonucleotide"
  source: /note="RNA"
  source: /note="5' tri-ethylene glycol (TEG)"
  modified_base (16)..(16): bicyclic nucleic acid (BNA)
gccagucgguaaguuc

SEQ ID NO: 5341 - DNA, 15 bp, Artificial Sequence
  source: /note="Description of Artificial Sequence: Synthetic oligonucleotide"
  source: /note="Description of Combined DNA/RNA Molecule: Synthetic oligonucleotide"
  source: /note="DNA/RNA"
  source: /note="5' tri-ethylene glycol (TEG)"
  modified_base (15)..(15): bicyclic nucleic acid (BNA)
gccagucgguaagut

SEQ ID NO: 5342 - DNA, 14 bp, Artificial Sequence
  source: /note="Description of Artificial Sequence: Synthetic oligonucleotide"
  source: /note="Description of Combined DNA/RNA Molecule: Synthetic oligonucleotide"
  source: /note="DNA/RNA"
  source: /note="5' tri-ethylene glycol (TEG)"
  modified_base (14)..(14): bicyclic nucleic acid (BNA)
gccagucgguaagt

SEQ ID NO: 5343 - DNA, 20 bp, Artificial Sequence
  source: /note="Description of Artificial Sequence: Synthetic oligonucleotide"
  source: /note="Description of Combined DNA/RNA Molecule: Synthetic oligonucleotide"
  source: /note="DNA/RNA"
  source: /note="5' tri-ethylene glycol (TEG)"
  modified_base (20)..(20): bicyclic nucleic acid (BNA)
ucaaggaagauggcauuuct

SEQ ID NO: 5344 - RNA, 22 nt, Artificial Sequence
  source: /note="Description of Artificial Sequence: Synthetic oligonucleotide"
  source: /note="RNA"
  source: /note="5' tri-ethylene glycol (TEG)"
  modified_base (22)..(22): bicyclic nucleic acid (BNA)
ucaaggaagauggcauuucuag

SEQ ID NO: 5345 - DNA, 16 bp, Artificial Sequence
  source: /note="Description of Artificial Sequence: Synthetic oligonucleotide"
  source: /note="Description of Combined DNA/RNA Molecule: Synthetic oligonucleotide"
  source: /note="DNA/RNA"
  source: /note="5' tri-ethylene glycol (TEG)"
  modified_base (16)..(16): bicyclic nucleic acid (BNA)
ucaaggaagauggcat

SEQ ID NO: 5346 - DNA, 15 bp, Artificial Sequence
  source: /note="Description of Artificial Sequence: Synthetic oligonucleotide"
  source: /note="Description of Combined DNA/RNA Molecule: Synthetic oligonucleotide"
  source: /note="DNA/RNA"
  source: /note="5' tri-ethylene glycol (TEG)"
  modified_base (15)..(15): bicyclic nucleic acid (BNA)
gaagauggcauuuct

SEQ ID NO: 5347 - RNA, 21 nt, Artificial Sequence
  source: /note="Description of Artificial Sequence: Synthetic oligonucleotide"
  source: /note="RNA"
  source: /note="5' tri-ethylene glycol (TEG)"
  modified_base (21)..(21): bicyclic nucleic acid (BNA)
ucaaggaagauggcauuucua

SEQ ID NO: 5348 - RNA, 19 nt, Artificial Sequence
  source: /note="Description of Artificial Sequence: Synthetic oligonucleotide"
  source: /note="RNA"
  source: /note="5' tri-ethylene glycol (TEG)"
  modified_base (19)..(19): bicyclic nucleic acid (BNA)
ucaaggaagauggcauuuc

SEQ ID NO: 5349 - DNA, 18 bp, Artificial Sequence
  source: /note="Description of Artificial Sequence: Synthetic oligonucleotide"
  source: /note="Description of Combined DNA/RNA Molecule: Synthetic oligonucleotide"
  source: /note="DNA/RNA"
  source: /note="5' tri-ethylene glycol (TEG)"
  modified_base (18)..(18): bicyclic nucleic acid (BNA)
ucaaggaagauggcauut

SEQ ID NO: 5350 - DNA, 17 bp, Artificial Sequence
  source: /note="Description of Artificial Sequence: Synthetic oligonucleotide"
  source: /note="Description of Combined DNA/RNA Molecule: Synthetic oligonucleotide"
  source: /note="DNA/RNA"
  source: /note="5' tri-ethylene glycol (TEG)"
  modified_base (17)..(17): bicyclic nucleic acid (BNA)
ucaaggaagauggcaut

SEQ ID NO: 5351 - RNA, 15 nt, Artificial Sequence
  source: /note="Description of Artificial Sequence: Synthetic oligonucleotide"
  source: /note="RNA"
  source: /note="5' tri-ethylene glycol (TEG)"
  modified_base (15)..(15): bicyclic nucleic acid (BNA)
ucaaggaagauggca

SEQ ID NO: 5352 - RNA, 14 nt, Artificial Sequence
  source: /note="Description of Artificial Sequence: Synthetic oligonucleotide"
  source: /note="RNA"
  source: /note="5' tri-ethylene glycol (TEG)"
  modified_base (14)..(14): bicyclic nucleic acid (BNA)
ucaaggaagauggc

SEQ ID NO: 5353 - RNA, 13 nt, Artificial Sequence
  source: /note="Description of Artificial Sequence: Synthetic oligonucleotide"
  source: /note="RNA"
  source: /note="5' tri-ethylene glycol (TEG)"
  modified_base (13)..(13): bicyclic nucleic acid (BNA)
ucaaggaagaugg

SEQ ID NO: 5354 - RNA, 12 nt, Artificial Sequence
  source: /note="Description of Artificial Sequence: Synthetic oligonucleotide"
  source: /note="RNA"
  source: /note="5' tri-ethylene glycol (TEG)"
  modified_base (12)..(12): bicyclic nucleic acid (BNA)
ucaaggaagaug

SEQ ID NO: 5355 - DNA, 11 bp, Artificial Sequence
  source: /note="Description of Artificial Sequence: Synthetic oligonucleotide"
  source: /note="Description of Combined DNA/RNA Molecule: Synthetic oligonucleotide"
  source: /note="DNA/RNA"
  source: /note="5' tri-ethylene glycol (TEG)"
  modified_base (11)..(11): bicyclic nucleic acid (BNA)
ucaaggaagat

SEQ ID NO: 5356 - RNA, 10 nt, Artificial Sequence
  source: /note="Description of Artificial Sequence: Synthetic oligonucleotide"
  source: /note="RNA"
  source: /note="5' tri-ethylene glycol (TEG)"
  modified_base (10)..(10): bicyclic nucleic acid (BNA)
ucaaggaaga

SEQ ID NO: 5357 - RNA, 9 nt, Artificial Sequence
  source: /note="Description of Artificial Sequence: Synthetic oligonucleotide"
  source: /note="RNA"
  source: /note="5' tri-ethylene glycol (TEG)"
  modified_base (9)..(9): bicyclic nucleic acid (BNA)
ucaaggaag

SEQ ID NO: 5358 - RNA, 21 nt, Artificial Sequence
  source: /note="Description of Artificial Sequence: Synthetic oligonucleotide"
  source: /note="RNA"
  source: /note="5' tri-ethylene glycol (TEG)"
  modified_base (21)..(21): bicyclic nucleic acid (BNA)
caaggaagauggcauuucuag

SEQ ID NO: 5359 - RNA, 20 nt, Artificial Sequence
  source: /note="Description of Artificial Sequence: Synthetic oligonucleotide"
  source: /note="RNA"
  source: /note="5' tri-ethylene glycol (TEG)"
  modified_base (20)..(20): bicyclic nucleic acid (BNA)
caaggaagauggcauuucua

SEQ ID NO: 5360 - DNA, 19 bp, Artificial Sequence
  source: /note="Description of Artificial Sequence: Synthetic oligonucleotide"
  source: /note="Description of Combined DNA/RNA Molecule: Synthetic oligonucleotide"
  source: /note="DNA/RNA"
  source: /note="5' tri-ethylene glycol (TEG)"
  modified_base (19)..(19): bicyclic nucleic acid (BNA)
caaggaagauggcauuuct

SEQ ID NO: 5361 - RNA, 18 nt, Artificial Sequence
  source: /note="Description of Artificial Sequence: Synthetic oligonucleotide"
  source: /note="RNA"
  source: /note="5' tri-ethylene glycol (TEG)"
  modified_base (18)..(18): bicyclic nucleic acid (BNA)
caaggaagauggcauuuc

SEQ ID NO: 5362 - DNA, 17 bp, Artificial Sequence
  source: /note="Description of Artificial Sequence: Synthetic oligonucleotide"
  source: /note="Description of Combined DNA/RNA Molecule: Synthetic oligonucleotide"
  source: /note="DNA/RNA"
  source: /note="5' tri-ethylene glycol (TEG)"
  modified_base (17)..(17): bicyclic nucleic acid (BNA)
caaggaagauggcauut

SEQ ID NO: 5363 - DNA, 16 bp, Artificial Sequence
  source: /note="Description of Artificial Sequence: Synthetic oligonucleotide"
  source: /note="Description of Combined DNA/RNA Molecule: Synthetic oligonucleotide"
  source: /note="DNA/RNA"
  source: /note="5' tri-ethylene glycol (TEG)"
  modified_base (16)..(16): bicyclic nucleic acid (BNA)
caaggaagauggcaut

SEQ ID NO: 5364 - DNA, 15 bp, Artificial Sequence
  source: /note="Description of Artificial Sequence: Synthetic oligonucleotide"
  source: /note="Description of Combined DNA/RNA Molecule: Synthetic oligonucleotide"
  source: /note="DNA/RNA"
  source: /note="5' tri-ethylene glycol (TEG)"
  modified_base (15)..(15): bicyclic nucleic acid (BNA)
caaggaagauggcat

SEQ ID NO: 5365 - RNA, 14 nt, Artificial Sequence
  source: /note="Description of Artificial Sequence: Synthetic oligonucleotide"
  source: /note="RNA"
  source: /note="5' tri-ethylene glycol (TEG)"
  modified_base (14)..(14): bicyclic nucleic acid (BNA)
caaggaagauggca

SEQ ID NO: 5366 - RNA, 13 nt, Artificial Sequence
  source: /note="Description of Artificial Sequence: Synthetic oligonucleotide"
  source: /note="RNA"
  source: /note="5' tri-ethylene glycol (TEG)"
  modified_base (13)..(13): bicyclic nucleic acid (BNA)
caaggaagauggc

SEQ ID NO: 5367 - RNA, 12 nt, Artificial Sequence
  source: /note="Description of Artificial Sequence: Synthetic oligonucleotide"
  source: /note="RNA"
  source: /note="5' tri-ethylene glycol (TEG)"
  modified_base (12)..(12): bicyclic nucleic acid (BNA)
caaggaagaugg

SEQ ID NO: 5368 - RNA, 11 nt, Artificial Sequence
  source: /note="Description of Artificial Sequence: Synthetic oligonucleotide"
  source: /note="RNA"
  source: /note="5' tri-ethylene glycol (TEG)"
  modified_base (11)..(11): bicyclic nucleic acid (BNA)
caaggaagaug

SEQ ID NO: 5369 - DNA, 10 bp, Artificial Sequence
  source: /note="Description of Artificial Sequence: Synthetic oligonucleotide"
  source: /note="DNA/RNA"
  source: /note="5' tri-ethylene glycol (TEG)"
  modified_base (10)..(10): bicyclic nucleic acid (BNA)
caaggaagat

SEQ ID NO: 5370 - RNA, 9 nt, Artificial Sequence
  source: /note="Description of Artificial Sequence: Synthetic oligonucleotide"
  source: /note="RNA/Antisense Oligonucleotide"
  source: /note="5' tri-ethylene glycol (TEG)"
  modified_base (9)..(9): bicyclic nucleic acid (BNA)
caaggaaga

SEQ ID NO: 5371 - RNA, 8 nt, Artificial Sequence
  source: /note="Description of Artificial Sequence: Synthetic oligonucleotide"
  source: /note="RNA/Antisense Oligonucleotide"
  source: /note="5' tri-ethylene glycol (TEG)"
  modified_base (8)..(8): bicyclic nucleic acid (BNA)
caaggaag

SEQ ID NO: 5372 - RNA, 20 nt, Artificial Sequence
  source: /note="Description of Artificial Sequence: Synthetic oligonucleotide"
  source: /note="RNA"
  source: /note="5' tri-ethylene glycol (TEG)"
  modified_base (20)..(20): bicyclic nucleic acid (BNA)
aaggaagauggcauuucuag

SEQ ID NO: 5373 - RNA, 19 nt, Artificial Sequence
  source: /note="Description of Artificial Sequence: Synthetic oligonucleotide"
  source: /note="RNA"
  source: /note="5' tri-ethylene glycol (TEG)"
  modified_base (19)..(19): bicyclic nucleic acid (BNA)
aaggaagauggcauuucua

SEQ ID NO: 5374 - DNA, 18 bp, Artificial Sequence
  source: /note="Description of Artificial Sequence: Synthetic oligonucleotide"
  source: /note="Description of Combined DNA/RNA Molecule: Synthetic oligonucleotide"
  source: /note="DNA/RNA"
  source: /note="5' tri-ethylene glycol (TEG)"
  modified_base (18)..(18): bicyclic nucleic acid (BNA)
aaggaagauggcauuuct

SEQ ID NO: 5375 - RNA, 17 nt, Artificial Sequence
  source: /note="Description of Artificial Sequence: Synthetic oligonucleotide"
  source: /note="RNA"
  source: /note="5' tri-ethylene glycol (TEG)"
  modified_base (17)..(17): bicyclic nucleic acid (BNA)
aaggaagauggcauuuc

SEQ ID NO: 5376 - DNA, 16 bp, Artificial Sequence
  source: /note="Description of Artificial Sequence: Synthetic oligonucleotide"
  source: /note="Description of Combined DNA/RNA Molecule: Synthetic oligonucleotide"
  source: /note="DNA/RNA"
  source: /note="5' tri-ethylene glycol (TEG)"
  modified_base (16)..(16): bicyclic nucleic acid (BNA)
aaggaagauggcauut

SEQ ID NO: 5377 - DNA, 15 bp, Artificial Sequence
  source: /note="Description of Artificial Sequence: Synthetic oligonucleotide"
  source: /note="Description of Combined DNA/RNA Molecule: Synthetic oligonucleotide"
  source: /note="DNA/RNA"
  source: /note="5' tri-ethylene glycol (TEG)"
  modified_base (15)..(15): bicyclic nucleic acid (BNA)
aaggaagauggcaut

SEQ ID NO: 5378 - DNA, 14 bp, Artificial Sequence
  source: /note="Description of Artificial Sequence: Synthetic oligonucleotide"
  source: /note="Description of Combined DNA/RNA Molecule: Synthetic oligonucleotide"
  source: /note="DNA/RNA"
  source: /note="5' tri-ethylene glycol (TEG)"
  modified_base (14)..(14): bicyclic nucleic acid (BNA)
aaggaagauggcat

SEQ ID NO: 5379 - RNA, 13 nt, Artificial Sequence
  source: /note="Description of Artificial Sequence: Synthetic oligonucleotide"
  source: /note="RNA"
  source: /note="5' tri-ethylene glycol (TEG)"
  modified_base (13)..(13): bicyclic nucleic acid (BNA)
aaggaagauggca

SEQ ID NO: 5380 - RNA, 12 nt, Artificial Sequence
  source: /note="Description of Artificial Sequence: Synthetic oligonucleotide"
  source: /note="RNA"
  source: /note="5' tri-ethylene glycol (TEG)"
  modified_base (12)..(12): bicyclic nucleic acid (BNA)
aaggaagauggc

SEQ ID NO: 5381 - RNA, 11 nt, Artificial Sequence
  source: /note="Description of Artificial Sequence: Synthetic oligonucleotide"
  source: /note="RNA"
  source: /note="5' tri-ethylene glycol (TEG)"
  modified_base (11)..(11): bicyclic nucleic acid (BNA)
aaggaagaugg

SEQ ID NO: 5382 - RNA, 10 nt, Artificial Sequence
  source: /note="Description of Artificial Sequence: Synthetic oligonucleotide"
  source: /note="RNA"
  source: /note="5' tri-ethylene glycol (TEG)"
  modified_base (10)..(10): bicyclic nucleic acid (BNA)
aaggaagaug

SEQ ID NO: 5383 - DNA, 9 bp, Artificial Sequence
  source: /note="Description of Artificial Sequence: Synthetic oligonucleotide"
  source: /note="DNA/RNA"
  source: /note="5' tri-ethylene glycol (TEG)"
  modified_base (9)..(9): bicyclic nucleic acid (BNA)
aaggaagat

SEQ ID NO: 5384 - RNA, 8 nt, Artificial Sequence
  source: /note="Description of Artificial Sequence: Synthetic oligonucleotide"
  source: /note="RNA/Antisense Oligonucleotide"
  source: /note="5' tri-ethylene glycol (TEG)"
  modified_base (8)..(8): bicyclic nucleic acid (BNA)
aaggaaga

SEQ ID NO: 5385 - RNA, 19 nt, Artificial Sequence
  source: /note="Description of Artificial Sequence: Synthetic oligonucleotide"
  source: /note="RNA"
  source: /note="5' tri-ethylene glycol (TEG)"
  modified_base (19)..(19): bicyclic nucleic acid (BNA)
aggaagauggcauuucuag

SEQ ID NO: 5386 - RNA, 18 nt, Artificial Sequence
  source: /note="Description of Artificial Sequence: Synthetic oligonucleotide"
  source: /note="RNA"
  source: /note="5' tri-ethylene glycol (TEG)"
  modified_base (18)..(18): bicyclic nucleic acid (BNA)
aggaagauggcauuucua

SEQ ID NO: 5387 - DNA, 17 bp, Artificial Sequence
  source: /note="Description of Artificial Sequence: Synthetic oligonucleotide"
  source: /note="Description of Combined DNA/RNA Molecule: Synthetic oligonucleotide"
  source: /note="DNA/RNA"
  source: /note="5' tri-ethylene glycol (TEG)"
  modified_base (17)..(17): bicyclic nucleic acid (BNA)
aggaagauggcauuuct

SEQ ID NO: 5388 - RNA, 16 nt, Artificial Sequence
  source: /note="Description of Artificial Sequence: Synthetic oligonucleotide"
  source: /note="RNA"
  source: /note="5' tri-ethylene glycol (TEG)"
  modified_base (16)..(16): bicyclic nucleic acid (BNA)
aggaagauggcauuuc

SEQ ID NO: 5389 - DNA, 15 bp, Artificial Sequence
  source: /note="Description of Artificial Sequence: Synthetic oligonucleotide"
  source: /note="Description of Combined DNA/RNA Molecule: Synthetic oligonucleotide"
  source: /note="DNA/RNA"
  source: /note="5' tri-ethylene glycol (TEG)"
  modified_base (15)..(15): bicyclic nucleic acid (BNA)
aggaagauggcauut

SEQ ID NO: 5390 - DNA, 14 bp, Artificial Sequence
  source: /note="Description of Artificial Sequence: Synthetic oligonucleotide"
  source: /note="Description of Combined DNA/RNA Molecule: Synthetic oligonucleotide"
  source: /note="DNA/RNA"
  source: /note="5' tri-ethylene glycol (TEG)"
  modified_base (14)..(14): bicyclic nucleic acid (BNA)
aggaagauggcaut

SEQ ID NO: 5391 - DNA, 13 bp, Artificial Sequence
  source: /note="Description of Artificial Sequence: Synthetic oligonucleotide"
  source: /note="Description of Combined DNA/RNA Molecule: Synthetic oligonucleotide"
  source: /note="DNA/RNA"
  source: /note="5' tri-ethylene glycol (TEG)"
  modified_base (13)..(13): bicyclic nucleic acid (BNA)
aggaagauggcat

SEQ ID NO: 5392 - RNA, 12 nt, Artificial Sequence
  source: /note="Description of Artificial Sequence: Synthetic oligonucleotide"
  source: /note="RNA"
  source: /note="5' tri-ethylene glycol (TEG)"
  modified_base (12)..(12): bicyclic nucleic acid (BNA)
aggaagauggca

SEQ ID NO: 5393 - RNA, 10 nt, Artificial Sequence
  source: /note="Description of Artificial Sequence: Synthetic oligonucleotide"
  source: /note="RNA"
  source: /note="5' tri-ethylene glycol (TEG)"
  modified_base (10)..(10): bicyclic nucleic acid (BNA)
aggaagaugg

SEQ ID NO: 5394 - RNA, 9 nt, Artificial Sequence
  source: /note="Description of Artificial Sequence: Synthetic oligonucleotide"
  source: /note="RNA"
  source: /note="5' tri-ethylene glycol (TEG)"
  modified_base (9)..(9): bicyclic nucleic acid (BNA)
aggaagaug

SEQ ID NO: 5395 - DNA, 8 bp, Artificial Sequence
  source: /note="Description of Artificial Sequence: Synthetic oligonucleotide"
  source: /note="DNA/RNA"
  source: /note="5' tri-ethylene glycol (TEG)"
  modified_base (8)..(8): bicyclic nucleic acid (BNA)
aggaagat

SEQ ID NO: 5396 - RNA, 18 nt, Artificial Sequence
  source: /note="Description of Artificial Sequence: Synthetic oligonucleotide"
  source: /note="RNA"
  source: /note="5' tri-ethylene glycol (TEG)"
  modified_base (18)..(18): bicyclic nucleic acid (BNA)
ggaagauggcauuucuag

SEQ ID NO: 5397 - RNA, 17 nt, Artificial Sequence
  source: /note="Description of Artificial Sequence: Synthetic oligonucleotide"
  source: /note="RNA"
  source: /note="5' tri-ethylene glycol (TEG)"
  modified_base (17)..(17): bicyclic nucleic acid (BNA)
ggaagauggcauuucua

SEQ ID NO: 5398 - DNA, 16 bp, Artificial Sequence
  source: /note="Description of Artificial Sequence: Synthetic oligonucleotide"
  source: /note="Description of Combined DNA/RNA Molecule: Synthetic oligonucleotide"
  source: /note="DNA/RNA"
  source: /note="5' tri-ethylene glycol (TEG)"
  modified_base (16)..(16): bicyclic nucleic acid (BNA)
ggaagauggcauuuct

SEQ ID NO: 5399 - RNA, 15 nt, Artificial Sequence
  source: /note="Description of Artificial Sequence: Synthetic oligonucleotide"
  source: /note="RNA"
  source: /note="5' tri-ethylene glycol (TEG)"
  modified_base (15)..(15): bicyclic nucleic acid (BNA)
ggaagauggcauuuc

SEQ ID NO: 5400 - DNA, 14 bp, Artificial Sequence
  source: /note="Description of Artificial Sequence: Synthetic oligonucleotide"
  source: /note="Description of Combined DNA/RNA Molecule: Synthetic oligonucleotide"
  source: /note="DNA/RNA"
  source: /note="5' tri-ethylene glycol (TEG)"
  modified_base (14)..(14): bicyclic nucleic acid (BNA)
ggaagauggcauut

SEQ ID NO: 5401 - DNA, 13 bp, Artificial Sequence
  source: /note="Description of Artificial Sequence: Synthetic oligonucleotide"
  source: /note="Description of Combined DNA/RNA Molecule: Synthetic oligonucleotide"
  source: /note="DNA/RNA"
  source: /note="5' tri-ethylene glycol (TEG)"
  modified_base (13)..(13): bicyclic nucleic acid (BNA)
ggaagauggcaut

SEQ ID NO: 5402 - DNA, 12 bp, Artificial Sequence
  source: /note="Description of Artificial Sequence: Synthetic oligonucleotide"
  source: /note="Description of Combined DNA/RNA Molecule: Synthetic oligonucleotide"
  source: /note="DNA/RNA"
  source: /note="5' tri-ethylene glycol (TEG)"
  modified_base (12)..(12): bicyclic nucleic acid (BNA)
ggaagauggcat

SEQ ID NO: 5403 - RNA, 11 nt, Artificial Sequence
  source: /note="Description of Artificial Sequence: Synthetic oligonucleotide"
  source: /note="RNA"
  source: /note="5' tri-ethylene glycol (TEG)"
  modified_base (11)..(11): bicyclic nucleic acid (BNA)
ggaagauggca

SEQ ID NO: 5404 - RNA, 10 nt, Artificial Sequence
  source: /note="Description of Artificial Sequence: Synthetic oligonucleotide"
  source: /note="RNA"
  source: /note="5' tri-ethylene glycol (TEG)"
  modified_base (10)..(10): bicyclic nucleic acid (BNA)
ggaagauggc

SEQ ID NO: 5405 - RNA, 8 nt, Artificial Sequence
  source: /note="Description of Artificial Sequence: Synthetic oligonucleotide"
  source: /note="RNA"
  source: /note="5' tri-ethylene glycol (TEG)"
  modified_base (8)..(8): bicyclic nucleic acid (BNA)
ggaagaug

SEQ ID NO: 5406 - RNA, 17 nt, Artificial Sequence
  source: /note="Description of Artificial Sequence: Synthetic oligonucleotide"
  source: /note="RNA"
  source: /note="5' tri-ethylene glycol (TEG)"
  modified_base (17)..(17): bicyclic nucleic acid (BNA)
gaagauggcauuucuag

SEQ ID NO: 5407 - RNA, 16 nt, Artificial Sequence
  source: /note="Description of Artificial Sequence: Synthetic oligonucleotide"
  source: /note="RNA"
  source: /note="5' tri-ethylene glycol (TEG)"
  modified_base (16)..(16): bicyclic nucleic acid (BNA)
gaagauggcauuucua

SEQ ID NO: 5408 - RNA, 14 nt, Artificial Sequence
  source: /note="Description of Artificial Sequence: Synthetic oligonucleotide"
  source: /note="RNA"
  source: /note="5' tri-ethylene glycol (TEG)"
  modified_base (14)..(14): bicyclic nucleic acid (BNA)
gaagauggcauuuc

SEQ ID NO: 5409 - DNA, 13 bp, Artificial Sequence
  source: /note="Description of Artificial Sequence: Synthetic oligonucleotide"
  source: /note="Description of Combined DNA/RNA Molecule: Synthetic oligonucleotide"
  source: /note="DNA/RNA"
  source: /note="5' tri-ethylene glycol (TEG)"
  modified_base (13)..(13): bicyclic nucleic acid (BNA)
gaagauggcauut

SEQ ID NO: 5410 - DNA, 12 bp, Artificial Sequence
  source: /note="Description of Artificial Sequence: Synthetic oligonucleotide"
  source: /note="Description of Combined DNA/RNA Molecule: Synthetic oligonucleotide"
  source: /note="DNA/RNA"
  source: /note="5' tri-ethylene glycol (TEG)"
  modified_base (12)..(12): bicyclic nucleic acid (BNA)
gaagauggcaut

SEQ ID NO: 5411 - DNA, 11 bp, Artificial Sequence
  source: /note="Description of Artificial Sequence: Synthetic oligonucleotide"
  source: /note="Description of Combined DNA/RNA Molecule: Synthetic oligonucleotide"
  source: /note="DNA/RNA"
  source: /note="5' tri-ethylene glycol (TEG)"
  modified_base (11)..(11): bicyclic nucleic acid (BNA)
gaagauggcat

SEQ ID NO: 5412 - RNA, 10 nt, Artificial Sequence
  source: /note="Description of Artificial Sequence: Synthetic oligonucleotide"
  source: /note="RNA"
  source: /note="5' tri-ethylene glycol (TEG)"
  modified_base (10)..(10): bicyclic nucleic acid (BNA)
gaagauggca

SEQ ID NO: 5413 - RNA, 9 nt, Artificial Sequence
  source: /note="Description of Artificial Sequence: Synthetic oligonucleotide"
  source: /note="RNA"
  source: /note="5' tri-ethylene glycol (TEG)"
  modified_base (9)..(9): bicyclic nucleic acid (BNA)
gaagauggc

SEQ ID NO: 5414 - RNA, 8 nt, Artificial Sequence
  source: /note="Description of Artificial Sequence: Synthetic oligonucleotide"
  source: /note="RNA"
  source: /note="5' tri-ethylene glycol (TEG)"
  modified_base (8)..(8): bicyclic nucleic acid (BNA)
gaagaugg

SEQ ID NO: 5415 - RNA, 16 nt, Artificial Sequence
  source: /note="Description of Artificial Sequence: Synthetic oligonucleotide"
  source: /note="RNA"
  source: /note="5' tri-ethylene glycol (TEG)"
  modified_base (16)..(16): bicyclic nucleic acid (BNA)
aagauggcauuucuag

SEQ ID NO: 5416 - RNA, 15 nt, Artificial Sequence
  source: /note="Description of Artificial Sequence: Synthetic oligonucleotide"
  source: /note="RNA"
  source: /note="5' tri-ethylene glycol (TEG)"
  modified_base (15)..(15): bicyclic nucleic acid (BNA)
aagauggcauuucua

SEQ ID NO: 5417 - DNA, 14 bp, Artificial Sequence
  source: /note="Description of Artificial Sequence: Synthetic oligonucleotide"
  source: /note="Description of Combined DNA/RNA Molecule: Synthetic oligonucleotide"
  source: /note="DNA/RNA"
  source: /note="5' tri-ethylene glycol (TEG)"
  modified_base (14)..(14): bicyclic nucleic acid (BNA)
aagauggcauuuct

SEQ ID NO: 5418 - RNA, 13 nt, Artificial Sequence
  source: /note="Description of Artificial Sequence: Synthetic oligonucleotide"
  source: /note="RNA"
  source: /note="5' tri-ethylene glycol (TEG)"
  modified_base (13)..(13): bicyclic nucleic acid (BNA)
aagauggcauuuc

SEQ ID NO: 5419 - DNA, 12 bp, Artificial Sequence
  source: /note="Description of Artificial Sequence: Synthetic oligonucleotide"
  source: /note="Description of Combined DNA/RNA Molecule: Synthetic oligonucleotide"
  source: /note="DNA/RNA"
  source: /note="5' tri-ethylene glycol (TEG)"
  modified_base (12)..(12): bicyclic nucleic acid (BNA)
aagauggcauut

SEQ ID NO: 5420 - DNA, 11 bp, Artificial Sequence
  source: /note="Description of Artificial Sequence: Synthetic oligonucleotide"
  source: /note="Description of Combined DNA/RNA Molecule: Synthetic oligonucleotide"
  source: /note="DNA/RNA"
  source: /note="5' tri-ethylene glycol (TEG)"
  modified_base (11)..(11): bicyclic nucleic acid (BNA)
aagauggcaut

SEQ ID NO: 5421 - DNA, 10 bp, Artificial Sequence
  source: /note="Description of Artificial Sequence: Synthetic oligonucleotide"
  source: /note="Description of Combined DNA/RNA Molecule: Synthetic oligonucleotide"
  source: /note="DNA/RNA"
  source: /note="5' tri-ethylene glycol (TEG)"
  modified_base (10)..(10): bicyclic nucleic acid (BNA)
aagauggcat

SEQ ID NO: 5422 - RNA, 9 nt, Artificial Sequence
  source: /note="Description of Artificial Sequence: Synthetic oligonucleotide"
  source: /note="RNA"
  source: /note="5' tri-ethylene glycol (TEG)"
  modified_base (9)..(9): bicyclic nucleic acid (BNA)
aagauggca

SEQ ID NO: 5423 - RNA, 8 nt, Artificial Sequence
  source: /note="Description of Artificial Sequence: Synthetic oligonucleotide"
  source: /note="RNA"
  source: /note="5' tri-ethylene glycol (TEG)"
  modified_base (8)..(8): bicyclic nucleic acid (BNA)
aagauggc

SEQ ID NO: 5424 - RNA, 15 nt, Artificial Sequence
  source: /note="Description of Artificial Sequence: Synthetic oligonucleotide"
  source: /note="RNA"
  source: /note="5' tri-ethylene glycol (TEG)"
  modified_base (15)..(15): bicyclic nucleic acid (BNA)
agauggcauuucuag

SEQ ID NO: 5425 - RNA, 14 nt, Artificial Sequence
  source: /note="Description of Artificial Sequence: Synthetic oligonucleotide"
  source: /note="RNA"
  source: /note="5' tri-ethylene glycol (TEG)"
  modified_base (14)..(14): bicyclic nucleic acid (BNA)
agauggcauuucua

SEQ ID NO: 5426 - DNA, 13 bp, Artificial Sequence
  source: /note="Description of Artificial Sequence: Synthetic oligonucleotide"
  source: /note="Description of Combined DNA/RNA Molecule: Synthetic oligonucleotide"
  source: /note="DNA/RNA"
  source: /note="5' tri-ethylene glycol (TEG)"
  modified_base (13)..(13): bicyclic nucleic acid (BNA)
agauggcauuuct

SEQ ID NO: 5427 - RNA, 12 nt, Artificial Sequence
  source: /note="Description of Artificial Sequence: Synthetic oligonucleotide"
  source: /note="RNA"
  source: /note="5' tri-ethylene glycol (TEG)"
  modified_base (12)..(12): bicyclic nucleic acid (BNA)
agauggcauuuc

SEQ ID NO: 5428 - DNA, 11 bp, Artificial Sequence
  source: /note="Description of Artificial Sequence: Synthetic oligonucleotide"
  source: /note="Description of Combined DNA/RNA Molecule: Synthetic oligonucleotide"
  source: /note="DNA/RNA"
  source: /note="5' tri-ethylene glycol (TEG)"
  modified_base (11)..(11): bicyclic nucleic acid (BNA)
agauggcauut

SEQ ID NO: 5429 - DNA, 10 bp, Artificial Sequence
  source: /note="Description of Artificial Sequence: Synthetic oligonucleotide"
  source: /note="Description of Combined DNA/RNA Molecule: Synthetic oligonucleotide"
  source: /note="DNA/RNA"
  source: /note="5' tri-ethylene glycol (TEG)"
  modified_base (10)..(10): bicyclic nucleic acid (BNA)
agauggcaut

SEQ ID NO: 5430 - DNA, 9 bp, Artificial Sequence
  source: /note="Description of Artificial Sequence: Synthetic oligonucleotide"
  source: /note="Description of Combined DNA/RNA Molecule: Synthetic oligonucleotide"
  source: /note="DNA/RNA"
  source: /note="5' tri-ethylene glycol (TEG)"
  modified_base (9)..(9): bicyclic nucleic acid (BNA)
agauggcat

SEQ ID NO: 5431 - RNA, 8 nt, Artificial Sequence
  source: /note="Description of Artificial Sequence: Synthetic oligonucleotide"
  source: /note="RNA"
  source: /note="5' tri-ethylene glycol (TEG)"
  modified_base (8)..(8): bicyclic nucleic acid (BNA)
agauggca

SEQ ID NO: 5432 - RNA, 30 nt, Artificial Sequence; identical to SEQ ID NO: 284
  source: /note="Description of Artificial Sequence: Synthetic oligonucleotide"
  source: /note="RNA"
  source: /note="5' tri-ethylene glycol (TEG)"
  modified_base (30)..(30): bicyclic nucleic acid (BNA)

SEQ ID NO: 5433 - RNA, 29 nt, Artificial Sequence
  source: /note="Description of Artificial Sequence: Synthetic oligonucleotide"
  source: /note="RNA"
  source: /note="5' tri-ethylene glycol (TEG)"
  modified_base (29)..(29): bicyclic nucleic acid (BNA)
cuccaacaucaaggaagauggcauuucua

SEQ ID NO: 5434 - DNA, 28 bp, Artificial Sequence
  source: /note="Description of Artificial Sequence: Synthetic oligonucleotide"
  source: /note="Description of Combined DNA/RNA Molecule: Synthetic oligonucleotide"
  source: /note="DNA/RNA"
  source: /note="5' tri-ethylene glycol (TEG)"
  modified_base (28)..(28): bicyclic nucleic acid (BNA)
cuccaacaucaaggaagauggcauuuct

SEQ ID NO: 5435 - RNA, 27 nt, Artificial Sequence
  source: /note="Description of Artificial Sequence: Synthetic oligonucleotide"
  source: /note="RNA"
  source: /note="5' tri-ethylene glycol (TEG)"
  modified_base (27)..(27): bicyclic nucleic acid (BNA)
cuccaacaucaaggaagauggcauuuc

SEQ ID NO: 5436 - DNA, 26 bp, Artificial Sequence
  source: /note="Description of Artificial Sequence: Synthetic oligonucleotide"
  source: /note="Description of Combined DNA/RNA Molecule: Synthetic oligonucleotide"
  source: /note="DNA/RNA"
  source: /note="5' tri-ethylene glycol (TEG)"
  modified_base (26)..(26): bicyclic nucleic acid (BNA)
cuccaacaucaaggaagauggcauut

SEQ ID NO: 5437 - DNA, 25 bp, Artificial Sequence
  source: /note="Description of Artificial Sequence: Synthetic oligonucleotide"
  source: /note="Description of Combined DNA/RNA Molecule: Synthetic oligonucleotide"
  source: /note="DNA/RNA"
  source: /note="5' tri-ethylene glycol (TEG)"
  modified_base (25)..(25): bicyclic nucleic acid (BNA)
cuccaacaucaaggaagauggcaut

SEQ ID NO: 5438 - DNA, 24 bp, Artificial Sequence
  source: /note="Description of Artificial Sequence: Synthetic oligonucleotide"
  source: /note="Description of Combined DNA/RNA Molecule: Synthetic oligonucleotide"
  source: /note="DNA/RNA"
  source: /note="5' tri-ethylene glycol (TEG)"
  modified_base (24)..(24): bicyclic nucleic acid (BNA)
cuccaacaucaaggaagauggcat

SEQ ID NO: 5439 - RNA, 23 nt, Artificial Sequence
  source: /note="Description of Artificial Sequence: Synthetic oligonucleotide"
  source: /note="RNA"
  source: /note="5' tri-ethylene glycol (TEG)"
  modified_base (23)..(23): bicyclic nucleic acid (BNA)
cuccaacaucaaggaagauggca

SEQ ID NO: 5440 - RNA, 22 nt, Artificial Sequence
  source: /note="Description of Artificial Sequence: Synthetic oligonucleotide"
  source: /note="RNA"
  source: /note="5' tri-ethylene glycol (TEG)"
  modified_base (22)..(22): bicyclic nucleic acid (BNA)
cuccaacaucaaggaagauggc

SEQ ID NO: 5441 - RNA, 21 nt, Artificial Sequence
  source: /note="Description of Artificial Sequence: Synthetic oligonucleotide"
  source: /note="RNA"
  source: /note="5' tri-ethylene glycol (TEG)"
  modified_base (21)..(21): bicyclic nucleic acid (BNA)
cuccaacaucaaggaagaugg

SEQ ID NO: 5442 - RNA, 20 nt, Artificial Sequence
  source: /note="Description of Artificial Sequence: Synthetic oligonucleotide"
  source: /note="RNA"
  source: /note="5' tri-ethylene glycol (TEG)"
  modified_base (20)..(20): bicyclic nucleic acid (BNA)
cuccaacaucaaggaagaug

SEQ ID NO: 5443 - DNA, 19 bp, Artificial Sequence
  source: /note="Description of Artificial Sequence: Synthetic oligonucleotide"
  source: /note="Description of Combined DNA/RNA Molecule: Synthetic oligonucleotide"
  source: /note="DNA/RNA"
  source: /note="5' tri-ethylene glycol (TEG)"
  modified_base (19)..(19): bicyclic nucleic acid (BNA)
cuccaacaucaaggaagat

SEQ ID NO: 5444 - RNA, 18 nt, Artificial Sequence
  source: /note="Description of Artificial Sequence: Synthetic oligonucleotide"
  source: /note="RNA"
  source: /note="5' tri-ethylene glycol (TEG)"
  modified_base (18)..(18): bicyclic nucleic acid (BNA)
cuccaacaucaaggaaga

SEQ ID NO: 5445 - RNA, 17 nt, Artificial Sequence
  source: /note="Description of Artificial Sequence: Synthetic oligonucleotide"
  source: /note="RNA"
  source: /note="5' tri-ethylene glycol (TEG)"
  modified_base (17)..(17): bicyclic nucleic acid (BNA)
cuccaacaucaaggaag

SEQ ID NO: 5446 - RNA, 29 nt, Artificial Sequence
  source: /note="Description of Artificial Sequence: Synthetic oligonucleotide"
  source: /note="RNA"
  source: /note="5' tri-ethylene glycol (TEG)"
  modified_base (29)..(29): bicyclic nucleic acid (BNA)
uccaacaucaaggaagauggcauuucuag

SEQ ID NO: 5447 - RNA, 28 nt, Artificial Sequence
  source: /note="Description of Artificial Sequence: Synthetic oligonucleotide"
  source: /note="RNA"
  source: /note="5' tri-ethylene glycol (TEG)"
  modified_base (28)..(28): bicyclic nucleic acid (BNA)
uccaacaucaaggaagauggcauuucua

SEQ ID NO: 5448 - DNA, 27 bp, Artificial Sequence
  source: /note="Description of Artificial Sequence: Synthetic oligonucleotide"
  source: /note="Description of Combined DNA/RNA Molecule: Synthetic oligonucleotide"
  source: /note="DNA/RNA"
  source: /note="5' tri-ethylene glycol (TEG)"
  modified_base (27)..(27): bicyclic nucleic acid (BNA)
uccaacaucaaggaagauggcauuuct

SEQ ID NO: 5449 - RNA, 26 nt, Artificial Sequence
  source: /note="Description of Artificial Sequence: Synthetic oligonucleotide"
  source: /note="RNA"
  source: /note="5' tri-ethylene glycol (TEG)"
  modified_base (26)..(26): bicyclic nucleic acid (BNA)
uccaacaucaaggaagauggcauuuc

SEQ ID NO: 5450 - DNA, 25 bp, Artificial Sequence
  source: /note="Description of Artificial Sequence: Synthetic oligonucleotide"
  source: /note="Description of Combined DNA/RNA Molecule: Synthetic oligonucleotide"
  source: /note="DNA/RNA"
  source: /note="5' tri-ethylene glycol (TEG)"
  modified_base (25)..(25): bicyclic nucleic acid (BNA)
uccaacaucaaggaagauggcauut

SEQ ID NO: 5451 - DNA, 24 bp, Artificial Sequence
  source: /note="Description of Artificial Sequence: Synthetic oligonucleotide"
  source: /note="Description of Combined DNA/RNA Molecule: Synthetic oligonucleotide"
  source: /note="DNA/RNA"
  source: /note="5' tri-ethylene glycol (TEG)"
  modified_base (24)..(24): bicyclic nucleic acid (BNA)
uccaacaucaaggaagauggcaut

SEQ ID NO: 5452 - DNA, 23 bp, Artificial Sequence
  source: /note="Description of Artificial Sequence: Synthetic oligonucleotide"
  source: /note="Description of Combined DNA/RNA Molecule: Synthetic oligonucleotide"
  source: /note="DNA/RNA"
  source: /note="5' tri-ethylene glycol (TEG)"
  modified_base (23)..(23): bicyclic nucleic acid (BNA)
uccaacaucaaggaagauggcat

SEQ ID NO: 5453 - RNA, 22 nt, Artificial Sequence
  source: /note="Description of Artificial Sequence: Synthetic oligonucleotide"
  source: /note="RNA"
  source: /note="5' tri-ethylene glycol (TEG)"
  modified_base (22)..(22): bicyclic nucleic acid (BNA)
uccaacaucaaggaagauggca

SEQ ID NO: 5454 - RNA, 21 nt, Artificial Sequence
  source: /note="Description of Artificial Sequence: Synthetic oligonucleotide"
  source: /note="RNA"
  source: /note="5' tri-ethylene glycol (TEG)"
  modified_base (21)..(21): bicyclic nucleic acid (BNA)
uccaacaucaaggaagauggc

SEQ ID NO: 5455 - RNA, 20 nt, Artificial Sequence
  source: /note="Description of Artificial Sequence: Synthetic oligonucleotide"
  source: /note="RNA"
  source: /note="5' tri-ethylene glycol (TEG)"
  modified_base (20)..(20): bicyclic nucleic acid (BNA)
uccaacaucaaggaagaugg

SEQ ID NO: 5456 - RNA, 19 nt, Artificial Sequence
  source: /note="Description of Artificial Sequence: Synthetic oligonucleotide"
  source: /note="RNA"
  source: /note="5' tri-ethylene glycol (TEG)"
  modified_base (19)..(19): bicyclic nucleic acid (BNA)
uccaacaucaaggaagaug

SEQ ID NO: 5457 - DNA, 18 bp, Artificial Sequence
  source: /note="Description of Artificial Sequence: Synthetic oligonucleotide"
  source: /note="Description of Combined DNA/RNA Molecule: Synthetic oligonucleotide"
  source: /note="DNA/RNA"
  source: /note="5' tri-ethylene glycol (TEG)"
  modified_base (18)..(18): bicyclic nucleic acid (BNA)
uccaacaucaaggaagat

SEQ ID NO: 5458 - RNA, 17 nt, Artificial Sequence
  source: /note="Description of Artificial Sequence: Synthetic oligonucleotide"
  source: /note="RNA"
  source: /note="5' tri-ethylene glycol (TEG)"
  modified_base (17)..(17): bicyclic nucleic acid (BNA)
uccaacaucaaggaaga

SEQ ID NO: 5459 - RNA, 16 nt, Artificial Sequence
  source: /note="Description of Artificial Sequence: Synthetic oligonucleotide"
  source: /note="RNA"
  source: /note="5' tri-ethylene glycol (TEG)"
  modified_base (16)..(16): bicyclic nucleic acid (BNA)
uccaacaucaaggaag

SEQ ID NO: 5460 - RNA, 28 nt, Artificial Sequence
  source: /note="Description of Artificial Sequence: Synthetic oligonucleotide"
  source: /note="RNA"
  source: /note="5' tri-ethylene glycol (TEG)"
  modified_base (28)..(28): bicyclic nucleic acid (BNA)
ccaacaucaaggaagauggcauuucuag

SEQ ID NO: 5461 - RNA, 27 nt, Artificial Sequence
  source: /note="Description of Artificial Sequence: Synthetic oligonucleotide"
  source: /note="RNA"
  source: /note="5' tri-ethylene glycol (TEG)"
  modified_base (27)..(27): bicyclic nucleic acid (BNA)
ccaacaucaaggaagauggcauuucua

SEQ ID NO: 5462 - DNA, 26 bp, Artificial Sequence
  source: /note="Description of Artificial Sequence: Synthetic oligonucleotide"
  source: /note="Description of Combined DNA/RNA Molecule: Synthetic oligonucleotide"
  source: /note="DNA/RNA"
  source: /note="5' tri-ethylene glycol (TEG)"
  modified_base (26)..(26): bicyclic nucleic acid (BNA)
ccaacaucaaggaagauggcauuuct

SEQ ID NO: 5463 - RNA, 25 nt, Artificial Sequence
  source: /note="Description of Artificial Sequence: Synthetic oligonucleotide"
  source: /note="RNA"
  source: /note="5' tri-ethylene glycol (TEG)"
  modified_base (25)..(25): bicyclic nucleic acid (BNA)
ccaacaucaaggaagauggcauuuc

SEQ ID NO: 5464 - DNA, 24 bp, Artificial Sequence
  source: /note="Description of Artificial Sequence: Synthetic oligonucleotide"
  source: /note="Description of Combined DNA/RNA Molecule: Synthetic oligonucleotide"
  source: /note="DNA/RNA"
  source: /note="5' tri-ethylene glycol (TEG)"
  modified_base (24)..(24): bicyclic nucleic acid (BNA)
ccaacaucaaggaagauggcauut

SEQ ID NO: 5465 - DNA, 23 bp, Artificial Sequence
  source: /note="Description of Artificial Sequence: Synthetic oligonucleotide"
  source: /note="Description of Combined DNA/RNA Molecule: Synthetic oligonucleotide"
  source: /note="DNA/RNA"
  source: /note="5' tri-ethylene glycol (TEG)"
  modified_base (23)..(23): bicyclic nucleic acid (BNA)
ccaacaucaaggaagauggcaut

SEQ ID NO: 5466 - DNA, 22 bp, Artificial Sequence
  source: /note="Description of Artificial Sequence: Synthetic oligonucleotide"
  source: /note="Description of Combined DNA/RNA Molecule: Synthetic oligonucleotide"
  source: /note="DNA/RNA"
  source: /note="5' tri-ethylene glycol (TEG)"
  modified_base (22)..(22): bicyclic nucleic acid (BNA)
ccaacaucaaggaagauggcat

SEQ ID NO: 5467 - RNA, 21 nt, Artificial Sequence
  source: /note="Description of Artificial Sequence: Synthetic oligonucleotide"
  source: /note="RNA"
  source: /note="5' tri-ethylene glycol (TEG)"
  modified_base (21)..(21): bicyclic nucleic acid (BNA)
ccaacaucaaggaagauggca

SEQ ID NO: 5468 - RNA, 20 nt, Artificial Sequence
  source: /note="Description of Artificial Sequence: Synthetic oligonucleotide"
  source: /note="RNA"
  source: /note="5' tri-ethylene glycol (TEG)"
  modified_base (20)..(20): bicyclic nucleic acid (BNA)
ccaacaucaaggaagauggc

SEQ ID NO: 5469 - RNA, 19 nt, Artificial Sequence
  source: /note="Description of Artificial Sequence: Synthetic oligonucleotide"
  source: /note="RNA"
  source: /note="5' tri-ethylene glycol (TEG)"
  modified_base (19)..(19): bicyclic nucleic acid (BNA)
ccaacaucaaggaagaugg

SEQ ID NO: 5470 - RNA, 18 nt, Artificial Sequence
  source: /note="Description of Artificial Sequence: Synthetic oligonucleotide"
  source: /note="RNA"
  source: /note="5' tri-ethylene glycol (TEG)"
  modified_base (18)..(18): bicyclic nucleic acid (BNA)
ccaacaucaaggaagaug

SEQ ID NO: 5471 - DNA, 17 bp, Artificial Sequence
  source: /note="Description of Artificial Sequence: Synthetic oligonucleotide"
  source: /note="Description of Combined DNA/RNA Molecule: Synthetic oligonucleotide"
  source: /note="DNA/RNA"
  source: /note="5' tri-ethylene glycol (TEG)"
  modified_base (17)..(17): bicyclic nucleic acid (BNA)
ccaacaucaaggaagat

SEQ ID NO: 5472 - RNA, 16 nt, Artificial Sequence
  source: /note="Description of Artificial Sequence: Synthetic oligonucleotide"
  source: /note="RNA"
  source: /note="5' tri-ethylene glycol (TEG)"
  modified_base (16)..(16): bicyclic nucleic acid (BNA)
ccaacaucaaggaaga

SEQ ID NO: 5473 - RNA, 15 nt, Artificial Sequence
  source: /note="Description of Artificial Sequence: Synthetic oligonucleotide"
  source: /note="RNA"
  source: /note="5' tri-ethylene glycol (TEG)"
  modified_base (15)..(15): bicyclic nucleic acid (BNA)
ccaacaucaaggaag

SEQ ID NO: 5474 - RNA, 27 nt, Artificial Sequence
  source: /note="Description of Artificial Sequence: Synthetic oligonucleotide"
  source: /note="RNA"
  source: /note="5' tri-ethylene glycol (TEG)"
  modified_base (27)..(27): bicyclic nucleic acid (BNA)
caacaucaaggaagauggcauuucuag

SEQ ID NO: 5475 - RNA, 26 nt, Artificial Sequence
  source: /note="Description of Artificial Sequence: Synthetic oligonucleotide"
  source: /note="RNA"
  source: /note="5' tri-ethylene glycol (TEG)"
  modified_base (26)..(26): bicyclic nucleic acid (BNA)
caacaucaaggaagauggcauuucua

SEQ ID NO: 5476 - DNA, 25 bp, Artificial Sequence
  source: /note="Description of Artificial Sequence: Synthetic oligonucleotide"
  source: /note="Description of Combined DNA/RNA Molecule: Synthetic oligonucleotide"
  source: /note="DNA/RNA"
  source: /note="5' tri-ethylene glycol (TEG)"
  modified_base (25)..(25): bicyclic nucleic acid (BNA)
caacaucaaggaagauggcauuuct

SEQ ID NO: 5477 - RNA, 24 nt, Artificial Sequence
  source: /note="Description of Artificial Sequence: Synthetic oligonucleotide"
  source: /note="RNA"
  source: /note="5' tri-ethylene glycol (TEG)"
  modified_base (24)..(24): bicyclic nucleic acid (BNA)
caacaucaaggaagauggcauuuc

SEQ ID NO: 5478 - DNA, 23 bp, Artificial Sequence
  source: /note="Description of Artificial Sequence: Synthetic oligonucleotide"
  source: /note="Description of Combined DNA/RNA Molecule: Synthetic oligonucleotide"
  source: /note="DNA/RNA"
  source: /note="5' tri-ethylene glycol (TEG)"
  modified_base (23)..(23): bicyclic nucleic acid (BNA)
caacaucaaggaagauggcauut

SEQ ID NO: 5479 - DNA, 22 bp, Artificial Sequence
  source: /note="Description of Artificial Sequence: Synthetic oligonucleotide"
  source: /note="Description of Combined DNA/RNA Molecule: Synthetic oligonucleotide"
  source: /note="DNA/RNA"
  source: /note="5' tri-ethylene glycol (TEG)"
  modified_base (22)..(22): bicyclic nucleic acid (BNA)
caacaucaaggaagauggcaut

SEQ ID NO: 5480 - DNA, 21 bp, Artificial Sequence
  source: /note="Description of Artificial Sequence: Synthetic oligonucleotide"
  source: /note="Description of Combined DNA/RNA Molecule: Synthetic oligonucleotide"
  source: /note="DNA/RNA"
  source: /note="5' tri-ethylene glycol (TEG)"
  modified_base (21)..(21): bicyclic nucleic acid (BNA)
caacaucaaggaagauggcat

SEQ ID NO: 5481 - RNA, 20 nt, Artificial Sequence
  source: /note="Description of Artificial Sequence: Synthetic oligonucleotide"
  source: /note="RNA"
  source: /note="5' tri-ethylene glycol (TEG)"
  modified_base (20)..(20): bicyclic nucleic acid (BNA)
caacaucaaggaagauggca

SEQ ID NO: 5482 - RNA, 19 nt, Artificial Sequence
  source: /note="Description of Artificial Sequence: Synthetic oligonucleotide"
  source: /note="RNA"
  source: /note="5' tri-ethylene glycol (TEG)"
  modified_base (19)..(19): bicyclic nucleic acid (BNA)
caacaucaaggaagauggc

SEQ ID NO: 5483 - RNA, 18 nt, Artificial Sequence
  source: /note="Description of Artificial Sequence: Synthetic oligonucleotide"
  source: /note="RNA"
  source: /note="5' tri-ethylene glycol (TEG)"
  modified_base (18)..(18): bicyclic nucleic acid (BNA)
caacaucaaggaagaugg

SEQ ID NO: 5484 - RNA, 17 nt, Artificial Sequence
  source: /note="Description of Artificial Sequence: Synthetic oligonucleotide"
  source: /note="RNA"
  source: /note="5' tri-ethylene glycol (TEG)"
  modified_base (17)..(17): bicyclic nucleic acid (BNA)
caacaucaaggaagaug

SEQ ID NO: 5485 - DNA, 16 bp, Artificial Sequence
  source: /note="Description of Artificial Sequence: Synthetic oligonucleotide"
  source: /note="Description of Combined DNA/RNA Molecule: Synthetic oligonucleotide"
  source: /note="DNA/RNA"
  source: /note="5' tri-ethylene glycol (TEG)"
  modified_base (16)..(16): bicyclic nucleic acid (BNA)
caacaucaaggaagat

SEQ ID NO: 5486 - RNA, 15 nt, Artificial Sequence
  source: /note="Description of Artificial Sequence: Synthetic oligonucleotide"
  source: /note="RNA"
  source: /note="5' tri-ethylene glycol (TEG)"
  modified_base (15)..(15): bicyclic nucleic acid (BNA)
caacaucaaggaaga

SEQ ID NO: 5487 - RNA, 14 nt, Artificial Sequence
  source: /note="Description of Artificial Sequence: Synthetic oligonucleotide"
  source: /note="RNA"
  source: /note="5' tri-ethylene glycol (TEG)"
  modified_base (14)..(14): bicyclic nucleic acid (BNA)
caacaucaaggaag

SEQ ID NO: 5488 - RNA, 26 nt, Artificial Sequence
  source: /note="Description of Artificial Sequence: Synthetic oligonucleotide"
  source: /note="RNA"
  source: /note="5' tri-ethylene glycol (TEG)"
  modified_base (26)..(26): bicyclic nucleic acid (BNA)
aacaucaaggaagauggcauuucuag

SEQ ID NO: 5489 - RNA, 25 nt, Artificial Sequence
  source: /note="Description of Artificial Sequence: Synthetic oligonucleotide"
  source: /note="RNA"
  source: /note="5' tri-ethylene glycol (TEG)"
  modified_base (25)..(25): bicyclic nucleic acid (BNA)
aacaucaaggaagauggcauuucua

SEQ ID NO: 5490 - DNA, 24 bp, Artificial Sequence
  source: /note="Description of Artificial Sequence: Synthetic oligonucleotide"
  source: /note="Description of Combined DNA/RNA Molecule: Synthetic oligonucleotide"
  source: /note="DNA/RNA"
  source: /note="5' tri-ethylene glycol (TEG)"
  modified_base (24)..(24): bicyclic nucleic acid (BNA)
aacaucaaggaagauggcauuuct

SEQ ID NO: 5491 - RNA, 23 nt, Artificial Sequence
  source: /note="Description of Artificial Sequence: Synthetic oligonucleotide"
  source: /note="RNA"
  source: /note="5' tri-ethylene glycol (TEG)"
  modified_base (23)..(23): bicyclic nucleic acid (BNA)
aacaucaaggaagauggcauuuc

SEQ ID NO: 5492 - DNA, 22 bp, Artificial Sequence
  source: /note="Description of Artificial Sequence: Synthetic oligonucleotide"
  source: /note="Description of Combined DNA/RNA Molecule: Synthetic oligonucleotide"
  source: /note="DNA/RNA"
  source: /note="5' tri-ethylene glycol (TEG)"
  modified_base (22)..(22): bicyclic nucleic acid (BNA)
aacaucaaggaagauggcauut

SEQ ID NO: 5493 - DNA, 21 bp, Artificial Sequence
  source: /note="Description of Artificial Sequence: Synthetic oligonucleotide"
  source: /note="Description of Combined DNA/RNA Molecule: Synthetic oligonucleotide"
  source: /note="DNA/RNA"
  source: /note="5' tri-ethylene glycol (TEG)"
  modified_base (21)..(21): bicyclic nucleic acid (BNA)
aacaucaaggaagauggcaut

SEQ ID NO: 5494 - DNA, 20 bp, Artificial Sequence
  source: /note="Description of Artificial Sequence: Synthetic oligonucleotide"
  source: /note="Description of Combined DNA/RNA Molecule: Synthetic oligonucleotide"
  source: /note="DNA/RNA"
  source: /note="5' tri-ethylene glycol (TEG)"
  modified_base (20)..(20): bicyclic nucleic acid (BNA)
aacaucaaggaagauggcat

SEQ ID NO: 5495 - RNA, 19 nt, Artificial Sequence
  source: /note="Description of Artificial Sequence: Synthetic oligonucleotide"
  source: /note="RNA"
  source: /note="5' tri-ethylene glycol (TEG)"
  modified_base (19)..(19): bicyclic nucleic acid (BNA)
aacaucaaggaagauggca

SEQ ID NO: 5496 - RNA, 18 nt, Artificial Sequence
  source: /note="Description of Artificial Sequence: Synthetic oligonucleotide"
  source: /note="RNA"
  source: /note="5' tri-ethylene glycol (TEG)"
  modified_base (18)..(18): bicyclic nucleic acid (BNA)
aacaucaaggaagauggc

SEQ ID NO: 5497 - RNA, 17 nt, Artificial Sequence
  source: /note="Description of Artificial Sequence: Synthetic oligonucleotide"
  source: /note="RNA"
  source: /note="5' tri-ethylene glycol (TEG)"
  modified_base (17)..(17): bicyclic nucleic acid (BNA)
aacaucaaggaagaugg

SEQ ID NO: 5498 - RNA, 16 nt, Artificial Sequence
  source: /note="Description of Artificial Sequence: Synthetic oligonucleotide"
  source: /note="RNA"
  source: /note="5' tri-ethylene glycol (TEG)"
  modified_base (16)..(16): bicyclic nucleic acid (BNA)
aacaucaaggaagaug

SEQ ID NO: 5499 - DNA, 15 bp, Artificial Sequence
  source: /note="Description of Artificial Sequence: Synthetic oligonucleotide"
  source: /note="Description of Combined DNA/RNA Molecule: Synthetic oligonucleotide"
  source: /note="DNA/RNA"
  source: /note="5' tri-ethylene glycol (TEG)"
  modified_base (15)..(15): bicyclic nucleic acid (BNA)
aacaucaaggaagat

SEQ ID NO: 5500 - RNA, 14 nt, Artificial Sequence
  source: /note="Description of Artificial Sequence: Synthetic oligonucleotide"
  source: /note="RNA"
  source: /note="5' tri-ethylene glycol (TEG)"
  modified_base (14)..(14): bicyclic nucleic acid (BNA)
aacaucaaggaaga

SEQ ID NO: 5501 - RNA, 13 nt, Artificial Sequence
  source: /note="Description of Artificial Sequence: Synthetic oligonucleotide"
  source: /note="RNA"
  source: /note="5' tri-ethylene glycol (TEG)"
  modified_base (13)..(13): bicyclic nucleic acid (BNA)
aacaucaaggaag

SEQ ID NO: 5502 - RNA, 25 nt, Artificial Sequence
  source: /note="Description of Artificial Sequence: Synthetic oligonucleotide"
  source: /note="RNA"
  source: /note="5' tri-ethylene glycol (TEG)"
  modified_base (25)..(25): bicyclic nucleic acid (BNA)
acaucaaggaagauggcauuucuag

SEQ ID NO: 5503 - RNA, 24 nt, Artificial Sequence
  source: /note="Description of Artificial Sequence: Synthetic oligonucleotide"
  source: /note="RNA"
  source: /note="5' tri-ethylene glycol (TEG)"
  modified_base (24)..(24): bicyclic nucleic acid (BNA)
acaucaaggaagauggcauuucua

SEQ ID NO: 5504 - DNA, 23 bp, Artificial Sequence
  source: /note="Description of Artificial Sequence: Synthetic oligonucleotide"
  source: /note="Description of Combined DNA/RNA Molecule: Synthetic oligonucleotide"
  source: /note="DNA/RNA"
  source: /note="5' tri-ethylene glycol (TEG)"
  modified_base (23)..(23): bicyclic nucleic acid (BNA)
acaucaaggaagauggcauuuct

SEQ ID NO: 5505 - RNA, 22 nt, Artificial Sequence
  source: /note="Description of Artificial Sequence: Synthetic oligonucleotide"
  source: /note="RNA"
  source: /note="5' tri-ethylene glycol (TEG)"
  modified_base (22)..(22): bicyclic nucleic acid (BNA)
acaucaaggaagauggcauuuc

SEQ ID NO: 5506 - DNA, 21 bp, Artificial Sequence
  source: /note="Description of Artificial Sequence: Synthetic oligonucleotide"
  source: /note="Description of Combined DNA/RNA Molecule: Synthetic oligonucleotide"
  source: /note="DNA/RNA"
  source: /note="5' tri-ethylene glycol (TEG)"
  modified_base (21)..(21): bicyclic nucleic acid (BNA)
acaucaaggaagauggcauut

SEQ ID NO: 5507 - DNA, 20 bp, Artificial Sequence
  source: /note="Description of Artificial Sequence: Synthetic oligonucleotide"
  source: /note="Description of Combined DNA/RNA Molecule: Synthetic oligonucleotide"
  source: /note="DNA/RNA"
  source: /note="5' tri-ethylene glycol (TEG)"
  modified_base (20)..(20): bicyclic nucleic acid (BNA)
acaucaaggaagauggcaut

SEQ ID NO: 5508 - DNA, 19 bp, Artificial Sequence
  source: /note="Description of Artificial Sequence: Synthetic oligonucleotide"
  source: /note="Description of Combined DNA/RNA Molecule: Synthetic oligonucleotide"
  source: /note="DNA/RNA"
  source: /note="5' tri-ethylene glycol (TEG)"
  modified_base (19)..(19): bicyclic nucleic acid (BNA)
acaucaaggaagauggcat

SEQ ID NO: 5509 - RNA, 18 nt, Artificial Sequence
  source: /note="Description of Artificial Sequence: Synthetic oligonucleotide"
  source: /note="RNA"
  source: /note="5' tri-ethylene glycol (TEG)"
  modified_base (18)..(18): bicyclic nucleic acid (BNA)
acaucaaggaagauggca

SEQ ID NO: 5510 - RNA, 17 nt, Artificial Sequence
  source: /note="Description of Artificial Sequence: Synthetic oligonucleotide"
  source: /note="RNA"
  source: /note="5' tri-ethylene glycol (TEG)"
  modified_base (17)..(17): bicyclic nucleic acid (BNA)
acaucaaggaagauggc

SEQ ID NO: 5511 - RNA, 16 nt, Artificial Sequence
  source: /note="Description of Artificial Sequence: Synthetic oligonucleotide"
  source: /note="RNA"
  source: /note="5' tri-ethylene glycol (TEG)"
  modified_base (16)..(16): bicyclic nucleic acid (BNA)
acaucaaggaagaugg

SEQ ID NO: 5512 - RNA, 15 nt, Artificial Sequence
  source: /note="Description of Artificial Sequence: Synthetic oligonucleotide"
  source: /note="RNA"
  source: /note="5' tri-ethylene glycol (TEG)"
  modified_base (15)..(15): bicyclic nucleic acid (BNA)
acaucaaggaagaug

SEQ ID NO: 5513 - DNA, 14 bp, Artificial Sequence
  source: /note="Description of Artificial Sequence: Synthetic oligonucleotide"
  source: /note="Description of Combined DNA/RNA Molecule: Synthetic oligonucleotide"
  source: /note="DNA/RNA"
  source: /note="5' tri-ethylene glycol (TEG)"
  modified_base (14)..(14): bicyclic nucleic acid (BNA)
acaucaaggaagat

SEQ ID NO: 5514 - RNA, 13 nt, Artificial Sequence
  source: /note="Description of Artificial Sequence: Synthetic oligonucleotide"
  source: /note="RNA"
  source: /note="5' tri-ethylene glycol (TEG)"
  modified_base (13)..(13): bicyclic nucleic acid (BNA)
acaucaaggaaga

SEQ ID NO: 5515 - RNA, 12 nt, Artificial Sequence
  source: /note="Description of Artificial Sequence: Synthetic oligonucleotide"
  source: /note="RNA"
  source: /note="5' tri-ethylene glycol (TEG)"
  modified_base (12)..(12): bicyclic nucleic acid (BNA)
acaucaaggaag

SEQ ID NO: 5516 - RNA, 24 nt, Artificial Sequence
  source: /note="Description of Artificial Sequence: Synthetic oligonucleotide"
  source: /note="RNA"
  source: /note="5' tri-ethylene glycol (TEG)"
  modified_base (24)..(24): bicyclic nucleic acid (BNA)
caucaaggaagauggcauuucuag

SEQ ID NO: 5517 - RNA, 23 nt, Artificial Sequence
  source: /note="Description of Artificial Sequence: Synthetic oligonucleotide"
  source: /note="RNA"
  source: /note="5' tri-ethylene glycol (TEG)"
  modified_base (23)..(23): bicyclic nucleic acid (BNA)
caucaaggaagauggcauuucua

SEQ ID NO: 5518 - DNA, 22 bp, Artificial Sequence
  source: /note="Description of Artificial Sequence: Synthetic oligonucleotide"
  source: /note="Description of Combined DNA/RNA Molecule: Synthetic oligonucleotide"
  source: /note="DNA/RNA"
  source: /note="5' tri-ethylene glycol (TEG)"
  modified_base (22)..(22): bicyclic nucleic acid (BNA)
caucaaggaagauggcauuuct

SEQ ID NO: 5519 - RNA, 21 nt, Artificial Sequence
  source: /note="Description of Artificial Sequence: Synthetic oligonucleotide"
  source: /note="RNA"
  source: /note="5' tri-ethylene glycol (TEG)"
  modified_base (21)..(21): bicyclic nucleic acid (BNA)
caucaaggaagauggcauuuc

SEQ ID NO: 5520 - DNA, 20 bp, Artificial Sequence
  source: /note="Description of Artificial Sequence: Synthetic oligonucleotide"
  source: /note="Description of Combined DNA/RNA Molecule: Synthetic oligonucleotide"
  source: /note="DNA/RNA"
  source: /note="5' tri-ethylene glycol (TEG)"
  modified_base (20)..(20): bicyclic nucleic acid (BNA)
caucaaggaagauggcauut

SEQ ID NO: 5521 - DNA, 19 bp, Artificial Sequence
  source: /note="Description of Artificial Sequence: Synthetic oligonucleotide"
  source: /note="Description of Combined DNA/RNA Molecule: Synthetic oligonucleotide"
  source: /note="DNA/RNA"
  source: /note="5' tri-ethylene glycol (TEG)"
  modified_base (19)..(19): bicyclic nucleic acid (BNA)
caucaaggaagauggcaut

SEQ ID NO: 5522 - DNA, 18 bp, Artificial Sequence
  source: /note="Description of Artificial Sequence: Synthetic oligonucleotide"
  source: /note="Description of Combined DNA/RNA Molecule: Synthetic oligonucleotide"
  source: /note="DNA/RNA"
  source: /note="5' tri-ethylene glycol (TEG)"
  modified_base (18)..(18): bicyclic nucleic acid (BNA)
caucaaggaagauggcat

SEQ ID NO: 5523 - RNA, 17 nt, Artificial Sequence
  source: /note="Description of Artificial Sequence: Synthetic oligonucleotide"
  source: /note="RNA"
  source: /note="5' tri-ethylene glycol (TEG)"
  modified_base (17)..(17): bicyclic nucleic acid (BNA)
caucaaggaagauggca

SEQ ID NO: 5524 - RNA, 16 nt, Artificial Sequence
  source: /note="Description of Artificial Sequence: Synthetic oligonucleotide"
  source: /note="RNA"
  source: /note="5' tri-ethylene glycol (TEG)"
  modified_base (16)..(16): bicyclic nucleic acid (BNA)
caucaaggaagauggc

SEQ ID NO: 5525 - RNA, 15 nt, Artificial Sequence
  source: /note="Description of Artificial Sequence: Synthetic oligonucleotide"
  source: /note="RNA"
  source: /note="5' tri-ethylene glycol (TEG)"
  modified_base (15)..(15): bicyclic nucleic acid (BNA)
caucaaggaagaugg

SEQ ID NO: 5526 - RNA, 14 nt, Artificial Sequence
  source: /note="Description of Artificial Sequence: Synthetic oligonucleotide"
  source: /note="RNA"
  source: /note="5' tri-ethylene glycol (TEG)"
  modified_base (14)..(14): bicyclic nucleic acid (BNA)
caucaaggaagaug

SEQ ID NO: 5527 - DNA, 13 bp, Artificial Sequence
  source: /note="Description of Artificial Sequence: Synthetic oligonucleotide"
  source: /note="Description of Combined DNA/RNA Molecule: Synthetic oligonucleotide"
  source: /note="DNA/RNA"
  source: /note="5' tri-ethylene glycol (TEG)"
  modified_base (13)..(13): bicyclic nucleic acid (BNA)
caucaaggaagat

SEQ ID NO: 5528 - RNA, 12 nt, Artificial Sequence
  source: /note="Description of Artificial Sequence: Synthetic oligonucleotide"
  source: /note="RNA"
  source: /note="5' tri-ethylene glycol (TEG)"
  modified_base (12)..(12): bicyclic nucleic acid (BNA)
caucaaggaaga

SEQ ID NO: 5529 - RNA, 11 nt, Artificial Sequence
  source: /note="Description of Artificial Sequence: Synthetic oligonucleotide"
  source: /note="RNA"
  source: /note="5' tri-ethylene glycol (TEG)"
  modified_base (11)..(11): bicyclic nucleic acid (BNA)
caucaaggaag

SEQ ID NO: 5530 - RNA, 23 nt, Artificial Sequence
  source: /note="Description of Artificial Sequence: Synthetic oligonucleotide"
  source: /note="RNA"
  source: /note="5' tri-ethylene glycol (TEG)"
  modified_base (23)..(23): bicyclic nucleic acid (BNA)
aucaaggaagauggcauuucuag

SEQ ID NO: 5531 - RNA, 22 nt, Artificial Sequence
  source: /note="Description of Artificial Sequence: Synthetic oligonucleotide"
  source: /note="RNA"
  source: /note="5' tri-ethylene glycol (TEG)"
  modified_base (22)..(22): bicyclic nucleic acid (BNA)
aucaaggaagauggcauuucua

SEQ ID NO: 5532 - DNA, 21 bp, Artificial Sequence
  source: /note="Description of Artificial Sequence: Synthetic oligonucleotide"
  source: /note="Description of Combined DNA/RNA Molecule: Synthetic oligonucleotide"
  source: /note="DNA/RNA"
  source: /note="5' tri-ethylene glycol (TEG)"
  modified_base (21)..(21): bicyclic nucleic acid (BNA)
aucaaggaagauggcauuuct

SEQ ID NO: 5533 - RNA, 20 nt, Artificial Sequence
  source: /note="Description of Artificial Sequence: Synthetic oligonucleotide"
  source: /note="RNA"
  source: /note="5' tri-ethylene glycol (TEG)"
  modified_base (20)..(20): bicyclic nucleic acid (BNA)
aucaaggaagauggcauuuc

SEQ ID NO: 5534 - DNA, 19 bp, Artificial Sequence
  source: /note="Description of Artificial Sequence: Synthetic oligonucleotide"
  source: /note="Description of Combined DNA/RNA Molecule: Synthetic oligonucleotide"
  source: /note="DNA/RNA"
  source: /note="5' tri-ethylene glycol (TEG)"
  modified_base (19)..(19): bicyclic nucleic acid (BNA)
aucaaggaagauggcauut

SEQ ID NO: 5535 - DNA, 18 bp, Artificial Sequence
  source: /note="Description of Artificial Sequence: Synthetic oligonucleotide"
  source: /note="Description of Combined DNA/RNA Molecule: Synthetic oligonucleotide"
  source: /note="DNA/RNA"
  source: /note="5' tri-ethylene glycol (TEG)"
  modified_base (18)..(18): bicyclic nucleic acid (BNA)
aucaaggaagauggcaut

SEQ ID NO: 5536 - DNA, 17 bp, Artificial Sequence
  source: /note="Description of Artificial Sequence: Synthetic oligonucleotide"
  source: /note="Description of Combined DNA/RNA Molecule: Synthetic oligonucleotide"
  source: /note="DNA/RNA"
  source: /note="5' tri-ethylene glycol (TEG)"
  modified_base (17)..(17): bicyclic nucleic acid (BNA)
aucaaggaagauggcat

SEQ ID NO: 5537 - RNA, 16 nt, Artificial Sequence
  source: /note="Description of Artificial Sequence: Synthetic oligonucleotide"
  source: /note="RNA"
  source: /note="5' tri-ethylene glycol (TEG)"
  modified_base (16)..(16): bicyclic nucleic acid (BNA)
aucaaggaagauggca

SEQ ID NO: 5538 - RNA, 15 nt, Artificial Sequence
  source: /note="Description of Artificial Sequence: Synthetic oligonucleotide"
  source: /note="RNA"
  source: /note="5' tri-ethylene glycol (TEG)"
  modified_base (15)..(15): bicyclic nucleic acid (BNA)
aucaaggaagauggc

SEQ ID NO: 5539 - RNA, 14 nt, Artificial Sequence
  source: /note="Description of Artificial Sequence: Synthetic oligonucleotide"
  source: /note="RNA"
  source: /note="5' tri-ethylene glycol (TEG)"
  modified_base (14)..(14): bicyclic nucleic acid (BNA)
aucaaggaagaugg

SEQ ID NO: 5540 - RNA, 13 nt, Artificial Sequence
  source: /note="Description of Artificial Sequence: Synthetic oligonucleotide"
  source: /note="RNA"
  source: /note="5' tri-ethylene glycol (TEG)"
  modified_base (13)..(13): bicyclic nucleic acid (BNA)
aucaaggaagaug

SEQ ID NO: 5541 - DNA, 12 bp, Artificial Sequence
  source: /note="Description of Artificial Sequence: Synthetic oligonucleotide"
  source: /note="Description of Combined DNA/RNA Molecule: Synthetic oligonucleotide"
  source: /note="DNA/RNA"
  source: /note="5' tri-ethylene glycol (TEG)"
  modified_base (12)..(12): bicyclic nucleic acid (BNA)
aucaaggaagat

SEQ ID NO: 5542 - RNA, 11 nt, Artificial Sequence
  source: /note="Description of Artificial Sequence: Synthetic oligonucleotide"
  source: /note="RNA"
  source: /note="5' tri-ethylene glycol (TEG)"
  modified_base (11)..(11): bicyclic nucleic acid (BNA)
aucaaggaaga

SEQ ID NO: 5543 - RNA, 10 nt, Artificial Sequence
  source: /note="Description of Artificial Sequence: Synthetic oligonucleotide"
  source: /note="RNA"
  source: /note="5' tri-ethylene glycol (TEG)"
  modified_base (10)..(10): bicyclic nucleic acid (BNA)
aucaaggaag

SEQ ID NO: 5544 - RNA, 23 nt, Artificial Sequence
  source: /note="Description of Artificial Sequence: Synthetic oligonucleotide"
  source: /note="RNA"
  source: /note="5' tri-ethylene glycol (TEG)"
  modified_base (23)..(23): bicyclic nucleic acid (BNA)
ccagagcagguaccuccaacauc

SEQ ID NO: 5545 - RNA, 18 nt, Artificial Sequence
  source: /note="Description of Artificial Sequence: Synthetic oligonucleotide"
  source: /note="RNA"
  source: /note="5' tri-ethylene glycol (TEG)"
  modified_base (18)..(18): bicyclic nucleic acid (BNA)
ccagagcagguaccucca

SEQ ID NO: 5546 - DNA, 23 bp, Artificial Sequence
  source: /note="Description of Artificial Sequence: Synthetic oligonucleotide"
  source: /note="Description of Combined DNA/RNA Molecule: Synthetic oligonucleotide"
  source: /note="DNA/RNA"
  source: /note="5' tri-ethylene glycol (TEG)"
  modified_base (23)..(23): bicyclic nucleic acid (BNA)
ccucugugauuuuauaacuugat

SEQ ID NO: 5547 - DNA, 17 bp, Artificial Sequence
  source: /note="Description of Artificial Sequence: Synthetic oligonucleotide"
  source: /note="Description of Combined DNA/RNA Molecule: Synthetic oligonucleotide"
  source: /note="DNA/RNA"
  source: /note="5' tri-ethylene glycol (TEG)"
  modified_base (17)..(17): bicyclic nucleic acid (BNA)
ucacccaccaucaccct

SEQ ID NO: 5548 - RNA, 20 nt, Artificial Sequence
  source: /note="Description of Artificial Sequence: Synthetic oligonucleotide"
  source: /note="RNA"
  source: /note="5' tri-ethylene glycol (TEG)"
  modified_base (20)..(20): bicyclic nucleic acid (BNA)
ugauauccucaaggucaccc

SEQ ID NO: 5549 - RNA, 22 nt, Artificial Sequence
  source: /note="Description of Artificial Sequence: Synthetic oligonucleotide"
  source: /note="RNA"
  source: /note="5' tri-ethylene glycol (TEG)"
  modified_base (22)..(22): bicyclic nucleic acid (BNA)
cugcuugaugaucaucucguug

SEQ ID NO: 5550 - RNA, 18 nt, Artificial Sequence
  source: /note="Description of Artificial Sequence: Synthetic oligonucleotide"
  source: /note="RNA"
  source: /note="5' tri-ethylene glycol (TEG)"
  modified_base (18)..(18): bicyclic nucleic acid (BNA)
cugcuugaugaucaucuc

SEQ ID NO: 5551 - RNA, 19 nt, Artificial Sequence
  source: /note="Description of Artificial Sequence: Synthetic oligonucleotide"
  source: /note="RNA"
  source: /note="5' tri-ethylene glycol (TEG)"
  modified_base (19)..(19): bicyclic nucleic acid (BNA)
guuuccuuaguaaccacag

SEQ ID NO: 5552 - RNA, 17 nt, Artificial Sequence
  source: /note="Description of Artificial Sequence: Synthetic oligonucleotide"
  source: /note="RNA"
  source: /note="5' tri-ethylene glycol (TEG)"
  modified_base (17)..(17): bicyclic nucleic acid (BNA)
guuuccuuaguaaccac

SEQ ID NO: 5553 - DNA, 20 bp, Artificial Sequence
  source: /note="Description of Artificial Sequence: Synthetic oligonucleotide"
  source: /note="Description of Combined DNA/RNA Molecule: Synthetic oligonucleotide"
  source: /note="DNA/RNA"
  modified_base (20)..(20): bicyclic nucleic acid (BNA)
  source: /note="3' tri-ethylene glycol (TEG)"
ucaaggaagauggcauuuct

SEQ ID NO: 5554 - RNA, 22 nt, Artificial Sequence
  source: /note="Description of Artificial Sequence: Synthetic oligonucleotide"
  source: /note="RNA"
  modified_base (22)..(22): bicyclic nucleic acid (BNA)
  source: /note="3' tri-ethylene glycol (TEG)"
ucaaggaagauggcauuucuag

SEQ ID NO: 5555 - RNA, 18 nt, Artificial Sequence
  source: /note="Description of Artificial Sequence: Synthetic oligonucleotide"
  source: /note="RNA"
  modified_base (18)..(18): bicyclic nucleic acid (BNA)
  source: /note="3' tri-ethylene glycol (TEG)"
gguaaguucuguccaagc

SEQ ID NO: 5556 - RNA, 18 nt, Artificial Sequence
  source: /note="Description of Artificial Sequence: Synthetic oligonucleotide"
  source: /note="RNA"
  modified_base (18)..(18): bicyclic nucleic acid (BNA)
  source: /note="3' tri-ethylene glycol (TEG)"
guaaguucuguccaagcc

SEQ ID NO: 5557 - RNA, 18 nt, Artificial Sequence
  source: /note="Description of Artificial Sequence: Synthetic oligonucleotide"
  source: /note="RNA"
  modified_base (18)..(18): bicyclic nucleic acid (BNA)
  source: /note="3' tri-ethylene glycol (TEG)"
agucgguaaguucugucc

SEQ ID NO: 5558 - RNA, 18 nt, Artificial Sequence
  source: /note="Description of Artificial Sequence: Synthetic oligonucleotide"
  source: /note="RNA"
  modified_base (18)..(18): bicyclic nucleic acid (BNA)
  source: /note="3' tri-ethylene glycol (TEG)"
cuguccaagcccgguuga

SEQ ID NO: 5559 - RNA, 15 nt, Artificial Sequence
  source: /note="Description of Artificial Sequence: Synthetic oligonucleotide"
  source: /note="RNA"
  modified_base (15)..(15): bicyclic nucleic acid (BNA)
  source: /note="3' tri-ethylene glycol (TEG)"
uaaguucuguccaag

SEQ ID NO: 5560 - RNA, 20 nt, Artificial Sequence
  source: /note="Description of Artificial Sequence: Synthetic oligonucleotide"
  source: /note="RNA"
  modified_base (20)..(20): bicyclic nucleic acid (BNA)
  source: /note="3' tri-ethylene glycol (TEG)"
uucuguccaagcccgguuga

SEQ ID NO: 5561 - RNA, 19 nt, Artificial Sequence
  source: /note="Description of Artificial Sequence: Synthetic oligonucleotide"
  source: /note="RNA"
  modified_base (19)..(19): bicyclic nucleic acid (BNA)
  source: /note="3' tri-ethylene glycol (TEG)"
uucuguccaagcccgguug

SEQ ID NO: 5562 - DNA, 18 bp, Artificial Sequence
  source: /note="Description of Artificial Sequence: Synthetic oligonucleotide"
  source: /note="Description of Combined DNA/RNA Molecule: Synthetic oligonucleotide"
  source: /note="DNA/RNA"
  modified_base (18)..(18): bicyclic nucleic acid (BNA)
  source: /note="3' tri-ethylene glycol (TEG)"
uucuguccaagcccggut

SEQ ID NO: 5563 - DNA, 17 bp, Artificial Sequence
  source: /note="Description of Artificial Sequence: Synthetic oligonucleotide"
  source: /note="Description of Combined DNA/RNA Molecule: Synthetic oligonucleotide"
  source: /note="DNA/RNA"
  modified_base (17)..(17): bicyclic nucleic acid (BNA)
  source: /note="3' tri-ethylene glycol (TEG)"
uucuguccaagcccggt

SEQ ID NO: 5564 - RNA, 16 nt, Artificial Sequence
  source: /note="Description of Artificial Sequence: Synthetic oligonucleotide"
  source: /note="RNA"
  modified_base (16)..(16): bicyclic nucleic acid (BNA)
  source: /note="3' tri-ethylene glycol (TEG)"
uucuguccaagcccgg

SEQ ID NO: 5565 - RNA, 15 nt, Artificial Sequence
  source: /note="Description of Artificial Sequence: Synthetic oligonucleotide"
  source: /note="RNA"
  modified_base (15)..(15): bicyclic nucleic acid (BNA)
  source: /note="3' tri-ethylene glycol (TEG)"
uucuguccaagcccg

SEQ ID NO: 5566 - RNA, 14 nt, Artificial Sequence
  source: /note="Description of Artificial Sequence: Synthetic oligonucleotide"
  source: /note="RNA"
  modified_base (14)..(14): bicyclic nucleic acid (BNA)
  source: /note="3' tri-ethylene glycol (TEG)"
uucuguccaagccc

SEQ ID NO: 5567 - RNA, 13 nt, Artificial Sequence
  source: /note="Description of Artificial Sequence: Synthetic oligonucleotide"
  source: /note="RNA"
  modified_base (13)..(13): bicyclic nucleic acid (BNA)
  source: /note="3' tri-ethylene glycol (TEG)"
uucuguccaagcc

SEQ ID NO: 5568 - RNA, 12 nt, Artificial Sequence
  source: /note="Description of Artificial Sequence: Synthetic oligonucleotide"
  source: /note="RNA"
  modified_base (12)..(12): bicyclic nucleic acid (BNA)
  source: /note="3' tri-ethylene glycol (TEG)"
uucuguccaagc

SEQ ID NO: 5569 - RNA, 11 nt, Artificial Sequence
  source: /note="Description of Artificial Sequence: Synthetic oligonucleotide"
  source: /note="RNA"
  modified_base (11)..(11): bicyclic nucleic acid (BNA)
  source: /note="3' tri-ethylene glycol (TEG)"
uucuguccaag

SEQ ID NO: 5570 - RNA, 10 nt, Artificial Sequence
  source: /note="Description of Artificial Sequence: Synthetic oligonucleotide"
  source: /note="RNA"
  modified_base (10)..(10): bicyclic nucleic acid (BNA)
  source: /note="3' tri-ethylene glycol (TEG)"
uucuguccaa

SEQ ID NO: 5571 - RNA, 9 nt, Artificial Sequence
  source: /note="Description of Artificial Sequence: Synthetic oligonucleotide"
  source: /note="RNA"
  modified_base (9)..(9): bicyclic nucleic acid (BNA)
  source: /note="3' tri-ethylene glycol (TEG)"
uucugucca

SEQ ID NO: 5572 - RNA, 8 nt, Artificial Sequence
  source: /note="Description of Artificial Sequence: Synthetic oligonucleotide"
  source: /note="RNA"
  modified_base (8)..(8): bicyclic nucleic acid (BNA)
  source: /note="3' tri-ethylene glycol (TEG)"
uucugucc

SEQ ID NO: 5573 - RNA, 19 nt, Artificial Sequence
  source: /note="Description of Artificial Sequence: Synthetic oligonucleotide"
  source: /note="RNA"
  modified_base (19)..(19): bicyclic nucleic acid (BNA)
  source: /note="3' tri-ethylene glycol (TEG)"
ucuguccaagcccgguuga

SEQ ID NO: 5574 - RNA, 18 nt, Artificial Sequence
  source: /note="Description of Artificial Sequence: Synthetic oligonucleotide"
  source: /note="RNA"
  modified_base (18)..(18): bicyclic nucleic acid (BNA)
  source: /note="3' tri-ethylene glycol (TEG)"
ucuguccaagcccgguug

SEQ ID NO: 5575 - DNA, 17 bp, Artificial Sequence
  source: /note="Description of Artificial Sequence: Synthetic oligonucleotide"
  source: /note="Description of Combined DNA/RNA Molecule: Synthetic oligonucleotide"
  source: /note="DNA/RNA"
  modified_base (17)..(17): bicyclic nucleic acid (BNA)
  source: /note="3' tri-ethylene glycol (TEG)"
ucuguccaagcccggut

SEQ ID NO: 5576 - DNA, 16 bp, Artificial Sequence
  source: /note="Description of Artificial Sequence: Synthetic oligonucleotide"
  source: /note="Description of Combined DNA/RNA Molecule: Synthetic oligonucleotide"
  source: /note="DNA/RNA"
  modified_base (16)..(16): bicyclic nucleic acid (BNA)
  source: /note="3' tri-ethylene glycol (TEG)"
ucuguccaagcccggt

SEQ ID NO: 5577 - RNA, 15 nt, Artificial Sequence
  source: /note="Description of Artificial Sequence: Synthetic oligonucleotide"
  source: /note="RNA"
  modified_base (15)..(15): bicyclic nucleic acid (BNA)
  source: /note="3' tri-ethylene glycol (TEG)"
ucuguccaagcccgg

SEQ ID NO: 5578 - RNA, 14 nt, Artificial Sequence
  source: /note="Description of Artificial Sequence: Synthetic oligonucleotide"
  source: /note="RNA"
  modified_base (14)..(14): bicyclic nucleic acid (BNA)
  source: /note="3' tri-ethylene glycol (TEG)"
ucuguccaagcccg

SEQ ID NO: 5579 - RNA, 13 nt, Artificial Sequence
  source: /note="Description of Artificial Sequence: Synthetic oligonucleotide"
  source: /note="RNA"
  modified_base (13)..(13): bicyclic nucleic acid (BNA)
  source: /note="3' tri-ethylene glycol (TEG)"
ucuguccaagccc

SEQ ID NO: 5580 - RNA, 12 nt, Artificial Sequence
  source: /note="Description of Artificial Sequence: Synthetic oligonucleotide"
  source: /note="RNA"
  modified_base (12)..(12): bicyclic nucleic acid (BNA)
  source: /note="3' tri-ethylene glycol (TEG)"
ucuguccaagcc

SEQ ID NO: 5581 - RNA, 11 nt, Artificial Sequence
  source: /note="Description of Artificial Sequence: Synthetic oligonucleotide"
  source: /note="RNA"
  modified_base (11)..(11): bicyclic nucleic acid (BNA)
  source: /note="3' tri-ethylene glycol (TEG)"
ucuguccaagc

SEQ ID NO: 5582 - RNA, 10 nt, Artificial Sequence
  source: /note="Description of Artificial Sequence: Synthetic oligonucleotide"
  source: /note="RNA"
  modified_base (10)..(10): bicyclic nucleic acid (BNA)
  source: /note="3' tri-ethylene glycol (TEG)"
ucuguccaag

SEQ ID NO: 5583 - RNA, 9 nt, Artificial Sequence
  source: /note="Description of Artificial Sequence: Synthetic oligonucleotide"
  source: /note="RNA"
  modified_base (9)..(9): bicyclic nucleic acid (BNA)
  source: /note="3' tri-ethylene glycol (TEG)"
ucuguccaa

SEQ ID NO: 5584 - RNA, 8 nt, Artificial Sequence
  source: /note="Description of Artificial Sequence: Synthetic oligonucleotide"
  source: /note="RNA"
  modified_base (8)..(8): bicyclic nucleic acid (BNA)
  source: /note="3' tri-ethylene glycol (TEG)"
ucugucca

SEQ ID NO: 5585 - RNA, 17 nt, Artificial Sequence
  source: /note="Description of Artificial Sequence: Synthetic oligonucleotide"
  source: /note="RNA"
  modified_base (17)..(17): bicyclic nucleic acid (BNA)
  source: /note="3' tri-ethylene glycol (TEG)"
cuguccaagcccgguug

SEQ ID NO: 5586 - DNA, 16 bp, Artificial Sequence
  source: /note="Description of Artificial Sequence: Synthetic oligonucleotide"
  source: /note="Description of Combined DNA/RNA Molecule: Synthetic oligonucleotide"
  source: /note="DNA/RNA"
  modified_base (16)..(16): bicyclic nucleic acid (BNA)
  source: /note="3' tri-ethylene glycol (TEG)"
cuguccaagcccggut

SEQ ID NO: 5587 - DNA, 15 bp, Artificial Sequence
  source: /note="Description of Artificial Sequence: Synthetic oligonucleotide"
  source: /note="Description of Combined DNA/RNA Molecule: Synthetic oligonucleotide"
  source: /note="DNA/RNA"
  modified_base (15)..(15): bicyclic nucleic acid (BNA)
  source: /note="3' tri-ethylene glycol (TEG)"
cuguccaagcccggt

SEQ ID NO: 5588 - RNA, 14 nt, Artificial Sequence
  source: /note="Description of Artificial Sequence: Synthetic oligonucleotide"
  source: /note="RNA"
  modified_base (14)..(14): bicyclic nucleic acid (BNA)
  source: /note="3' tri-ethylene glycol (TEG)"
cuguccaagcccgg

SEQ ID NO: 5589 - RNA, 13 nt, Artificial Sequence
  source: /note="Description of Artificial Sequence: Synthetic oligonucleotide"
  source: /note="RNA"
  modified_base (13)..(13): bicyclic nucleic acid (BNA)
  source: /note="3' tri-ethylene glycol (TEG)"
cuguccaagcccg

SEQ ID NO: 5590 - RNA, 12 nt, Artificial Sequence
  source: /note="Description of Artificial Sequence: Synthetic oligonucleotide"
  source: /note="RNA"
  modified_base (12)..(12): bicyclic nucleic acid (BNA)
  source: /note="3' tri-ethylene glycol (TEG)"
cuguccaagccc

SEQ ID NO: 5591 - RNA, 11 nt, Artificial Sequence
  source: /note="Description of Artificial Sequence: Synthetic oligonucleotide"
  source: /note="RNA"
  modified_base (11)..(11): bicyclic nucleic acid (BNA)
  source: /note="3' tri-ethylene glycol (TEG)"
cuguccaagcc

SEQ ID NO: 5592 - RNA, 10 nt, Artificial Sequence
  source: /note="Description of Artificial Sequence: Synthetic oligonucleotide"
  source: /note="RNA"
  modified_base (10)..(10): bicyclic nucleic acid (BNA)
  source: /note="3' tri-ethylene glycol (TEG)"
cuguccaagc

SEQ ID NO: 5593 - RNA, 9 nt, Artificial Sequence
  source: /note="Description of Artificial Sequence: Synthetic oligonucleotide"
  source: /note="RNA"
  modified_base (9)..(9): bicyclic nucleic acid (BNA)
  source: /note="3' tri-ethylene glycol (TEG)"
cuguccaag

SEQ ID NO: 5594 - RNA, 8 nt, Artificial Sequence
  source: /note="Description of Artificial Sequence: Synthetic oligonucleotide"
  source: /note="RNA"
  modified_base (8)..(8): bicyclic nucleic acid (BNA)
  source: /note="3' tri-ethylene glycol (TEG)"
cuguccaa

SEQ ID NO: 5595 - RNA, 20 nt, Artificial Sequence
  source: /note="Description of Artificial Sequence: Synthetic oligonucleotide"
  source: /note="RNA"
  modified_base (20)..(20): bicyclic nucleic acid (BNA)
  source: /note="3' tri-ethylene glycol (TEG)"
guucuguccaagcccgguug

SEQ ID NO: 5596 - DNA, 19 bp, Artificial Sequence
  source: /note="Description of Artificial Sequence: Synthetic oligonucleotide"
  source: /note="Description of Combined DNA/RNA Molecule: Synthetic oligonucleotide"
  source: /note="DNA/RNA"
  modified_base (19)..(19): bicyclic nucleic acid (BNA)
  source: /note="3' tri-ethylene glycol (TEG)"
guucuguccaagcccggut

SEQ ID NO: 5597 - DNA, 18 bp, Artificial Sequence
  source: /note="Description of Artificial Sequence: Synthetic oligonucleotide"
  source: /note="Description of Combined DNA/RNA Molecule: Synthetic oligonucleotide"
  source: /note="DNA/RNA"
  modified_base (18)..(18): bicyclic nucleic acid (BNA)
  source: /note="3' tri-ethylene glycol (TEG)"
guucuguccaagcccggt

SEQ ID NO: 5598 - RNA, 17 nt, Artificial Sequence
  source: /note="Description of Artificial Sequence: Synthetic oligonucleotide"
  source: /note="RNA"
  modified_base (17)..(17): bicyclic nucleic acid (BNA)
  source: /note="3' tri-ethylene glycol (TEG)"
guucuguccaagcccgg

SEQ ID NO: 5599 - RNA, 16 nt, Artificial Sequence
  source: /note="Description of Artificial Sequence: Synthetic oligonucleotide"
  source: /note="RNA"
  modified_base (16)..(16): bicyclic nucleic acid (BNA)
  source: /note="3' tri-ethylene glycol (TEG)"
guucuguccaagcccg

SEQ ID NO: 5600 - RNA, 15 nt, Artificial Sequence
  source: /note="Description of Artificial Sequence: Synthetic oligonucleotide"
  source: /note="RNA"
  modified_base (15)..(15): bicyclic nucleic acid (BNA)
  source: /note="3' tri-ethylene glycol (TEG)"
guucuguccaagccc

SEQ ID NO: 5601 - RNA, 14 nt, Artificial Sequence
  source: /note="Description of Artificial Sequence: Synthetic oligonucleotide"
  source: /note="RNA"
  modified_base (14)..(14): bicyclic nucleic acid (BNA)
  source: /note="3' tri-ethylene glycol (TEG)"
guucuguccaagcc

SEQ ID NO: 5602 - RNA, 13 nt, Artificial Sequence
  source: /note="Description of Artificial Sequence: Synthetic oligonucleotide"
  source: /note="RNA"
  modified_base (13)..(13): bicyclic nucleic acid (BNA)
  source: /note="3' tri-ethylene glycol (TEG)"
guucuguccaagc

SEQ ID NO: 5603 - RNA, 12 nt, Artificial Sequence
  source: /note="Description of Artificial Sequence: Synthetic oligonucleotide"
  source: /note="RNA"
  modified_base (12)..(12): bicyclic nucleic acid (BNA)
  source: /note="3' tri-ethylene glycol (TEG)"
guucuguccaag

SEQ ID NO: 5604 - RNA, 11 nt, Artificial Sequence
  source: /note="Description of Artificial Sequence: Synthetic oligonucleotide"
  source: /note="RNA"
  modified_base (11)..(11): bicyclic nucleic acid (BNA)
  source: /note="3' tri-ethylene glycol (TEG)"
guucuguccaa

SEQ ID NO: 5605 - RNA, 10 nt, Artificial Sequence
  source: /note="Description of Artificial Sequence: Synthetic oligonucleotide"
  source: /note="RNA"
  modified_base (10)..(10): bicyclic nucleic acid (BNA)
  source: /note="3' tri-ethylene glycol (TEG)"
guucugucca

SEQ ID NO: 5606 - RNA, 9 nt, Artificial Sequence
  source: /note="Description of Artificial Sequence: Synthetic oligonucleotide"
  source: /note="RNA"
  modified_base (9)..(9): bicyclic nucleic acid (BNA)
  source: /note="3' tri-ethylene glycol (TEG)"
guucugucc

SEQ ID NO: 5607 - RNA, 8 nt, Artificial Sequence
  source: /note="Description of Artificial Sequence: Synthetic oligonucleotide"
  source: /note="RNA"
  modified_base (8)..(8): bicyclic nucleic acid (BNA)
  source: /note="3' tri-ethylene glycol (TEG)"
guucuguc

SEQ ID NO: 5608 - DNA, 20 bp, Artificial Sequence
  source: /note="Description of Artificial Sequence: Synthetic oligonucleotide"
  source: /note="Description of Combined DNA/RNA Molecule: Synthetic oligonucleotide"
  source: /note="DNA/RNA"
  modified_base (20)..(20): bicyclic nucleic acid (BNA)
  source: /note="3' tri-ethylene glycol (TEG)"
aguucuguccaagcccggut

SEQ ID NO: 5609 - DNA, 19 bp, Artificial Sequence
  source: /note="Description of Artificial Sequence: Synthetic oligonucleotide"
  source: /note="Description of Combined DNA/RNA Molecule: Synthetic oligonucleotide"
  source: /note="DNA/RNA"
  modified_base (19)..(19): bicyclic nucleic acid (BNA)
  source: /note="3' tri-ethylene glycol (TEG)"
aguucuguccaagcccggt

SEQ ID NO: 5610 - RNA, 18 nt, Artificial Sequence
  source: /note="Description of Artificial Sequence: Synthetic oligonucleotide"
  source: /note="RNA"
  modified_base (18)..(18): bicyclic nucleic acid (BNA)
  source: /note="3' tri-ethylene glycol (TEG)"
aguucuguccaagcccgg

SEQ ID NO: 5611 - RNA, 17 nt, Artificial Sequence
  source: /note="Description of Artificial Sequence: Synthetic oligonucleotide"
  source: /note="RNA"
  modified_base (17)..(17): bicyclic nucleic acid (BNA)
  source: /note="3' tri-ethylene glycol (TEG)"
aguucuguccaagcccg

SEQ ID NO: 5612 - RNA, 16 nt, Artificial Sequence
  source: /note="Description of Artificial Sequence: Synthetic oligonucleotide"
  source: /note="RNA"
  modified_base (16)..(16): bicyclic nucleic acid (BNA)
  source: /note="3' tri-ethylene glycol (TEG)"
aguucuguccaagccc

SEQ ID NO: 5613 - RNA, 15 nt, Artificial Sequence
  source: /note="Description of Artificial Sequence: Synthetic oligonucleotide"
  source: /note="RNA"
  modified_base (15)..(15): bicyclic nucleic acid (BNA)
  source: /note="3' tri-ethylene glycol (TEG)"
aguucuguccaagcc

SEQ ID NO: 5614 - RNA, 14 nt, Artificial Sequence
  source: /note="Description of Artificial Sequence: Synthetic oligonucleotide"
  source: /note="RNA"
  modified_base (14)..(14): bicyclic nucleic acid (BNA)
  source: /note="3' tri-ethylene glycol (TEG)"
aguucuguccaagc

SEQ ID NO: 5615 - RNA, 13 nt, Artificial Sequence
  source: /note="Description of Artificial Sequence: Synthetic oligonucleotide"
  source: /note="RNA"
  modified_base (13)..(13): bicyclic nucleic acid (BNA)
  source: /note="3' tri-ethylene glycol (TEG)"
aguucuguccaag

SEQ ID NO: 5616 - RNA, 12 nt, Artificial Sequence
  source: /note="Description of Artificial Sequence: Synthetic oligonucleotide"
  source: /note="RNA"
  modified_base (12)..(12): bicyclic nucleic acid (BNA)
  source: /note="3' tri-ethylene glycol (TEG)"
aguucuguccaa

SEQ ID NO: 5617 - RNA, 11 nt, Artificial Sequence
  source: /note="Description of Artificial Sequence: Synthetic oligonucleotide"
  source: /note="RNA"
  modified_base (11)..(11): bicyclic nucleic acid (BNA)
  source: /note="3' tri-ethylene glycol (TEG)"
aguucugucca

SEQ ID NO: 5618 - RNA, 10 nt, Artificial Sequence
  source: /note="Description of Artificial Sequence: Synthetic oligonucleotide"
  source: /note="RNA"
  modified_base (10)..(10): bicyclic nucleic acid (BNA)
  source: /note="3' tri-ethylene glycol (TEG)"
aguucugucc

SEQ ID NO: 5619 - RNA, 9 nt, Artificial Sequence
  source: /note="Description of Artificial Sequence: Synthetic oligonucleotide"
  source: /note="RNA"
  modified_base (9)..(9): bicyclic nucleic acid (BNA)
  source: /note="3' tri-ethylene glycol (TEG)"
aguucuguc

SEQ ID NO: 5620 - DNA, 8 bp, Artificial Sequence
  source: /note="Description of Artificial Sequence: Synthetic oligonucleotide"
  source: /note="Description of Combined DNA/RNA Molecule: Synthetic oligonucleotide"
  source: /note="DNA/RNA"
  modified_base (8)..(8): bicyclic nucleic acid (BNA)
  source: /note="3' tri-ethylene glycol (TEG)"
aguucugt

SEQ ID NO: 5621 - DNA, 20 bp, Artificial Sequence
  source: /note="Description of Artificial Sequence: Synthetic oligonucleotide"
  source: /note="Description of Combined DNA/RNA Molecule: Synthetic oligonucleotide"
  source: /note="DNA/RNA"
  modified_base (20)..(20): bicyclic nucleic acid (BNA)
  source: /note="3' tri-ethylene glycol (TEG)"
aaguucuguccaagcccggt

SEQ ID NO: 5622 - RNA, 19 nt, Artificial Sequence
  source: /note="Description of Artificial Sequence: Synthetic oligonucleotide"
  source: /note="RNA"
  modified_base (19)..(19): bicyclic nucleic acid (BNA)
  source: /note="3' tri-ethylene glycol (TEG)"
aaguucuguccaagcccgg

SEQ ID NO: 5623 - RNA, 18 nt, Artificial Sequence
  source: /note="Description of Artificial Sequence: Synthetic oligonucleotide"
  source: /note="RNA"
  modified_base (18)..(18): bicyclic nucleic acid (BNA)
  source: /note="3' tri-ethylene glycol (TEG)"
aaguucuguccaagcccg

SEQ ID NO: 5624 - RNA, 17 nt, Artificial Sequence
  source: /note="Description of Artificial Sequence: Synthetic oligonucleotide"
  source: /note="RNA"
  modified_base (17)..(17): bicyclic nucleic acid (BNA)
  source: /note="3' tri-ethylene glycol (TEG)"
aaguucuguccaagccc

SEQ ID NO: 5625 - RNA, 16 nt, Artificial Sequence
  source: /note="Description of Artificial Sequence: Synthetic oligonucleotide"
  source: /note="RNA"
  modified_base (16)..(16): bicyclic nucleic acid (BNA)
  source: /note="3' tri-ethylene glycol (TEG)"
aaguucuguccaagcc

SEQ ID NO: 5626 - RNA, 15 nt, Artificial Sequence
  source: /note="Description of Artificial Sequence: Synthetic oligonucleotide"
  source: /note="RNA"
  modified_base (15)..(15): bicyclic nucleic acid (BNA)
  source: /note="3' tri-ethylene glycol (TEG)"
aaguucuguccaagc

SEQ ID NO: 5627 - RNA, 14 nt, Artificial Sequence
  source: /note="Description of Artificial Sequence: Synthetic oligonucleotide"
  source: /note="RNA"
  modified_base (14)..(14): bicyclic nucleic acid (BNA)
  source: /note="3' tri-ethylene glycol (TEG)"
aaguucuguccaag

SEQ ID NO: 5628 - RNA, 13 nt, Artificial Sequence
  source: /note="Description of Artificial Sequence: Synthetic oligonucleotide"
  source: /note="RNA"
  modified_base (13)..(13): bicyclic nucleic acid (BNA)
  source: /note="3' tri-ethylene glycol (TEG)"
aaguucuguccaa

SEQ ID NO: 5629 - RNA, 12 nt, Artificial Sequence
  source: /note="Description of Artificial Sequence: Synthetic oligonucleotide"
  source: /note="RNA"
  modified_base (12)..(12): bicyclic nucleic acid (BNA)
  source: /note="3' tri-ethylene glycol (TEG)"
aaguucugucca

SEQ ID NO: 5630 - RNA, 11 nt, Artificial Sequence
  source: /note="Description of Artificial Sequence: Synthetic oligonucleotide"
  source: /note="RNA"
  modified_base (11)..(11): bicyclic nucleic acid (BNA)
  source: /note="3' tri-ethylene glycol (TEG)"
aaguucugucc

SEQ ID NO: 5631 - RNA, 10 nt, Artificial Sequence
  source: /note="Description of Artificial Sequence: Synthetic oligonucleotide"
  source: /note="RNA"
  modified_base (10)..(10): bicyclic nucleic acid (BNA)
  source: /note="3' tri-ethylene glycol (TEG)"
aaguucuguc

SEQ ID NO: 5632 - DNA, 9 bp, Artificial Sequence
  source: /note="Description of Artificial Sequence: Synthetic oligonucleotide"
  source: /note="Description of Combined DNA/RNA Molecule: Synthetic oligonucleotide"
  source: /note="DNA/RNA"
  modified_base (9)..(9): bicyclic nucleic acid (BNA)
  source: /note="3' tri-ethylene glycol (TEG)"
aaguucugt

SEQ ID NO: 5633 - RNA, 8 nt, Artificial Sequence
  source: /note="Description of Artificial Sequence: Synthetic oligonucleotide"
  source: /note="RNA"
  modified_base (8)..(8): bicyclic nucleic acid (BNA)
  source: /note="3' tri-ethylene glycol (TEG)"
aaguucug

SEQ ID NO: 5634 - RNA, 20 nt, Artificial Sequence
  source: /note="Description of Artificial Sequence: Synthetic oligonucleotide"
  source: /note="RNA"
  modified_base (20)..(20): bicyclic nucleic acid (BNA)
  source: /note="3' tri-ethylene glycol (TEG)"
uaaguucuguccaagcccgg

SEQ ID NO: 5635 - RNA, 19 nt, Artificial Sequence
  source: /note="Description of Artificial Sequence: Synthetic oligonucleotide"
  source: /note="RNA"
  modified_base (19)..(19): bicyclic nucleic acid (BNA)
  source: /note="3' tri-ethylene glycol (TEG)"
uaaguucuguccaagcccg

SEQ ID NO: 5636 - RNA, 18 nt, Artificial Sequence
  source: /note="Description of Artificial Sequence: Synthetic oligonucleotide"
  source: /note="RNA"
  modified_base (18)..(18): bicyclic nucleic acid (BNA)
  source: /note="3' tri-ethylene glycol (TEG)"
uaaguucuguccaagccc

SEQ ID NO: 5637 - RNA, 17 nt, Artificial Sequence
  source: /note="Description of Artificial Sequence: Synthetic oligonucleotide"
  source: /note="RNA"
  modified_base (17)..(17): bicyclic nucleic acid (BNA)
  source: /note="3' tri-ethylene glycol (TEG)"
uaaguucuguccaagcc

SEQ ID NO: 5638 - RNA, 16 nt, Artificial Sequence
  source: /note="Description of Artificial Sequence: Synthetic oligonucleotide"
  source: /note="RNA"
  modified_base (16)..(16): bicyclic nucleic acid (BNA)
  source: /note="3' tri-ethylene glycol (TEG)"
uaaguucuguccaagc

SEQ ID NO: 5639 - RNA, 14 nt, Artificial Sequence
  source: /note="Description of Artificial Sequence: Synthetic oligonucleotide"
  source: /note="RNA"
  modified_base (14)..(14): bicyclic nucleic acid (BNA)
  source: /note="3' tri-ethylene glycol (TEG)"
uaaguucuguccaa

SEQ ID NO: 5640 - RNA, 13 nt, Artificial Sequence
  source: /note="Description of Artificial Sequence: Synthetic oligonucleotide"
  source: /note="RNA"
  modified_base (13)..(13): bicyclic nucleic acid (BNA)
  source: /note="3' tri-ethylene glycol (TEG)"
uaaguucugucca

SEQ ID NO: 5641 - RNA, 12 nt, Artificial Sequence
  source: /note="Description of Artificial Sequence: Synthetic oligonucleotide"
  source: /note="RNA"
  modified_base (12)..(12): bicyclic nucleic acid (BNA)
  source: /note="3' tri-ethylene glycol (TEG)"
uaaguucugucc

SEQ ID NO: 5642 - RNA, 11 nt, Artificial Sequence
  source: /note="Description of Artificial Sequence: Synthetic oligonucleotide"
  source: /note="RNA"
  modified_base (11)..(11): bicyclic nucleic acid (BNA)
  source: /note="3' tri-ethylene glycol (TEG)"
uaaguucuguc

SEQ ID NO: 5643 - DNA, 10 bp, Artificial Sequence
  source: /note="Description of Artificial Sequence: Synthetic oligonucleotide"
  source: /note="Description of Combined DNA/RNA Molecule: Synthetic oligonucleotide"
  source: /note="DNA/RNA"
  modified_base (10)..(10): bicyclic nucleic acid (BNA)
  source: /note="3' tri-ethylene glycol (TEG)"
uaaguucugt

SEQ ID NO: 5644 - RNA, 9 nt, Artificial Sequence
  source: /note="Description of Artificial Sequence: Synthetic oligonucleotide"
  source: /note="RNA"
  modified_base (9)..(9): bicyclic nucleic acid (BNA)
  source: /note="3' tri-ethylene glycol (TEG)"
uaaguucug

SEQ ID NO: 5645 - DNA, 8 bp, Artificial Sequence
  source: /note="Description of Artificial Sequence: Synthetic oligonucleotide"
  source: /note="Description of Combined DNA/RNA Molecule: Synthetic oligonucleotide"
  source: /note="DNA/RNA"
  modified_base (8)..(8): bicyclic nucleic acid (BNA)
  source: /note="3' tri-ethylene glycol (TEG)"
uaaguuct

SEQ ID NO: 5646 - RNA, 20 nt, Artificial Sequence
  source: /note="Description of Artificial Sequence: Synthetic oligonucleotide"
  source: /note="RNA"
  modified_base (20)..(20): bicyclic nucleic acid (BNA)
  source: /note="3' tri-ethylene glycol (TEG)"
guaaguucuguccaagcccg

SEQ ID NO: 5647 - RNA, 19 nt, Artificial Sequence
  source: /note="Description of Artificial Sequence: Synthetic oligonucleotide"
  source: /note="RNA"
  modified_base (19)..(19): bicyclic nucleic acid (BNA)
  source: /note="3' tri-ethylene glycol (TEG)"
guaaguucuguccaagccc

SEQ ID NO: 5648 - RNA, 17 nt, Artificial Sequence
  source: /note="Description of Artificial Sequence: Synthetic oligonucleotide"
  source: /note="RNA"
  modified_base (17)..(17): bicyclic nucleic acid (BNA)
  source: /note="3' tri-ethylene glycol (TEG)"
guaaguucuguccaagc

SEQ ID NO: 5649 - RNA, 16 nt, Artificial Sequence
  source: /note="Description of Artificial Sequence: Synthetic oligonucleotide"
  source: /note="RNA"
  modified_base (16)..(16): bicyclic nucleic acid (BNA)
  source: /note="3' tri-ethylene glycol (TEG)"
guaaguucuguccaag

SEQ ID NO: 5650 - RNA, 15 nt, Artificial Sequence
  source: /note="Description of Artificial Sequence: Synthetic oligonucleotide"
  source: /note="RNA"
  modified_base (15)..(15): bicyclic nucleic acid (BNA)
  source: /note="3' tri-ethylene glycol (TEG)"
guaaguucuguccaa

SEQ ID NO: 5651 - RNA, 14 nt, Artificial Sequence
  source: /note="Description of Artificial Sequence: Synthetic oligonucleotide"
  source: /note="RNA"
  modified_base (14)..(14): bicyclic nucleic acid (BNA)
  source: /note="3' tri-ethylene glycol (TEG)"
guaaguucugucca

SEQ ID NO: 5652 - RNA, 13 nt, Artificial Sequence
  source: /note="Description of Artificial Sequence: Synthetic oligonucleotide"
  source: /note="RNA"
  modified_base (13)..(13): bicyclic nucleic acid (BNA)
  source: /note="3' tri-ethylene glycol (TEG)"
guaaguucugucc

SEQ ID NO: 5653 - RNA, 12 nt, Artificial Sequence
  source: /note="Description of Artificial Sequence: Synthetic oligonucleotide"
  source: /note="RNA"
  modified_base (12)..(12): bicyclic nucleic acid (BNA)
  source: /note="3' tri-ethylene glycol (TEG)"
guaaguucuguc

SEQ ID NO: 5654 - DNA, 11 bp, Artificial Sequence
  source: /note="Description of Artificial Sequence: Synthetic oligonucleotide"
  source: /note="Description of Combined DNA/RNA Molecule: Synthetic oligonucleotide"
  source: /note="DNA/RNA"
  modified_base (11)..(11): bicyclic nucleic acid (BNA)
  source: /note="3' tri-ethylene glycol (TEG)"
guaaguucugt

SEQ ID NO: 5655 - RNA, 10 nt, Artificial Sequence
  source: /note="Description of Artificial Sequence: Synthetic oligonucleotide"
  source: /note="RNA"
  modified_base (10)..(10): bicyclic nucleic acid (BNA)
  source: /note="3' tri-ethylene glycol (TEG)"
guaaguucug

SEQ ID NO: 5656 - DNA, 9 bp, Artificial Sequence
  source: /note="Description of Artificial Sequence: Synthetic oligonucleotide"
  source: /note="Description of Combined DNA/RNA Molecule: Synthetic oligonucleotide"
  source: /note="DNA/RNA"
  modified_base (9)..(9): bicyclic nucleic acid (BNA)
  source: /note="3' tri-ethylene glycol (TEG)"
guaaguuct

SEQ ID NO: 5657 - RNA, 8 nt, Artificial Sequence
  source: /note="Description of Artificial Sequence: Synthetic oligonucleotide"
  source: /note="RNA"
  modified_base (8)..(8): bicyclic nucleic acid (BNA)
  source: /note="3' tri-ethylene glycol (TEG)"
guaaguuc

SEQ ID NO: 5658 - RNA, 20 nt, Artificial Sequence
  source: /note="Description of Artificial Sequence: Synthetic oligonucleotide"
  source: /note="RNA"
  modified_base (20)..(20): bicyclic nucleic acid (BNA)
  source: /note="3' tri-ethylene glycol (TEG)"
gguaaguucuguccaagccc

SEQ ID NO: 5659 - RNA, 19 nt, Artificial Sequence
  source: /note="Description of Artificial Sequence: Synthetic oligonucleotide"
  source: /note="RNA"
  modified_base (19)..(19): bicyclic nucleic acid (BNA)
  source: /note="3' tri-ethylene glycol (TEG)"
gguaaguucuguccaagcc

SEQ ID NO: 5660 - RNA, 17 nt, Artificial Sequence
  source: /note="Description of Artificial Sequence: Synthetic oligonucleotide"
  source: /note="RNA"
  modified_base (17)..(17): bicyclic nucleic acid (BNA)
  source: /note="3' tri-ethylene glycol (TEG)"
gguaaguucuguccaag

SEQ ID NO: 5661 - RNA, 16 nt, Artificial Sequence
  source: /note="Description of Artificial Sequence: Synthetic oligonucleotide"
  source: /note="RNA"
  modified_base (16)..(16): bicyclic nucleic acid (BNA)
  source: /note="3' tri-ethylene glycol (TEG)"
gguaaguucuguccaa

SEQ ID NO: 5662 - RNA, 15 nt, Artificial Sequence
  source: /note="Description of Artificial Sequence: Synthetic oligonucleotide"
  source: /note="RNA"
  modified_base (15)..(15): bicyclic nucleic acid (BNA)
  source: /note="3' tri-ethylene glycol (TEG)"
gguaaguucugucca

SEQ ID NO: 5663 - RNA, 14 nt, Artificial Sequence
  source: /note="Description of Artificial Sequence: Synthetic oligonucleotide"
  source: /note="RNA"
  modified_base (14)..(14): bicyclic nucleic acid (BNA)
  source: /note="3' tri-ethylene glycol (TEG)"
gguaaguucugucc

SEQ ID NO: 5664 - RNA, 13 nt, Artificial Sequence
  source: /note="Description of Artificial Sequence: Synthetic oligonucleotide"
  source: /note="RNA"
  modified_base (13)..(13): bicyclic nucleic acid (BNA)
  source: /note="3' tri-ethylene glycol (TEG)"
gguaaguucuguc

SEQ ID NO: 5665 - DNA, 12 bp, Artificial Sequence
  source: /note="Description of Artificial Sequence: Synthetic oligonucleotide"
  source: /note="Description of Combined DNA/RNA Molecule: Synthetic oligonucleotide"
  source: /note="DNA/RNA"
  modified_base (12)..(12): bicyclic nucleic acid (BNA)
  source: /note="3' tri-ethylene glycol (TEG)"
gguaaguucugt

SEQ ID NO: 5666 - RNA, 11 nt, Artificial Sequence
  source: /note="Description of Artificial Sequence: Synthetic oligonucleotide"
  source: /note="RNA"
  modified_base (11)..(11): bicyclic nucleic acid (BNA)
  source: /note="3' tri-ethylene glycol (TEG)"
gguaaguucug

SEQ ID NO: 5667 - DNA, 10 bp, Artificial Sequence
  source: /note="Description of Artificial Sequence: Synthetic oligonucleotide"
  source: /note="Description of Combined DNA/RNA Molecule: Synthetic oligonucleotide"
  source: /note="DNA/RNA"
  modified_base (10)..(10): bicyclic nucleic acid (BNA)
  source: /note="3' tri-ethylene glycol (TEG)"
gguaaguuct

SEQ ID NO: 5668 - RNA, 9 nt, Artificial Sequence
  source: /note="Description of Artificial Sequence: Synthetic oligonucleotide"
  source: /note="RNA"
  modified_base (9)..(9): bicyclic nucleic acid (BNA)
  source: /note="3' tri-ethylene glycol (TEG)"
gguaaguuc

SEQ ID NO: 5669 - DNA, 8 bp, Artificial Sequence
  source: /note="Description of Artificial Sequence: Synthetic oligonucleotide"
  source: /note="Description of Combined DNA/RNA Molecule: Synthetic oligonucleotide"
  source: /note="DNA/RNA"
  modified_base (8)..(8): bicyclic nucleic acid (BNA)
  source: /note="3' tri-ethylene glycol (TEG)"
gguaagut

SEQ ID NO: 5670 - RNA, 20 nt, Artificial Sequence
  source: /note="Description of Artificial Sequence: Synthetic oligonucleotide"
  source: /note="RNA"
  modified_base (20)..(20): bicyclic nucleic acid (BNA)
  source: /note="3' tri-ethylene glycol (TEG)"
cgguaaguucuguccaagcc

SEQ ID NO: 5671 - RNA, 19 nt, Artificial Sequence
  source: /note="Description of Artificial Sequence: Synthetic oligonucleotide"
  source: /note="RNA"
  modified_base (19)..(19): bicyclic nucleic acid (BNA)
  source: /note="3' tri-ethylene glycol (TEG)"
cgguaaguucuguccaagc

SEQ ID NO: 5672 - RNA, 18 nt, Artificial Sequence
  source: /note="Description of Artificial Sequence: Synthetic oligonucleotide"
  source: /note="RNA"
  modified_base (18)..(18): bicyclic nucleic acid (BNA)
  source: /note="3' tri-ethylene glycol (TEG)"
cgguaaguucuguccaag

SEQ ID NO: 5673 - RNA, 17 nt, Artificial Sequence
  source: /note="Description of Artificial Sequence: Synthetic oligonucleotide"
  source: /note="RNA"
  modified_base (17)..(17): bicyclic nucleic acid (BNA)
  source: /note="3' tri-ethylene glycol (TEG)"
cgguaaguucuguccaa

SEQ ID NO: 5674 - RNA, 16 nt, Artificial Sequence
  source: /note="Description of Artificial Sequence: Synthetic oligonucleotide"
  source: /note="RNA"
  modified_base (16)..(16): bicyclic nucleic acid (BNA)
  source: /note="3' tri-ethylene glycol (TEG)"
cgguaaguucugucca

SEQ ID NO: 5675 - RNA, 15 nt, Artificial Sequence
  source: /note="Description of Artificial Sequence: Synthetic oligonucleotide"
  source: /note="RNA"
  modified_base (15)..(15): bicyclic nucleic acid (BNA)
  source: /note="3' tri-ethylene glycol (TEG)"
cgguaaguucugucc

SEQ ID NO: 5676 - RNA, 14 nt, Artificial Sequence
  source: /note="Description of Artificial Sequence: Synthetic oligonucleotide"
  source: /note="RNA"
  modified_base (14)..(14): bicyclic nucleic acid (BNA)
  source: /note="3' tri-ethylene glycol (TEG)"
cgguaaguucuguc

SEQ ID NO: 5677 - DNA, 13 bp, Artificial Sequence
  source: /note="Description of Artificial Sequence: Synthetic oligonucleotide"
  source: /note="Description of Combined DNA/RNA Molecule: Synthetic oligonucleotide"
  source: /note="DNA/RNA"
  modified_base (13)..(13): bicyclic nucleic acid (BNA)
  source: /note="3' tri-ethylene glycol (TEG)"
cgguaaguucugt

SEQ ID NO: 5678 - RNA, 12 nt, Artificial Sequence
  source: /note="Description of Artificial Sequence: Synthetic oligonucleotide"
  source: /note="RNA"
  modified_base (12)..(12): bicyclic nucleic acid (BNA)
  source: /note="3' tri-ethylene glycol (TEG)"
cgguaaguucug

SEQ ID NO: 5679 - DNA, 11 bp, Artificial Sequence
  source: /note="Description of Artificial Sequence: Synthetic oligonucleotide"
  source: /note="Description of Combined DNA/RNA Molecule: Synthetic oligonucleotide"
  source: /note="DNA/RNA"
  modified_base (11)..(11): bicyclic nucleic acid (BNA)
  source: /note="3' tri-ethylene glycol (TEG)"
cgguaaguuct

SEQ ID NO: 5680 - RNA, 10 nt, Artificial Sequence
  source: /note="Description of Artificial Sequence: Synthetic oligonucleotide"
  source: /note="RNA"
  modified_base (10)..(10): bicyclic nucleic acid (BNA)
  source: /note="3' tri-ethylene glycol (TEG)"
cgguaaguuc

SEQ ID NO: 5681 - DNA, 9 bp, Artificial Sequence
  source: /note="Description of Artificial Sequence: Synthetic oligonucleotide"
  source: /note="Description of Combined DNA/RNA Molecule: Synthetic oligonucleotide"
  source: /note="DNA/RNA"
  modified_base (9)..(9): bicyclic nucleic acid (BNA)
  source: /note="3' tri-ethylene glycol (TEG)"
cgguaagut

SEQ ID NO: 5682 - DNA, 8 bp, Artificial Sequence
  source: /note="Description of Artificial Sequence: Synthetic oligonucleotide"
  source: /note="Description of Combined DNA/RNA Molecule: Synthetic oligonucleotide"
  source: /note="DNA/RNA"
  modified_base (8)..(8): bicyclic nucleic acid (BNA)
  source: /note="3' tri-ethylene glycol (TEG)"
cgguaagt

SEQ ID NO: 5683 - RNA, 20 nt, Artificial Sequence
  source: /note="Description of Artificial Sequence: Synthetic oligonucleotide"
  source: /note="RNA"
  modified_base (20)..(20): bicyclic nucleic acid (BNA)
  source: /note="3' tri-ethylene glycol (TEG)"
ucgguaaguucuguccaagc

SEQ ID NO: 5684 - RNA, 19 nt, Artificial Sequence
  source: /note="Description of Artificial Sequence: Synthetic oligonucleotide"
  source: /note="RNA"
  modified_base (19)..(19): bicyclic nucleic acid (BNA)
  source: /note="3' tri-ethylene glycol (TEG)"
ucgguaaguucuguccaag

SEQ ID NO: 5685 - RNA, 18 nt, Artificial Sequence
  source: /note="Description of Artificial Sequence: Synthetic oligonucleotide"
  source: /note="RNA"
  modified_base (18)..(18): bicyclic nucleic acid (BNA)
  source: /note="3' tri-ethylene glycol (TEG)"
ucgguaaguucuguccaa

SEQ ID NO: 5686 - RNA, 17 nt, Artificial Sequence
  source: /note="Description of Artificial Sequence: Synthetic oligonucleotide"
  source: /note="RNA"
  modified_base (17)..(17): bicyclic nucleic acid (BNA)
  source: /note="3' tri-ethylene glycol (TEG)"
ucgguaaguucugucca

SEQ ID NO: 5687 - RNA, 16 nt, Artificial Sequence
  source: /note="Description of Artificial Sequence: Synthetic oligonucleotide"
  source: /note="RNA"
  modified_base (16)..(16): bicyclic nucleic acid (BNA)
  source: /note="3' tri-ethylene glycol (TEG)"
ucgguaaguucugucc

SEQ ID NO: 5688 - RNA, 15 nt, Artificial Sequence
  source: /note="Description of Artificial Sequence: Synthetic oligonucleotide"
  source: /note="RNA"
  modified_base (15)..(15): bicyclic nucleic acid (BNA)
  source: /note="3' tri-ethylene glycol (TEG)"
ucgguaaguucuguc

SEQ ID NO: 5689 - DNA, 14 bp, Artificial Sequence
  source: /note="Description of Artificial Sequence: Synthetic oligonucleotide"
  source: /note="Description of Combined DNA/RNA Molecule: Synthetic oligonucleotide"
  source: /note="DNA/RNA"
  modified_base (14)..(14): bicyclic nucleic acid (BNA)
  source: /note="3' tri-ethylene glycol (TEG)"
ucgguaaguucugt

SEQ ID NO: 5690 - RNA, 13 nt, Artificial Sequence
  source: /note="Description of Artificial Sequence: Synthetic oligonucleotide"
  source: /note="RNA"
  modified_base (13)..(13): bicyclic nucleic acid (BNA)
  source: /note="3' tri-ethylene glycol (TEG)"
ucgguaaguucug

SEQ ID NO: 5691 - DNA, 12 bp, Artificial Sequence
  source: /note="Description of Artificial Sequence: Synthetic oligonucleotide"
  source: /note="Description of Combined DNA/RNA Molecule: Synthetic oligonucleotide"
  source: /note="DNA/RNA"
  modified_base (12)..(12): bicyclic nucleic acid (BNA)
  source: /note="3' tri-ethylene glycol (TEG)"
ucgguaaguuct

SEQ ID NO: 5692 - RNA, 11 nt, Artificial Sequence
  source: /note="Description of Artificial Sequence: Synthetic oligonucleotide"
  source: /note="RNA"
  modified_base (11)..(11): bicyclic nucleic acid (BNA)
  source: /note="3' tri-ethylene glycol (TEG)"
ucgguaaguuc

SEQ ID NO: 5693 - DNA, 10 bp, Artificial Sequence
  source: /note="Description of Artificial Sequence: Synthetic oligonucleotide"
  source: /note="Description of Combined DNA/RNA Molecule: Synthetic oligonucleotide"
  source: /note="DNA/RNA"
  modified_base (10)..(10): bicyclic nucleic acid (BNA)
  source: /note="3' tri-ethylene glycol (TEG)"
ucgguaagut

SEQ ID NO: 5694 - DNA, 9 bp, Artificial Sequence
  source: /note="Description of Artificial Sequence: Synthetic oligonucleotide"
  source: /note="Description of Combined DNA/RNA Molecule: Synthetic oligonucleotide"
  source: /note="DNA/RNA"
  modified_base (9)..(9): bicyclic nucleic acid (BNA)
  source: /note="3' tri-ethylene glycol (TEG)"
ucgguaagt

SEQ ID NO: 5695 - RNA, 20 nt, Artificial Sequence
  source: /note="Description of Artificial Sequence: Synthetic oligonucleotide"
  source: /note="RNA"
  modified_base (20)..(20): bicyclic nucleic acid (BNA)
  source: /note="3' tri-ethylene glycol (TEG)"
gucgguaaguucuguccaag

SEQ ID NO: 5696 - RNA, 19 nt, Artificial Sequence
  source: /note="Description of Artificial Sequence: Synthetic oligonucleotide"
  source: /note="RNA"
  modified_base (19)..(19): bicyclic nucleic acid (BNA)
  source: /note="3' tri-ethylene glycol (TEG)"
gucgguaaguucuguccaa

SEQ ID NO: 5697 - RNA, 18 nt, Artificial Sequence
  source: /note="Description of Artificial Sequence: Synthetic oligonucleotide"
  source: /note="RNA"
  modified_base (18)..(18): bicyclic nucleic acid (BNA)
  source: /note="3' tri-ethylene glycol (TEG)"
gucgguaaguucugucca

SEQ ID NO: 5698 - RNA, 17 nt, Artificial Sequence
  source: /note="Description of Artificial Sequence: Synthetic oligonucleotide"
  source: /note="RNA"
  modified_base (17)..(17): bicyclic nucleic acid (BNA)
  source: /note="3' tri-ethylene glycol (TEG)"
gucgguaaguucugucc

SEQ ID NO: 5699 - RNA, 16 nt, Artificial Sequence
  source: /note="Description of Artificial Sequence: Synthetic oligonucleotide"
  source: /note="RNA"
  modified_base (16)..(16): bicyclic nucleic acid (BNA)
  source: /note="3' tri-ethylene glycol (TEG)"
gucgguaaguucuguc

SEQ ID NO: 5700 - DNA, 15 bp, Artificial Sequence
  source: /note="Description of Artificial Sequence: Synthetic oligonucleotide"
  source: /note="Description of Combined DNA/RNA Molecule: Synthetic oligonucleotide"
  source: /note="DNA/RNA"
  modified_base (15)..(15): bicyclic nucleic acid (BNA)
  source: /note="3' tri-ethylene glycol (TEG)"
gucgguaaguucugt

SEQ ID NO: 5701 - RNA, 14 nt, Artificial Sequence
  source: /note="Description of Artificial Sequence: Synthetic oligonucleotide"
  source: /note="RNA"
  modified_base (14)..(14): bicyclic nucleic acid (BNA)
  source: /note="3' tri-ethylene glycol (TEG)"
gucgguaaguucug

SEQ ID NO: 5702 - DNA, 13 bp, Artificial Sequence
  source: /note="Description of Artificial Sequence: Synthetic oligonucleotide"
  source: /note="Description of Combined DNA/RNA Molecule: Synthetic oligonucleotide"
  source: /note="DNA/RNA"
  modified_base (13)..(13): bicyclic nucleic acid (BNA)
  source: /note="3' tri-ethylene glycol (TEG)"
gucgguaaguuct

SEQ ID NO: 5703 - RNA, 12 nt, Artificial Sequence
  source: /note="Description of Artificial Sequence: Synthetic oligonucleotide"
  source: /note="RNA"
  modified_base (12)..(12): bicyclic nucleic acid (BNA)
  source: /note="3' tri-ethylene glycol (TEG)"
gucgguaaguuc

SEQ ID NO: 5704 - DNA, 11 bp, Artificial Sequence
  source: /note="Description of Artificial Sequence: Synthetic oligonucleotide"
  source: /note="Description of Combined DNA/RNA Molecule: Synthetic oligonucleotide"
  source: /note="DNA/RNA"
  modified_base (11)..(11): bicyclic nucleic acid (BNA)
  source: /note="3' tri-ethylene glycol (TEG)"
gucgguaagut

SEQ ID NO: 5705 - DNA, 10 bp, Artificial Sequence
  source: /note="Description of Artificial Sequence: Synthetic oligonucleotide"
  source: /note="Description of Combined DNA/RNA Molecule: Synthetic oligonucleotide"
  source: /note="DNA/RNA"
  modified_base (10)..(10): bicyclic nucleic acid (BNA)
  source: /note="3' tri-ethylene glycol (TEG)"
gucgguaagt

SEQ ID NO: 5706 - RNA, 20 nt, Artificial Sequence
  source: /note="Description of Artificial Sequence: Synthetic oligonucleotide"
  source: /note="RNA"
  modified_base (20)..(20): bicyclic nucleic acid (BNA)
  source: /note="3' tri-ethylene glycol (TEG)"
agucgguaaguucuguccaa

SEQ ID NO: 5707 - RNA, 19 nt, Artificial Sequence
  source: /note="Description of Artificial Sequence: Synthetic oligonucleotide"
  source: /note="RNA"
  modified_base (19)..(19): bicyclic nucleic acid (BNA)
  source: /note="3' tri-ethylene glycol (TEG)"
agucgguaaguucugucca

SEQ ID NO: 5708 - RNA, 17 nt, Artificial Sequence
  source: /note="Description of Artificial Sequence: Synthetic oligonucleotide"
  source: /note="RNA"
  modified_base (17)..(17): bicyclic nucleic acid (BNA)
  source: /note="3' tri-ethylene glycol (TEG)"
agucgguaaguucuguc

SEQ ID NO: 5709 - DNA, 16 bp, Artificial Sequence
  source: /note="Description of Artificial Sequence: Synthetic oligonucleotide"
  source: /note="Description of Combined DNA/RNA Molecule: Synthetic oligonucleotide"
  source: /note="DNA/RNA"
  modified_base (16)..(16): bicyclic nucleic acid (BNA)
  source: /note="3' tri-ethylene glycol (TEG)"
agucgguaaguucugt

SEQ ID NO: 5710 - RNA, 15 nt, Artificial Sequence
  source: /note="Description of Artificial Sequence: Synthetic oligonucleotide"
  source: /note="RNA"
  modified_base (15)..(15): bicyclic nucleic acid (BNA)
  source: /note="3' tri-ethylene glycol (TEG)"
agucgguaaguucug

SEQ ID NO: 5711 - DNA, 14 bp, Artificial Sequence
  source: /note="Description of Artificial Sequence: Synthetic oligonucleotide"
  source: /note="Description of Combined DNA/RNA Molecule: Synthetic oligonucleotide"
  source: /note="DNA/RNA"
  modified_base (14)..(14): bicyclic nucleic acid (BNA)
  source: /note="3' tri-ethylene glycol (TEG)"
agucgguaaguuct

SEQ ID NO: 5712 - RNA, 13 nt, Artificial Sequence
  source: /note="Description of Artificial Sequence: Synthetic oligonucleotide"
  source: /note="RNA"
  modified_base (13)..(13): bicyclic nucleic acid (BNA)
  source: /note="3' tri-ethylene glycol (TEG)"
agucgguaaguuc

SEQ ID NO: 5713 - DNA, 12 bp, Artificial Sequence
  source: /note="Description of Artificial Sequence: Synthetic oligonucleotide"
  source: /note="Description of Combined DNA/RNA Molecule: Synthetic oligonucleotide"
  source: /note="DNA/RNA"
  modified_base (12)..(12): bicyclic nucleic acid (BNA)
  source: /note="3' tri-ethylene glycol (TEG)"
agucgguaagut

SEQ ID NO: 5714 - DNA, 11 bp, Artificial Sequence
  source: /note="Description of Artificial Sequence: Synthetic oligonucleotide"
  source: /note="Description of Combined DNA/RNA Molecule: Synthetic oligonucleotide"
  source: /note="DNA/RNA"
  modified_base (11)..(11): bicyclic nucleic acid (BNA)
  source: /note="3' tri-ethylene glycol (TEG)"
agucgguaagt

SEQ ID NO: 5715 - RNA, 20 nt, Artificial Sequence
  source: /note="Description of Artificial Sequence: Synthetic oligonucleotide"
  source: /note="RNA"
  modified_base (20)..(20): bicyclic nucleic acid (BNA)
  source: /note="3' tri-ethylene glycol (TEG)"
cagucgguaaguucugucca

SEQ ID NO: 5716 - RNA, 19 nt, Artificial Sequence
  source: /note="Description of Artificial Sequence: Synthetic oligonucleotide"
  source: /note="RNA"
  modified_base (19)..(19): bicyclic nucleic acid (BNA)
  source: /note="3' tri-ethylene glycol (TEG)"
cagucgguaaguucugucc

SEQ ID NO: 5717 - RNA, 18 nt, Artificial Sequence
  source: /note="Description of Artificial Sequence: Synthetic oligonucleotide"
  source: /note="RNA"
  modified_base (18)..(18): bicyclic nucleic acid (BNA)
  source: /note="3' tri-ethylene glycol (TEG)"
cagucgguaaguucuguc

SEQ ID NO: 5718 - DNA, 17 bp, Artificial Sequence
  source: /note="Description of Artificial Sequence: Synthetic oligonucleotide"
  source: /note="Description of Combined DNA/RNA Molecule: Synthetic oligonucleotide"
  source: /note="DNA/RNA"
  modified_base (17)..(17): bicyclic nucleic acid (BNA)
  source: /note="3' tri-ethylene glycol (TEG)"
cagucgguaaguucugt

SEQ ID NO: 5719 - RNA, 16 nt, Artificial Sequence
  source: /note="Description of Artificial Sequence: Synthetic oligonucleotide"
  source: /note="RNA"
  modified_base (16)..(16): bicyclic nucleic acid (BNA)
  source: /note="3' tri-ethylene glycol (TEG)"
cagucgguaaguucug

SEQ ID NO: 5720 - DNA, 15 bp, Artificial Sequence
  source: /note="Description of Artificial Sequence: Synthetic oligonucleotide"
  source: /note="Description of Combined DNA/RNA Molecule: Synthetic oligonucleotide"
  source: /note="DNA/RNA"
  modified_base (15)..(15): bicyclic nucleic acid (BNA)
  source: /note="3' tri-ethylene glycol (TEG)"
cagucgguaaguuct

SEQ ID NO: 5721 - RNA, 14 nt, Artificial Sequence
  source: /note="Description of Artificial Sequence: Synthetic oligonucleotide"
  source: /note="RNA"
  modified_base (14)..(14): bicyclic nucleic acid (BNA)
  source: /note="3' tri-ethylene glycol (TEG)"
cagucgguaaguuc

SEQ ID NO: 5722 - DNA, 13 bp, Artificial Sequence
  source: /note="Description of Artificial Sequence: Synthetic oligonucleotide"
  source: /note="Description of Combined DNA/RNA Molecule: Synthetic oligonucleotide"
  source: /note="DNA/RNA"
  modified_base (13)..(13): bicyclic nucleic acid (BNA)
  source: /note="3' tri-ethylene glycol (TEG)"
cagucgguaagut

SEQ ID NO: 5723 - DNA, 12 bp, Artificial Sequence
  source: /note="Description of Artificial Sequence: Synthetic oligonucleotide"
  source: /note="Description of Combined DNA/RNA Molecule: Synthetic oligonucleotide"
  source: /note="DNA/RNA"
  modified_base (12)..(12): bicyclic nucleic acid (BNA)
  source: /note="3' tri-ethylene glycol (TEG)"
cagucgguaagt

SEQ ID NO: 5724 - RNA, 20 nt, Artificial Sequence
  source: /note="Description of Artificial Sequence: Synthetic oligonucleotide"
  source: /note="RNA"
  modified_base (20)..(20): bicyclic nucleic acid (BNA)
  source: /note="3' tri-ethylene glycol (TEG)"
ccagucgguaaguucugucc

SEQ ID NO: 5725 - RNA, 19 nt, Artificial Sequence
  source: /note="Description of Artificial Sequence: Synthetic oligonucleotide"
  source: /note="RNA"
  modified_base (19)..(19): bicyclic nucleic acid (BNA)
  source: /note="3' tri-ethylene glycol (TEG)"
ccagucgguaaguucuguc

SEQ ID NO: 5726 - DNA, 18 bp, Artificial Sequence
  source: /note="Description of Artificial Sequence: Synthetic oligonucleotide"
  source: /note="Description of Combined DNA/RNA Molecule: Synthetic oligonucleotide"
  source: /note="DNA/RNA"
  modified_base (18)..(18): bicyclic nucleic acid (BNA)
  source: /note="3' tri-ethylene glycol (TEG)"
ccagucgguaaguucugt

SEQ ID NO: 5727 - RNA, 17 nt, Artificial Sequence
  source: /note="Description of Artificial Sequence: Synthetic oligonucleotide"
  source: /note="RNA"
  modified_base (17)..(17): bicyclic nucleic acid (BNA)
  source: /note="3' tri-ethylene glycol (TEG)"
ccagucgguaaguucug

SEQ ID NO: 5728 - DNA, 16 bp, Artificial Sequence
  source: /note="Description of Artificial Sequence: Synthetic oligonucleotide"
  source: /note="Description of Combined DNA/RNA Molecule: Synthetic oligonucleotide"
  source: /note="DNA/RNA"
  modified_base (16)..(16): bicyclic nucleic acid (BNA)
  source: /note="3' tri-ethylene glycol (TEG)"
ccagucgguaaguuct

SEQ ID NO: 5729 - RNA, 15 nt, Artificial Sequence
  source: /note="Description of Artificial Sequence: Synthetic oligonucleotide"
  source: /note="RNA"
  modified_base (15)..(15): bicyclic nucleic acid (BNA)
  source: /note="3' tri-ethylene glycol (TEG)"
ccagucgguaaguuc

SEQ ID NO: 5730 - DNA, 14 bp, Artificial Sequence
  source: /note="Description of Artificial Sequence: Synthetic oligonucleotide"
  source: /note="Description of Combined DNA/RNA Molecule: Synthetic oligonucleotide"
  source: /note="DNA/RNA"
  modified_base (14)..(14): bicyclic nucleic acid (BNA)
  source: /note="3' tri-ethylene glycol (TEG)"
ccagucgguaagut

SEQ ID NO: 5731 - DNA, 13 bp, Artificial Sequence
  source: /note="Description of Artificial Sequence: Synthetic oligonucleotide"
  source: /note="Description of Combined DNA/RNA Molecule: Synthetic oligonucleotide"
  source: /note="DNA/RNA"
  modified_base (13)..(13): bicyclic nucleic acid (BNA)
  source: /note="3' tri-ethylene glycol (TEG)"
ccagucgguaagt

SEQ ID NO: 5732 - RNA, 20 nt, Artificial Sequence
  source: /note="Description of Artificial Sequence: Synthetic oligonucleotide"
  source: /note="RNA"
  modified_base (20)..(20): bicyclic nucleic acid (BNA)
  source: /note="3' tri-ethylene glycol (TEG)"
gccagucgguaaguucuguc

SEQ ID NO: 5733 - DNA, 19 bp, Artificial Sequence
  source: /note="Description of Artificial Sequence: Synthetic oligonucleotide"
  source: /note="Description of Combined DNA/RNA Molecule: Synthetic oligonucleotide"
  source: /note="DNA/RNA"
  modified_base (19)..(19): bicyclic nucleic acid (BNA)
  source: /note="3' tri-ethylene glycol (TEG)"
gccagucgguaaguucugt

SEQ ID NO: 5734 - RNA, 18 nt, Artificial Sequence
  source: /note="Description of Artificial Sequence: Synthetic oligonucleotide"
  source: /note="RNA"
  modified_base (18)..(18): bicyclic nucleic acid (BNA)
  source: /note="3' tri-ethylene glycol (TEG)"
gccagucgguaaguucug

SEQ ID NO: 5735 - DNA, 17 bp, Artificial Sequence
  source: /note="Description of Artificial Sequence: Synthetic oligonucleotide"
  source: /note="Description of Combined DNA/RNA Molecule: Synthetic oligonucleotide"
  source: /note="DNA/RNA"
  modified_base (17)..(17): bicyclic nucleic acid (BNA)
  source: /note="3' tri-ethylene glycol (TEG)"
gccagucgguaaguuct

SEQ ID NO: 5736 - RNA, 16 nt, Artificial Sequence
  source: /note="Description of Artificial Sequence: Synthetic oligonucleotide"
  source: /note="RNA"
  modified_base (16)..(16): bicyclic nucleic acid (BNA)
  source: /note="3' tri-ethylene glycol (TEG)"
gccagucgguaaguuc

SEQ ID NO: 5737 - DNA, 15 bp, Artificial Sequence
  source: /note="Description of Artificial Sequence: Synthetic oligonucleotide"
  source: /note="Description of Combined DNA/RNA Molecule: Synthetic oligonucleotide"
  source: /note="DNA/RNA"
  modified_base (15)..(15): bicyclic nucleic acid (BNA)
  source: /note="3' tri-ethylene glycol (TEG)"
gccagucgguaagut

SEQ ID NO: 5738 - DNA, 14 bp, Artificial Sequence
  source: /note="Description of Artificial Sequence: Synthetic oligonucleotide"
  source: /note="Description of Combined DNA/RNA Molecule: Synthetic oligonucleotide"
  source: /note="DNA/RNA"
  modified_base (14)..(14): bicyclic nucleic acid (BNA)
  source: /note="3' tri-ethylene glycol (TEG)"
gccagucgguaagt

SEQ ID NO: 5739 - DNA, 20 bp, Artificial Sequence
  source: /note="Description of Artificial Sequence: Synthetic oligonucleotide"
  source: /note="Description of Combined DNA/RNA Molecule: Synthetic oligonucleotide"
  source: /note="DNA/RNA"
  modified_base (20)..(20): bicyclic nucleic acid (BNA)
  source: /note="3' tri-ethylene glycol (TEG)"
ucaaggaagauggcauuuct

SEQ ID NO: 5740 - RNA, 22 nt, Artificial Sequence
  source: /note="Description of Artificial Sequence: Synthetic oligonucleotide"
  source: /note="RNA"
  modified_base (22)..(22): bicyclic nucleic acid (BNA)
  source: /note="3' tri-ethylene glycol (TEG)"
ucaaggaagauggcauuucuag

SEQ ID NO: 5741 - DNA, 16 bp, Artificial Sequence
  source: /note="Description of Artificial Sequence: Synthetic oligonucleotide"
  source: /note="Description of Combined DNA/RNA Molecule: Synthetic oligonucleotide"
  source: /note="DNA/RNA"
  modified_base (16)..(16): bicyclic nucleic acid (BNA)
  source: /note="3' tri-ethylene glycol (TEG)"
ucaaggaagauggcat

SEQ ID NO: 5742 - DNA, 15 bp, Artificial Sequence
  source: /note="Description of Artificial Sequence: Synthetic oligonucleotide"
  source: /note="Description of Combined DNA/RNA Molecule: Synthetic oligonucleotide"
  source: /note="DNA/RNA"
  modified_base (15)..(15): bicyclic nucleic acid (BNA)
  source: /note="3' tri-ethylene glycol (TEG)"
gaagauggcauuuct

SEQ ID NO: 5743 - RNA, 21 nt, Artificial Sequence
  source: /note="Description of Artificial Sequence: Synthetic oligonucleotide"
  source: /note="RNA"
  modified_base (21)..(21): bicyclic nucleic acid (BNA)
  source: /note="3' tri-ethylene glycol (TEG)"
ucaaggaagauggcauuucua

SEQ ID NO: 5744 - RNA, 19 nt, Artificial Sequence
  source: /note="Description of Artificial Sequence: Synthetic oligonucleotide"
  source: /note="RNA"
  modified_base (19)..(19): bicyclic nucleic acid (BNA)
  source: /note="3' tri-ethylene glycol (TEG)"
ucaaggaagauggcauuuc

SEQ ID NO: 5745 - DNA, 18 bp, Artificial Sequence
  source: /note="Description of Artificial Sequence: Synthetic oligonucleotide"
  source: /note="Description of Combined DNA/RNA Molecule: Synthetic oligonucleotide"
  source: /note="DNA/RNA"
  modified_base (18)..(18): bicyclic nucleic acid (BNA)
  source: /note="3' tri-ethylene glycol (TEG)"
ucaaggaagauggcauut

SEQ ID NO: 5746 - DNA, 17 bp, Artificial Sequence
  source: /note="Description of Artificial Sequence: Synthetic oligonucleotide"
  source: /note="Description of Combined DNA/RNA Molecule: Synthetic oligonucleotide"
  source: /note="DNA/RNA"
  modified_base (17)..(17): bicyclic nucleic acid (BNA)
  source: /note="3' tri-ethylene glycol (TEG)"
ucaaggaagauggcaut

SEQ ID NO: 5747 - RNA, 15 nt, Artificial Sequence
  source: /note="Description of Artificial Sequence: Synthetic oligonucleotide"
  source: /note="RNA"
  modified_base (15)..(15): bicyclic nucleic acid (BNA)
  source: /note="3' tri-ethylene glycol (TEG)"
ucaaggaagauggca

SEQ ID NO: 5748 - RNA, 14 nt, Artificial Sequence
  source: /note="Description of Artificial Sequence: Synthetic oligonucleotide"
  source: /note="RNA"
  modified_base (14)..(14): bicyclic nucleic acid (BNA)
  source: /note="3' tri-ethylene glycol (TEG)"
ucaaggaagauggc

SEQ ID NO: 5749 - RNA, 13 nt, Artificial Sequence
  source: /note="Description of Artificial Sequence: Synthetic oligonucleotide"
  source: /note="RNA"
  modified_base (13)..(13): bicyclic nucleic acid (BNA)
  source: /note="3' tri-ethylene glycol (TEG)"
ucaaggaagaugg

SEQ ID NO: 5750 - RNA, 12 nt, Artificial Sequence
  source: /note="Description of Artificial Sequence: Synthetic oligonucleotide"
  source: /note="RNA"
  modified_base (12)..(12): bicyclic nucleic acid (BNA)
  source: /note="3' tri-ethylene glycol (TEG)"
ucaaggaagaug

SEQ ID NO: 5751 - DNA, 11 bp, Artificial Sequence
  source: /note="Description of Artificial Sequence: Synthetic oligonucleotide"
  source: /note="Description of Combined DNA/RNA Molecule: Synthetic oligonucleotide"
  source: /note="DNA/RNA"
  modified_base (11)..(11): bicyclic nucleic acid (BNA)
  source: /note="3' tri-ethylene glycol (TEG)"
ucaaggaagat

SEQ ID NO: 5752 - RNA, 10 nt, Artificial Sequence
  source: /note="Description of Artificial Sequence: Synthetic oligonucleotide"
  source: /note="RNA"
  modified_base (10)..(10): bicyclic nucleic acid (BNA)
  source: /note="3' tri-ethylene glycol (TEG)"
ucaaggaaga

SEQ ID NO: 5753 - RNA, 9 nt, Artificial Sequence
  source: /note="Description of Artificial Sequence: Synthetic oligonucleotide"
  source: /note="RNA"
  modified_base (9)..(9): bicyclic nucleic acid (BNA)
  source: /note="3' tri-ethylene glycol (TEG)"
ucaaggaag

SEQ ID NO: 5754 - RNA, 21 nt, Artificial Sequence
  source: /note="Description of Artificial Sequence: Synthetic oligonucleotide"
  source: /note="RNA"
  modified_base (21)..(21): bicyclic nucleic acid (BNA)
  source: /note="3' tri-ethylene glycol (TEG)"
caaggaagauggcauuucuag

SEQ ID NO: 5755 - RNA, 20 nt, Artificial Sequence
  source: /note="Description of Artificial Sequence: Synthetic oligonucleotide"
  source: /note="RNA"
  modified_base (20)..(20): bicyclic nucleic acid (BNA)
  source: /note="3' tri-ethylene glycol (TEG)"
caaggaagauggcauuucua

SEQ ID NO: 5756 - DNA, 19 bp, Artificial Sequence
  source: /note="Description of Artificial Sequence: Synthetic oligonucleotide"
  source: /note="Description of Combined DNA/RNA Molecule: Synthetic oligonucleotide"
  source: /note="DNA/RNA"
  modified_base (19)..(19): bicyclic nucleic acid (BNA)
  source: /note="3' tri-ethylene glycol (TEG)"
caaggaagauggcauuuct

SEQ ID NO: 5757 - RNA, 18 nt, Artificial Sequence
  source: /note="Description of Artificial Sequence: Synthetic oligonucleotide"
  source: /note="RNA"
  modified_base (18)..(18): bicyclic nucleic acid (BNA)
  source: /note="3' tri-ethylene glycol (TEG)"
caaggaagauggcauuuc

SEQ ID NO: 5758 - DNA, 17 bp, Artificial Sequence
  source: /note="Description of Artificial Sequence: Synthetic oligonucleotide"
  source: /note="Description of Combined DNA/RNA Molecule: Synthetic oligonucleotide"
  source: /note="DNA/RNA"
  modified_base (17)..(17): bicyclic nucleic acid (BNA)
  source: /note="3' tri-ethylene glycol (TEG)"
caaggaagauggcauut

SEQ ID NO: 5759 - DNA, 16 bp, Artificial Sequence
  source: /note="Description of Artificial Sequence: Synthetic oligonucleotide"
  source: /note="Description of Combined DNA/RNA Molecule: Synthetic oligonucleotide"
  source: /note="DNA/RNA"
  modified_base (16)..(16): bicyclic nucleic acid (BNA)
  source: /note="3' tri-ethylene glycol (TEG)"
caaggaagauggcaut

SEQ ID NO: 5760 - DNA, 15 bp, Artificial Sequence
  source: /note="Description of Artificial Sequence: Synthetic oligonucleotide"
  source: /note="Description of Combined DNA/RNA Molecule: Synthetic oligonucleotide"
  source: /note="DNA/RNA"
  modified_base (15)..(15): bicyclic nucleic acid (BNA)
  source: /note="3' tri-ethylene glycol (TEG)"
caaggaagauggcat

SEQ ID NO: 5761 - RNA, 14 nt, Artificial Sequence
  source: /note="Description of Artificial Sequence: Synthetic oligonucleotide"
  source: /note="RNA"
  modified_base (14)..(14): bicyclic nucleic acid (BNA)
  source: /note="3' tri-ethylene glycol (TEG)"
caaggaagauggca

SEQ ID NO: 5762 - RNA, 13 nt, Artificial Sequence
  source: /note="Description of Artificial Sequence: Synthetic oligonucleotide"
  source: /note="RNA"
  modified_base (13)..(13): bicyclic nucleic acid (BNA)
  source: /note="3' tri-ethylene glycol (TEG)"
caaggaagauggc

SEQ ID NO: 5763 - RNA, 12 nt, Artificial Sequence
  source: /note="Description of Artificial Sequence: Synthetic oligonucleotide"
  source: /note="RNA"
  modified_base (12)..(12): bicyclic nucleic acid (BNA)
  source: /note="3' tri-ethylene glycol (TEG)"
caaggaagaugg

SEQ ID NO: 5764 - RNA, 11 nt, Artificial Sequence
  source: /note="Description of Artificial Sequence: Synthetic oligonucleotide"
  source: /note="RNA"
  modified_base (11)..(11): bicyclic nucleic acid (BNA)
  source: /note="3' tri-ethylene glycol (TEG)"
caaggaagaug

SEQ ID NO: 5765 - DNA, 10 bp, Artificial Sequence
  source: /note="Description of Artificial Sequence: Synthetic oligonucleotide"
  source: /note="DNA/RNA"
  modified_base (10)..(10): bicyclic nucleic acid (BNA)
  source: /note="3' tri-ethylene glycol (TEG)"
caaggaagat

SEQ ID NO: 5766 - RNA, 9 nt, Artificial Sequence
  source: /note="Description of Artificial Sequence: Synthetic oligonucleotide"
  source: /note="RNA/Antisense Oligonucleotide"
  modified_base (9)..(9): bicyclic nucleic acid (BNA)
  source: /note="3' tri-ethylene glycol (TEG)"
caaggaaga

SEQ ID NO: 5767 - RNA, 8 nt, Artificial Sequence
  source: /note="Description of Artificial Sequence: Synthetic oligonucleotide"
  source: /note="RNA/Antisense Oligonucleotide"
  modified_base (8)..(8): bicyclic nucleic acid (BNA)
  source: /note="3' tri-ethylene glycol (TEG)"
caaggaag

SEQ ID NO: 5768 - RNA, 20 nt, Artificial Sequence
  source: /note="Description of Artificial Sequence: Synthetic oligonucleotide"
  source: /note="RNA"
  modified_base (20)..(20): bicyclic nucleic acid (BNA)
  source: /note="3' tri-ethylene glycol (TEG)"
aaggaagauggcauuucuag

SEQ ID NO: 5769 - RNA, 19 nt, Artificial Sequence
  source: /note="Description of Artificial Sequence: Synthetic oligonucleotide"
  source: /note="RNA"
  modified_base (19)..(19): bicyclic nucleic acid (BNA)
  source: /note="3' tri-ethylene glycol (TEG)"
aaggaagauggcauuucua

SEQ ID NO: 5770 - DNA, 18 bp, Artificial Sequence
  source: /note="Description of Artificial Sequence: Synthetic oligonucleotide"
  source: /note="Description of Combined DNA/RNA Molecule: Synthetic oligonucleotide"
  source: /note="DNA/RNA"
  modified_base (18)..(18): bicyclic nucleic acid (BNA)
  source: /note="3' tri-ethylene glycol (TEG)"
aaggaagauggcauuuct

SEQ ID NO: 5771 - RNA, 17 nt, Artificial Sequence
  source: /note="Description of Artificial Sequence: Synthetic oligonucleotide"
  source: /note="RNA"
  modified_base (17)..(17): bicyclic nucleic acid (BNA)
  source: /note="3' tri-ethylene glycol (TEG)"
aaggaagauggcauuuc

SEQ ID NO: 5772 - DNA, 16 bp, Artificial Sequence
  source: /note="Description of Artificial Sequence: Synthetic oligonucleotide"
  source: /note="Description of Combined DNA/RNA Molecule: Synthetic oligonucleotide"
  source: /note="DNA/RNA"
  modified_base (16)..(16): bicyclic nucleic acid (BNA)
  source: /note="3' tri-ethylene glycol (TEG)"
aaggaagauggcauut

SEQ ID NO: 5773 - DNA, 15 bp, Artificial Sequence
  source: /note="Description of Artificial Sequence: Synthetic oligonucleotide"
  source: /note="Description of Combined DNA/RNA Molecule: Synthetic oligonucleotide"
  source: /note="DNA/RNA"
  modified_base (15)..(15): bicyclic nucleic acid (BNA)
  source: /note="3' tri-ethylene glycol (TEG)"
aaggaagauggcaut

SEQ ID NO: 5774 - DNA, 14 bp, Artificial Sequence
  source: /note="Description of Artificial Sequence: Synthetic oligonucleotide"
  source: /note="Description of Combined DNA/RNA Molecule: Synthetic oligonucleotide"
  source: /note="DNA/RNA"
  modified_base (14)..(14): bicyclic nucleic acid (BNA)
  source: /note="3' tri-ethylene glycol (TEG)"
aaggaagauggcat

SEQ ID NO: 5775 - RNA, 13 nt, Artificial Sequence
  source: /note="Description of Artificial Sequence: Synthetic oligonucleotide"
  source: /note="RNA"
  modified_base (13)..(13): bicyclic nucleic acid (BNA)
  source: /note="3' tri-ethylene glycol (TEG)"
aaggaagauggca

SEQ ID NO: 5776 - RNA, 12 nt, Artificial Sequence
  source: /note="Description of Artificial Sequence: Synthetic oligonucleotide"
  source: /note="RNA"
  modified_base (12)..(12): bicyclic nucleic acid (BNA)
  source: /note="3' tri-ethylene glycol (TEG)"
aaggaagauggc

SEQ ID NO: 5777 - RNA, 11 nt, Artificial Sequence
  source: /note="Description of Artificial Sequence: Synthetic oligonucleotide"
  source: /note="RNA"
  modified_base (11)..(11): bicyclic nucleic acid (BNA)
  source: /note="3' tri-ethylene glycol (TEG)"
aaggaagaugg

SEQ ID NO: 5778 - RNA, 10 nt, Artificial Sequence
  source: /note="Description of Artificial Sequence: Synthetic oligonucleotide"
  source: /note="RNA"
  modified_base (10)..(10): bicyclic nucleic acid (BNA)
  source: /note="3' tri-ethylene glycol (TEG)"
aaggaagaug

SEQ ID NO: 5779 - DNA, 9 bp, Artificial Sequence
  source: /note="Description of Artificial Sequence: Synthetic oligonucleotide"
  source: /note="DNA/RNA"
  modified_base (9)..(9): bicyclic nucleic acid (BNA)
  source: /note="3' tri-ethylene glycol (TEG)"
aaggaagat

SEQ ID NO: 5780 - RNA, 8 nt, Artificial Sequence
  source: /note="Description of Artificial Sequence: Synthetic oligonucleotide"
  source: /note="RNA/Antisense Oligonucleotide"
  modified_base (8)..(8): bicyclic nucleic acid (BNA)
  source: /note="3' tri-ethylene glycol (TEG)"
aaggaaga

SEQ ID NO: 5781 - RNA, 19 nt, Artificial Sequence
  source: /note="Description of Artificial Sequence: Synthetic oligonucleotide"
  source: /note="RNA"
  modified_base (19)..(19): bicyclic nucleic acid (BNA)
  source: /note="3' tri-ethylene glycol (TEG)"
aggaagauggcauuucuag

SEQ ID NO: 5782 - RNA, 18 nt, Artificial Sequence
  source: /note="Description of Artificial Sequence: Synthetic oligonucleotide"
  source: /note="RNA"
  modified_base (18)..(18): bicyclic nucleic acid (BNA)
  source: /note="3' tri-ethylene glycol (TEG)"
aggaagauggcauuucua

SEQ ID NO: 5783 - DNA, 17 bp, Artificial Sequence
  source: /note="Description of Artificial Sequence: Synthetic oligonucleotide"
  source: /note="Description of Combined DNA/RNA Molecule: Synthetic oligonucleotide"
  source: /note="DNA/RNA"
  modified_base (17)..(17): bicyclic nucleic acid (BNA)
  source: /note="3' tri-ethylene glycol (TEG)"
aggaagauggcauuuct

SEQ ID NO: 5784 - RNA, 16 nt, Artificial Sequence
  source: /note="Description of Artificial Sequence: Synthetic oligonucleotide"
  source: /note="RNA"
  modified_base (16)..(16): bicyclic nucleic acid (BNA)
  source: /note="3' tri-ethylene glycol (TEG)"
aggaagauggcauuuc

SEQ ID NO: 5785 - DNA, 15 bp, Artificial Sequence
  source: /note="Description of Artificial Sequence: Synthetic oligonucleotide"
  source: /note="Description of Combined DNA/RNA Molecule: Synthetic oligonucleotide"
  source: /note="DNA/RNA"
  modified_base (15)..(15): bicyclic nucleic acid (BNA)
  source: /note="3' tri-ethylene glycol (TEG)"
aggaagauggcauut

SEQ ID NO: 5786 - DNA, 14 bp, Artificial Sequence
  source: /note="Description of Artificial Sequence: Synthetic oligonucleotide"
  source: /note="Description of Combined DNA/RNA Molecule: Synthetic oligonucleotide"
  source: /note="DNA/RNA"
  modified_base (14)..(14): bicyclic nucleic acid (BNA)
  source: /note="3' tri-ethylene glycol (TEG)"
aggaagauggcaut

SEQ ID NO: 5787 - DNA, 13 bp, Artificial Sequence
  source: /note="Description of Artificial Sequence: Synthetic oligonucleotide"
  source: /note="Description of Combined DNA/RNA Molecule: Synthetic oligonucleotide"
  source: /note="DNA/RNA"
  modified_base (13)..(13): bicyclic nucleic acid (BNA)
  source: /note="3' tri-ethylene glycol (TEG)"
aggaagauggcat

SEQ ID NO: 5788 - RNA, 12 nt, Artificial Sequence
  source: /note="Description of Artificial Sequence: Synthetic oligonucleotide"
  source: /note="RNA"
  modified_base (12)..(12): bicyclic nucleic acid (BNA)
  source: /note="3' tri-ethylene glycol (TEG)"
aggaagauggca

SEQ ID NO: 5789 - RNA, 10 nt, Artificial Sequence
  source: /note="Description of Artificial Sequence: Synthetic oligonucleotide"
  source: /note="RNA"
  modified_base (10)..(10): bicyclic nucleic acid (BNA)
  source: /note="3' tri-ethylene glycol (TEG)"
aggaagaugg

SEQ ID NO: 5790 - RNA, 9 nt, Artificial Sequence
  source: /note="Description of Artificial Sequence: Synthetic oligonucleotide"
  source: /note="RNA"
  modified_base (9)..(9): bicyclic nucleic acid (BNA)
  source: /note="3' tri-ethylene glycol (TEG)"
aggaagaug

SEQ ID NO: 5791 - DNA, 8 bp, Artificial Sequence
  source: /note="Description of Artificial Sequence: Synthetic oligonucleotide"
  source: /note="DNA/RNA"
  modified_base (8)..(8): bicyclic nucleic acid (BNA)
  source: /note="3' tri-ethylene glycol (TEG)"
aggaagat

SEQ ID NO: 5792 - RNA, 18 nt, Artificial Sequence
  source: /note="Description of Artificial Sequence: Synthetic oligonucleotide"
  source: /note="RNA"
  modified_base (18)..(18): bicyclic nucleic acid (BNA)
  source: /note="3' tri-ethylene glycol (TEG)"
ggaagauggcauuucuag

SEQ ID NO: 5793 - RNA, 17 nt, Artificial Sequence
  source: /note="Description of Artificial Sequence: Synthetic oligonucleotide"
  source: /note="RNA"
  modified_base (17)..(17): bicyclic nucleic acid (BNA)
  source: /note="3' tri-ethylene glycol (TEG)"
ggaagauggcauuucua

SEQ ID NO: 5794 - DNA, 16 bp, Artificial Sequence
  source: /note="Description of Artificial Sequence: Synthetic oligonucleotide"
  source: /note="Description of Combined DNA/RNA Molecule: Synthetic oligonucleotide"
  source: /note="DNA/RNA"
  modified_base (16)..(16): bicyclic nucleic acid (BNA)
  source: /note="3' tri-ethylene glycol (TEG)"
ggaagauggcauuuct

SEQ ID NO: 5795 - RNA, 15 nt, Artificial Sequence
  source: /note="Description of Artificial Sequence: Synthetic oligonucleotide"
  source: /note="RNA"
  modified_base (15)..(15): bicyclic nucleic acid (BNA)
  source: /note="3' tri-ethylene glycol (TEG)"
ggaagauggcauuuc

SEQ ID NO: 5796 - DNA, 14 bp, Artificial Sequence
  source: /note="Description of Artificial Sequence: Synthetic oligonucleotide"
  source: /note="Description of Combined DNA/RNA Molecule: Synthetic oligonucleotide"
  source: /note="DNA/RNA"
  modified_base (14)..(14): bicyclic nucleic acid (BNA)
  source: /note="3' tri-ethylene glycol (TEG)"
ggaagauggcauut

SEQ ID NO: 5797 - DNA, 13 bp, Artificial Sequence
  source: /note="Description of Artificial Sequence: Synthetic oligonucleotide"
  source: /note="Description of Combined DNA/RNA Molecule: Synthetic oligonucleotide"
  source: /note="DNA/RNA"
  modified_base (13)..(13): bicyclic nucleic acid (BNA)
  source: /note="3' tri-ethylene glycol (TEG)"
ggaagauggcaut

SEQ ID NO: 5798 - DNA, 12 bp, Artificial Sequence
  source: /note="Description of Artificial Sequence: Synthetic oligonucleotide"
  source: /note="Description of Combined DNA/RNA Molecule: Synthetic oligonucleotide"
  source: /note="DNA/RNA"
  modified_base (12)..(12): bicyclic nucleic acid (BNA)
  source: /note="3' tri-ethylene glycol (TEG)"
ggaagauggcat

SEQ ID NO: 5799 - RNA, 11 nt, Artificial Sequence
  source: /note="Description of Artificial Sequence: Synthetic oligonucleotide"
  source: /note="RNA"
  modified_base (11)..(11): bicyclic nucleic acid (BNA)
  source: /note="3' tri-ethylene glycol (TEG)"
ggaagauggca

SEQ ID NO: 5800 - RNA, 10 nt, Artificial Sequence
  source: /note="Description of Artificial Sequence: Synthetic oligonucleotide"
  source: /note="RNA"
  modified_base (10)..(10): bicyclic nucleic acid (BNA)
  source: /note="3' tri-ethylene glycol (TEG)"
ggaagauggc

SEQ ID NO: 5801 - RNA, 8 nt, Artificial Sequence
  source: /note="Description of Artificial Sequence: Synthetic oligonucleotide"
  source: /note="RNA"
  modified_base (8)..(8): bicyclic nucleic acid (BNA)
  source: /note="3' tri-ethylene glycol (TEG)"
ggaagaug

SEQ ID NO: 5802 - RNA, 17 nt, Artificial Sequence
  source: /note="Description of Artificial Sequence: Synthetic oligonucleotide"
  source: /note="RNA"
  modified_base (17)..(17): bicyclic nucleic acid (BNA)
  source: /note="3' tri-ethylene glycol (TEG)"
gaagauggcauuucuag

SEQ ID NO: 5803 - RNA, 16 nt, Artificial Sequence
  source: /note="Description of Artificial Sequence: Synthetic oligonucleotide"
  source: /note="RNA"
  modified_base (16)..(16): bicyclic nucleic acid (BNA)
  source: /note="3' tri-ethylene glycol (TEG)"
gaagauggcauuucua

SEQ ID NO: 5804 - RNA, 14 nt, Artificial Sequence
  source: /note="Description of Artificial Sequence: Synthetic oligonucleotide"
  source: /note="RNA"
  modified_base (14)..(14): bicyclic nucleic acid (BNA)
  source: /note="3' tri-ethylene glycol (TEG)"
gaagauggcauuuc

SEQ ID NO: 5805 - DNA, 13 bp, Artificial Sequence
  source: /note="Description of Artificial Sequence: Synthetic oligonucleotide"
  source: /note="Description of Combined DNA/RNA Molecule: Synthetic oligonucleotide"
  source: /note="DNA/RNA"
  modified_base (13)..(13): bicyclic nucleic acid (BNA)
  source: /note="3' tri-ethylene glycol (TEG)"
gaagauggcauut

SEQ ID NO: 5806 - DNA, 12 bp, Artificial Sequence
  source: /note="Description of Artificial Sequence: Synthetic oligonucleotide"
  source: /note="Description of Combined DNA/RNA Molecule: Synthetic oligonucleotide"
  source: /note="DNA/RNA"
  modified_base (12)..(12): bicyclic nucleic acid (BNA)
  source: /note="3' tri-ethylene glycol (TEG)"
gaagauggcaut

SEQ ID NO: 5807 - DNA, 11 bp, Artificial Sequence
  source: /note="Description of Artificial Sequence: Synthetic oligonucleotide"
  source: /note="Description of Combined DNA/RNA Molecule: Synthetic oligonucleotide"
  source: /note="DNA/RNA"
  modified_base (11)..(11): bicyclic nucleic acid (BNA)
  source: /note="3' tri-ethylene glycol (TEG)"
gaagauggcat

SEQ ID NO: 5808 - RNA, 10 nt, Artificial Sequence
  source: /note="Description of Artificial Sequence: Synthetic oligonucleotide"
  source: /note="RNA"
  modified_base (10)..(10): bicyclic nucleic acid (BNA)
  source: /note="3' tri-ethylene glycol (TEG)"
gaagauggca

SEQ ID NO: 5809 - RNA, 9 nt, Artificial Sequence
  source: /note="Description of Artificial Sequence: Synthetic oligonucleotide"
  source: /note="RNA"
  modified_base (9)..(9): bicyclic nucleic acid (BNA)
  source: /note="3' tri-ethylene glycol (TEG)"
gaagauggc

SEQ ID NO: 5810 - RNA, 8 nt, Artificial Sequence
  source: /note="Description of Artificial Sequence: Synthetic oligonucleotide"
  source: /note="RNA"
  modified_base (8)..(8): bicyclic nucleic acid (BNA)
  source: /note="3' tri-ethylene glycol (TEG)"
gaagaugg

SEQ ID NO: 5811 - RNA, 16 nt, Artificial Sequence
  source: /note="Description of Artificial Sequence: Synthetic oligonucleotide"
  source: /note="RNA"
  modified_base (16)..(16): bicyclic nucleic acid (BNA)
  source: /note="3' tri-ethylene glycol (TEG)"
aagauggcauuucuag

SEQ ID NO: 5812 - RNA, 15 nt, Artificial Sequence
  source: /note="Description of Artificial Sequence: Synthetic oligonucleotide"
  source: /note="RNA"
  modified_base (15)..(15): bicyclic nucleic acid (BNA)
  source: /note="3' tri-ethylene glycol (TEG)"
aagauggcauuucua

SEQ ID NO: 5813 - DNA, 14 bp, Artificial Sequence
  source: /note="Description of Artificial Sequence: Synthetic oligonucleotide"
  source: /note="Description of Combined DNA/RNA Molecule: Synthetic oligonucleotide"
  source: /note="DNA/RNA"
  modified_base (14)..(14): bicyclic nucleic acid (BNA)
  source: /note="3' tri-ethylene glycol (TEG)"
aagauggcauuuct

SEQ ID NO: 5814 - RNA, 13 nt, Artificial Sequence
  source: /note="Description of Artificial Sequence: Synthetic oligonucleotide"
  source: /note="RNA"
  modified_base (13)..(13): bicyclic nucleic acid (BNA)
  source: /note="3' tri-ethylene glycol (TEG)"
aagauggcauuuc

SEQ ID NO: 5815 - DNA, 12 bp, Artificial Sequence
  source: /note="Description of Artificial Sequence: Synthetic oligonucleotide"
  source: /note="Description of Combined DNA/RNA Molecule: Synthetic oligonucleotide"
  source: /note="DNA/RNA"
  modified_base (12)..(12): bicyclic nucleic acid (BNA)
  source: /note="3' tri-ethylene glycol (TEG)"
aagauggcauut

SEQ ID NO: 5816 - DNA, 11 bp, Artificial Sequence
  source: /note="Description of Artificial Sequence: Synthetic oligonucleotide"
  source: /note="Description of Combined DNA/RNA Molecule: Synthetic oligonucleotide"
  source: /note="DNA/RNA"
  modified_base (11)..(11): bicyclic nucleic acid (BNA)
  source: /note="3' tri-ethylene glycol (TEG)"
aagauggcaut

SEQ ID NO: 5817 - DNA, 10 bp, Artificial Sequence
  source: /note="Description of Artificial Sequence: Synthetic oligonucleotide"
  source: /note="Description of Combined DNA/RNA Molecule: Synthetic oligonucleotide"
  source: /note="DNA/RNA"
  modified_base (10)..(10): bicyclic nucleic acid (BNA)
  source: /note="3' tri-ethylene glycol (TEG)"
aagauggcat

SEQ ID NO: 5818 - RNA, 9 nt, Artificial Sequence
  source: /note="Description of Artificial Sequence: Synthetic oligonucleotide"
  source: /note="RNA"
  modified_base (9)..(9): bicyclic nucleic acid (BNA)
  source: /note="3' tri-ethylene glycol (TEG)"
aagauggca

SEQ ID NO: 5819 - RNA, 8 nt, Artificial Sequence
  source: /note="Description of Artificial Sequence: Synthetic oligonucleotide"
  source: /note="RNA"
  modified_base (8)..(8): bicyclic nucleic acid (BNA)
  source: /note="3' tri-ethylene glycol (TEG)"
aagauggc

SEQ ID NO: 5820 - RNA, 15 nt, Artificial Sequence
  source: /note="Description of Artificial Sequence: Synthetic oligonucleotide"
  source: /note="RNA"
  modified_base (15)..(15): bicyclic nucleic acid (BNA)
  source: /note="3' tri-ethylene glycol (TEG)"
agauggcauuucuag

SEQ ID NO: 5821 - RNA, 14 nt, Artificial Sequence
  source: /note="Description of Artificial Sequence: Synthetic oligonucleotide"
  source: /note="RNA"
  modified_base (14)..(14): bicyclic nucleic acid (BNA)
  source: /note="3' tri-ethylene glycol (TEG)"
agauggcauuucua

SEQ ID NO: 5822 - DNA, 13 bp, Artificial Sequence
  source: /note="Description of Artificial Sequence: Synthetic oligonucleotide"
  source: /note="Description of Combined DNA/RNA Molecule: Synthetic oligonucleotide"
  source: /note="DNA/RNA"
  modified_base (13)..(13): bicyclic nucleic acid (BNA)
  source: /note="3' tri-ethylene glycol (TEG)"
agauggcauuuct

SEQ ID NO: 5823 - RNA, 12 nt, Artificial Sequence
  source: /note="Description of Artificial Sequence: Synthetic oligonucleotide"
  source: /note="RNA"
  modified_base (12)..(12): bicyclic nucleic acid (BNA)
  source: /note="3' tri-ethylene glycol (TEG)"
agauggcauuuc

SEQ ID NO: 5824 - DNA, 11 bp, Artificial Sequence
  source: /note="Description of Artificial Sequence: Synthetic oligonucleotide"
  source: /note="Description of Combined DNA/RNA Molecule: Synthetic oligonucleotide"
  source: /note="DNA/RNA"
  modified_base (11)..(11): bicyclic nucleic acid (BNA)
  source: /note="3' tri-ethylene glycol (TEG)"
agauggcauut

SEQ ID NO: 5825 - DNA, 10 bp, Artificial Sequence
  source: /note="Description of Artificial Sequence: Synthetic oligonucleotide"
  source: /note="Description of Combined DNA/RNA Molecule: Synthetic oligonucleotide"
  source: /note="DNA/RNA"
  modified_base (10)..(10): bicyclic nucleic acid (BNA)
  source: /note="3' tri-ethylene glycol (TEG)"
agauggcaut

SEQ ID NO: 5826 - DNA, 9 bp, Artificial Sequence
  source: /note="Description of Artificial Sequence: Synthetic oligonucleotide"
  source: /note="Description of Combined DNA/RNA Molecule: Synthetic oligonucleotide"
  source: /note="DNA/RNA"
  modified_base (9)..(9): bicyclic nucleic acid (BNA)
  source: /note="3' tri-ethylene glycol (TEG)"
agauggcat

SEQ ID NO: 5827 - RNA, 8 nt, Artificial Sequence
  source: /note="Description of Artificial Sequence: Synthetic oligonucleotide"
  source: /note="RNA"
  modified_base (8)..(8): bicyclic nucleic acid (BNA)
  source: /note="3' tri-ethylene glycol (TEG)"
agauggca

SEQ ID NO: 5828 - RNA, 30 nt, Artificial Sequence; identical to SEQ ID NO: 284
  source: /note="Description of Artificial Sequence: Synthetic oligonucleotide"
  source: /note="RNA"
  modified_base (30)..(30): bicyclic nucleic acid (BNA)
  source: /note="3' tri-ethylene glycol (TEG)"

SEQ ID NO: 5829 - RNA, 29 nt, Artificial Sequence
  source: /note="Description of Artificial Sequence: Synthetic oligonucleotide"
  source: /note="RNA"
  modified_base (29)..(29): bicyclic nucleic acid (BNA)
  source: /note="3' tri-ethylene glycol (TEG)"
cuccaacaucaaggaagauggcauuucua

SEQ ID NO: 5830 - DNA, 28 bp, Artificial Sequence
  source: /note="Description of Artificial Sequence: Synthetic oligonucleotide"
  source: /note="Description of Combined DNA/RNA Molecule: Synthetic oligonucleotide"
  source: /note="DNA/RNA"
  modified_base (28)..(28): bicyclic nucleic acid (BNA)
  source: /note="3' tri-ethylene glycol (TEG)"
cuccaacaucaaggaagauggcauuuct

SEQ ID NO: 5831 - RNA, 27 nt, Artificial Sequence
  source: /note="Description of Artificial Sequence: Synthetic oligonucleotide"
  source: /note="RNA"
  modified_base (27)..(27): bicyclic nucleic acid (BNA)
  source: /note="3' tri-ethylene glycol (TEG)"
cuccaacaucaaggaagauggcauuuc

SEQ ID NO: 5832 - DNA, 26 bp, Artificial Sequence
  source: /note="Description of Artificial Sequence: Synthetic oligonucleotide"
  source: /note="Description of Combined DNA/RNA Molecule: Synthetic oligonucleotide"
  source: /note="DNA/RNA"
  modified_base (26)..(26): bicyclic nucleic acid (BNA)
  source: /note="3' tri-ethylene glycol (TEG)"
cuccaacaucaaggaagauggcauut

SEQ ID NO: 5833 - DNA, 25 bp, Artificial Sequence
  source: /note="Description of Artificial Sequence: Synthetic oligonucleotide"
  source: /note="Description of Combined DNA/RNA Molecule: Synthetic oligonucleotide"
  source: /note="DNA/RNA"
  modified_base (25)..(25): bicyclic nucleic acid (BNA)
  source: /note="3' tri-ethylene glycol (TEG)"
cuccaacaucaaggaagauggcaut

SEQ ID NO: 5834 - DNA, 24 bp, Artificial Sequence
  source: /note="Description of Artificial Sequence: Synthetic oligonucleotide"
  source: /note="Description of Combined DNA/RNA Molecule: Synthetic oligonucleotide"
  source: /note="DNA/RNA"
  modified_base (24)..(24): bicyclic nucleic acid (BNA)
  source: /note="3' tri-ethylene glycol (TEG)"
cuccaacaucaaggaagauggcat

SEQ ID NO: 5835 - RNA, 23 nt, Artificial Sequence
  source: /note="Description of Artificial Sequence: Synthetic oligonucleotide"
  source: /note="RNA"
  modified_base (23)..(23): bicyclic nucleic acid (BNA)
  source: /note="3' tri-ethylene glycol (TEG)"
cuccaacaucaaggaagauggca

SEQ ID NO: 5836 - RNA, 22 nt, Artificial Sequence
  source: /note="Description of Artificial Sequence: Synthetic oligonucleotide"
  source: /note="RNA"
  modified_base (22)..(22): bicyclic nucleic acid (BNA)
  source: /note="3' tri-ethylene glycol (TEG)"
cuccaacaucaaggaagauggc

SEQ ID NO: 5837 - RNA, 21 nt, Artificial Sequence
  source: /note="Description of Artificial Sequence: Synthetic oligonucleotide"
  source: /note="RNA"
  modified_base (21)..(21): bicyclic nucleic acid (BNA)
  source: /note="3' tri-ethylene glycol (TEG)"
cuccaacaucaaggaagaugg

SEQ ID NO: 5838 - RNA, 20 nt, Artificial Sequence
  source: /note="Description of Artificial Sequence: Synthetic oligonucleotide"
  source: /note="RNA"
  modified_base (20)..(20): bicyclic nucleic acid (BNA)
  source: /note="3' tri-ethylene glycol (TEG)"
cuccaacaucaaggaagaug

SEQ ID NO: 5839 - DNA, 19 bp, Artificial Sequence
  source: /note="Description of Artificial Sequence: Synthetic oligonucleotide"
  source: /note="Description of Combined DNA/RNA Molecule: Synthetic oligonucleotide"
  source: /note="DNA/RNA"
  modified_base (19)..(19): bicyclic nucleic acid (BNA)
  source: /note="3' tri-ethylene glycol (TEG)"
cuccaacaucaaggaagat

SEQ ID NO: 5840 - RNA, 18 nt, Artificial Sequence
  source: /note="Description of Artificial Sequence: Synthetic oligonucleotide"
  source: /note="RNA"
  modified_base (18)..(18): bicyclic nucleic acid (BNA)
  source: /note="3' tri-ethylene glycol (TEG)"
cuccaacaucaaggaaga

SEQ ID NO: 5841 - RNA, 17 nt, Artificial Sequence
  source: /note="Description of Artificial Sequence: Synthetic oligonucleotide"
  source: /note="RNA"
  modified_base (17)..(17): bicyclic nucleic acid (BNA)
  source: /note="3' tri-ethylene glycol (TEG)"
cuccaacaucaaggaag

SEQ ID NO: 5842 - RNA, 29 nt, Artificial Sequence
  source: /note="Description of Artificial Sequence: Synthetic oligonucleotide"
  source: /note="RNA"
  modified_base (29)..(29): bicyclic nucleic acid (BNA)
  source: /note="3' tri-ethylene glycol (TEG)"
uccaacaucaaggaagauggcauuucuag

SEQ ID NO: 5843 - RNA, 28 nt, Artificial Sequence
  source: /note="Description of Artificial Sequence: Synthetic oligonucleotide"
  source: /note="RNA"
  modified_base (28)..(28): bicyclic nucleic acid (BNA)
  source: /note="3' tri-ethylene glycol (TEG)"
uccaacaucaaggaagauggcauuucua

SEQ ID NO: 5844 - DNA, 27 bp, Artificial Sequence
  source: /note="Description of Artificial Sequence: Synthetic oligonucleotide"
  source: /note="Description of Combined DNA/RNA Molecule: Synthetic oligonucleotide"
  source: /note="DNA/RNA"
  modified_base (27)..(27): bicyclic nucleic acid (BNA)
  source: /note="3' tri-ethylene glycol (TEG)"
uccaacaucaaggaagauggcauuuct

SEQ ID NO: 5845 - RNA, 26 nt, Artificial Sequence
  source: /note="Description of Artificial Sequence: Synthetic oligonucleotide"
  source: /note="RNA"
  modified_base (26)..(26): bicyclic nucleic acid (BNA)
  source: /note="3' tri-ethylene glycol (TEG)"
uccaacaucaaggaagauggcauuuc

SEQ ID NO: 5846 - DNA, 25 bp, Artificial Sequence
  source: /note="Description of Artificial Sequence: Synthetic oligonucleotide"
  source: /note="Description of Combined DNA/RNA Molecule: Synthetic oligonucleotide"
  source: /note="DNA/RNA"
  modified_base (25)..(25): bicyclic nucleic acid (BNA)
  source: /note="3' tri-ethylene glycol (TEG)"
uccaacaucaaggaagauggcauut

SEQ ID NO: 5847 - DNA, 24 bp, Artificial Sequence
  source: /note="Description of Artificial Sequence: Synthetic oligonucleotide"
  source: /note="Description of Combined DNA/RNA Molecule: Synthetic oligonucleotide"
  source: /note="DNA/RNA"
  modified_base (24)..(24): bicyclic nucleic acid (BNA)
  source: /note="3' tri-ethylene glycol (TEG)"
uccaacaucaaggaagauggcaut

SEQ ID NO: 5848 - DNA, 23 bp, Artificial Sequence
  source: /note="Description of Artificial Sequence: Synthetic oligonucleotide"
  source: /note="Description of Combined DNA/RNA Molecule: Synthetic oligonucleotide"
  source: /note="DNA/RNA"
  modified_base (23)..(23): bicyclic nucleic acid (BNA)
  source: /note="3' tri-ethylene glycol (TEG)"
uccaacaucaaggaagauggcat

SEQ ID NO: 5849 - RNA, 22 nt, Artificial Sequence
  source: /note="Description of Artificial Sequence: Synthetic oligonucleotide"
  source: /note="RNA"
  modified_base (22)..(22): bicyclic nucleic acid (BNA)
  source: /note="3' tri-ethylene glycol (TEG)"
uccaacaucaaggaagauggca

SEQ ID NO: 5850 - RNA, 21 nt, Artificial Sequence
  source: /note="Description of Artificial Sequence: Synthetic oligonucleotide"
  source: /note="RNA"
  modified_base (21)..(21): bicyclic nucleic acid (BNA)
  source: /note="3' tri-ethylene glycol (TEG)"
uccaacaucaaggaagauggc

SEQ ID NO: 5851 - RNA, 20 nt, Artificial Sequence
  source: /note="Description of Artificial Sequence: Synthetic oligonucleotide"
  source: /note="RNA"
  modified_base (20)..(20): bicyclic nucleic acid (BNA)
  source: /note="3' tri-ethylene glycol (TEG)"
uccaacaucaaggaagaugg

SEQ ID NO: 5852 - RNA, 19 nt, Artificial Sequence
  source: /note="Description of Artificial Sequence: Synthetic oligonucleotide"
  source: /note="RNA"
  modified_base (19)..(19): bicyclic nucleic acid (BNA)
  source: /note="3' tri-ethylene glycol (TEG)"
uccaacaucaaggaagaug

SEQ ID NO: 5853 - DNA, 18 bp, Artificial Sequence
  source: /note="Description of Artificial Sequence: Synthetic oligonucleotide"
  source: /note="Description of Combined DNA/RNA Molecule: Synthetic oligonucleotide"
  source: /note="DNA/RNA"
  modified_base (18)..(18): bicyclic nucleic acid (BNA)
  source: /note="3' tri-ethylene glycol (TEG)"
uccaacaucaaggaagat

SEQ ID NO: 5854 - RNA, 17 nt, Artificial Sequence
  source: /note="Description of Artificial Sequence: Synthetic oligonucleotide"
  source: /note="RNA"
  modified_base (17)..(17): bicyclic nucleic acid (BNA)
  source: /note="3' tri-ethylene glycol (TEG)"
uccaacaucaaggaaga

SEQ ID NO: 5855 - RNA, 16 nt, Artificial Sequence
  source: /note="Description of Artificial Sequence: Synthetic oligonucleotide"
  source: /note="RNA"
  modified_base (16)..(16): bicyclic nucleic acid (BNA)
  source: /note="3' tri-ethylene glycol (TEG)"
uccaacaucaaggaag

SEQ ID NO: 5856 - RNA, 28 nt, Artificial Sequence
  source: /note="Description of Artificial Sequence: Synthetic oligonucleotide"
  source: /note="RNA"
  modified_base (28)..(28): bicyclic nucleic acid (BNA)
  source: /note="3' tri-ethylene glycol (TEG)"
ccaacaucaaggaagauggcauuucuag

SEQ ID NO: 5857 - RNA, 27 nt, Artificial Sequence
  source: /note="Description of Artificial Sequence: Synthetic oligonucleotide"
  source: /note="RNA"
  modified_base (27)..(27): bicyclic nucleic acid (BNA)
  source: /note="3' tri-ethylene glycol (TEG)"
ccaacaucaaggaagauggcauuucua

SEQ ID NO: 5858 - DNA, 26 bp, Artificial Sequence
  source: /note="Description of Artificial Sequence: Synthetic oligonucleotide"
  source: /note="Description of Combined DNA/RNA Molecule: Synthetic oligonucleotide"
  source: /note="DNA/RNA"
  modified_base (26)..(26): bicyclic nucleic acid (BNA)
  source: /note="3' tri-ethylene glycol (TEG)"
ccaacaucaaggaagauggcauuuct

SEQ ID NO: 5859 - RNA, 25 nt, Artificial Sequence
  source: /note="Description of Artificial Sequence: Synthetic oligonucleotide"
  source: /note="RNA"
  modified_base (25)..(25): bicyclic nucleic acid (BNA)
  source: /note="3' tri-ethylene glycol (TEG)"
ccaacaucaaggaagauggcauuuc

SEQ ID NO: 5860 - DNA, 24 bp, Artificial Sequence
  source: /note="Description of Artificial Sequence: Synthetic oligonucleotide"
  source: /note="Description of Combined DNA/RNA Molecule: Synthetic oligonucleotide"
  source: /note="DNA/RNA"
  modified_base (24)..(24): bicyclic nucleic acid (BNA)
  source: /note="3' tri-ethylene glycol (TEG)"
ccaacaucaaggaagauggcauut

SEQ ID NO: 5861 - DNA, 23 bp, Artificial Sequence
  source: /note="Description of Artificial Sequence: Synthetic oligonucleotide"
  source: /note="Description of Combined DNA/RNA Molecule: Synthetic oligonucleotide"
  source: /note="DNA/RNA"
  modified_base (23)..(23): bicyclic nucleic acid (BNA)
  source: /note="3' tri-ethylene glycol (TEG)"
ccaacaucaaggaagauggcaut

SEQ ID NO: 5862 - DNA, 22 bp, Artificial Sequence
  source: /note="Description of Artificial Sequence: Synthetic oligonucleotide"
  source: /note="Description of Combined DNA/RNA Molecule: Synthetic oligonucleotide"
  source: /note="DNA/RNA"
  modified_base (22)..(22): bicyclic nucleic acid (BNA)
  source: /note="3' tri-ethylene glycol (TEG)"
ccaacaucaaggaagauggcat

SEQ ID NO: 5863 - RNA, 21 nt, Artificial Sequence
  source: /note="Description of Artificial Sequence: Synthetic oligonucleotide"
  source: /note="RNA"
  modified_base (21)..(21): bicyclic nucleic acid (BNA)
  source: /note="3' tri-ethylene glycol (TEG)"
ccaacaucaaggaagauggca

SEQ ID NO: 5864 - RNA, 20 nt, Artificial Sequence
  source: /note="Description of Artificial Sequence: Synthetic oligonucleotide"
  source: /note="RNA"
  modified_base (20)..(20): bicyclic nucleic acid (BNA)
  source: /note="3' tri-ethylene glycol (TEG)"
ccaacaucaaggaagauggc

SEQ ID NO: 5865 - RNA, 19 nt, Artificial Sequence
  source: /note="Description of Artificial Sequence: Synthetic oligonucleotide"
  source: /note="RNA"
  modified_base (19)..(19): bicyclic nucleic acid (BNA)
  source: /note="3' tri-ethylene glycol (TEG)"
ccaacaucaaggaagaugg

SEQ ID NO: 5866 - RNA, 18 nt, Artificial Sequence
  source: /note="Description of Artificial Sequence: Synthetic oligonucleotide"
  source: /note="RNA"
  modified_base (18)..(18): bicyclic nucleic acid (BNA)
  source: /note="3' tri-ethylene glycol (TEG)"
ccaacaucaaggaagaug

SEQ ID NO: 5867 - DNA, 17 bp, Artificial Sequence
  source: /note="Description of Artificial Sequence: Synthetic oligonucleotide"
  source: /note="Description of Combined DNA/RNA Molecule: Synthetic oligonucleotide"
  source: /note="DNA/RNA"
  modified_base (17)..(17): bicyclic nucleic acid (BNA)
  source: /note="3' tri-ethylene glycol (TEG)"
ccaacaucaaggaagat

SEQ ID NO: 5868 - RNA, 16 nt, Artificial Sequence
  source: /note="Description of Artificial Sequence: Synthetic oligonucleotide"
  source: /note="RNA"
  modified_base (16)..(16): bicyclic nucleic acid (BNA)
  source: /note="3' tri-ethylene glycol (TEG)"
ccaacaucaaggaaga

SEQ ID NO: 5869 - RNA, 15 nt, Artificial Sequence
  source: /note="Description of Artificial Sequence: Synthetic oligonucleotide"
  source: /note="RNA"
  modified_base (15)..(15): bicyclic nucleic acid (BNA)
  source: /note="3' tri-ethylene glycol (TEG)"
ccaacaucaaggaag

SEQ ID NO: 5870 - RNA, 27 nt, Artificial Sequence
  source: /note="Description of Artificial Sequence: Synthetic oligonucleotide"
  source: /note="RNA"
  modified_base (27)..(27): bicyclic nucleic acid (BNA)
  source: /note="3' tri-ethylene glycol (TEG)"
caacaucaaggaagauggcauuucuag

SEQ ID NO: 5871 - RNA, 26 nt, Artificial Sequence
  source: /note="Description of Artificial Sequence: Synthetic oligonucleotide"
  source: /note="RNA"
  modified_base (26)..(26): bicyclic nucleic acid (BNA)
  source: /note="3' tri-ethylene glycol (TEG)"
caacaucaaggaagauggcauuucua

SEQ ID NO: 5872 - DNA, 25 bp, Artificial Sequence
  source: /note="Description of Artificial Sequence: Synthetic oligonucleotide"
  source: /note="Description of Combined DNA/RNA Molecule: Synthetic oligonucleotide"
  source: /note="DNA/RNA"
  modified_base (25)..(25): bicyclic nucleic acid (BNA)
  source: /note="3' tri-ethylene glycol (TEG)"
caacaucaaggaagauggcauuuct

SEQ ID NO: 5873 - RNA, 24 nt, Artificial Sequence
  source: /note="Description of Artificial Sequence: Synthetic oligonucleotide"
  source: /note="RNA"
  modified_base (24)..(24): bicyclic nucleic acid (BNA)
  source: /note="3' tri-ethylene glycol (TEG)"
caacaucaaggaagauggcauuuc

SEQ ID NO: 5874 - DNA, 23 bp, Artificial Sequence
  source: /note="Description of Artificial Sequence: Synthetic oligonucleotide"
  source: /note="Description of Combined DNA/RNA Molecule: Synthetic oligonucleotide"
  source: /note="DNA/RNA"
  modified_base (23)..(23): bicyclic nucleic acid (BNA)
  source: /note="3' tri-ethylene glycol (TEG)"
caacaucaaggaagauggcauut

SEQ ID NO: 5875 - DNA, 22 bp, Artificial Sequence
  source: /note="Description of Artificial Sequence: Synthetic oligonucleotide"
  source: /note="Description of Combined DNA/RNA Molecule: Synthetic oligonucleotide"
  source: /note="DNA/RNA"
  modified_base (22)..(22): bicyclic nucleic acid (BNA)
  source: /note="3' tri-ethylene glycol (TEG)"
caacaucaaggaagauggcaut

SEQ ID NO: 5876 - DNA, 21 bp, Artificial Sequence
  source: /note="Description of Artificial Sequence: Synthetic oligonucleotide"
  source: /note="Description of Combined DNA/RNA Molecule: Synthetic oligonucleotide"
  source: /note="DNA/RNA"
  modified_base (21)..(21): bicyclic nucleic acid (BNA)
  source: /note="3' tri-ethylene glycol (TEG)"
caacaucaaggaagauggcat

SEQ ID NO: 5877 - RNA, 20 nt, Artificial Sequence
  source: /note="Description of Artificial Sequence: Synthetic oligonucleotide"
  source: /note="RNA"
  modified_base (20)..(20): bicyclic nucleic acid (BNA)
  source: /note="3' tri-ethylene glycol (TEG)"
caacaucaaggaagauggca

SEQ ID NO: 5878 - RNA, 19 nt, Artificial Sequence
  source: /note="Description of Artificial Sequence: Synthetic oligonucleotide"
  source: /note="RNA"
  modified_base (19)..(19): bicyclic nucleic acid (BNA)
  source: /note="3' tri-ethylene glycol (TEG)"
caacaucaaggaagauggc

SEQ ID NO: 5879 - RNA, 18 nt, Artificial Sequence
  source: /note="Description of Artificial Sequence: Synthetic oligonucleotide"
  source: /note="RNA"
  modified_base (18)..(18): bicyclic nucleic acid (BNA)
  source: /note="3' tri-ethylene glycol (TEG)"
caacaucaaggaagaugg

SEQ ID NO: 5880 - RNA, 17 nt, Artificial Sequence
  source: /note="Description of Artificial Sequence: Synthetic oligonucleotide"
  source: /note="RNA"
  modified_base (17)..(17): bicyclic nucleic acid (BNA)
  source: /note="3' tri-ethylene glycol (TEG)"
caacaucaaggaagaug

SEQ ID NO: 5881 - DNA, 16 bp, Artificial Sequence
  source: /note="Description of Artificial Sequence: Synthetic oligonucleotide"
  source: /note="Description of Combined DNA/RNA Molecule: Synthetic oligonucleotide"
  source: /note="DNA/RNA"
  modified_base (16)..(16): bicyclic nucleic acid (BNA)
  source: /note="3' tri-ethylene glycol (TEG)"
caacaucaaggaagat

SEQ ID NO: 5882 - RNA, 15 nt, Artificial Sequence
  source: /note="Description of Artificial Sequence: Synthetic oligonucleotide"
  source: /note="RNA"
  modified_base (15)..(15): bicyclic nucleic acid (BNA)
  source: /note="3' tri-ethylene glycol (TEG)"
caacaucaaggaaga

SEQ ID NO: 5883 - RNA, 14 nt, Artificial Sequence
  source: /note="Description of Artificial Sequence: Synthetic oligonucleotide"
  source: /note="RNA"
  modified_base (14)..(14): bicyclic nucleic acid (BNA)
  source: /note="3' tri-ethylene glycol (TEG)"
caacaucaaggaag

SEQ ID NO: 5884 - RNA, 26 nt, Artificial Sequence
  source: /note="Description of Artificial Sequence: Synthetic oligonucleotide"
  source: /note="RNA"
  modified_base (26)..(26): bicyclic nucleic acid (BNA)
  source: /note="3' tri-ethylene glycol (TEG)"
aacaucaaggaagauggcauuucuag

SEQ ID NO: 5885 - RNA, 25 nt, Artificial Sequence
  source: /note="Description of Artificial Sequence: Synthetic oligonucleotide"
  source: /note="RNA"
  modified_base (25)..(25): bicyclic nucleic acid (BNA)
  source: /note="3' tri-ethylene glycol (TEG)"
aacaucaaggaagauggcauuucua

SEQ ID NO: 5886 - DNA, 24 bp, Artificial Sequence
  source: /note="Description of Artificial Sequence: Synthetic oligonucleotide"
  source: /note="Description of Combined DNA/RNA Molecule: Synthetic oligonucleotide"
  source: /note="DNA/RNA"
  modified_base (24)..(24): bicyclic nucleic acid (BNA)
  source: /note="3' tri-ethylene glycol (TEG)"
aacaucaaggaagauggcauuuct

SEQ ID NO: 5887 - RNA, 23 nt, Artificial Sequence
  source: /note="Description of Artificial Sequence: Synthetic oligonucleotide"
  source: /note="RNA"
  modified_base (23)..(23): bicyclic nucleic acid (BNA)
  source: /note="3' tri-ethylene glycol (TEG)"
aacaucaaggaagauggcauuuc

SEQ ID NO: 5888 - DNA, 22 bp, Artificial Sequence
  source: /note="Description of Artificial Sequence: Synthetic oligonucleotide"
  source: /note="Description of Combined DNA/RNA Molecule: Synthetic oligonucleotide"
  source: /note="DNA/RNA"
  modified_base (22)..(22): bicyclic nucleic acid (BNA)
  source: /note="3' tri-ethylene glycol (TEG)"
aacaucaaggaagauggcauut

SEQ ID NO: 5889 - DNA, 21 bp, Artificial Sequence
  source: /note="Description of Artificial Sequence: Synthetic oligonucleotide"
  source: /note="Description of Combined DNA/RNA Molecule: Synthetic oligonucleotide"
  source: /note="DNA/RNA"
  modified_base (21)..(21): bicyclic nucleic acid (BNA)
  source: /note="3' tri-ethylene glycol (TEG)"
aacaucaaggaagauggcaut

SEQ ID NO: 5890 - DNA, 20 bp, Artificial Sequence
  source: /note="Description of Artificial Sequence: Synthetic oligonucleotide"
  source: /note="Description of Combined DNA/RNA Molecule: Synthetic oligonucleotide"
  source: /note="DNA/RNA"
  modified_base (20)..(20): bicyclic nucleic acid (BNA)
  source: /note="3' tri-ethylene glycol (TEG)"
aacaucaaggaagauggcat

SEQ ID NO: 5891 - RNA, 19 nt, Artificial Sequence
  source: /note="Description of Artificial Sequence: Synthetic oligonucleotide"
  source: /note="RNA"
  modified_base (19)..(19): bicyclic nucleic acid (BNA)
  source: /note="3' tri-ethylene glycol (TEG)"
aacaucaaggaagauggca

SEQ ID NO: 5892 - RNA, 18 nt, Artificial Sequence
  source: /note="Description of Artificial Sequence: Synthetic oligonucleotide"
  source: /note="RNA"
  modified_base (18)..(18): bicyclic nucleic acid (BNA)
  source: /note="3' tri-ethylene glycol (TEG)"
aacaucaaggaagauggc

SEQ ID NO: 5893 - RNA, 17 nt, Artificial Sequence
  source: /note="Description of Artificial Sequence: Synthetic oligonucleotide"
  source: /note="RNA"
  modified_base (17)..(17): bicyclic nucleic acid (BNA)
  source: /note="3' tri-ethylene glycol (TEG)"
aacaucaaggaagaugg

SEQ ID NO: 5894 - RNA, 16 nt, Artificial Sequence
  source: /note="Description of Artificial Sequence: Synthetic oligonucleotide"
  source: /note="RNA"
  modified_base (16)..(16): bicyclic nucleic acid (BNA)
  source: /note="3' tri-ethylene glycol (TEG)"
aacaucaaggaagaug

SEQ ID NO: 5895 - DNA, 15 bp, Artificial Sequence
  source: /note="Description of Artificial Sequence: Synthetic oligonucleotide"
  source: /note="Description of Combined DNA/RNA Molecule: Synthetic oligonucleotide"
  source: /note="DNA/RNA"
  modified_base (15)..(15): bicyclic nucleic acid (BNA)
  source: /note="3' tri-ethylene glycol (TEG)"
aacaucaaggaagat

SEQ ID NO: 5896 - RNA, 14 nt, Artificial Sequence
  source: /note="Description of Artificial Sequence: Synthetic oligonucleotide"
  source: /note="RNA"
  modified_base (14)..(14): bicyclic nucleic acid (BNA)
  source: /note="3' tri-ethylene glycol (TEG)"
aacaucaaggaaga

SEQ ID NO: 5897 - RNA, 13 nt, Artificial Sequence
  source: /note="Description of Artificial Sequence: Synthetic oligonucleotide"
  source: /note="RNA"
  modified_base (13)..(13): bicyclic nucleic acid (BNA)
  source: /note="3' tri-ethylene glycol (TEG)"
aacaucaaggaag

SEQ ID NO: 5898 - RNA, 25 nt, Artificial Sequence
  source: /note="Description of Artificial Sequence: Synthetic oligonucleotide"
  source: /note="RNA"
  modified_base (25)..(25): bicyclic nucleic acid (BNA)
  source: /note="3' tri-ethylene glycol (TEG)"
acaucaaggaagauggcauuucuag

SEQ ID NO: 5899 - RNA, 24 nt, Artificial Sequence
  source: /note="Description of Artificial Sequence: Synthetic oligonucleotide"
  source: /note="RNA"
  modified_base (24)..(24): bicyclic nucleic acid (BNA)
  source: /note="3' tri-ethylene glycol (TEG)"
acaucaaggaagauggcauuucua

SEQ ID NO: 5900 - DNA, 23 bp, Artificial Sequence
  source: /note="Description of Artificial Sequence: Synthetic oligonucleotide"
  source: /note="Description of Combined DNA/RNA Molecule: Synthetic oligonucleotide"
  source: /note="DNA/RNA"
  modified_base (23)..(23): bicyclic nucleic acid (BNA)
  source: /note="3' tri-ethylene glycol (TEG)"
acaucaaggaagauggcauuuct

SEQ ID NO: 5901 - RNA, 22 nt, Artificial Sequence
  source: /note="Description of Artificial Sequence: Synthetic oligonucleotide"
  source: /note="RNA"
  modified_base (22)..(22): bicyclic nucleic acid (BNA)
  source: /note="3' tri-ethylene glycol (TEG)"
acaucaaggaagauggcauuuc

SEQ ID NO: 5902 - DNA, 21 bp, Artificial Sequence
  source: /note="Description of Artificial Sequence: Synthetic oligonucleotide"
  source: /note="Description of Combined DNA/RNA Molecule: Synthetic oligonucleotide"
  source: /note="DNA/RNA"
  modified_base (21)..(21): bicyclic nucleic acid (BNA)
  source: /note="3' tri-ethylene glycol (TEG)"
acaucaaggaagauggcauut

SEQ ID NO: 5903 - DNA, 20 bp, Artificial Sequence
  source: /note="Description of Artificial Sequence: Synthetic oligonucleotide"
  source: /note="Description of Combined DNA/RNA Molecule: Synthetic oligonucleotide"
  source: /note="DNA/RNA"
  modified_base (20)..(20): bicyclic nucleic acid (BNA)
  source: /note="3' tri-ethylene glycol (TEG)"
acaucaaggaagauggcaut

SEQ ID NO: 5904 - DNA, 19 bp, Artificial Sequence
  source: /note="Description of Artificial Sequence: Synthetic oligonucleotide"
  source: /note="Description of Combined DNA/RNA Molecule: Synthetic oligonucleotide"
  source: /note="DNA/RNA"
  modified_base (19)..(19): bicyclic nucleic acid (BNA)
  source: /note="3' tri-ethylene glycol (TEG)"
acaucaaggaagauggcat

SEQ ID NO: 5905 - RNA, 18 nt, Artificial Sequence
  source: /note="Description of Artificial Sequence: Synthetic oligonucleotide"
  source: /note="RNA"
  modified_base (18)..(18): bicyclic nucleic acid (BNA)
  source: /note="3' tri-ethylene glycol (TEG)"
acaucaaggaagauggca

SEQ ID NO: 5906 - RNA, 17 nt, Artificial Sequence
  source: /note="Description of Artificial Sequence: Synthetic oligonucleotide"
  source: /note="RNA"
  modified_base (17)..(17): bicyclic nucleic acid (BNA)
  source: /note="3' tri-ethylene glycol (TEG)"
acaucaaggaagauggc

SEQ ID NO: 5907 - RNA, 16 nt, Artificial Sequence
  source: /note="Description of Artificial Sequence: Synthetic oligonucleotide"
  source: /note="RNA"
  modified_base (16)..(16): bicyclic nucleic acid (BNA)
  source: /note="3' tri-ethylene glycol (TEG)"
acaucaaggaagaugg

SEQ ID NO: 5908 - RNA, 15 nt, Artificial Sequence
  source: /note="Description of Artificial Sequence: Synthetic oligonucleotide"
  source: /note="RNA"
  modified_base (15)..(15): bicyclic nucleic acid (BNA)
  source: /note="3' tri-ethylene glycol (TEG)"
acaucaaggaagaug

SEQ ID NO: 5909 - DNA, 14 bp, Artificial Sequence
  source: /note="Description of Artificial Sequence: Synthetic oligonucleotide"
  source: /note="Description of Combined DNA/RNA Molecule: Synthetic oligonucleotide"
  source: /note="DNA/RNA"
  modified_base (14)..(14): bicyclic nucleic acid (BNA)
  source: /note="3' tri-ethylene glycol (TEG)"
acaucaaggaagat

SEQ ID NO: 5910 - RNA, 13 nt, Artificial Sequence
  source: /note="Description of Artificial Sequence: Synthetic oligonucleotide"
  source: /note="RNA"
  modified_base (13)..(13): bicyclic nucleic acid (BNA)
  source: /note="3' tri-ethylene glycol (TEG)"
acaucaaggaaga

SEQ ID NO: 5911 - RNA, 12 nt, Artificial Sequence
  source: /note="Description of Artificial Sequence: Synthetic oligonucleotide"
  source: /note="RNA"
  modified_base (12)..(12): bicyclic nucleic acid (BNA)
  source: /note="3' tri-ethylene glycol (TEG)"
acaucaaggaag

SEQ ID NO: 5912 - RNA, 24 nt, Artificial Sequence
  source: /note="Description of Artificial Sequence: Synthetic oligonucleotide"
  source: /note="RNA"
  modified_base (24)..(24): bicyclic nucleic acid (BNA)
  source: /note="3' tri-ethylene glycol (TEG)"
caucaaggaagauggcauuucuag

SEQ ID NO: 5913 - RNA, 23 nt, Artificial Sequence
  source: /note="Description of Artificial Sequence: Synthetic oligonucleotide"
  source: /note="RNA"
  modified_base (23)..(23): bicyclic nucleic acid (BNA)
  source: /note="3' tri-ethylene glycol (TEG)"
caucaaggaagauggcauuucua

SEQ ID NO: 5914 - DNA, 22 bp, Artificial Sequence
  source: /note="Description of Artificial Sequence: Synthetic oligonucleotide"
  source: /note="Description of Combined DNA/RNA Molecule: Synthetic oligonucleotide"
  source: /note="DNA/RNA"
  modified_base (22)..(22): bicyclic nucleic acid (BNA)
  source: /note="3' tri-ethylene glycol (TEG)"
caucaaggaagauggcauuuct

SEQ ID NO: 5915 - RNA, 21 nt, Artificial Sequence
  source: /note="Description of Artificial Sequence: Synthetic oligonucleotide"
  source: /note="RNA"
  modified_base (21)..(21): bicyclic nucleic acid (BNA)
  source: /note="3' tri-ethylene glycol (TEG)"
caucaaggaagauggcauuuc

SEQ ID NO: 5916 - DNA, 20 bp, Artificial Sequence
  source: /note="Description of Artificial Sequence: Synthetic oligonucleotide"
  source: /note="Description of Combined DNA/RNA Molecule: Synthetic oligonucleotide"
  source: /note="DNA/RNA"
  modified_base (20)..(20): bicyclic nucleic acid (BNA)
  source: /note="3' tri-ethylene glycol (TEG)"
caucaaggaagauggcauut

SEQ ID NO: 5917 - DNA, 19 bp, Artificial Sequence
  source: /note="Description of Artificial Sequence: Synthetic oligonucleotide"
  source: /note="Description of Combined DNA/RNA Molecule: Synthetic oligonucleotide"
  source: /note="DNA/RNA"
  modified_base (19)..(19): bicyclic nucleic acid (BNA)
  source: /note="3' tri-ethylene glycol (TEG)"
caucaaggaagauggcaut

SEQ ID NO: 5918 - DNA, 18 bp, Artificial Sequence
  source: /note="Description of Artificial Sequence: Synthetic oligonucleotide"
  source: /note="Description of Combined DNA/RNA Molecule: Synthetic oligonucleotide"
  source: /note="DNA/RNA"
  modified_base (18)..(18): bicyclic nucleic acid (BNA)
  source: /note="3' tri-ethylene glycol (TEG)"
caucaaggaagauggcat

SEQ ID NO: 5919 - RNA, 17 nt, Artificial Sequence
  source: /note="Description of Artificial Sequence: Synthetic oligonucleotide"
  source: /note="RNA"
  modified_base (17)..(17): bicyclic nucleic acid (BNA)
  source: /note="3' tri-ethylene glycol (TEG)"
caucaaggaagauggca

SEQ ID NO: 5920 - RNA, 16 nt, Artificial Sequence
  source: /note="Description of Artificial Sequence: Synthetic oligonucleotide"
  source: /note="RNA"
  modified_base (16)..(16): bicyclic nucleic acid (BNA)
  source: /note="3' tri-ethylene glycol (TEG)"
caucaaggaagauggc

SEQ ID NO: 5921 - RNA, 15 nt, Artificial Sequence
  source: /note="Description of Artificial Sequence: Synthetic oligonucleotide"
  source: /note="RNA"
  modified_base (15)..(15): bicyclic nucleic acid (BNA)
  source: /note="3' tri-ethylene glycol (TEG)"
caucaaggaagaugg

SEQ ID NO: 5922 - RNA, 14 nt, Artificial Sequence
  source: /note="Description of Artificial Sequence: Synthetic oligonucleotide"
  source: /note="RNA"
  modified_base (14)..(14): bicyclic nucleic acid (BNA)
  source: /note="3' tri-ethylene glycol (TEG)"
caucaaggaagaug

SEQ ID NO: 5923 - DNA, 13 bp, Artificial Sequence
  source: /note="Description of Artificial Sequence: Synthetic oligonucleotide"
  source: /note="Description of Combined DNA/RNA Molecule: Synthetic oligonucleotide"
  source: /note="DNA/RNA"
  modified_base (13)..(13): bicyclic nucleic acid (BNA)
  source: /note="3' tri-ethylene glycol (TEG)"
caucaaggaagat

SEQ ID NO: 5924 - RNA, 12 nt, Artificial Sequence
  source: /note="Description of Artificial Sequence: Synthetic oligonucleotide"
  source: /note="RNA"
  modified_base (12)..(12): bicyclic nucleic acid (BNA)
  source: /note="3' tri-ethylene glycol (TEG)"
caucaaggaaga

SEQ ID NO: 5925 - RNA, 11 nt, Artificial Sequence
  source: /note="Description of Artificial Sequence: Synthetic oligonucleotide"
  source: /note="RNA"
  modified_base (11)..(11): bicyclic nucleic acid (BNA)
  source: /note="3' tri-ethylene glycol (TEG)"
caucaaggaag

SEQ ID NO: 5926 - RNA, 23 nt, Artificial Sequence
  source: /note="Description of Artificial Sequence: Synthetic oligonucleotide"
  source: /note="RNA"
  modified_base (23)..(23): bicyclic nucleic acid (BNA)
  source: /note="3' tri-ethylene glycol (TEG)"
aucaaggaagauggcauuucuag

SEQ ID NO: 5927 - RNA, 22 nt, Artificial Sequence
  source: /note="Description of Artificial Sequence: Synthetic oligonucleotide"
  source: /note="RNA"
  modified_base (22)..(22): bicyclic nucleic acid (BNA)
  source: /note="3' tri-ethylene glycol (TEG)"
aucaaggaagauggcauuucua

SEQ ID NO: 5928 - DNA, 21 bp, Artificial Sequence
  source: /note="Description of Artificial Sequence: Synthetic oligonucleotide"
  source: /note="Description of Combined DNA/RNA Molecule: Synthetic oligonucleotide"
  source: /note="DNA/RNA"
  modified_base (21)..(21): bicyclic nucleic acid (BNA)
  source: /note="3' tri-ethylene glycol (TEG)"
aucaaggaagauggcauuuct

SEQ ID NO: 5929 - RNA, 20 nt, Artificial Sequence
  source: /note="Description of Artificial Sequence: Synthetic oligonucleotide"
  source: /note="RNA"
  modified_base (20)..(20): bicyclic nucleic acid (BNA)
  source: /note="3' tri-ethylene glycol (TEG)"
aucaaggaagauggcauuuc

SEQ ID NO: 5930 - DNA, 19 bp, Artificial Sequence
  source: /note="Description of Artificial Sequence: Synthetic oligonucleotide"
  source: /note="Description of Combined DNA/RNA Molecule: Synthetic oligonucleotide"
  source: /note="DNA/RNA"
  modified_base (19)..(19): bicyclic nucleic acid (BNA)
  source: /note="3' tri-ethylene glycol (TEG)"
aucaaggaagauggcauut

SEQ ID NO: 5931 - DNA, 18 bp, Artificial Sequence
  source: /note="Description of Artificial Sequence: Synthetic oligonucleotide"
  source: /note="Description of Combined DNA/RNA Molecule: Synthetic oligonucleotide"
  source: /note="DNA/RNA"
  modified_base (18)..(18): bicyclic nucleic acid (BNA)
  source: /note="3' tri-ethylene glycol (TEG)"
aucaaggaagauggcaut

SEQ ID NO: 5932 - DNA, 17 bp, Artificial Sequence
  source: /note="Description of Artificial Sequence: Synthetic oligonucleotide"
  source: /note="Description of Combined DNA/RNA Molecule: Synthetic oligonucleotide"
  source: /note="DNA/RNA"
  modified_base (17)..(17): bicyclic nucleic acid (BNA)
  source: /note="3' tri-ethylene glycol (TEG)"
aucaaggaagauggcat

SEQ ID NO: 5933 - RNA, 16 nt, Artificial Sequence
  source: /note="Description of Artificial Sequence: Synthetic oligonucleotide"
  source: /note="RNA"
  modified_base (16)..(16): bicyclic nucleic acid (BNA)
  source: /note="3' tri-ethylene glycol (TEG)"
aucaaggaagauggca

SEQ ID NO: 5934 - RNA, 15 nt, Artificial Sequence
  source: /note="Description of Artificial Sequence: Synthetic oligonucleotide"
  source: /note="RNA"
  modified_base (15)..(15): bicyclic nucleic acid (BNA)
  source: /note="3' tri-ethylene glycol (TEG)"
aucaaggaagauggc

SEQ ID NO: 5935 - RNA, 14 nt, Artificial Sequence
  source: /note="Description of Artificial Sequence: Synthetic oligonucleotide"
  source: /note="RNA"
  modified_base (14)..(14): bicyclic nucleic acid (BNA)
  source: /note="3' tri-ethylene glycol (TEG)"
aucaaggaagaugg

SEQ ID NO: 5936 - RNA, 13 nt, Artificial Sequence
  source: /note="Description of Artificial Sequence: Synthetic oligonucleotide"
  source: /note="RNA"
  modified_base (13)..(13): bicyclic nucleic acid (BNA)
  source: /note="3' tri-ethylene glycol (TEG)"
aucaaggaagaug

SEQ ID NO: 5937 - DNA, 12 bp, Artificial Sequence
  source: /note="Description of Artificial Sequence: Synthetic oligonucleotide"
  source: /note="Description of Combined DNA/RNA Molecule: Synthetic oligonucleotide"
  source: /note="DNA/RNA"
  modified_base (12)..(12): bicyclic nucleic acid (BNA)
  source: /note="3' tri-ethylene glycol (TEG)"
aucaaggaagat

SEQ ID NO: 5938 - RNA, 11 nt, Artificial Sequence
  source: /note="Description of Artificial Sequence: Synthetic oligonucleotide"
  source: /note="RNA"
  modified_base (11)..(11): bicyclic nucleic acid (BNA)
  source: /note="3' tri-ethylene glycol (TEG)"
aucaaggaaga

SEQ ID NO: 5939 - RNA, 10 nt, Artificial Sequence
  source: /note="Description of Artificial Sequence: Synthetic oligonucleotide"
  source: /note="RNA"
  modified_base (10)..(10): bicyclic nucleic acid (BNA)
  source: /note="3' tri-ethylene glycol (TEG)"
aucaaggaag

SEQ ID NO: 5940 - RNA, 23 nt, Artificial Sequence
  source: /note="Description of Artificial Sequence: Synthetic oligonucleotide"
  source: /note="RNA"
  modified_base (23)..(23): bicyclic nucleic acid (BNA)
  source: /note="3' tri-ethylene glycol (TEG)"
ccagagcagguaccuccaacauc

SEQ ID NO: 5941 - RNA, 18 nt, Artificial Sequence
  source: /note="Description of Artificial Sequence: Synthetic oligonucleotide"
  source: /note="RNA"
  modified_base (18)..(18): bicyclic nucleic acid (BNA)
  source: /note="3' tri-ethylene glycol (TEG)"
ccagagcagguaccucca

SEQ ID NO: 5942 - DNA, 23 bp, Artificial Sequence
  source: /note="Description of Artificial Sequence: Synthetic oligonucleotide"
  source: /note="Description of Combined DNA/RNA Molecule: Synthetic oligonucleotide"
  source: /note="DNA/RNA"
  modified_base (23)..(23): bicyclic nucleic acid (BNA)
  source: /note="3' tri-ethylene glycol (TEG)"
ccucugugauuuuauaacuugat

SEQ ID NO: 5943 - DNA, 17 bp, Artificial Sequence
  source: /note="Description of Artificial Sequence: Synthetic oligonucleotide"
  source: /note="Description of Combined DNA/RNA Molecule: Synthetic oligonucleotide"
  source: /note="DNA/RNA"
  modified_base (17)..(17): bicyclic nucleic acid (BNA)
  source: /note="3' tri-ethylene glycol (TEG)"
ucacccaccaucaccct

SEQ ID NO: 5944 - RNA, 20 nt, Artificial Sequence
  source: /note="Description of Artificial Sequence: Synthetic oligonucleotide"
  source: /note="RNA"
  modified_base (20)..(20): bicyclic nucleic acid (BNA)
  source: /note="3' tri-ethylene glycol (TEG)"
ugauauccucaaggucaccc

SEQ ID NO: 5945 - RNA, 22 nt, Artificial Sequence
  source: /note="Description of Artificial Sequence: Synthetic oligonucleotide"
  source: /note="RNA"
  modified_base (22)..(22): bicyclic nucleic acid (BNA)
  source: /note="3' tri-ethylene glycol (TEG)"
cugcuugaugaucaucucguug

SEQ ID NO: 5946 - RNA, 18 nt, Artificial Sequence
  source: /note="Description of Artificial Sequence: Synthetic oligonucleotide"
  source: /note="RNA"
  modified_base (18)..(18): bicyclic nucleic acid (BNA)
  source: /note="3' tri-ethylene glycol (TEG)"
cugcuugaugaucaucuc

SEQ ID NO: 5947 - RNA, 19 nt, Artificial Sequence
  source: /note="Description of Artificial Sequence: Synthetic oligonucleotide"
  source: /note="RNA"
  modified_base (19)..(19): bicyclic nucleic acid (BNA)
  source: /note="3' tri-ethylene glycol (TEG)"
guuuccuuaguaaccacag

SEQ ID NO: 5948 - RNA, 17 nt, Artificial Sequence
  source: /note="Description of Artificial Sequence: Synthetic oligonucleotide"
  source: /note="RNA"
  modified_base (17)..(17): bicyclic nucleic acid (BNA)
  source: /note="3' tri-ethylene glycol (TEG)"
guuuccuuaguaaccac

SEQ ID NO: 5949 - DNA, 20 bp, Artificial Sequence
  source: /note="Description of Artificial Sequence: Synthetic oligonucleotide"
  source: /note="Description of Combined DNA/RNA Molecule: Synthetic oligonucleotide"
  source: /note="DNA/RNA"
  source: /note="5' tri-ethylene glycol (TEG)"
  modified_base (20)..(20): bicyclic nucleic acid (BNA)
  source: /note="3' tri-ethylene glycol (TEG)"
ucaaggaagauggcauuuct

SEQ ID NO: 5950 - RNA, 22 nt, Artificial Sequence
  source: /note="Description of Artificial Sequence: Synthetic oligonucleotide"
  source: /note="RNA"
  source: /note="5' tri-ethylene glycol (TEG)"
  modified_base (22)..(22): bicyclic nucleic acid (BNA)
  source: /note="3' tri-ethylene glycol (TEG)"
ucaaggaagauggcauuucuag

SEQ ID NO: 5951 - RNA, 18 nt, Artificial Sequence
  source: /note="Description of Artificial Sequence: Synthetic oligonucleotide"
  source: /note="RNA"
  source: /note="5' tri-ethylene glycol (TEG)"
  modified_base (18)..(18): bicyclic nucleic acid (BNA)
  source: /note="3' tri-ethylene glycol (TEG)"
gguaaguucuguccaagc

SEQ ID NO: 5952 - RNA, 18 nt, Artificial Sequence
  source: /note="Description of Artificial Sequence: Synthetic oligonucleotide"
  source: /note="RNA"
  source: /note="5' tri-ethylene glycol (TEG)"
  modified_base (18)..(18): bicyclic nucleic acid (BNA)
  source: /note="3' tri-ethylene glycol (TEG)"
guaaguucuguccaagcc

SEQ ID NO: 5953 - RNA, 18 nt, Artificial Sequence
  source: /note="Description of Artificial Sequence: Synthetic oligonucleotide"
  source: /note="RNA"
  source: /note="5' tri-ethylene glycol (TEG)"
  modified_base (18)..(18): bicyclic nucleic acid (BNA)
  source: /note="3' tri-ethylene glycol (TEG)"
agucgguaaguucugucc

SEQ ID NO: 5954 - RNA, 18 nt, Artificial Sequence
  source: /note="Description of Artificial Sequence: Synthetic oligonucleotide"
  source: /note="RNA"
  source: /note="5' tri-ethylene glycol (TEG)"
  modified_base (18)..(18): bicyclic nucleic acid (BNA)
  source: /note="3' tri-ethylene glycol (TEG)"
cuguccaagcccgguuga

SEQ ID NO: 5955 - RNA, 15 nt, Artificial Sequence
  source: /note="Description of Artificial Sequence: Synthetic oligonucleotide"
  source: /note="RNA"
  source: /note="5' tri-ethylene glycol (TEG)"
  modified_base (15)..(15): bicyclic nucleic acid (BNA)
  source: /note="3' tri-ethylene glycol (TEG)"
uaaguucuguccaag

SEQ ID NO: 5956 - RNA, 20 nt, Artificial Sequence
  source: /note="Description of Artificial Sequence: Synthetic oligonucleotide"
  source: /note="RNA"
  source: /note="5' tri-ethylene glycol (TEG)"
  modified_base (20)..(20): bicyclic nucleic acid (BNA)
  source: /note="3' tri-ethylene glycol (TEG)"
uucuguccaagcccgguuga

SEQ ID NO: 5957 - RNA, 19 nt, Artificial Sequence
  source: /note="Description of Artificial Sequence: Synthetic oligonucleotide"
  source: /note="RNA"
  source: /note="5' tri-ethylene glycol (TEG)"
  modified_base (19)..(19): bicyclic nucleic acid (BNA)
  source: /note="3' tri-ethylene glycol (TEG)"
uucuguccaagcccgguug

SEQ ID NO: 5958 - DNA, 18 bp, Artificial Sequence
  source: /note="Description of Artificial Sequence: Synthetic oligonucleotide"
  source: /note="Description of Combined DNA/RNA Molecule: Synthetic oligonucleotide"
  source: /note="DNA/RNA"
  source: /note="5' tri-ethylene glycol (TEG)"
  modified_base (18)..(18): bicyclic nucleic acid (BNA)
  source: /note="3' tri-ethylene glycol (TEG)"
uucuguccaagcccggut

SEQ ID NO: 5959 - DNA, 17 bp, Artificial Sequence
  source: /note="Description of Artificial Sequence: Synthetic oligonucleotide"
  source: /note="Description of Combined DNA/RNA Molecule: Synthetic oligonucleotide"
  source: /note="DNA/RNA"
  source: /note="5' tri-ethylene glycol (TEG)"
  modified_base (17)..(17): bicyclic nucleic acid (BNA)
  source: /note="3' tri-ethylene glycol (TEG)"
uucuguccaagcccggt

SEQ ID NO: 5960 - RNA, 16 nt, Artificial Sequence
  source: /note="Description of Artificial Sequence: Synthetic oligonucleotide"
  source: /note="RNA"
  source: /note="5' tri-ethylene glycol (TEG)"
  modified_base (16)..(16): bicyclic nucleic acid (BNA)
  source: /note="3' tri-ethylene glycol (TEG)"
uucuguccaagcccgg

SEQ ID NO: 5961 - RNA, 15 nt, Artificial Sequence
  source: /note="Description of Artificial Sequence: Synthetic oligonucleotide"
  source: /note="RNA"
  source: /note="5' tri-ethylene glycol (TEG)"
  modified_base (15)..(15): bicyclic nucleic acid (BNA)
  source: /note="3' tri-ethylene glycol (TEG)"
uucuguccaagcccg

SEQ ID NO: 5962 - RNA, 14 nt, Artificial Sequence
  source: /note="Description of Artificial Sequence: Synthetic oligonucleotide"
  source: /note="RNA"
  source: /note="5' tri-ethylene glycol (TEG)"
  modified_base (14)..(14): bicyclic nucleic acid (BNA)
  source: /note="3' tri-ethylene glycol (TEG)"
uucuguccaagccc

SEQ ID NO: 5963 - RNA, 13 nt, Artificial Sequence
  source: /note="Description of Artificial Sequence: Synthetic oligonucleotide"
  source: /note="RNA"
  source: /note="5' tri-ethylene glycol (TEG)"
  modified_base (13)..(13): bicyclic nucleic acid (BNA)
  source: /note="3' tri-ethylene glycol (TEG)"
uucuguccaagcc

SEQ ID NO: 5964 - RNA, 12 nt, Artificial Sequence
  source: /note="Description of Artificial Sequence: Synthetic oligonucleotide"
  source: /note="RNA"
  source: /note="5' tri-ethylene glycol (TEG)"
  modified_base (12)..(12): bicyclic nucleic acid (BNA)
  source: /note="3' tri-ethylene glycol (TEG)"
uucuguccaagc

SEQ ID NO: 5965 - RNA, 11 nt, Artificial Sequence
  source: /note="Description of Artificial Sequence: Synthetic oligonucleotide"
  source: /note="RNA"
  source: /note="5' tri-ethylene glycol (TEG)"
  modified_base (11)..(11): bicyclic nucleic acid (BNA)
  source: /note="3' tri-ethylene glycol (TEG)"
uucuguccaag

SEQ ID NO: 5966 - RNA, 10 nt, Artificial Sequence
  source: /note="Description of Artificial Sequence: Synthetic oligonucleotide"
  source: /note="RNA"
  source: /note="5' tri-ethylene glycol (TEG)"
  modified_base (10)..(10): bicyclic nucleic acid (BNA)
  source: /note="3' tri-ethylene glycol (TEG)"
uucuguccaa

SEQ ID NO: 5967 - RNA, 9 nt, Artificial Sequence
  source: /note="Description of Artificial Sequence: Synthetic oligonucleotide"
  source: /note="RNA"
  source: /note="5' tri-ethylene glycol (TEG)"
  modified_base (9)..(9): bicyclic nucleic acid (BNA)
  source: /note="3' tri-ethylene glycol (TEG)"
uucugucca

SEQ ID NO: 5968 - RNA, 8 nt, Artificial Sequence
  source: /note="Description of Artificial Sequence: Synthetic oligonucleotide"
  source: /note="RNA"
  source: /note="5' tri-ethylene glycol (TEG)"
  modified_base (8)..(8): bicyclic nucleic acid (BNA)
  source: /note="3' tri-ethylene glycol (TEG)"
uucugucc

SEQ ID NO: 5969 - RNA, 19 nt, Artificial Sequence
  source: /note="Description of Artificial Sequence: Synthetic oligonucleotide"
  source: /note="RNA"
  source: /note="5' tri-ethylene glycol (TEG)"
  modified_base (19)..(19): bicyclic nucleic acid (BNA)
  source: /note="3' tri-ethylene glycol (TEG)"
ucuguccaagcccgguuga

SEQ ID NO: 5970 - RNA, 18 nt, Artificial Sequence
  source: /note="Description of Artificial Sequence: Synthetic oligonucleotide"
  source: /note="RNA"
  source: /note="5' tri-ethylene glycol (TEG)"
  modified_base (18)..(18): bicyclic nucleic acid (BNA)
  source: /note="3' tri-ethylene glycol (TEG)"
ucuguccaagcccgguug

SEQ ID NO: 5971 - DNA, 17 bp, Artificial Sequence
  source: /note="Description of Artificial Sequence: Synthetic oligonucleotide"
  source: /note="Description of Combined DNA/RNA Molecule: Synthetic oligonucleotide"
  source: /note="DNA/RNA"
  source: /note="5' tri-ethylene glycol (TEG)"
  modified_base (17)..(17): bicyclic nucleic acid (BNA)
  source: /note="3' tri-ethylene glycol (TEG)"
ucuguccaagcccggut

SEQ ID NO: 5972 - DNA, 16 bp, Artificial Sequence
  source: /note="Description of Artificial Sequence: Synthetic oligonucleotide"
  source: /note="Description of Combined DNA/RNA Molecule: Synthetic oligonucleotide"
  source: /note="DNA/RNA"
  source: /note="5' tri-ethylene glycol (TEG)"
  modified_base (16)..(16): bicyclic nucleic acid (BNA)
  source: /note="3' tri-ethylene glycol (TEG)"
ucuguccaagcccggt

SEQ ID NO: 5973 - RNA, 15 nt, Artificial Sequence
  source: /note="Description of Artificial Sequence: Synthetic oligonucleotide"
  source: /note="RNA"
  source: /note="5' tri-ethylene glycol (TEG)"
  modified_base (15)..(15): bicyclic nucleic acid (BNA)
  source: /note="3' tri-ethylene glycol (TEG)"
ucuguccaagcccgg

SEQ ID NO: 5974 - RNA, 14 nt, Artificial Sequence
  source: /note="Description of Artificial Sequence: Synthetic oligonucleotide"
  source: /note="RNA"
  source: /note="5' tri-ethylene glycol (TEG)"
  modified_base (14)..(14): bicyclic nucleic acid (BNA)
  source: /note="3' tri-ethylene glycol (TEG)"
ucuguccaagcccg

SEQ ID NO: 5975 - RNA, 13 nt, Artificial Sequence
  source: /note="Description of Artificial Sequence: Synthetic oligonucleotide"
  source: /note="RNA"
  source: /note="5' tri-ethylene glycol (TEG)"
  modified_base (13)..(13): bicyclic nucleic acid (BNA)
  source: /note="3' tri-ethylene glycol (TEG)"
ucuguccaagccc

SEQ ID NO: 5976 - RNA, 12 nt, Artificial Sequence
  source: /note="Description of Artificial Sequence: Synthetic oligonucleotide"
  source: /note="RNA"
  source: /note="5' tri-ethylene glycol (TEG)"
  modified_base (12)..(12): bicyclic nucleic acid (BNA)
  source: /note="3' tri-ethylene glycol (TEG)"
ucuguccaagcc

SEQ ID NO: 5977 - RNA, 11 nt, Artificial Sequence
  source: /note="Description of Artificial Sequence: Synthetic oligonucleotide"
  source: /note="RNA"
  source: /note="5' tri-ethylene glycol (TEG)"
  modified_base (11)..(11): bicyclic nucleic acid (BNA)
  source: /note="3' tri-ethylene glycol (TEG)"
ucuguccaagc

SEQ ID NO: 5978 - RNA, 10 nt, Artificial Sequence
  source: /note="Description of Artificial Sequence: Synthetic oligonucleotide"
  source: /note="RNA"
  source: /note="5' tri-ethylene glycol (TEG)"
  modified_base (10)..(10): bicyclic nucleic acid (BNA)
  source: /note="3' tri-ethylene glycol (TEG)"
ucuguccaag

SEQ ID NO: 5979 - RNA, 9 nt, Artificial Sequence
  source: /note="Description of Artificial Sequence: Synthetic oligonucleotide"
  source: /note="RNA"
  source: /note="5' tri-ethylene glycol (TEG)"
  modified_base (9)..(9): bicyclic nucleic acid (BNA)
  source: /note="3' tri-ethylene glycol (TEG)"
ucuguccaa

SEQ ID NO: 5980 - RNA, 8 nt, Artificial Sequence
  source: /note="Description of Artificial Sequence: Synthetic oligonucleotide"
  source: /note="RNA"
  source: /note="5' tri-ethylene glycol (TEG)"
  modified_base (8)..(8): bicyclic nucleic acid (BNA)
  source: /note="3' tri-ethylene glycol (TEG)"
ucugucca

SEQ ID NO: 5981 - RNA, 17 nt, Artificial Sequence
  source: /note="Description of Artificial Sequence: Synthetic oligonucleotide"
  source: /note="RNA"
  source: /note="5' tri-ethylene glycol (TEG)"
  modified_base (17)..(17): bicyclic nucleic acid (BNA)
  source: /note="3' tri-ethylene glycol (TEG)"
cuguccaagcccgguug

SEQ ID NO: 5982 - DNA, 16 bp, Artificial Sequence
  source: /note="Description of Artificial Sequence: Synthetic oligonucleotide"
  source: /note="Description of Combined DNA/RNA Molecule: Synthetic oligonucleotide"
  source: /note="DNA/RNA"
  source: /note="5' tri-ethylene glycol (TEG)"
  modified_base (16)..(16): bicyclic nucleic acid (BNA)
  source: /note="3' tri-ethylene glycol (TEG)"
cuguccaagcccggut

SEQ ID NO: 5983 - DNA, 15 bp, Artificial Sequence
  source: /note="Description of Artificial Sequence: Synthetic oligonucleotide"
  source: /note="Description of Combined DNA/RNA Molecule: Synthetic oligonucleotide"
  source: /note="DNA/RNA"
  source: /note="5' tri-ethylene glycol (TEG)"
  modified_base (15)..(15): bicyclic nucleic acid (BNA)
  source: /note="3' tri-ethylene glycol (TEG)"
cuguccaagcccggt

SEQ ID NO: 5984 - RNA, 14 nt, Artificial Sequence
  source: /note="Description of Artificial Sequence: Synthetic oligonucleotide"
  source: /note="RNA"
  source: /note="5' tri-ethylene glycol (TEG)"
  modified_base (14)..(14): bicyclic nucleic acid (BNA)
  source: /note="3' tri-ethylene glycol (TEG)"
cuguccaagcccgg

SEQ ID NO: 5985 - RNA, 13 nt, Artificial Sequence
  source: /note="Description of Artificial Sequence: Synthetic oligonucleotide"
  source: /note="RNA"
  source: /note="5' tri-ethylene glycol (TEG)"
  modified_base (13)..(13): bicyclic nucleic acid (BNA)
  source: /note="3' tri-ethylene glycol (TEG)"
cuguccaagcccg

SEQ ID NO: 5986 - RNA, 12 nt, Artificial Sequence
  source: /note="Description of Artificial Sequence: Synthetic oligonucleotide"
  source: /note="RNA"
  source: /note="5' tri-ethylene glycol (TEG)"
  modified_base (12)..(12): bicyclic nucleic acid (BNA)
  source: /note="3' tri-ethylene glycol (TEG)"
cuguccaagccc

SEQ ID NO: 5987 - RNA, 11 nt, Artificial Sequence
  source: /note="Description of Artificial Sequence: Synthetic oligonucleotide"
  source: /note="RNA"
  source: /note="5' tri-ethylene glycol (TEG)"
  modified_base (11)..(11): bicyclic nucleic acid (BNA)
  source: /note="3' tri-ethylene glycol (TEG)"
cuguccaagcc

SEQ ID NO: 5988 - RNA, 10 nt, Artificial Sequence
  source: /note="Description of Artificial Sequence: Synthetic oligonucleotide"
  source: /note="RNA"
  source: /note="5' tri-ethylene glycol (TEG)"
  modified_base (10)..(10): bicyclic nucleic acid (BNA)
  source: /note="3' tri-ethylene glycol (TEG)"
cuguccaagc

SEQ ID NO: 5989 - RNA, 9 nt, Artificial Sequence
  source: /note="Description of Artificial Sequence: Synthetic oligonucleotide"
  source: /note="RNA"
  source: /note="5' tri-ethylene glycol (TEG)"
  modified_base (9)..(9): bicyclic nucleic acid (BNA)
  source: /note="3' tri-ethylene glycol (TEG)"
cuguccaag

SEQ ID NO: 5990 - RNA, 8 nt, Artificial Sequence
  source: /note="Description of Artificial Sequence: Synthetic oligonucleotide"
  source: /note="RNA"
  source: /note="5' tri-ethylene glycol (TEG)"
  modified_base (8)..(8): bicyclic nucleic acid (BNA)
  source: /note="3' tri-ethylene glycol (TEG)"
cuguccaa

SEQ ID NO: 5991 - RNA, 20 nt, Artificial Sequence
  source: /note="Description of Artificial Sequence: Synthetic oligonucleotide"
  source: /note="RNA"
  source: /note="5' tri-ethylene glycol (TEG)"
  modified_base (20)..(20): bicyclic nucleic acid (BNA)
  source: /note="3' tri-ethylene glycol (TEG)"
guucuguccaagcccgguug

SEQ ID NO: 5992 - DNA, 19 bp, Artificial Sequence
  source: /note="Description of Artificial Sequence: Synthetic oligonucleotide"
  source: /note="Description of Combined DNA/RNA Molecule: Synthetic oligonucleotide"
  source: /note="DNA/RNA"
  source: /note="5' tri-ethylene glycol (TEG)"
  modified_base (19)..(19): bicyclic nucleic acid (BNA)
  source: /note="3' tri-ethylene glycol (TEG)"
guucuguccaagcccggut

SEQ ID NO: 5993 - DNA, 18 bp, Artificial Sequence
  source: /note="Description of Artificial Sequence: Synthetic oligonucleotide"
  source: /note="Description of Combined DNA/RNA Molecule: Synthetic oligonucleotide"
  source: /note="DNA/RNA"
  source: /note="5' tri-ethylene glycol (TEG)"
  modified_base (18)..(18): bicyclic nucleic acid (BNA)
  source: /note="3' tri-ethylene glycol (TEG)"
guucuguccaagcccggt

SEQ ID NO: 5994 - RNA, 17 nt, Artificial Sequence
  source: /note="Description of Artificial Sequence: Synthetic oligonucleotide"
  source: /note="RNA"
  source: /note="5' tri-ethylene glycol (TEG)"
  modified_base (17)..(17): bicyclic nucleic acid (BNA)
  source: /note="3' tri-ethylene glycol (TEG)"
guucuguccaagcccgg

SEQ ID NO: 5995 - RNA, 16 nt, Artificial Sequence
  source: /note="Description of Artificial Sequence: Synthetic oligonucleotide"
  source: /note="RNA"
  source: /note="5' tri-ethylene glycol (TEG)"
  modified_base (16)..(16): bicyclic nucleic acid (BNA)
  source: /note="3' tri-ethylene glycol (TEG)"
guucuguccaagcccg

SEQ ID NO: 5996 - RNA, 15 nt, Artificial Sequence
  source: /note="Description of Artificial Sequence: Synthetic oligonucleotide"
  source: /note="RNA"
  source: /note="5' tri-ethylene glycol (TEG)"
  modified_base (15)..(15): bicyclic nucleic acid (BNA)
  source: /note="3' tri-ethylene glycol (TEG)"
guucuguccaagccc

SEQ ID NO: 5997 - RNA, 14 nt, Artificial Sequence
  source: /note="Description of Artificial Sequence: Synthetic oligonucleotide"
  source: /note="RNA"
  source: /note="5' tri-ethylene glycol (TEG)"
  modified_base (14)..(14): bicyclic nucleic acid (BNA)
  source: /note="3' tri-ethylene glycol (TEG)"
guucuguccaagcc

SEQ ID NO: 5998 - RNA, 13 nt, Artificial Sequence
  source: /note="Description of Artificial Sequence: Synthetic oligonucleotide"
  source: /note="RNA"
  source: /note="5' tri-ethylene glycol (TEG)"
  modified_base (13)..(13): bicyclic nucleic acid (BNA)
  source: /note="3' tri-ethylene glycol (TEG)"
guucuguccaagc

SEQ ID NO: 5999 - RNA, 12 nt, Artificial Sequence
  source: /note="Description of Artificial Sequence: Synthetic oligonucleotide"
  source: /note="RNA"
  source: /note="5' tri-ethylene glycol (TEG)"
  modified_base (12)..(12): bicyclic nucleic acid (BNA)
  source: /note="3' tri-ethylene glycol (TEG)"
guucuguccaag

SEQ ID NO: 6000 - RNA, 11 nt, Artificial Sequence
  source: /note="Description of Artificial Sequence: Synthetic oligonucleotide"
  source: /note="RNA"
  source: /note="5' tri-ethylene glycol (TEG)"
  modified_base (11)..(11): bicyclic nucleic acid (BNA)
  source: /note="3' tri-ethylene glycol (TEG)"
guucuguccaa

SEQ ID NO: 6001 - RNA, 10 nt, Artificial Sequence
  source: /note="Description of Artificial Sequence: Synthetic oligonucleotide"
  source: /note="RNA"
  source: /note="5' tri-ethylene glycol (TEG)"
  modified_base (10)..(10): bicyclic nucleic acid (BNA)
  source: /note="3' tri-ethylene glycol (TEG)"
guucugucca

SEQ ID NO: 6002 - RNA, 9 nt, Artificial Sequence
  source: /note="Description of Artificial Sequence: Synthetic oligonucleotide"
  source: /note="RNA"
  source: /note="5' tri-ethylene glycol (TEG)"
  modified_base (9)..(9): bicyclic nucleic acid (BNA)
  source: /note="3' tri-ethylene glycol (TEG)"
guucugucc

SEQ ID NO: 6003 - RNA, 8 nt, Artificial Sequence
  source: /note="Description of Artificial Sequence: Synthetic oligonucleotide"
  source: /note="RNA"
  source: /note="5' tri-ethylene glycol (TEG)"
  modified_base (8)..(8): bicyclic nucleic acid (BNA)
  source: /note="3' tri-ethylene glycol (TEG)"
guucuguc

SEQ ID NO: 6004 - DNA, 20 bp, Artificial Sequence
  source: /note="Description of Artificial Sequence: Synthetic oligonucleotide"
  source: /note="Description of Combined DNA/RNA Molecule: Synthetic oligonucleotide"
  source: /note="DNA/RNA"
  source: /note="5' tri-ethylene glycol (TEG)"
  modified_base (20)..(20): bicyclic nucleic acid (BNA)
  source: /note="3' tri-ethylene glycol (TEG)"
aguucuguccaagcccggut

SEQ ID NO: 6005 - DNA, 19 bp, Artificial Sequence
  source: /note="Description of Artificial Sequence: Synthetic oligonucleotide"
  source: /note="Description of Combined DNA/RNA Molecule: Synthetic oligonucleotide"
  source: /note="DNA/RNA"
  source: /note="5' tri-ethylene glycol (TEG)"
  modified_base (19)..(19): bicyclic nucleic acid (BNA)
  source: /note="3' tri-ethylene glycol (TEG)"
aguucuguccaagcccggt

SEQ ID NO: 6006 - RNA, 18 nt, Artificial Sequence
  source: /note="Description of Artificial Sequence: Synthetic oligonucleotide"
  source: /note="RNA"
  source: /note="5' tri-ethylene glycol (TEG)"
  modified_base (18)..(18): bicyclic nucleic acid (BNA)
  source: /note="3' tri-ethylene glycol (TEG)"
aguucuguccaagcccgg

SEQ ID NO: 6007 - RNA, 17 nt, Artificial Sequence
  source: /note="Description of Artificial Sequence: Synthetic oligonucleotide"
  source: /note="RNA"
  source: /note="5' tri-ethylene glycol (TEG)"
  modified_base (17)..(17): bicyclic nucleic acid (BNA)
  source: /note="3' tri-ethylene glycol (TEG)"
aguucuguccaagcccg

SEQ ID NO: 6008 - RNA, 16 nt, Artificial Sequence
  source: /note="Description of Artificial Sequence: Synthetic oligonucleotide"
  source: /note="RNA"
  source: /note="5' tri-ethylene glycol (TEG)"
  modified_base (16)..(16): bicyclic nucleic acid (BNA)
  source: /note="3' tri-ethylene glycol (TEG)"
aguucuguccaagccc

SEQ ID NO: 6009 - RNA, 15 nt, Artificial Sequence
  source: /note="Description of Artificial Sequence: Synthetic oligonucleotide"
  source: /note="RNA"
  source: /note="5' tri-ethylene glycol (TEG)"
  modified_base (15)..(15): bicyclic nucleic acid (BNA)
  source: /note="3' tri-ethylene glycol (TEG)"
aguucuguccaagcc

SEQ ID NO: 6010 - RNA, 14 nt, Artificial Sequence
  source: /note="Description of Artificial Sequence: Synthetic oligonucleotide"
  source: /note="RNA"
  source: /note="5' tri-ethylene glycol (TEG)"
  modified_base (14)..(14): bicyclic nucleic acid (BNA)
  source: /note="3' tri-ethylene glycol (TEG)"
aguucuguccaagc

SEQ ID NO: 6011 - RNA, 13 nt, Artificial Sequence
  source: /note="Description of Artificial Sequence: Synthetic oligonucleotide"
  source: /note="RNA"
  source: /note="5' tri-ethylene glycol (TEG)"
  modified_base (13)..(13): bicyclic nucleic acid (BNA)
  source: /note="3' tri-ethylene glycol (TEG)"
aguucuguccaag

SEQ ID NO: 6012 - RNA, 12 nt, Artificial Sequence
  source: /note="Description of Artificial Sequence: Synthetic oligonucleotide"
  source: /note="RNA"
  source: /note="5' tri-ethylene glycol (TEG)"
  modified_base (12)..(12): bicyclic nucleic acid (BNA)
  source: /note="3' tri-ethylene glycol (TEG)"
aguucuguccaa

SEQ ID NO: 6013 - RNA, 11 nt, Artificial Sequence
  source: /note="Description of Artificial Sequence: Synthetic oligonucleotide"
  source: /note="RNA"
  source: /note="5' tri-ethylene glycol (TEG)"
  modified_base (11)..(11): bicyclic nucleic acid (BNA)
  source: /note="3' tri-ethylene glycol (TEG)"
aguucugucca

SEQ ID NO: 6014 - RNA, 10 nt, Artificial Sequence
  source: /note="Description of Artificial Sequence: Synthetic oligonucleotide"
  source: /note="RNA"
  source: /note="5' tri-ethylene glycol (TEG)"
  modified_base (10)..(10): bicyclic nucleic acid (BNA)
  source: /note="3' tri-ethylene glycol (TEG)"
aguucugucc

SEQ ID NO: 6015 - RNA, 9 nt, Artificial Sequence
  source: /note="Description of Artificial Sequence: Synthetic oligonucleotide"
  source: /note="RNA"
  source: /note="5' tri-ethylene glycol (TEG)"
  modified_base (9)..(9): bicyclic nucleic acid (BNA)
  source: /note="3' tri-ethylene glycol (TEG)"
aguucuguc

SEQ ID NO: 6016 - DNA, 8 bp, Artificial Sequence
  source: /note="Description of Artificial Sequence: Synthetic oligonucleotide"
  source: /note="Description of Combined DNA/RNA Molecule: Synthetic oligonucleotide"
  source: /note="DNA/RNA"
  source: /note="5' tri-ethylene glycol (TEG)"
  modified_base (8)..(8): bicyclic nucleic acid (BNA)
  source: /note="3' tri-ethylene glycol (TEG)"
aguucugt

SEQ ID NO: 6017 - DNA, 20 bp, Artificial Sequence
  source: /note="Description of Artificial Sequence: Synthetic oligonucleotide"
  source: /note="Description of Combined DNA/RNA Molecule: Synthetic oligonucleotide"
  source: /note="DNA/RNA"
  source: /note="5' tri-ethylene glycol (TEG)"
  modified_base (20)..(20): bicyclic nucleic acid (BNA)
  source: /note="3' tri-ethylene glycol (TEG)"
aaguucuguccaagcccggt

SEQ ID NO: 6018 - RNA, 19 nt, Artificial Sequence
  source: /note="Description of Artificial Sequence: Synthetic oligonucleotide"
  source: /note="RNA"
  source: /note="5' tri-ethylene glycol (TEG)"
  modified_base (19)..(19): bicyclic nucleic acid (BNA)
  source: /note="3' tri-ethylene glycol (TEG)"
aaguucuguccaagcccgg

SEQ ID NO: 6019 - RNA, 18 nt, Artificial Sequence
  source: /note="Description of Artificial Sequence: Synthetic oligonucleotide"
  source: /note="RNA"
  source: /note="5' tri-ethylene glycol (TEG)"
  modified_base (18)..(18): bicyclic nucleic acid (BNA)
  source: /note="3' tri-ethylene glycol (TEG)"
aaguucuguccaagcccg

SEQ ID NO: 6020 - RNA, 17 nt, Artificial Sequence
  source: /note="Description of Artificial Sequence: Synthetic oligonucleotide"
  source: /note="RNA"
  source: /note="5' tri-ethylene glycol (TEG)"
  modified_base (17)..(17): bicyclic nucleic acid (BNA)
  source: /note="3' tri-ethylene glycol (TEG)"
aaguucuguccaagccc

SEQ ID NO: 6021 - RNA, 16 nt, Artificial Sequence
  source: /note="Description of Artificial Sequence: Synthetic oligonucleotide"
  source: /note="RNA"
  source: /note="5' tri-ethylene glycol (TEG)"
  modified_base (16)..(16): bicyclic nucleic acid (BNA)
  source: /note="3' tri-ethylene glycol (TEG)"
aaguucuguccaagcc

SEQ ID NO: 6022 - RNA, 15 nt, Artificial Sequence
  source: /note="Description of Artificial Sequence: Synthetic oligonucleotide"
  source: /note="RNA"
  source: /note="5' tri-ethylene glycol (TEG)"
  modified_base (15)..(15): bicyclic nucleic acid (BNA)
  source: /note="3' tri-ethylene glycol (TEG)"
aaguucuguccaagc

SEQ ID NO: 6023 - RNA, 14 nt, Artificial Sequence
  source: /note="Description of Artificial Sequence: Synthetic oligonucleotide"
  source: /note="RNA"
  source: /note="5' tri-ethylene glycol (TEG)"
  modified_base (14)..(14): bicyclic nucleic acid (BNA)
  source: /note="3' tri-ethylene glycol (TEG)"
aaguucuguccaag

SEQ ID NO: 6024 - RNA, 13 nt, Artificial Sequence
  source: /note="Description of Artificial Sequence: Synthetic oligonucleotide"
  source: /note="RNA"
  source: /note="5' tri-ethylene glycol (TEG)"
  modified_base (13)..(13): bicyclic nucleic acid (BNA)
  source: /note="3' tri-ethylene glycol (TEG)"
aaguucuguccaa

SEQ ID NO: 6025 - RNA, 12 nt, Artificial Sequence
  source: /note="Description of Artificial Sequence: Synthetic oligonucleotide"
  source: /note="RNA"
  source: /note="5' tri-ethylene glycol (TEG)"
  modified_base (12)..(12): bicyclic nucleic acid (BNA)
  source: /note="3' tri-ethylene glycol (TEG)"
aaguucugucca

SEQ ID NO: 6026 - RNA, 11 nt, Artificial Sequence
  source: /note="Description of Artificial Sequence: Synthetic oligonucleotide"
  source: /note="RNA"
  source: /note="5' tri-ethylene glycol (TEG)"
  modified_base (11)..(11): bicyclic nucleic acid (BNA)
  source: /note="3' tri-ethylene glycol (TEG)"
aaguucugucc

SEQ ID NO: 6027 - RNA, 10 nt, Artificial Sequence
  source: /note="Description of Artificial Sequence: Synthetic oligonucleotide"
  source: /note="RNA"
  source: /note="5' tri-ethylene glycol (TEG)"
  modified_base (10)..(10): bicyclic nucleic acid (BNA)
  source: /note="3' tri-ethylene glycol (TEG)"
aaguucuguc

SEQ ID NO: 6028 - DNA, 9 bp, Artificial Sequence
  source: /note="Description of Artificial Sequence: Synthetic oligonucleotide"
  source: /note="Description of Combined DNA/RNA Molecule: Synthetic oligonucleotide"
  source: /note="DNA/RNA"
  source: /note="5' tri-ethylene glycol (TEG)"
  modified_base (9)..(9): bicyclic nucleic acid (BNA)
  source: /note="3' tri-ethylene glycol (TEG)"
aaguucugt

SEQ ID NO: 6029 - RNA, 8 nt, Artificial Sequence
  source: /note="Description of Artificial Sequence: Synthetic oligonucleotide"
  source: /note="RNA"
  source: /note="5' tri-ethylene glycol (TEG)"
  modified_base (8)..(8): bicyclic nucleic acid (BNA)
  source: /note="3' tri-ethylene glycol (TEG)"
aaguucug

SEQ ID NO: 6030 - RNA, 20 nt, Artificial Sequence
  source: /note="Description of Artificial Sequence: Synthetic oligonucleotide"
  source: /note="RNA"
  source: /note="5' tri-ethylene glycol (TEG)"
  modified_base (20)..(20): bicyclic nucleic acid (BNA)
  source: /note="3' tri-ethylene glycol (TEG)"
uaaguucuguccaagcccgg

SEQ ID NO: 6031 - RNA, 19 nt, Artificial Sequence
  source: /note="Description of Artificial Sequence: Synthetic oligonucleotide"
  source: /note="RNA"
  source: /note="5' tri-ethylene glycol (TEG)"
  modified_base (19)..(19): bicyclic nucleic acid (BNA)
  source: /note="3' tri-ethylene glycol (TEG)"
uaaguucuguccaagcccg

SEQ ID NO: 6032 - RNA, 18 nt, Artificial Sequence
  source: /note="Description of Artificial Sequence: Synthetic oligonucleotide"
  source: /note="RNA"
  source: /note="5' tri-ethylene glycol (TEG)"
  modified_base (18)..(18): bicyclic nucleic acid (BNA)
  source: /note="3' tri-ethylene glycol (TEG)"
uaaguucuguccaagccc

SEQ ID NO: 6033 - RNA, 17 nt, Artificial Sequence
  source: /note="Description of Artificial Sequence: Synthetic oligonucleotide"
  source: /note="RNA"
  source: /note="5' tri-ethylene glycol (TEG)"
  modified_base (17)..(17): bicyclic nucleic acid (BNA)
  source: /note="3' tri-ethylene glycol (TEG)"
uaaguucuguccaagcc

SEQ ID NO: 6034 - RNA, 16 nt, Artificial Sequence
  source: /note="Description of Artificial Sequence: Synthetic oligonucleotide"
  source: /note="RNA"
  source: /note="5' tri-ethylene glycol (TEG)"
  modified_base (16)..(16): bicyclic nucleic acid (BNA)
  source: /note="3' tri-ethylene glycol (TEG)"
uaaguucuguccaagc

SEQ ID NO: 6035 - RNA, 14 nt, Artificial Sequence
  source: /note="Description of Artificial Sequence: Synthetic oligonucleotide"
  source: /note="RNA"
  source: /note="5' tri-ethylene glycol (TEG)"
  modified_base (14)..(14): bicyclic nucleic acid (BNA)
  source: /note="3' tri-ethylene glycol (TEG)"
uaaguucuguccaa

SEQ ID NO: 6036 - RNA, 13 nt, Artificial Sequence
  source: /note="Description of Artificial Sequence: Synthetic oligonucleotide"
  source: /note="RNA"
  source: /note="5' tri-ethylene glycol (TEG)"
  modified_base (13)..(13): bicyclic nucleic acid (BNA)
  source: /note="3' tri-ethylene glycol (TEG)"
uaaguucugucca

SEQ ID NO: 6037 - RNA, 12 nt, Artificial Sequence
  source: /note="Description of Artificial Sequence: Synthetic oligonucleotide"
  source: /note="RNA"
  source: /note="5' tri-ethylene glycol (TEG)"
  modified_base (12)..(12): bicyclic nucleic acid (BNA)
  source: /note="3' tri-ethylene glycol (TEG)"
uaaguucugucc

SEQ ID NO: 6038 - RNA, 11 nt, Artificial Sequence
  source: /note="Description of Artificial Sequence: Synthetic oligonucleotide"
  source: /note="RNA"
  source: /note="5' tri-ethylene glycol (TEG)"
  modified_base (11)..(11): bicyclic nucleic acid (BNA)
  source: /note="3' tri-ethylene glycol (TEG)"
uaaguucuguc

SEQ ID NO: 6039 - DNA, 10 bp, Artificial Sequence
  source: /note="Description of Artificial Sequence: Synthetic oligonucleotide"
  source: /note="Description of Combined DNA/RNA Molecule: Synthetic oligonucleotide"
  source: /note="DNA/RNA"
  source: /note="5' tri-ethylene glycol (TEG)"
  modified_base (10)..(10): bicyclic nucleic acid (BNA)
  source: /note="3' tri-ethylene glycol (TEG)"
uaaguucugt

SEQ ID NO: 6040 - RNA, 9 nt, Artificial Sequence
  source: /note="Description of Artificial Sequence: Synthetic oligonucleotide"
  source: /note="RNA"
  source: /note="5' tri-ethylene glycol (TEG)"
  modified_base (9)..(9): bicyclic nucleic acid (BNA)
  source: /note="3' tri-ethylene glycol (TEG)"
uaaguucug

SEQ ID NO: 6041 - DNA, 8 bp, Artificial Sequence
  source: /note="Description of Artificial Sequence: Synthetic oligonucleotide"
  source: /note="Description of Combined DNA/RNA Molecule: Synthetic oligonucleotide"
  source: /note="DNA/RNA"
  source: /note="5' tri-ethylene glycol (TEG)"
  modified_base (8)..(8): bicyclic nucleic acid (BNA)
  source: /note="3' tri-ethylene glycol (TEG)"
uaaguuct

SEQ ID NO: 6042 - RNA, 20 nt, Artificial Sequence
  source: /note="Description of Artificial Sequence: Synthetic oligonucleotide"
  source: /note="RNA"
  source: /note="5' tri-ethylene glycol (TEG)"
  modified_base (20)..(20): bicyclic nucleic acid (BNA)
  source: /note="3' tri-ethylene glycol (TEG)"
guaaguucuguccaagcccg

SEQ ID NO: 6043 - RNA, 19 nt, Artificial Sequence
  source: /note="Description of Artificial Sequence: Synthetic oligonucleotide"
  source: /note="RNA"
  source: /note="5' tri-ethylene glycol (TEG)"
  modified_base (19)..(19): bicyclic nucleic acid (BNA)
  source: /note="3' tri-ethylene glycol (TEG)"
guaaguucuguccaagccc

SEQ ID NO: 6044 - RNA, 17 nt, Artificial Sequence
  source: /note="Description of Artificial Sequence: Synthetic oligonucleotide"
  source: /note="RNA"
  source: /note="5' tri-ethylene glycol (TEG)"
  modified_base (17)..(17): bicyclic nucleic acid (BNA)
  source: /note="3' tri-ethylene glycol (TEG)"
guaaguucuguccaagc

SEQ ID NO: 6045 - RNA, 16 nt, Artificial Sequence
  source: /note="Description of Artificial Sequence: Synthetic oligonucleotide"
  source: /note="RNA"
  source: /note="5' tri-ethylene glycol (TEG)"
  modified_base (16)..(16): bicyclic nucleic acid (BNA)
  source: /note="3' tri-ethylene glycol (TEG)"
guaaguucuguccaag

SEQ ID NO: 6046 - RNA, 15 nt, Artificial Sequence
  source: /note="Description of Artificial Sequence: Synthetic oligonucleotide"
  source: /note="RNA"
  source: /note="5' tri-ethylene glycol (TEG)"
  modified_base (15)..(15): bicyclic nucleic acid (BNA)
  source: /note="3' tri-ethylene glycol (TEG)"
guaaguucuguccaa

SEQ ID NO: 6047 - RNA, 14 nt, Artificial Sequence
  source: /note="Description of Artificial Sequence: Synthetic oligonucleotide"
  source: /note="RNA"
  source: /note="5' tri-ethylene glycol (TEG)"
  modified_base (14)..(14): bicyclic nucleic acid (BNA)
  source: /note="3' tri-ethylene glycol (TEG)"
guaaguucugucca

SEQ ID NO: 6048 - RNA, 13 nt, Artificial Sequence
  source: /note="Description of Artificial Sequence: Synthetic oligonucleotide"
  source: /note="RNA"
  source: /note="5' tri-ethylene glycol (TEG)"
  modified_base (13)..(13): bicyclic nucleic acid (BNA)
  source: /note="3' tri-ethylene glycol (TEG)"
guaaguucugucc

SEQ ID NO: 6049 - RNA, 12 nt, Artificial Sequence
  source: /note="Description of Artificial Sequence: Synthetic oligonucleotide"
  source: /note="RNA"
  source: /note="5' tri-ethylene glycol (TEG)"
  modified_base (12)..(12): bicyclic nucleic acid (BNA)
  source: /note="3' tri-ethylene glycol (TEG)"
guaaguucuguc

SEQ ID NO: 6050 - DNA, 11 bp, Artificial Sequence
  source: /note="Description of Artificial Sequence: Synthetic oligonucleotide"
  source: /note="Description of Combined DNA/RNA Molecule: Synthetic oligonucleotide"
  source: /note="DNA/RNA"
  source: /note="5' tri-ethylene glycol (TEG)"
  modified_base (11)..(11): bicyclic nucleic acid (BNA)
  source: /note="3' tri-ethylene glycol (TEG)"
guaaguucugt

SEQ ID NO: 6051 - RNA, 10 nt, Artificial Sequence
  source: /note="Description of Artificial Sequence: Synthetic oligonucleotide"
  source: /note="RNA"
  source: /note="5' tri-ethylene glycol (TEG)"
  modified_base (10)..(10): bicyclic nucleic acid (BNA)
  source: /note="3' tri-ethylene glycol (TEG)"
guaaguucug

SEQ ID NO: 6052 - DNA, 9 bp, Artificial Sequence
  source: /note="Description of Artificial Sequence: Synthetic oligonucleotide"
  source: /note="Description of Combined DNA/RNA Molecule: Synthetic oligonucleotide"
  source: /note="DNA/RNA"
  source: /note="5' tri-ethylene glycol (TEG)"
  modified_base (9)..(9): bicyclic nucleic acid (BNA)
  source: /note="3' tri-ethylene glycol (TEG)"
guaaguuct

SEQ ID NO: 6053 - RNA, 8 nt, Artificial Sequence
  source: /note="Description of Artificial Sequence: Synthetic oligonucleotide"
  source: /note="RNA"
  source: /note="5' tri-ethylene glycol (TEG)"
  modified_base (8)..(8): bicyclic nucleic acid (BNA)
  source: /note="3' tri-ethylene glycol (TEG)"
guaaguuc

SEQ ID NO: 6054 - RNA, 20 nt, Artificial Sequence
  source: /note="Description of Artificial Sequence: Synthetic oligonucleotide"
  source: /note="RNA"
  source: /note="5' tri-ethylene glycol (TEG)"
  modified_base (20)..(20): bicyclic nucleic acid (BNA)
  source: /note="3' tri-ethylene glycol (TEG)"
gguaaguucuguccaagccc

SEQ ID NO: 6055 - RNA, 19 nt, Artificial Sequence
  source: /note="Description of Artificial Sequence: Synthetic oligonucleotide"
  source: /note="RNA"
  source: /note="5' tri-ethylene glycol (TEG)"
  modified_base (19)..(19): bicyclic nucleic acid (BNA)
  source: /note="3' tri-ethylene glycol (TEG)"
gguaaguucuguccaagcc

SEQ ID NO: 6056 - RNA, 17 nt, Artificial Sequence
  source: /note="Description of Artificial Sequence: Synthetic oligonucleotide"
  source: /note="RNA"
  source: /note="5' tri-ethylene glycol (TEG)"
  modified_base (17)..(17): bicyclic nucleic acid (BNA)
  source: /note="3' tri-ethylene glycol (TEG)"
gguaaguucuguccaag

SEQ ID NO: 6057 - RNA, 16 nt, Artificial Sequence
  source: /note="Description of Artificial Sequence: Synthetic oligonucleotide"
  source: /note="RNA"
  source: /note="5' tri-ethylene glycol (TEG)"
  modified_base (16)..(16): bicyclic nucleic acid (BNA)
  source: /note="3' tri-ethylene glycol (TEG)"
gguaaguucuguccaa

SEQ ID NO: 6058 - RNA, 15 nt, Artificial Sequence
  source: /note="Description of Artificial Sequence: Synthetic oligonucleotide"
  source: /note="RNA"
  source: /note="5' tri-ethylene glycol (TEG)"
  modified_base (15)..(15): bicyclic nucleic acid (BNA)
  source: /note="3' tri-ethylene glycol (TEG)"
gguaaguucugucca

SEQ ID NO: 6059 - RNA, 14 nt, Artificial Sequence
  source: /note="Description of Artificial Sequence: Synthetic oligonucleotide"
  source: /note="RNA"
  source: /note="5' tri-ethylene glycol (TEG)"
  modified_base (14)..(14): bicyclic nucleic acid (BNA)
  source: /note="3' tri-ethylene glycol (TEG)"
gguaaguucugucc

SEQ ID NO: 6060 - RNA, 13 nt, Artificial Sequence
  source: /note="Description of Artificial Sequence: Synthetic oligonucleotide"
  source: /note="RNA"
  source: /note="5' tri-ethylene glycol (TEG)"
  modified_base (13)..(13): bicyclic nucleic acid (BNA)
  source: /note="3' tri-ethylene glycol (TEG)"
gguaaguucuguc

SEQ ID NO: 6061 - DNA, 12 bp, Artificial Sequence
  source: /note="Description of Artificial Sequence: Synthetic oligonucleotide"
  source: /note="Description of Combined DNA/RNA Molecule: Synthetic oligonucleotide"
  source: /note="DNA/RNA"
  source: /note="5' tri-ethylene glycol (TEG)"
  modified_base (12)..(12): bicyclic nucleic acid (BNA)
  source: /note="3' tri-ethylene glycol (TEG)"
gguaaguucugt

SEQ ID NO: 6062 - RNA, 11 nt, Artificial Sequence
  source: /note="Description of Artificial Sequence: Synthetic oligonucleotide"
  source: /note="RNA"
  source: /note="5' tri-ethylene glycol (TEG)"
  modified_base (11)..(11): bicyclic nucleic acid (BNA)
  source: /note="3' tri-ethylene glycol (TEG)"
gguaaguucug

SEQ ID NO: 6063 - DNA, 10 bp, Artificial Sequence
  source: /note="Description of Artificial Sequence: Synthetic oligonucleotide"
  source: /note="Description of Combined DNA/RNA Molecule: Synthetic oligonucleotide"
  source: /note="DNA/RNA"
  source: /note="5' tri-ethylene glycol (TEG)"
  modified_base (10)..(10): bicyclic nucleic acid (BNA)
  source: /note="3' tri-ethylene glycol (TEG)"
gguaaguuct

SEQ ID NO: 6064 - RNA, 9 nt, Artificial Sequence
  source: /note="Description of Artificial Sequence: Synthetic oligonucleotide"
  source: /note="RNA"
  source: /note="5' tri-ethylene glycol (TEG)"
  modified_base (9)..(9): bicyclic nucleic acid (BNA)
  source: /note="3' tri-ethylene glycol (TEG)"
gguaaguuc

SEQ ID NO: 6065 - DNA, 8 bp, Artificial Sequence
  source: /note="Description of Artificial Sequence: Synthetic oligonucleotide"
  source: /note="Description of Combined DNA/RNA Molecule: Synthetic oligonucleotide"
  source: /note="DNA/RNA"
  source: /note="5' tri-ethylene glycol (TEG)"
  modified_base (8)..(8): bicyclic nucleic acid (BNA)
  source: /note="3' tri-ethylene glycol (TEG)"
gguaagut

SEQ ID NO: 6066 - RNA, 20 nt, Artificial Sequence
  source: /note="Description of Artificial Sequence: Synthetic oligonucleotide"
  source: /note="RNA"
  source: /note="5' tri-ethylene glycol (TEG)"
  modified_base (20)..(20): bicyclic nucleic acid (BNA)
  source: /note="3' tri-ethylene glycol (TEG)"
cgguaaguucuguccaagcc

SEQ ID NO: 6067 - RNA, 19 nt, Artificial Sequence
  source: /note="Description of Artificial Sequence: Synthetic oligonucleotide"
  source: /note="RNA"
  source: /note="5' tri-ethylene glycol (TEG)"
  modified_base (19)..(19): bicyclic nucleic acid (BNA)
  source: /note="3' tri-ethylene glycol (TEG)"
cgguaaguucuguccaagc

SEQ ID NO: 6068 - RNA, 18 nt, Artificial Sequence
  source: /note="Description of Artificial Sequence: Synthetic oligonucleotide"
  source: /note="RNA"
  source: /note="5' tri-ethylene glycol (TEG)"
  modified_base (18)..(18): bicyclic nucleic acid (BNA)
  source: /note="3' tri-ethylene glycol (TEG)"
cgguaaguucuguccaag

SEQ ID NO: 6069 - RNA, 17 nt, Artificial Sequence
  source: /note="Description of Artificial Sequence: Synthetic oligonucleotide"
  source: /note="RNA"
  source: /note="5' tri-ethylene glycol (TEG)"
  modified_base (17)..(17): bicyclic nucleic acid (BNA)
  source: /note="3' tri-ethylene glycol (TEG)"
cgguaaguucuguccaa

SEQ ID NO: 6070 - RNA, 16 nt, Artificial Sequence
  source: /note="Description of Artificial Sequence: Synthetic oligonucleotide"
  source: /note="RNA"
  source: /note="5' tri-ethylene glycol (TEG)"
  modified_base (16)..(16): bicyclic nucleic acid (BNA)
  source: /note="3' tri-ethylene glycol (TEG)"
cgguaaguucugucca

SEQ ID NO: 6071 - RNA, 15 nt, Artificial Sequence
  source: /note="Description of Artificial Sequence: Synthetic oligonucleotide"
  source: /note="RNA"
  source: /note="5' tri-ethylene glycol (TEG)"
  modified_base (15)..(15): bicyclic nucleic acid (BNA)
  source: /note="3' tri-ethylene glycol (TEG)"
cgguaaguucugucc

SEQ ID NO: 6072 - RNA, 14 nt, Artificial Sequence
  source: /note="Description of Artificial Sequence: Synthetic oligonucleotide"
  source: /note="RNA"
  source: /note="5' tri-ethylene glycol (TEG)"
  modified_base (14)..(14): bicyclic nucleic acid (BNA)
  source: /note="3' tri-ethylene glycol (TEG)"
cgguaaguucuguc

SEQ ID NO: 6073 - DNA, 13 bp, Artificial Sequence
  source: /note="Description of Artificial Sequence: Synthetic oligonucleotide"
  source: /note="Description of Combined DNA/RNA Molecule: Synthetic oligonucleotide"
  source: /note="DNA/RNA"
  source: /note="5' tri-ethylene glycol (TEG)"
  modified_base (13)..(13): bicyclic nucleic acid (BNA)
  source: /note="3' tri-ethylene glycol (TEG)"
cgguaaguucugt

SEQ ID NO: 6074 - RNA, 12 nt, Artificial Sequence
  source: /note="Description of Artificial Sequence: Synthetic oligonucleotide"
  source: /note="RNA"
  source: /note="5' tri-ethylene glycol (TEG)"
  modified_base (12)..(12): bicyclic nucleic acid (BNA)
  source: /note="3' tri-ethylene glycol (TEG)"
cgguaaguucug

SEQ ID NO: 6075 - DNA, 11 bp, Artificial Sequence
  source: /note="Description of Artificial Sequence: Synthetic oligonucleotide"
  source: /note="Description of Combined DNA/RNA Molecule: Synthetic oligonucleotide"
  source: /note="DNA/RNA"
  source: /note="5' tri-ethylene glycol (TEG)"
  modified_base (11)..(11): bicyclic nucleic acid (BNA)
  source: /note="3' tri-ethylene glycol (TEG)"
cgguaaguuct

SEQ ID NO: 6076 - RNA, 10 nt, Artificial Sequence
  source: /note="Description of Artificial Sequence: Synthetic oligonucleotide"
  source: /note="RNA"
  source: /note="5' tri-ethylene glycol (TEG)"
  modified_base (10)..(10): bicyclic nucleic acid (BNA)
  source: /note="3' tri-ethylene glycol (TEG)"
cgguaaguuc

SEQ ID NO: 6077 - DNA, 9 bp, Artificial Sequence
  source: /note="Description of Artificial Sequence: Synthetic oligonucleotide"
  source: /note="Description of Combined DNA/RNA Molecule: Synthetic oligonucleotide"
  source: /note="DNA/RNA"
  source: /note="5' tri-ethylene glycol (TEG)"
  modified_base (9)..(9): bicyclic nucleic acid (BNA)
  source: /note="3' tri-ethylene glycol (TEG)"
cgguaagut

SEQ ID NO: 6078 - DNA, 8 bp, Artificial Sequence
  source: /note="Description of Artificial Sequence: Synthetic oligonucleotide"
  source: /note="Description of Combined DNA/RNA Molecule: Synthetic oligonucleotide"
  source: /note="DNA/RNA"
  source: /note="5' tri-ethylene glycol (TEG)"
  modified_base (8)..(8): bicyclic nucleic acid (BNA)
  source: /note="3' tri-ethylene glycol (TEG)"
cgguaagt

SEQ ID NO: 6079 - RNA, 20 nt, Artificial Sequence
  source: /note="Description of Artificial Sequence: Synthetic oligonucleotide"
  source: /note="RNA"
  source: /note="5' tri-ethylene glycol (TEG)"
  modified_base (20)..(20): bicyclic nucleic acid (BNA)
  source: /note="3' tri-ethylene glycol (TEG)"
ucgguaaguucuguccaagc

SEQ ID NO: 6080 - RNA, 19 nt, Artificial Sequence
  source: /note="Description of Artificial Sequence: Synthetic oligonucleotide"
  source: /note="RNA"
  source: /note="5' tri-ethylene glycol (TEG)"
  modified_base (19)..(19): bicyclic nucleic acid (BNA)
  source: /note="3' tri-ethylene glycol (TEG)"
ucgguaaguucuguccaag

SEQ ID NO: 6081 - RNA, 18 nt, Artificial Sequence
  source: /note="Description of Artificial Sequence: Synthetic oligonucleotide"
  source: /note="RNA"
  source: /note="5' tri-ethylene glycol (TEG)"
  modified_base (18)..(18): bicyclic nucleic acid (BNA)
  source: /note="3' tri-ethylene glycol (TEG)"
ucgguaaguucuguccaa

SEQ ID NO: 6082 - RNA, 17 nt, Artificial Sequence
  source: /note="Description of Artificial Sequence: Synthetic oligonucleotide"
  source: /note="RNA"
  source: /note="5' tri-ethylene glycol (TEG)"
  modified_base (17)..(17): bicyclic nucleic acid (BNA)
  source: /note="3' tri-ethylene glycol (TEG)"
ucgguaaguucugucca

SEQ ID NO: 6083 - RNA, 16 nt, Artificial Sequence
  source: /note="Description of Artificial Sequence: Synthetic oligonucleotide"
  source: /note="RNA"
  source: /note="5' tri-ethylene glycol (TEG)"
  modified_base (16)..(16): bicyclic nucleic acid (BNA)
  source: /note="3' tri-ethylene glycol (TEG)"
ucgguaaguucugucc

SEQ ID NO: 6084 - RNA, 15 nt, Artificial Sequence
  source: /note="Description of Artificial Sequence: Synthetic oligonucleotide"
  source: /note="RNA"
  source: /note="5' tri-ethylene glycol (TEG)"
  modified_base (15)..(15): bicyclic nucleic acid (BNA)
  source: /note="3' tri-ethylene glycol (TEG)"
ucgguaaguucuguc

SEQ ID NO: 6085 - DNA, 14 bp, Artificial Sequence
  source: /note="Description of Artificial Sequence: Synthetic oligonucleotide"
  source: /note="Description of Combined DNA/RNA Molecule: Synthetic oligonucleotide"
  source: /note="DNA/RNA"
  source: /note="5' tri-ethylene glycol (TEG)"
  modified_base (14)..(14): bicyclic nucleic acid (BNA)
  source: /note="3' tri-ethylene glycol (TEG)"
ucgguaaguucugt

SEQ ID NO: 6086 - RNA, 13 nt, Artificial Sequence
  source: /note="Description of Artificial Sequence: Synthetic oligonucleotide"
  source: /note="RNA"
  source: /note="5' tri-ethylene glycol (TEG)"
  modified_base (13)..(13): bicyclic nucleic acid (BNA)
  source: /note="3' tri-ethylene glycol (TEG)"
ucgguaaguucug

SEQ ID NO: 6087 - DNA, 12 bp, Artificial Sequence
  source: /note="Description of Artificial Sequence: Synthetic oligonucleotide"
  source: /note="Description of Combined DNA/RNA Molecule: Synthetic oligonucleotide"
  source: /note="DNA/RNA"
  source: /note="5' tri-ethylene glycol (TEG)"
  modified_base (12)..(12): bicyclic nucleic acid (BNA)
  source: /note="3' tri-ethylene glycol (TEG)"
ucgguaaguuct

SEQ ID NO: 6088 - RNA, 11 nt, Artificial Sequence
  source: /note="Description of Artificial Sequence: Synthetic oligonucleotide"
  source: /note="RNA"
  source: /note="5' tri-ethylene glycol (TEG)"
  modified_base (11)..(11): bicyclic nucleic acid (BNA)
  source: /note="3' tri-ethylene glycol (TEG)"
ucgguaaguuc

SEQ ID NO: 6089 - DNA, 10 bp, Artificial Sequence
  source: /note="Description of Artificial Sequence: Synthetic oligonucleotide"
  source: /note="Description of Combined DNA/RNA Molecule: Synthetic oligonucleotide"
  source: /note="DNA/RNA"
  source: /note="5' tri-ethylene glycol (TEG)"
  modified_base (10)..(10): bicyclic nucleic acid (BNA)
  source: /note="3' tri-ethylene glycol (TEG)"
ucgguaagut

SEQ ID NO: 6090 - DNA, 9 bp, Artificial Sequence
  source: /note="Description of Artificial Sequence: Synthetic oligonucleotide"
  source: /note="Description of Combined DNA/RNA Molecule: Synthetic oligonucleotide"
  source: /note="DNA/RNA"
  source: /note="5' tri-ethylene glycol (TEG)"
  modified_base (9)..(9): bicyclic nucleic acid (BNA)
  source: /note="3' tri-ethylene glycol (TEG)"
ucgguaagt

SEQ ID NO: 6091 - RNA, 20 nt, Artificial Sequence
  source: /note="Description of Artificial Sequence: Synthetic oligonucleotide"
  source: /note="RNA"
  source: /note="5' tri-ethylene glycol (TEG)"
  modified_base (20)..(20): bicyclic nucleic acid (BNA)
  source: /note="3' tri-ethylene glycol (TEG)"
gucgguaaguucuguccaag

SEQ ID NO: 6092 - RNA, 19 nt, Artificial Sequence
  source: /note="Description of Artificial Sequence: Synthetic oligonucleotide"
  source: /note="RNA"
  source: /note="5' tri-ethylene glycol (TEG)"
  modified_base (19)..(19): bicyclic nucleic acid (BNA)
  source: /note="3' tri-ethylene glycol (TEG)"
gucgguaaguucuguccaa

SEQ ID NO: 6093 - RNA, 18 nt, Artificial Sequence
  source: /note="Description of Artificial Sequence: Synthetic oligonucleotide"
  source: /note="RNA"
  source: /note="5' tri-ethylene glycol (TEG)"
  modified_base (18)..(18): bicyclic nucleic acid (BNA)
  source: /note="3' tri-ethylene glycol (TEG)"
gucgguaaguucugucca

SEQ ID NO: 6094 - RNA, 17 nt, Artificial Sequence
  source: /note="Description of Artificial Sequence: Synthetic oligonucleotide"
  source: /note="RNA"
  source: /note="5' tri-ethylene glycol (TEG)"
  modified_base (17)..(17): bicyclic nucleic acid (BNA)
  source: /note="3' tri-ethylene glycol (TEG)"
gucgguaaguucugucc

SEQ ID NO: 6095 - RNA, 16 nt, Artificial Sequence
  source: /note="Description of Artificial Sequence: Synthetic oligonucleotide"
  source: /note="RNA"
  source: /note="5' tri-ethylene glycol (TEG)"
  modified_base (16)..(16): bicyclic nucleic acid (BNA)
  source: /note="3' tri-ethylene glycol (TEG)"
gucgguaaguucuguc

SEQ ID NO: 6096 - DNA, 15 bp, Artificial Sequence
  source: /note="Description of Artificial Sequence: Synthetic oligonucleotide"
  source: /note="Description of Combined DNA/RNA Molecule: Synthetic oligonucleotide"
  source: /note="DNA/RNA"
  source: /note="5' tri-ethylene glycol (TEG)"
  modified_base (15)..(15): bicyclic nucleic acid (BNA)
  source: /note="3' tri-ethylene glycol (TEG)"
gucgguaaguucugt

SEQ ID NO: 6097 - RNA, 14 nt, Artificial Sequence
  source: /note="Description of Artificial Sequence: Synthetic oligonucleotide"
  source: /note="RNA"
  source: /note="5' tri-ethylene glycol (TEG)"
  modified_base (14)..(14): bicyclic nucleic acid (BNA)
  source: /note="3' tri-ethylene glycol (TEG)"
gucgguaaguucug

SEQ ID NO: 6098 - DNA, 13 bp, Artificial Sequence
  source: /note="Description of Artificial Sequence: Synthetic oligonucleotide"
  source: /note="Description of Combined DNA/RNA Molecule: Synthetic oligonucleotide"
  source: /note="DNA/RNA"
  source: /note="5' tri-ethylene glycol (TEG)"
  modified_base (13)..(13): bicyclic nucleic acid (BNA)
  source: /note="3' tri-ethylene glycol (TEG)"
gucgguaaguuct

SEQ ID NO: 6099 - RNA, 12 nt, Artificial Sequence
  source: /note="Description of Artificial Sequence: Synthetic oligonucleotide"
  source: /note="RNA"
  source: /note="5' tri-ethylene glycol (TEG)"
  modified_base (12)..(12): bicyclic nucleic acid (BNA)
  source: /note="3' tri-ethylene glycol (TEG)"
gucgguaaguuc

SEQ ID NO: 6100 - DNA, 11 bp, Artificial Sequence
  source: /note="Description of Artificial Sequence: Synthetic oligonucleotide"
  source: /note="Description of Combined DNA/RNA Molecule: Synthetic oligonucleotide"
  source: /note="DNA/RNA"
  source: /note="5' tri-ethylene glycol (TEG)"
  modified_base (11)..(11): bicyclic nucleic acid (BNA)
  source: /note="3' tri-ethylene glycol (TEG)"
gucgguaagut

SEQ ID NO: 6101 - DNA, 10 bp, Artificial Sequence
  source: /note="Description of Artificial Sequence: Synthetic oligonucleotide"
  source: /note="Description of Combined DNA/RNA Molecule: Synthetic oligonucleotide"
  source: /note="DNA/RNA"
  source: /note="5' tri-ethylene glycol (TEG)"
  modified_base (10)..(10): bicyclic nucleic acid (BNA)
  source: /note="3' tri-ethylene glycol (TEG)"
gucgguaagt

SEQ ID NO: 6102 - RNA, 20 nt, Artificial Sequence
  source: /note="Description of Artificial Sequence: Synthetic oligonucleotide"
  source: /note="RNA"
  source: /note="5' tri-ethylene glycol (TEG)"
  modified_base (20)..(20): bicyclic nucleic acid (BNA)
  source: /note="3' tri-ethylene glycol (TEG)"
agucgguaaguucuguccaa

SEQ ID NO: 6103 - RNA, 19 nt, Artificial Sequence
  source: /note="Description of Artificial Sequence: Synthetic oligonucleotide"
  source: /note="RNA"
  source: /note="5' tri-ethylene glycol (TEG)"
  modified_base (19)..(19): bicyclic nucleic acid (BNA)
  source: /note="3' tri-ethylene glycol (TEG)"
agucgguaaguucugucca

SEQ ID NO: 6104 - RNA, 17 nt, Artificial Sequence
  source: /note="Description of Artificial Sequence: Synthetic oligonucleotide"
  source: /note="RNA"
  source: /note="5' tri-ethylene glycol (TEG)"
  modified_base (17)..(17): bicyclic nucleic acid (BNA)
  source: /note="3' tri-ethylene glycol (TEG)"
agucgguaaguucuguc

SEQ ID NO: 6105 - DNA, 16 bp, Artificial Sequence
  source: /note="Description of Artificial Sequence: Synthetic oligonucleotide"
  source: /note="Description of Combined DNA/RNA Molecule: Synthetic oligonucleotide"
  source: /note="DNA/RNA"
  source: /note="5' tri-ethylene glycol (TEG)"
  modified_base (16)..(16): bicyclic nucleic acid (BNA)
  source: /note="3' tri-ethylene glycol (TEG)"
agucgguaaguucugt

SEQ ID NO: 6106 - RNA, 15 nt, Artificial Sequence
  source: /note="Description of Artificial Sequence: Synthetic oligonucleotide"
  source: /note="RNA"
  source: /note="5' tri-ethylene glycol (TEG)"
  modified_base (15)..(15): bicyclic nucleic acid (BNA)
  source: /note="3' tri-ethylene glycol (TEG)"
agucgguaaguucug

SEQ ID NO: 6107 - DNA, 14 bp, Artificial Sequence
  source: /note="Description of Artificial Sequence: Synthetic oligonucleotide"
  source: /note="Description of Combined DNA/RNA Molecule: Synthetic oligonucleotide"
  source: /note="DNA/RNA"
  source: /note="5' tri-ethylene glycol (TEG)"
  modified_base (14)..(14): bicyclic nucleic acid (BNA)
  source: /note="3' tri-ethylene glycol (TEG)"
agucgguaaguuct

SEQ ID NO: 6108 - RNA, 13 nt, Artificial Sequence
  source: /note="Description of Artificial Sequence: Synthetic oligonucleotide"
  source: /note="RNA"
  source: /note="5' tri-ethylene glycol (TEG)"
  modified_base (13)..(13): bicyclic nucleic acid (BNA)
  source: /note="3' tri-ethylene glycol (TEG)"
agucgguaaguuc

SEQ ID NO: 6109 - DNA, 12 bp, Artificial Sequence
  source: /note="Description of Artificial Sequence: Synthetic oligonucleotide"
  source: /note="Description of Combined DNA/RNA Molecule: Synthetic oligonucleotide"
  source: /note="DNA/RNA"
  source: /note="5' tri-ethylene glycol (TEG)"
  modified_base (12)..(12): bicyclic nucleic acid (BNA)
  source: /note="3' tri-ethylene glycol (TEG)"
agucgguaagut

SEQ ID NO: 6110 - DNA, 11 bp, Artificial Sequence
  source: /note="Description of Artificial Sequence: Synthetic oligonucleotide"
  source: /note="Description of Combined DNA/RNA Molecule: Synthetic oligonucleotide"
  source: /note="DNA/RNA"
  source: /note="5' tri-ethylene glycol (TEG)"
  modified_base (11)..(11): bicyclic nucleic acid (BNA)
  source: /note="3' tri-ethylene glycol (TEG)"
agucgguaagt

SEQ ID NO: 6111 - RNA, 20 nt, Artificial Sequence
  source: /note="Description of Artificial Sequence: Synthetic oligonucleotide"
  source: /note="RNA"
  source: /note="5' tri-ethylene glycol (TEG)"
  modified_base (20)..(20): bicyclic nucleic acid (BNA)
  source: /note="3' tri-ethylene glycol (TEG)"
cagucgguaaguucugucca

SEQ ID NO: 6112 - RNA, 19 nt, Artificial Sequence
  source: /note="Description of Artificial Sequence: Synthetic oligonucleotide"
  source: /note="RNA"
  source: /note="5' tri-ethylene glycol (TEG)"
  modified_base (19)..(19): bicyclic nucleic acid (BNA)
  source: /note="3' tri-ethylene glycol (TEG)"
cagucgguaaguucugucc

SEQ ID NO: 6113 - RNA, 18 nt, Artificial Sequence
  source: /note="Description of Artificial Sequence: Synthetic oligonucleotide"
  source: /note="RNA"
  source: /note="5' tri-ethylene glycol (TEG)"
  modified_base (18)..(18): bicyclic nucleic acid (BNA)
  source: /note="3' tri-ethylene glycol (TEG)"
cagucgguaaguucuguc

SEQ ID NO: 6114 - DNA, 17 bp, Artificial Sequence
  source: /note="Description of Artificial Sequence: Synthetic oligonucleotide"
  source: /note="Description of Combined DNA/RNA Molecule: Synthetic oligonucleotide"
  source: /note="DNA/RNA"
  source: /note="5' tri-ethylene glycol (TEG)"
  modified_base (17)..(17): bicyclic nucleic acid (BNA)
  source: /note="3' tri-ethylene glycol (TEG)"
cagucgguaaguucugt

SEQ ID NO: 6115 - RNA, 16 nt, Artificial Sequence
  source: /note="Description of Artificial Sequence: Synthetic oligonucleotide"
  source: /note="RNA"
  source: /note="5' tri-ethylene glycol (TEG)"
  modified_base (16)..(16): bicyclic nucleic acid (BNA)
  source: /note="3' tri-ethylene glycol (TEG)"
cagucgguaaguucug

SEQ ID NO: 6116 - DNA, 15 bp, Artificial Sequence
  source: /note="Description of Artificial Sequence: Synthetic oligonucleotide"
  source: /note="Description of Combined DNA/RNA Molecule: Synthetic oligonucleotide"
  source: /note="DNA/RNA"
  source: /note="5' tri-ethylene glycol (TEG)"
  modified_base (15)..(15): bicyclic nucleic acid (BNA)
  source: /note="3' tri-ethylene glycol (TEG)"
cagucgguaaguuct

SEQ ID NO: 6117 - RNA, 14 nt, Artificial Sequence
  source: /note="Description of Artificial Sequence: Synthetic oligonucleotide"
  source: /note="RNA"
  source: /note="5' tri-ethylene glycol (TEG)"
  modified_base (14)..(14): bicyclic nucleic acid (BNA)
  source: /note="3' tri-ethylene glycol (TEG)"
cagucgguaaguuc

SEQ ID NO: 6118 - DNA, 13 bp, Artificial Sequence
  source: /note="Description of Artificial Sequence: Synthetic oligonucleotide"
  source: /note="Description of Combined DNA/RNA Molecule: Synthetic oligonucleotide"
  source: /note="DNA/RNA"
  source: /note="5' tri-ethylene glycol (TEG)"
  modified_base (13)..(13): bicyclic nucleic acid (BNA)
  source: /note="3' tri-ethylene glycol (TEG)"
cagucgguaagut

SEQ ID NO: 6119 - DNA, 12 bp, Artificial Sequence
  source: /note="Description of Artificial Sequence: Synthetic oligonucleotide"
  source: /note="Description of Combined DNA/RNA Molecule: Synthetic oligonucleotide"
  source: /note="DNA/RNA"
  source: /note="5' tri-ethylene glycol (TEG)"
  modified_base (12)..(12): bicyclic nucleic acid (BNA)
  source: /note="3' tri-ethylene glycol (TEG)"
cagucgguaagt

SEQ ID NO: 6120 - RNA, 20 nt, Artificial Sequence
  source: /note="Description of Artificial Sequence: Synthetic oligonucleotide"
  source: /note="RNA"
  source: /note="5' tri-ethylene glycol (TEG)"
  modified_base (20)..(20): bicyclic nucleic acid (BNA)
  source: /note="3' tri-ethylene glycol (TEG)"
ccagucgguaaguucugucc

SEQ ID NO: 6121 - RNA, 19 nt, Artificial Sequence
  source: /note="Description of Artificial Sequence: Synthetic oligonucleotide"
  source: /note="RNA"
  source: /note="5' tri-ethylene glycol (TEG)"
  modified_base (19)..(19): bicyclic nucleic acid (BNA)
  source: /note="3' tri-ethylene glycol (TEG)"
ccagucgguaaguucuguc

SEQ ID NO: 6122 - DNA, 18 bp, Artificial Sequence
  source: /note="Description of Artificial Sequence: Synthetic oligonucleotide"
  source: /note="Description of Combined DNA/RNA Molecule: Synthetic oligonucleotide"
  source: /note="DNA/RNA"
  source: /note="5' tri-ethylene glycol (TEG)"
  modified_base (18)..(18): bicyclic nucleic acid (BNA)
  source: /note="3' tri-ethylene glycol (TEG)"
ccagucgguaaguucugt

SEQ ID NO: 6123 - RNA, 17 nt, Artificial Sequence
  source: /note="Description of Artificial Sequence: Synthetic oligonucleotide"
  source: /note="RNA"
  source: /note="5' tri-ethylene glycol (TEG)"
  modified_base (17)..(17): bicyclic nucleic acid (BNA)
  source: /note="3' tri-ethylene glycol (TEG)"
ccagucgguaaguucug

SEQ ID NO: 6124 - DNA, 16 bp, Artificial Sequence
  source: /note="Description of Artificial Sequence: Synthetic oligonucleotide"
  source: /note="Description of Combined DNA/RNA Molecule: Synthetic oligonucleotide"
  source: /note="DNA/RNA"
  source: /note="5' tri-ethylene glycol (TEG)"
  modified_base (16)..(16): bicyclic nucleic acid (BNA)
  source: /note="3' tri-ethylene glycol (TEG)"
ccagucgguaaguuct

SEQ ID NO: 6125 - RNA, 15 nt, Artificial Sequence
  source: /note="Description of Artificial Sequence: Synthetic oligonucleotide"
  source: /note="RNA"
  source: /note="5' tri-ethylene glycol (TEG)"
  modified_base (15)..(15): bicyclic nucleic acid (BNA)
  source: /note="3' tri-ethylene glycol (TEG)"
ccagucgguaaguuc

SEQ ID NO: 6126 - DNA, 14 bp, Artificial Sequence
  source: /note="Description of Artificial Sequence: Synthetic oligonucleotide"
  source: /note="Description of Combined DNA/RNA Molecule: Synthetic oligonucleotide"
  source: /note="DNA/RNA"
  source: /note="5' tri-ethylene glycol (TEG)"
  modified_base (14)..(14): bicyclic nucleic acid (BNA)
  source: /note="3' tri-ethylene glycol (TEG)"
ccagucgguaagut

SEQ ID NO: 6127 - DNA, 13 bp, Artificial Sequence
  source: /note="Description of Artificial Sequence: Synthetic oligonucleotide"
  source: /note="Description of Combined DNA/RNA Molecule: Synthetic oligonucleotide"
  source: /note="DNA/RNA"
  source: /note="5' tri-ethylene glycol (TEG)"
  modified_base (13)..(13): bicyclic nucleic acid (BNA)
  source: /note="3' tri-ethylene glycol (TEG)"
ccagucgguaagt

SEQ ID NO: 6128 - RNA, 20 nt, Artificial Sequence
  source: /note="Description of Artificial Sequence: Synthetic oligonucleotide"
  source: /note="RNA"
  source: /note="5' tri-ethylene glycol (TEG)"
  modified_base (20)..(20): bicyclic nucleic acid (BNA)
  source: /note="3' tri-ethylene glycol (TEG)"
gccagucgguaaguucuguc

SEQ ID NO: 6129 - DNA, 19 bp, Artificial Sequence
  source: /note="Description of Artificial Sequence: Synthetic oligonucleotide"
  source: /note="Description of Combined DNA/RNA Molecule: Synthetic oligonucleotide"
  source: /note="DNA/RNA"
  source: /note="5' tri-ethylene glycol (TEG)"
  modified_base (19)..(19): bicyclic nucleic acid (BNA)
  source: /note="3' tri-ethylene glycol (TEG)"
gccagucgguaaguucugt

SEQ ID NO: 6130 - RNA, 18 nt, Artificial Sequence
  source: /note="Description of Artificial Sequence: Synthetic oligonucleotide"
  source: /note="RNA"
  source: /note="5' tri-ethylene glycol (TEG)"
  modified_base (18)..(18): bicyclic nucleic acid (BNA)
  source: /note="3' tri-ethylene glycol (TEG)"
gccagucgguaaguucug

SEQ ID NO: 6131 - DNA, 17 bp, Artificial Sequence
  source: /note="Description of Artificial Sequence: Synthetic oligonucleotide"
  source: /note="Description of Combined DNA/RNA Molecule: Synthetic oligonucleotide"
  source: /note="DNA/RNA"
  source: /note="5' tri-ethylene glycol (TEG)"
  modified_base (17)..(17): bicyclic nucleic acid (BNA)
  source: /note="3' tri-ethylene glycol (TEG)"
gccagucgguaaguuct

SEQ ID NO: 6132 - RNA, 16 nt, Artificial Sequence
  source: /note="Description of Artificial Sequence: Synthetic oligonucleotide"
  source: /note="RNA"
  source: /note="5' tri-ethylene glycol (TEG)"
  modified_base (16)..(16): bicyclic nucleic acid (BNA)
  source: /note="3' tri-ethylene glycol (TEG)"
gccagucgguaaguuc

SEQ ID NO: 6133 - DNA, 15 bp, Artificial Sequence
  source: /note="Description of Artificial Sequence: Synthetic oligonucleotide"
  source: /note="Description of Combined DNA/RNA Molecule: Synthetic oligonucleotide"
  source: /note="DNA/RNA"
  source: /note="5' tri-ethylene glycol (TEG)"
  modified_base (15)..(15): bicyclic nucleic acid (BNA)
  source: /note="3' tri-ethylene glycol (TEG)"
gccagucgguaagut

SEQ ID NO: 6134 - DNA, 14 bp, Artificial Sequence
  source: /note="Description of Artificial Sequence: Synthetic oligonucleotide"
  source: /note="Description of Combined DNA/RNA Molecule: Synthetic oligonucleotide"
  source: /note="DNA/RNA"
  source: /note="5' tri-ethylene glycol (TEG)"
  modified_base (14)..(14): bicyclic nucleic acid (BNA)
  source: /note="3' tri-ethylene glycol (TEG)"
gccagucgguaagt

SEQ ID NO: 6135 - DNA, 20 bp, Artificial Sequence
  source: /note="Description of Artificial Sequence: Synthetic oligonucleotide"
  source: /note="Description of Combined DNA/RNA Molecule: Synthetic oligonucleotide"
  source: /note="DNA/RNA"
  source: /note="5' tri-ethylene glycol (TEG)"
  modified_base (20)..(20): bicyclic nucleic acid (BNA)
  source: /note="3' tri-ethylene glycol (TEG)"
ucaaggaagauggcauuuct

SEQ ID NO: 6136 - RNA, 22 nt, Artificial Sequence
  source: /note="Description of Artificial Sequence: Synthetic oligonucleotide"
  source: /note="RNA"
  source: /note="5' tri-ethylene glycol (TEG)"
  modified_base (22)..(22): bicyclic nucleic acid (BNA)
  source: /note="3' tri-ethylene glycol (TEG)"
ucaaggaagauggcauuucuag

SEQ ID NO: 6137 - DNA, 16 bp, Artificial Sequence
  source: /note="Description of Artificial Sequence: Synthetic oligonucleotide"
  source: /note="Description of Combined DNA/RNA Molecule: Synthetic oligonucleotide"
  source: /note="DNA/RNA"
  source: /note="5' tri-ethylene glycol (TEG)"
  modified_base (16)..(16): bicyclic nucleic acid (BNA)
  source: /note="3' tri-ethylene glycol (TEG)"
ucaaggaagauggcat

SEQ ID NO: 6138 - DNA, 15 bp, Artificial Sequence
  source: /note="Description of Artificial Sequence: Synthetic oligonucleotide"
  source: /note="Description of Combined DNA/RNA Molecule: Synthetic oligonucleotide"
  source: /note="DNA/RNA"
  source: /note="5' tri-ethylene glycol (TEG)"
  modified_base (15)..(15): bicyclic nucleic acid (BNA)
  source: /note="3' tri-ethylene glycol (TEG)"
gaagauggcauuuct

SEQ ID NO: 6139 - RNA, 21 nt, Artificial Sequence
  source: /note="Description of Artificial Sequence: Synthetic oligonucleotide"
  source: /note="RNA"
  source: /note="5' tri-ethylene glycol (TEG)"
  modified_base (21)..(21): bicyclic nucleic acid (BNA)
  source: /note="3' tri-ethylene glycol (TEG)"
ucaaggaagauggcauuucua

SEQ ID NO: 6140 - RNA, 19 nt, Artificial Sequence
  source: /note="Description of Artificial Sequence: Synthetic oligonucleotide"
  source: /note="RNA"
  source: /note="5' tri-ethylene glycol (TEG)"
  modified_base (19)..(19): bicyclic nucleic acid (BNA)
  source: /note="3' tri-ethylene glycol (TEG)"
ucaaggaagauggcauuuc

SEQ ID NO: 6141 - DNA, 18 bp, Artificial Sequence
  source: /note="Description of Artificial Sequence: Synthetic oligonucleotide"
  source: /note="Description of Combined DNA/RNA Molecule: Synthetic oligonucleotide"
  source: /note="DNA/RNA"
  source: /note="5' tri-ethylene glycol (TEG)"
  modified_base (18)..(18): bicyclic nucleic acid (BNA)
  source: /note="3' tri-ethylene glycol (TEG)"
ucaaggaagauggcauut

SEQ ID NO: 6142 - DNA, 17 bp, Artificial Sequence
  source: /note="Description of Artificial Sequence: Synthetic oligonucleotide"
  source: /note="Description of Combined DNA/RNA Molecule: Synthetic oligonucleotide"
  source: /note="DNA/RNA"
  source: /note="5' tri-ethylene glycol (TEG)"
  modified_base (17)..(17): bicyclic nucleic acid (BNA)
  source: /note="3' tri-ethylene glycol (TEG)"
ucaaggaagauggcaut

SEQ ID NO: 6143 - RNA, 15 nt, Artificial Sequence
  source: /note="Description of Artificial Sequence: Synthetic oligonucleotide"
  source: /note="RNA"
  source: /note="5' tri-ethylene glycol (TEG)"
  modified_base (15)..(15): bicyclic nucleic acid (BNA)
  source: /note="3' tri-ethylene glycol (TEG)"
ucaaggaagauggca

SEQ ID NO: 6144 - RNA, 14 nt, Artificial Sequence
  source: /note="Description of Artificial Sequence: Synthetic oligonucleotide"
  source: /note="RNA"
  source: /note="5' tri-ethylene glycol (TEG)"
  modified_base (14)..(14): bicyclic nucleic acid (BNA)
  source: /note="3' tri-ethylene glycol (TEG)"
ucaaggaagauggc

SEQ ID NO: 6145 - RNA, 13 nt, Artificial Sequence
  source: /note="Description of Artificial Sequence: Synthetic oligonucleotide"
  source: /note="RNA"
  source: /note="5' tri-ethylene glycol (TEG)"
  modified_base (13)..(13): bicyclic nucleic acid (BNA)
  source: /note="3' tri-ethylene glycol (TEG)"
ucaaggaagaugg

SEQ ID NO: 6146 - RNA, 12 nt, Artificial Sequence
  source: /note="Description of Artificial Sequence: Synthetic oligonucleotide"
  source: /note="RNA"
  source: /note="5' tri-ethylene glycol (TEG)"
  modified_base (12)..(12): bicyclic nucleic acid (BNA)
  source: /note="3' tri-ethylene glycol (TEG)"
ucaaggaagaug

SEQ ID NO: 6147 - DNA, 11 bp, Artificial Sequence
  source: /note="Description of Artificial Sequence: Synthetic oligonucleotide"
  source: /note="Description of Combined DNA/RNA Molecule: Synthetic oligonucleotide"
  source: /note="DNA/RNA"
  source: /note="5' tri-ethylene glycol (TEG)"
  modified_base (11)..(11): bicyclic nucleic acid (BNA)
  source: /note="3' tri-ethylene glycol (TEG)"
ucaaggaagat

SEQ ID NO: 6148 - RNA, 10 nt, Artificial Sequence
  source: /note="Description of Artificial Sequence: Synthetic oligonucleotide"
  source: /note="RNA"
  source: /note="5' tri-ethylene glycol (TEG)"
  modified_base (10)..(10): bicyclic nucleic acid (BNA)
  source: /note="3' tri-ethylene glycol (TEG)"
ucaaggaaga

SEQ ID NO: 6149 - RNA, 9 nt, Artificial Sequence
  source: /note="Description of Artificial Sequence: Synthetic oligonucleotide"
  source: /note="RNA"
  source: /note="5' tri-ethylene glycol (TEG)"
  modified_base (9)..(9): bicyclic nucleic acid (BNA)
  source: /note="3' tri-ethylene glycol (TEG)"
ucaaggaag

SEQ ID NO: 6150 - RNA, 21 nt, Artificial Sequence
  source: /note="Description of Artificial Sequence: Synthetic oligonucleotide"
  source: /note="RNA"
  source: /note="5' tri-ethylene glycol (TEG)"
  modified_base (21)..(21): bicyclic nucleic acid (BNA)
  source: /note="3' tri-ethylene glycol (TEG)"
caaggaagauggcauuucuag

SEQ ID NO: 6151 - RNA, 20 nt, Artificial Sequence
  source: /note="Description of Artificial Sequence: Synthetic oligonucleotide"
  source: /note="RNA"
  source: /note="5' tri-ethylene glycol (TEG)"
  modified_base (20)..(20): bicyclic nucleic acid (BNA)
  source: /note="3' tri-ethylene glycol (TEG)"
caaggaagauggcauuucua

SEQ ID NO: 6152 - DNA, 19 bp, Artificial Sequence
  source: /note="Description of Artificial Sequence: Synthetic oligonucleotide"
  source: /note="Description of Combined DNA/RNA Molecule: Synthetic oligonucleotide"
  source: /note="DNA/RNA"
  source: /note="5' tri-ethylene glycol (TEG)"
  modified_base (19)..(19): bicyclic nucleic acid (BNA)
  source: /note="3' tri-ethylene glycol (TEG)"
caaggaagauggcauuuct

SEQ ID NO: 6153 - RNA, 18 nt, Artificial Sequence
  source: /note="Description of Artificial Sequence: Synthetic oligonucleotide"
  source: /note="RNA"
  source: /note="5' tri-ethylene glycol (TEG)"
  modified_base (18)..(18): bicyclic nucleic acid (BNA)
  source: /note="3' tri-ethylene glycol (TEG)"
caaggaagauggcauuuc

SEQ ID NO: 6154 - DNA, 17 bp, Artificial Sequence
  source: /note="Description of Artificial Sequence: Synthetic oligonucleotide"
  source: /note="Description of Combined DNA/RNA Molecule: Synthetic oligonucleotide"
  source: /note="DNA/RNA"
  source: /note="5' tri-ethylene glycol (TEG)"
  modified_base (17)..(17): bicyclic nucleic acid (BNA)
  source: /note="3' tri-ethylene glycol (TEG)"
caaggaagauggcauut

SEQ ID NO: 6155 - DNA, 16 bp, Artificial Sequence
  source: /note="Description of Artificial Sequence: Synthetic oligonucleotide"
  source: /note="Description of Combined DNA/RNA Molecule: Synthetic oligonucleotide"
  source: /note="DNA/RNA"
  source: /note="5' tri-ethylene glycol (TEG)"
  modified_base (16)..(16): bicyclic nucleic acid (BNA)
  source: /note="3' tri-ethylene glycol (TEG)"
caaggaagauggcaut

SEQ ID NO: 6156 - DNA, 15 bp, Artificial Sequence
  source: /note="Description of Artificial Sequence: Synthetic oligonucleotide"
  source: /note="Description of Combined DNA/RNA Molecule: Synthetic oligonucleotide"
  source: /note="DNA/RNA"
  source: /note="5' tri-ethylene glycol (TEG)"
  modified_base (15)..(15): bicyclic nucleic acid (BNA)
  source: /note="3' tri-ethylene glycol (TEG)"
caaggaagauggcat

SEQ ID NO: 6157 - RNA, 14 nt, Artificial Sequence
  source: /note="Description of Artificial Sequence: Synthetic oligonucleotide"
  source: /note="RNA"
  source: /note="5' tri-ethylene glycol (TEG)"
  modified_base (14)..(14): bicyclic nucleic acid (BNA)
  source: /note="3' tri-ethylene glycol (TEG)"
caaggaagauggca

SEQ ID NO: 6158 - RNA, 13 nt, Artificial Sequence
  source: /note="Description of Artificial Sequence: Synthetic oligonucleotide"
  source: /note="RNA"
  source: /note="5' tri-ethylene glycol (TEG)"
  modified_base (13)..(13): bicyclic nucleic acid (BNA)
  source: /note="3' tri-ethylene glycol (TEG)"
caaggaagauggc

SEQ ID NO: 6159 - RNA, 12 nt, Artificial Sequence
  source: /note="Description of Artificial Sequence: Synthetic oligonucleotide"
  source: /note="RNA"
  source: /note="5' tri-ethylene glycol (TEG)"
  modified_base (12)..(12): bicyclic nucleic acid (BNA)
  source: /note="3' tri-ethylene glycol (TEG)"
caaggaagaugg

SEQ ID NO: 6160 - RNA, 11 nt, Artificial Sequence
  source: /note="Description of Artificial Sequence: Synthetic oligonucleotide"
  source: /note="RNA"
  source: /note="5' tri-ethylene glycol (TEG)"
  modified_base (11)..(11): bicyclic nucleic acid (BNA)
  source: /note="3' tri-ethylene glycol (TEG)"
caaggaagaug

SEQ ID NO: 6161 - DNA, 10 bp, Artificial Sequence
  source: /note="Description of Artificial Sequence: Synthetic oligonucleotide"
  source: /note="DNA/RNA"
  source: /note="5' tri-ethylene glycol (TEG)"
  modified_base (10)..(10): bicyclic nucleic acid (BNA)
  source: /note="3' tri-ethylene glycol (TEG)"
caaggaagat

SEQ ID NO: 6162 - RNA, 9 nt, Artificial Sequence
  source: /note="Description of Artificial Sequence: Synthetic oligonucleotide"
  source: /note="RNA/Antisense Oligonucleotide"
  source: /note="5' tri-ethylene glycol (TEG)"
  modified_base (9)..(9): bicyclic nucleic acid (BNA)
  source: /note="3' tri-ethylene glycol (TEG)"
caaggaaga

SEQ ID NO: 6163 - RNA, 8 nt, Artificial Sequence
  source: /note="Description of Artificial Sequence: Synthetic oligonucleotide"
  source: /note="RNA/Antisense Oligonucleotide"
  source: /note="5' tri-ethylene glycol (TEG)"
  modified_base (8)..(8): bicyclic nucleic acid (BNA)
  source: /note="3' tri-ethylene glycol (TEG)"
caaggaag

SEQ ID NO: 6164 - RNA, 20 nt, Artificial Sequence
  source: /note="Description of Artificial Sequence: Synthetic oligonucleotide"
  source: /note="RNA"
  source: /note="5' tri-ethylene glycol (TEG)"
  modified_base (20)..(20): bicyclic nucleic acid (BNA)
  source: /note="3' tri-ethylene glycol (TEG)"
aaggaagauggcauuucuag

SEQ ID NO: 6165 - RNA, 19 nt, Artificial Sequence
  source: /note="Description of Artificial Sequence: Synthetic oligonucleotide"
  source: /note="RNA"
  source: /note="5' tri-ethylene glycol (TEG)"
  modified_base (19)..(19): bicyclic nucleic acid (BNA)
  source: /note="3' tri-ethylene glycol (TEG)"
aaggaagauggcauuucua

SEQ ID NO: 6166 - DNA, 18 bp, Artificial Sequence
  source: /note="Description of Artificial Sequence: Synthetic oligonucleotide"
  source: /note="Description of Combined DNA/RNA Molecule: Synthetic oligonucleotide"
  source: /note="DNA/RNA"
  source: /note="5' tri-ethylene glycol (TEG)"
  modified_base (18)..(18): bicyclic nucleic acid (BNA)
  source: /note="3' tri-ethylene glycol (TEG)"
aaggaagauggcauuuct

SEQ ID NO: 6167 - RNA, 17 nt, Artificial Sequence
  source: /note="Description of Artificial Sequence: Synthetic oligonucleotide"
  source: /note="RNA"
  source: /note="5' tri-ethylene glycol (TEG)"
  modified_base (17)..(17): bicyclic nucleic acid (BNA)
  source: /note="3' tri-ethylene glycol (TEG)"
aaggaagauggcauuuc

SEQ ID NO: 6168 - DNA, 16 bp, Artificial Sequence
  source: /note="Description of Artificial Sequence: Synthetic oligonucleotide"
  source: /note="Description of Combined DNA/RNA Molecule: Synthetic oligonucleotide"
  source: /note="DNA/RNA"
  source: /note="5' tri-ethylene glycol (TEG)"
  modified_base (16)..(16): bicyclic nucleic acid (BNA)
  source: /note="3' tri-ethylene glycol (TEG)"
aaggaagauggcauut

SEQ ID NO: 6169 - DNA, 15 bp, Artificial Sequence
  source: /note="Description of Artificial Sequence: Synthetic oligonucleotide"
  source: /note="Description of Combined DNA/RNA Molecule: Synthetic oligonucleotide"
  source: /note="DNA/RNA"
  source: /note="5' tri-ethylene glycol (TEG)"
  modified_base (15)..(15): bicyclic nucleic acid (BNA)
  source: /note="3' tri-ethylene glycol (TEG)"
aaggaagauggcaut

SEQ ID NO: 6170 - DNA, 14 bp, Artificial Sequence
  source: /note="Description of Artificial Sequence: Synthetic oligonucleotide"
  source: /note="Description of Combined DNA/RNA Molecule: Synthetic oligonucleotide"
  source: /note="DNA/RNA"
  source: /note="5' tri-ethylene glycol (TEG)"
  modified_base (14)..(14): bicyclic nucleic acid (BNA)
  source: /note="3' tri-ethylene glycol (TEG)"
aaggaagauggcat

SEQ ID NO: 6171 - RNA, 13 nt, Artificial Sequence
  source: /note="Description of Artificial Sequence: Synthetic oligonucleotide"
  source: /note="RNA"
  source: /note="5' tri-ethylene glycol (TEG)"
  modified_base (13)..(13): bicyclic nucleic acid (BNA)
  source: /note="3' tri-ethylene glycol (TEG)"
aaggaagauggca

SEQ ID NO: 6172 - RNA, 12 nt, Artificial Sequence
  source: /note="Description of Artificial Sequence: Synthetic oligonucleotide"
  source: /note="RNA"
  source: /note="5' tri-ethylene glycol (TEG)"
  modified_base (12)..(12): bicyclic nucleic acid (BNA)
  source: /note="3' tri-ethylene glycol (TEG)"
aaggaagauggc

SEQ ID NO: 6173 - RNA, 11 nt, Artificial Sequence
  source: /note="Description of Artificial Sequence: Synthetic oligonucleotide"
  source: /note="RNA"
  source: /note="5' tri-ethylene glycol (TEG)"
  modified_base (11)..(11): bicyclic nucleic acid (BNA)
  source: /note="3' tri-ethylene glycol (TEG)"
aaggaagaugg

SEQ ID NO: 6174 - RNA, 10 nt, Artificial Sequence
  source: /note="Description of Artificial Sequence: Synthetic oligonucleotide"
  source: /note="RNA"
  source: /note="5' tri-ethylene glycol (TEG)"
  modified_base (10)..(10): bicyclic nucleic acid (BNA)
  source: /note="3' tri-ethylene glycol (TEG)"
aaggaagaug

SEQ ID NO: 6175 - DNA, 9 bp, Artificial Sequence
  source: /note="Description of Artificial Sequence: Synthetic oligonucleotide"
  source: /note="DNA/RNA"
  source: /note="5' tri-ethylene glycol (TEG)"
  modified_base (9)..(9): bicyclic nucleic acid (BNA)
  source: /note="3' tri-ethylene glycol (TEG)"
aaggaagat

SEQ ID NO: 6176 - RNA, 8 nt, Artificial Sequence
  source: /note="Description of Artificial Sequence: Synthetic oligonucleotide"
  source: /note="RNA/Antisense Oligonucleotide"
  source: /note="5' tri-ethylene glycol (TEG)"
  modified_base (8)..(8): bicyclic nucleic acid (BNA)
  source: /note="3' tri-ethylene glycol (TEG)"
aaggaaga

SEQ ID NO: 6177 - RNA, 19 nt, Artificial Sequence
  source: /note="Description of Artificial Sequence: Synthetic oligonucleotide"
  source: /note="RNA"
  source: /note="5' tri-ethylene glycol (TEG)"
  modified_base (19)..(19): bicyclic nucleic acid (BNA)
  source: /note="3' tri-ethylene glycol (TEG)"
aggaagauggcauuucuag

SEQ ID NO: 6178 - RNA, 18 nt, Artificial Sequence
  source: /note="Description of Artificial Sequence: Synthetic oligonucleotide"
  source: /note="RNA"
  source: /note="5' tri-ethylene glycol (TEG)"
  modified_base (18)..(18): bicyclic nucleic acid (BNA)
  source: /note="3' tri-ethylene glycol (TEG)"
aggaagauggcauuucua

SEQ ID NO: 6179 - DNA, 17 bp, Artificial Sequence
  source: /note="Description of Artificial Sequence: Synthetic oligonucleotide"
  source: /note="Description of Combined DNA/RNA Molecule: Synthetic oligonucleotide"
  source: /note="DNA/RNA"
  source: /note="5' tri-ethylene glycol (TEG)"
  modified_base (17)..(17): bicyclic nucleic acid (BNA)
  source: /note="3' tri-ethylene glycol (TEG)"
aggaagauggcauuuct

SEQ ID NO: 6180 - RNA, 16 nt, Artificial Sequence
  source: /note="Description of Artificial Sequence: Synthetic oligonucleotide"
  source: /note="RNA"
  source: /note="5' tri-ethylene glycol (TEG)"
  modified_base (16)..(16): bicyclic nucleic acid (BNA)
  source: /note="3' tri-ethylene glycol (TEG)"
aggaagauggcauuuc

SEQ ID NO: 6181 - DNA, 15 bp, Artificial Sequence
  source: /note="Description of Artificial Sequence: Synthetic oligonucleotide"
  source: /note="Description of Combined DNA/RNA Molecule: Synthetic oligonucleotide"
  source: /note="DNA/RNA"
  source: /note="5' tri-ethylene glycol (TEG)"
  modified_base (15)..(15): bicyclic nucleic acid (BNA)
  source: /note="3' tri-ethylene glycol (TEG)"
aggaagauggcauut

SEQ ID NO: 6182 - DNA, 14 bp, Artificial Sequence
  source: /note="Description of Artificial Sequence: Synthetic oligonucleotide"
  source: /note="Description of Combined DNA/RNA Molecule: Synthetic oligonucleotide"
  source: /note="DNA/RNA"
  source: /note="5' tri-ethylene glycol (TEG)"
  modified_base (14)..(14): bicyclic nucleic acid (BNA)
  source: /note="3' tri-ethylene glycol (TEG)"
aggaagauggcaut

SEQ ID NO: 6183 - DNA, 13 bp, Artificial Sequence
  source: /note="Description of Artificial Sequence: Synthetic oligonucleotide"
  source: /note="Description of Combined DNA/RNA Molecule: Synthetic oligonucleotide"
  source: /note="DNA/RNA"
  source: /note="5' tri-ethylene glycol (TEG)"
  modified_base (13)..(13): bicyclic nucleic acid (BNA)
  source: /note="3' tri-ethylene glycol (TEG)"
aggaagauggcat

SEQ ID NO: 6184 - RNA, 12 nt, Artificial Sequence
  source: /note="Description of Artificial Sequence: Synthetic oligonucleotide"
  source: /note="RNA"
  source: /note="5' tri-ethylene glycol (TEG)"
  modified_base (12)..(12): bicyclic nucleic acid (BNA)
  source: /note="3' tri-ethylene glycol (TEG)"
aggaagauggca

SEQ ID NO: 6185 - RNA, 10 nt, Artificial Sequence
  source: /note="Description of Artificial Sequence: Synthetic oligonucleotide"
  source: /note="RNA"
  source: /note="5' tri-ethylene glycol (TEG)"
  modified_base (10)..(10): bicyclic nucleic acid (BNA)
  source: /note="3' tri-ethylene glycol (TEG)"
aggaagaugg

SEQ ID NO: 6186 - RNA, 9 nt, Artificial Sequence
  source: /note="Description of Artificial Sequence: Synthetic oligonucleotide"
  source: /note="RNA"
  source: /note="5' tri-ethylene glycol (TEG)"
  modified_base (9)..(9): bicyclic nucleic acid (BNA)
  source: /note="3' tri-ethylene glycol (TEG)"
aggaagaug

SEQ ID NO: 6187 - DNA, 8 bp, Artificial Sequence
  source: /note="Description of Artificial Sequence: Synthetic oligonucleotide"
  source: /note="DNA/RNA"
  source: /note="5' tri-ethylene glycol (TEG)"
  modified_base (8)..(8): bicyclic nucleic acid (BNA)
  source: /note="3' tri-ethylene glycol (TEG)"
aggaagat

SEQ ID NO: 6188 - RNA, 18 nt, Artificial Sequence
  source: /note="Description of Artificial Sequence: Synthetic oligonucleotide"
  source: /note="RNA"
  source: /note="5' tri-ethylene glycol (TEG)"
  modified_base (18)..(18): bicyclic nucleic acid (BNA)
  source: /note="3' tri-ethylene glycol (TEG)"
ggaagauggcauuucuag

SEQ ID NO: 6189 - RNA, 17 nt, Artificial Sequence
  source: /note="Description of Artificial Sequence: Synthetic oligonucleotide"
  source: /note="RNA"
  source: /note="5' tri-ethylene glycol (TEG)"
  modified_base (17)..(17): bicyclic nucleic acid (BNA)
  source: /note="3' tri-ethylene glycol (TEG)"
ggaagauggcauuucua

SEQ ID NO: 6190 - DNA, 16 bp, Artificial Sequence
  source: /note="Description of Artificial Sequence: Synthetic oligonucleotide"
  source: /note="Description of Combined DNA/RNA Molecule: Synthetic oligonucleotide"
  source: /note="DNA/RNA"
  source: /note="5' tri-ethylene glycol (TEG)"
  modified_base (16)..(16): bicyclic nucleic acid (BNA)
  source: /note="3' tri-ethylene glycol (TEG)"
ggaagauggcauuuct

SEQ ID NO: 6191 - RNA, 15 nt, Artificial Sequence
  source: /note="Description of Artificial Sequence: Synthetic oligonucleotide"
  source: /note="RNA"
  source: /note="5' tri-ethylene glycol (TEG)"
  modified_base (15)..(15): bicyclic nucleic acid (BNA)
  source: /note="3' tri-ethylene glycol (TEG)"
ggaagauggcauuuc

SEQ ID NO: 6192 - DNA, 14 bp, Artificial Sequence
  source: /note="Description of Artificial Sequence: Synthetic oligonucleotide"
  source: /note="Description of Combined DNA/RNA Molecule: Synthetic oligonucleotide"
  source: /note="DNA/RNA"
  source: /note="5' tri-ethylene glycol (TEG)"
  modified_base (14)..(14): bicyclic nucleic acid (BNA)
  source: /note="3' tri-ethylene glycol (TEG)"
ggaagauggcauut

SEQ ID NO: 6193 - DNA, 13 bp, Artificial Sequence
  source: /note="Description of Artificial Sequence: Synthetic oligonucleotide"
  source: /note="Description of Combined DNA/RNA Molecule: Synthetic oligonucleotide"
  source: /note="DNA/RNA"
  source: /note="5' tri-ethylene glycol (TEG)"
  modified_base (13)..(13): bicyclic nucleic acid (BNA)
  source: /note="3' tri-ethylene glycol (TEG)"
ggaagauggcaut

SEQ ID NO: 6194 - DNA, 12 bp, Artificial Sequence
  source: /note="Description of Artificial Sequence: Synthetic oligonucleotide"
  source: /note="Description of Combined DNA/RNA Molecule: Synthetic oligonucleotide"
  source: /note="DNA/RNA"
  source: /note="5' tri-ethylene glycol (TEG)"
  modified_base (12)..(12): bicyclic nucleic acid (BNA)
  source: /note="3' tri-ethylene glycol (TEG)"
ggaagauggcat

SEQ ID NO: 6195 - RNA, 11 nt, Artificial Sequence
  source: /note="Description of Artificial Sequence: Synthetic oligonucleotide"
  source: /note="RNA"
  source: /note="5' tri-ethylene glycol (TEG)"
  modified_base (11)..(11): bicyclic nucleic acid (BNA)
  source: /note="3' tri-ethylene glycol (TEG)"
ggaagauggca

SEQ ID NO: 6196 - RNA, 10 nt, Artificial Sequence
  source: /note="Description of Artificial Sequence: Synthetic oligonucleotide"
  source: /note="RNA"
  source: /note="5' tri-ethylene glycol (TEG)"
  modified_base (10)..(10): bicyclic nucleic acid (BNA)
  source: /note="3' tri-ethylene glycol (TEG)"
ggaagauggc

SEQ ID NO: 6197 - RNA, 8 nt, Artificial Sequence
  source: /note="Description of Artificial Sequence: Synthetic oligonucleotide"
  source: /note="RNA"
  source: /note="5' tri-ethylene glycol (TEG)"
  modified_base (8)..(8): bicyclic nucleic acid (BNA)
  source: /note="3' tri-ethylene glycol (TEG)"
ggaagaug

SEQ ID NO: 6198 - RNA, 17 nt, Artificial Sequence
  source: /note="Description of Artificial Sequence: Synthetic oligonucleotide"
  source: /note="RNA"
  source: /note="5' tri-ethylene glycol (TEG)"
  modified_base (17)..(17): bicyclic nucleic acid (BNA)
  source: /note="3' tri-ethylene glycol (TEG)"
gaagauggcauuucuag

SEQ ID NO: 6199 - RNA, 16 nt, Artificial Sequence
  source: /note="Description of Artificial Sequence: Synthetic oligonucleotide"
  source: /note="RNA"
  source: /note="5' tri-ethylene glycol (TEG)"
  modified_base (16)..(16): bicyclic nucleic acid (BNA)
  source: /note="3' tri-ethylene glycol (TEG)"
gaagauggcauuucua

SEQ ID NO: 6200 - RNA, 14 nt, Artificial Sequence
  source: /note="Description of Artificial Sequence: Synthetic oligonucleotide"
  source: /note="RNA"
  source: /note="5' tri-ethylene glycol (TEG)"
  modified_base (14)..(14): bicyclic nucleic acid (BNA)
  source: /note="3' tri-ethylene glycol (TEG)"
gaagauggcauuuc

SEQ ID NO: 6201 - DNA, 13 bp, Artificial Sequence
  source: /note="Description of Artificial Sequence: Synthetic oligonucleotide"
  source: /note="Description of Combined DNA/RNA Molecule: Synthetic oligonucleotide"
  source: /note="DNA/RNA"
  source: /note="5' tri-ethylene glycol (TEG)"
  modified_base (13)..(13): bicyclic nucleic acid (BNA)
  source: /note="3' tri-ethylene glycol (TEG)"
gaagauggcauut

SEQ ID NO: 6202 - DNA, 12 bp, Artificial Sequence
  source: /note="Description of Artificial Sequence: Synthetic oligonucleotide"
  source: /note="Description of Combined DNA/RNA Molecule: Synthetic oligonucleotide"
  source: /note="DNA/RNA"
  source: /note="5' tri-ethylene glycol (TEG)"
  modified_base (12)..(12): bicyclic nucleic acid (BNA)
  source: /note="3' tri-ethylene glycol (TEG)"
gaagauggcaut

SEQ ID NO: 6203 - DNA, 11 bp, Artificial Sequence
  source: /note="Description of Artificial Sequence: Synthetic oligonucleotide"
  source: /note="Description of Combined DNA/RNA Molecule: Synthetic oligonucleotide"
  source: /note="DNA/RNA"
  source: /note="5' tri-ethylene glycol (TEG)"
  modified_base (11)..(11): bicyclic nucleic acid (BNA)
  source: /note="3' tri-ethylene glycol (TEG)"
gaagauggcat

SEQ ID NO: 6204 - RNA, 10 nt, Artificial Sequence
  source: /note="Description of Artificial Sequence: Synthetic oligonucleotide"
  source: /note="RNA"
  source: /note="5' tri-ethylene glycol (TEG)"
  modified_base (10)..(10): bicyclic nucleic acid (BNA)
  source: /note="3' tri-ethylene glycol (TEG)"
gaagauggca

SEQ ID NO: 6205 - RNA, 9 nt, Artificial Sequence
  source: /note="Description of Artificial Sequence: Synthetic oligonucleotide"
  source: /note="RNA"
  source: /note="5' tri-ethylene glycol (TEG)"
  modified_base (9)..(9): bicyclic nucleic acid (BNA)
  source: /note="3' tri-ethylene glycol (TEG)"
gaagauggc

SEQ ID NO: 6206 - RNA, 8 nt, Artificial Sequence
  source: /note="Description of Artificial Sequence: Synthetic oligonucleotide"
  source: /note="RNA"
  source: /note="5' tri-ethylene glycol (TEG)"
  modified_base (8)..(8): bicyclic nucleic acid (BNA)
  source: /note="3' tri-ethylene glycol (TEG)"
gaagaugg

SEQ ID NO: 6207 - RNA, 16 nt, Artificial Sequence
  source: /note="Description of Artificial Sequence: Synthetic oligonucleotide"
  source: /note="RNA"
  source: /note="5' tri-ethylene glycol (TEG)"
  modified_base (16)..(16): bicyclic nucleic acid (BNA)
  source: /note="3' tri-ethylene glycol (TEG)"
aagauggcauuucuag

SEQ ID NO: 6208 - RNA, 15 nt, Artificial Sequence
  source: /note="Description of Artificial Sequence: Synthetic oligonucleotide"
  source: /note="RNA"
  source: /note="5' tri-ethylene glycol (TEG)"
  modified_base (15)..(15): bicyclic nucleic acid (BNA)
  source: /note="3' tri-ethylene glycol (TEG)"
aagauggcauuucua

SEQ ID NO: 6209 - DNA, 14 bp, Artificial Sequence
  source: /note="Description of Artificial Sequence: Synthetic oligonucleotide"
  source: /note="Description of Combined DNA/RNA Molecule: Synthetic oligonucleotide"
  source: /note="DNA/RNA"
  source: /note="5' tri-ethylene glycol (TEG)"
  modified_base (14)..(14): bicyclic nucleic acid (BNA)
  source: /note="3' tri-ethylene glycol (TEG)"
aagauggcauuuct

SEQ ID NO: 6210 - RNA, 13 nt, Artificial Sequence
  source: /note="Description of Artificial Sequence: Synthetic oligonucleotide"
  source: /note="RNA"
  source: /note="5' tri-ethylene glycol (TEG)"
  modified_base (13)..(13): bicyclic nucleic acid (BNA)
  source: /note="3' tri-ethylene glycol (TEG)"
aagauggcauuuc

SEQ ID NO: 6211 - DNA, 12 bp, Artificial Sequence
  source: /note="Description of Artificial Sequence: Synthetic oligonucleotide"
  source: /note="Description of Combined DNA/RNA Molecule: Synthetic oligonucleotide"
  source: /note="DNA/RNA"
  source: /note="5' tri-ethylene glycol (TEG)"
  modified_base (12)..(12): bicyclic nucleic acid (BNA)
  source: /note="3' tri-ethylene glycol (TEG)"
aagauggcauut

SEQ ID NO: 6212 - DNA, 11 bp, Artificial Sequence
  source: /note="Description of Artificial Sequence: Synthetic oligonucleotide"
  source: /note="Description of Combined DNA/RNA Molecule: Synthetic oligonucleotide"
  source: /note="DNA/RNA"
  source: /note="5' tri-ethylene glycol (TEG)"
  modified_base (11)..(11): bicyclic nucleic acid (BNA)
  source: /note="3' tri-ethylene glycol (TEG)"
aagauggcaut

SEQ ID NO: 6213 - DNA, 10 bp, Artificial Sequence
  source: /note="Description of Artificial Sequence: Synthetic oligonucleotide"
  source: /note="Description of Combined DNA/RNA Molecule: Synthetic oligonucleotide"
  source: /note="DNA/RNA"
  source: /note="5' tri-ethylene glycol (TEG)"
  modified_base (10)..(10): bicyclic nucleic acid (BNA)
  source: /note="3' tri-ethylene glycol (TEG)"
aagauggcat

SEQ ID NO: 6214 - RNA, 9 nt, Artificial Sequence
  source: /note="Description of Artificial Sequence: Synthetic oligonucleotide"
  source: /note="RNA"
  source: /note="5' tri-ethylene glycol (TEG)"
  modified_base (9)..(9): bicyclic nucleic acid (BNA)
  source: /note="3' tri-ethylene glycol (TEG)"
aagauggca

SEQ ID NO: 6215 - RNA, 8 nt, Artificial Sequence
  source: /note="Description of Artificial Sequence: Synthetic oligonucleotide"
  source: /note="RNA"
  source: /note="5' tri-ethylene glycol (TEG)"
  modified_base (8)..(8): bicyclic nucleic acid (BNA)
  source: /note="3' tri-ethylene glycol (TEG)"
aagauggc

SEQ ID NO: 6216 - RNA, 15 nt, Artificial Sequence
  source: /note="Description of Artificial Sequence: Synthetic oligonucleotide"
  source: /note="RNA"
  source: /note="5' tri-ethylene glycol (TEG)"
  modified_base (15)..(15): bicyclic nucleic acid (BNA)
  source: /note="3' tri-ethylene glycol (TEG)"
agauggcauuucuag

SEQ ID NO: 6217 - RNA, 14 nt, Artificial Sequence
  source: /note="Description of Artificial Sequence: Synthetic oligonucleotide"
  source: /note="RNA"
  source: /note="5' tri-ethylene glycol (TEG)"
  modified_base (14)..(14): bicyclic nucleic acid (BNA)
  source: /note="3' tri-ethylene glycol (TEG)"
agauggcauuucua

SEQ ID NO: 6218 - DNA, 13 bp, Artificial Sequence
  source: /note="Description of Artificial Sequence: Synthetic oligonucleotide"
  source: /note="Description of Combined DNA/RNA Molecule: Synthetic oligonucleotide"
  source: /note="DNA/RNA"
  source: /note="5' tri-ethylene glycol (TEG)"
  modified_base (13)..(13): bicyclic nucleic acid (BNA)
  source: /note="3' tri-ethylene glycol (TEG)"
agauggcauuuct

SEQ ID NO: 6219 - RNA, 12 nt, Artificial Sequence
  source: /note="Description of Artificial Sequence: Synthetic oligonucleotide"
  source: /note="RNA"
  source: /note="5' tri-ethylene glycol (TEG)"
  modified_base (12)..(12): bicyclic nucleic acid (BNA)
  source: /note="3' tri-ethylene glycol (TEG)"
agauggcauuuc

SEQ ID NO: 6220 - DNA, 11 bp, Artificial Sequence
  source: /note="Description of Artificial Sequence: Synthetic oligonucleotide"
  source: /note="Description of Combined DNA/RNA Molecule: Synthetic oligonucleotide"
  source: /note="DNA/RNA"
  source: /note="5' tri-ethylene glycol (TEG)"
  modified_base (11)..(11): bicyclic nucleic acid (BNA)
  source: /note="3' tri-ethylene glycol (TEG)"
agauggcauut

SEQ ID NO: 6221 - DNA, 10 bp, Artificial Sequence
  source: /note="Description of Artificial Sequence: Synthetic oligonucleotide"
  source: /note="Description of Combined DNA/RNA Molecule: Synthetic oligonucleotide"
  source: /note="DNA/RNA"
  source: /note="5' tri-ethylene glycol (TEG)"
  modified_base (10)..(10): bicyclic nucleic acid (BNA)
  source: /note="3' tri-ethylene glycol (TEG)"
agauggcaut

SEQ ID NO: 6222 - DNA, 9 bp, Artificial Sequence
  source: /note="Description of Artificial Sequence: Synthetic oligonucleotide"
  source: /note="Description of Combined DNA/RNA Molecule: Synthetic oligonucleotide"
  source: /note="DNA/RNA"
  source: /note="5' tri-ethylene glycol (TEG)"
  modified_base (9)..(9): bicyclic nucleic acid (BNA)
  source: /note="3' tri-ethylene glycol (TEG)"
agauggcat

SEQ ID NO: 6223 - RNA, 8 nt, Artificial Sequence
  source: /note="Description of Artificial Sequence: Synthetic oligonucleotide"
  source: /note="RNA"
  source: /note="5' tri-ethylene glycol (TEG)"
  modified_base (8)..(8): bicyclic nucleic acid (BNA)
  source: /note="3' tri-ethylene glycol (TEG)"
agauggca

SEQ ID NO: 6224 - RNA, 30 nt, Artificial Sequence; identical to SEQ ID NO: 284
  source: /note="Description of Artificial Sequence: Synthetic oligonucleotide"
  source: /note="RNA"
  source: /note="5' tri-ethylene glycol (TEG)"
  modified_base (30)..(30): bicyclic nucleic acid (BNA)
  source: /note="3' tri-ethylene glycol (TEG)"

SEQ ID NO: 6225 - RNA, 29 nt, Artificial Sequence
  source: /note="Description of Artificial Sequence: Synthetic oligonucleotide"
  source: /note="RNA"
  source: /note="5' tri-ethylene glycol (TEG)"
  modified_base (29)..(29): bicyclic nucleic acid (BNA)
  source: /note="3' tri-ethylene glycol (TEG)"
cuccaacaucaaggaagauggcauuucua

SEQ ID NO: 6226 - DNA, 28 bp, Artificial Sequence
  source: /note="Description of Artificial Sequence: Synthetic oligonucleotide"
  source: /note="Description of Combined DNA/RNA Molecule: Synthetic oligonucleotide"
  source: /note="DNA/RNA"
  source: /note="5' tri-ethylene glycol (TEG)"
  modified_base (28)..(28): bicyclic nucleic acid (BNA)
  source: /note="3' tri-ethylene glycol (TEG)"
cuccaacaucaaggaagauggcauuuct

SEQ ID NO: 6227 - RNA, 27 nt, Artificial Sequence
  source: /note="Description of Artificial Sequence: Synthetic oligonucleotide"
  source: /note="RNA"
  source: /note="5' tri-ethylene glycol (TEG)"
  modified_base (27)..(27): bicyclic nucleic acid (BNA)
  source: /note="3' tri-ethylene glycol (TEG)"
cuccaacaucaaggaagauggcauuuc

SEQ ID NO: 6228 - DNA, 26 bp, Artificial Sequence
  source: /note="Description of Artificial Sequence: Synthetic oligonucleotide"
  source: /note="Description of Combined DNA/RNA Molecule: Synthetic oligonucleotide"
  source: /note="DNA/RNA"
  source: /note="5' tri-ethylene glycol (TEG)"
  modified_base (26)..(26): bicyclic nucleic acid (BNA)
  source: /note="3' tri-ethylene glycol (TEG)"
cuccaacaucaaggaagauggcauut

SEQ ID NO: 6229 - DNA, 25 bp, Artificial Sequence
  source: /note="Description of Artificial Sequence: Synthetic oligonucleotide"
  source: /note="Description of Combined DNA/RNA Molecule: Synthetic oligonucleotide"
  source: /note="DNA/RNA"
  source: /note="5' tri-ethylene glycol (TEG)"
  modified_base (25)..(25): bicyclic nucleic acid (BNA)
  source: /note="3' tri-ethylene glycol (TEG)"
cuccaacaucaaggaagauggcaut

SEQ ID NO: 6230 - DNA, 24 bp, Artificial Sequence
  source: /note="Description of Artificial Sequence: Synthetic oligonucleotide"
  source: /note="Description of Combined DNA/RNA Molecule: Synthetic oligonucleotide"
  source: /note="DNA/RNA"
  source: /note="5' tri-ethylene glycol (TEG)"
  modified_base (24)..(24): bicyclic nucleic acid (BNA)
  source: /note="3' tri-ethylene glycol (TEG)"
cuccaacaucaaggaagauggcat

SEQ ID NO: 6231 - RNA, 23 nt, Artificial Sequence
  source: /note="Description of Artificial Sequence: Synthetic oligonucleotide"
  source: /note="RNA"
  source: /note="5' tri-ethylene glycol (TEG)"
  modified_base (23)..(23): bicyclic nucleic acid (BNA)
  source: /note="3' tri-ethylene glycol (TEG)"
cuccaacaucaaggaagauggca

SEQ ID NO: 6232 - RNA, 22 nt, Artificial Sequence
  source: /note="Description of Artificial Sequence: Synthetic oligonucleotide"
  source: /note="RNA"
  source: /note="5' tri-ethylene glycol (TEG)"
  modified_base (22)..(22): bicyclic nucleic acid (BNA)
  source: /note="3' tri-ethylene glycol (TEG)"
cuccaacaucaaggaagauggc

SEQ ID NO: 6233 - RNA, 21 nt, Artificial Sequence
  source: /note="Description of Artificial Sequence: Synthetic oligonucleotide"
  source: /note="RNA"
  source: /note="5' tri-ethylene glycol (TEG)"
  modified_base (21)..(21): bicyclic nucleic acid (BNA)
  source: /note="3' tri-ethylene glycol (TEG)"
cuccaacaucaaggaagaugg

SEQ ID NO: 6234 - RNA, 20 nt, Artificial Sequence
  source: /note="Description of Artificial Sequence: Synthetic oligonucleotide"
  source: /note="RNA"
  source: /note="5' tri-ethylene glycol (TEG)"
  modified_base (20)..(20): bicyclic nucleic acid (BNA)
  source: /note="3' tri-ethylene glycol (TEG)"
cuccaacaucaaggaagaug

SEQ ID NO: 6235 - DNA, 19 bp, Artificial Sequence
  source: /note="Description of Artificial Sequence: Synthetic oligonucleotide"
  source: /note="Description of Combined DNA/RNA Molecule: Synthetic oligonucleotide"
  source: /note="DNA/RNA"
  source: /note="5' tri-ethylene glycol (TEG)"
  modified_base (19)..(19): bicyclic nucleic acid (BNA)
  source: /note="3' tri-ethylene glycol (TEG)"
cuccaacaucaaggaagat

SEQ ID NO: 6236 - RNA, 18 nt, Artificial Sequence
  source: /note="Description of Artificial Sequence: Synthetic oligonucleotide"
  source: /note="RNA"
  source: /note="5' tri-ethylene glycol (TEG)"
  modified_base (18)..(18): bicyclic nucleic acid (BNA)
  source: /note="3' tri-ethylene glycol (TEG)"
cuccaacaucaaggaaga

SEQ ID NO: 6237 - RNA, 17 nt, Artificial Sequence
  source: /note="Description of Artificial Sequence: Synthetic oligonucleotide"
  source: /note="RNA"
  source: /note="5' tri-ethylene glycol (TEG)"
  modified_base (17)..(17): bicyclic nucleic acid (BNA)
  source: /note="3' tri-ethylene glycol (TEG)"
cuccaacaucaaggaag

SEQ ID NO: 6238 - RNA, 29 nt, Artificial Sequence
  source: /note="Description of Artificial Sequence: Synthetic oligonucleotide"
  source: /note="RNA"
  source: /note="5' tri-ethylene glycol (TEG)"
  modified_base (29)..(29): bicyclic nucleic acid (BNA)
  source: /note="3' tri-ethylene glycol (TEG)"
uccaacaucaaggaagauggcauuucuag

SEQ ID NO: 6239 - RNA, 28 nt, Artificial Sequence
  source: /note="Description of Artificial Sequence: Synthetic oligonucleotide"
  source: /note="RNA"
  source: /note="5' tri-ethylene glycol (TEG)"
  modified_base (28)..(28): bicyclic nucleic acid (BNA)
  source: /note="3' tri-ethylene glycol (TEG)"
uccaacaucaaggaagauggcauuucua

SEQ ID NO: 6240 - DNA, 27 bp, Artificial Sequence
  source: /note="Description of Artificial Sequence: Synthetic oligonucleotide"
  source: /note="Description of Combined DNA/RNA Molecule: Synthetic oligonucleotide"
  source: /note="DNA/RNA"
  source: /note="5' tri-ethylene glycol (TEG)"
  modified_base (27)..(27): bicyclic nucleic acid (BNA)
  source: /note="3' tri-ethylene glycol (TEG)"
uccaacaucaaggaagauggcauuuct

SEQ ID NO: 6241 - RNA, 26 nt, Artificial Sequence
  source: /note="Description of Artificial Sequence: Synthetic oligonucleotide"
  source: /note="RNA"
  source: /note="5' tri-ethylene glycol (TEG)"
  modified_base (26)..(26): bicyclic nucleic acid (BNA)
  source: /note="3' tri-ethylene glycol (TEG)"
uccaacaucaaggaagauggcauuuc

SEQ ID NO: 6242 - DNA, 25 bp, Artificial Sequence
  source: /note="Description of Artificial Sequence: Synthetic oligonucleotide"
  source: /note="Description of Combined DNA/RNA Molecule: Synthetic oligonucleotide"
  source: /note="DNA/RNA"
  source: /note="5' tri-ethylene glycol (TEG)"
  modified_base (25)..(25): bicyclic nucleic acid (BNA)
  source: /note="3' tri-ethylene glycol (TEG)"
uccaacaucaaggaagauggcauut

SEQ ID NO: 6243 - DNA, 24 bp, Artificial Sequence
  source: /note="Description of Artificial Sequence: Synthetic oligonucleotide"
  source: /note="Description of Combined DNA/RNA Molecule: Synthetic oligonucleotide"
  source: /note="DNA/RNA"
  source: /note="5' tri-ethylene glycol (TEG)"
  modified_base (24)..(24): bicyclic nucleic acid (BNA)
  source: /note="3' tri-ethylene glycol (TEG)"
uccaacaucaaggaagauggcaut

SEQ ID NO: 6244 - DNA, 23 bp, Artificial Sequence
  source: /note="Description of Artificial Sequence: Synthetic oligonucleotide"
  source: /note="Description of Combined DNA/RNA Molecule: Synthetic oligonucleotide"
  source: /note="DNA/RNA"
  source: /note="5' tri-ethylene glycol (TEG)"
  modified_base (23)..(23): bicyclic nucleic acid (BNA)
  source: /note="3' tri-ethylene glycol (TEG)"
uccaacaucaaggaagauggcat

SEQ ID NO: 6245 - RNA, 22 nt, Artificial Sequence
  source: /note="Description of Artificial Sequence: Synthetic oligonucleotide"
  source: /note="RNA"
  source: /note="5' tri-ethylene glycol (TEG)"
  modified_base (22)..(22): bicyclic nucleic acid (BNA)
  source: /note="3' tri-ethylene glycol (TEG)"
uccaacaucaaggaagauggca

SEQ ID NO: 6246 - RNA, 21 nt, Artificial Sequence
  source: /note="Description of Artificial Sequence: Synthetic oligonucleotide"
  source: /note="RNA"
  source: /note="5' tri-ethylene glycol (TEG)"
  modified_base (21)..(21): bicyclic nucleic acid (BNA)
  source: /note="3' tri-ethylene glycol (TEG)"
uccaacaucaaggaagauggc

SEQ ID NO: 6247 - RNA, 20 nt, Artificial Sequence
  source: /note="Description of Artificial Sequence: Synthetic oligonucleotide"
  source: /note="RNA"
  source: /note="5' tri-ethylene glycol (TEG)"
  modified_base (20)..(20): bicyclic nucleic acid (BNA)
  source: /note="3' tri-ethylene glycol (TEG)"
uccaacaucaaggaagaugg

SEQ ID NO: 6248 - RNA, 19 nt, Artificial Sequence
  source: /note="Description of Artificial Sequence: Synthetic oligonucleotide"
  source: /note="RNA"
  source: /note="5' tri-ethylene glycol (TEG)"
  modified_base (19)..(19): bicyclic nucleic acid (BNA)
  source: /note="3' tri-ethylene glycol (TEG)"
uccaacaucaaggaagaug

SEQ ID NO: 6249 - DNA, 18 bp, Artificial Sequence
  source: /note="Description of Artificial Sequence: Synthetic oligonucleotide"
  source: /note="Description of Combined DNA/RNA Molecule: Synthetic oligonucleotide"
  source: /note="DNA/RNA"
  source: /note="5' tri-ethylene glycol (TEG)"
  modified_base (18)..(18): bicyclic nucleic acid (BNA)
  source: /note="3' tri-ethylene glycol (TEG)"
uccaacaucaaggaagat

SEQ ID NO: 6250 - RNA, 17 nt, Artificial Sequence
  source: /note="Description of Artificial Sequence: Synthetic oligonucleotide"
  source: /note="RNA"
  source: /note="5' tri-ethylene glycol (TEG)"
  modified_base (17)..(17): bicyclic nucleic acid (BNA)
  source: /note="3' tri-ethylene glycol (TEG)"
uccaacaucaaggaaga

SEQ ID NO: 6251 - RNA, 16 nt, Artificial Sequence
  source: /note="Description of Artificial Sequence: Synthetic oligonucleotide"
  source: /note="RNA"
  source: /note="5' tri-ethylene glycol (TEG)"
  modified_base (16)..(16): bicyclic nucleic acid (BNA)
  source: /note="3' tri-ethylene glycol (TEG)"
uccaacaucaaggaag

SEQ ID NO: 6252 - RNA, 28 nt, Artificial Sequence
  source: /note="Description of Artificial Sequence: Synthetic oligonucleotide"
  source: /note="RNA"
  source: /note="5' tri-ethylene glycol (TEG)"
  modified_base (28)..(28): bicyclic nucleic acid (BNA)
  source: /note="3' tri-ethylene glycol (TEG)"
ccaacaucaaggaagauggcauuucuag

SEQ ID NO: 6253 - RNA, 27 nt, Artificial Sequence
  source: /note="Description of Artificial Sequence: Synthetic oligonucleotide"
  source: /note="RNA"
  source: /note="5' tri-ethylene glycol (TEG)"
  modified_base (27)..(27): bicyclic nucleic acid (BNA)
  source: /note="3' tri-ethylene glycol (TEG)"
ccaacaucaaggaagauggcauuucua

SEQ ID NO: 6254 - DNA, 26 bp, Artificial Sequence
  source: /note="Description of Artificial Sequence: Synthetic oligonucleotide"
  source: /note="Description of Combined DNA/RNA Molecule: Synthetic oligonucleotide"
  source: /note="DNA/RNA"
  source: /note="5' tri-ethylene glycol (TEG)"
  modified_base (26)..(26): bicyclic nucleic acid (BNA)
  source: /note="3' tri-ethylene glycol (TEG)"
ccaacaucaaggaagauggcauuuct

SEQ ID NO: 6255 - RNA, 25 nt, Artificial Sequence
  source: /note="Description of Artificial Sequence: Synthetic oligonucleotide"
  source: /note="RNA"
  source: /note="5' tri-ethylene glycol (TEG)"
  modified_base (25)..(25): bicyclic nucleic acid (BNA)
  source: /note="3' tri-ethylene glycol (TEG)"
ccaacaucaaggaagauggcauuuc

SEQ ID NO: 6256 - DNA, 24 bp, Artificial Sequence
  source: /note="Description of Artificial Sequence: Synthetic oligonucleotide"
  source: /note="Description of Combined DNA/RNA Molecule: Synthetic oligonucleotide"
  source: /note="DNA/RNA"
  source: /note="5' tri-ethylene glycol (TEG)"
  modified_base (24)..(24): bicyclic nucleic acid (BNA)
  source: /note="3' tri-ethylene glycol (TEG)"
ccaacaucaaggaagauggcauut

SEQ ID NO: 6257 - DNA, 23 bp, Artificial Sequence
  source: /note="Description of Artificial Sequence: Synthetic oligonucleotide"
  source: /note="Description of Combined DNA/RNA Molecule: Synthetic oligonucleotide"
  source: /note="DNA/RNA"
  source: /note="5' tri-ethylene glycol (TEG)"
  modified_base (23)..(23): bicyclic nucleic acid (BNA)
  source: /note="3' tri-ethylene glycol (TEG)"
ccaacaucaaggaagauggcaut

SEQ ID NO: 6258 - DNA, 22 bp, Artificial Sequence
  source: /note="Description of Artificial Sequence: Synthetic oligonucleotide"
  source: /note="Description of Combined DNA/RNA Molecule: Synthetic oligonucleotide"
  source: /note="DNA/RNA"
  source: /note="5' tri-ethylene glycol (TEG)"
  modified_base (22)..(22): bicyclic nucleic acid (BNA)
  source: /note="3' tri-ethylene glycol (TEG)"
ccaacaucaaggaagauggcat

SEQ ID NO: 6259 - RNA, 21 nt, Artificial Sequence
  source: /note="Description of Artificial Sequence: Synthetic oligonucleotide"
  source: /note="RNA"
  source: /note="5' tri-ethylene glycol (TEG)"
  modified_base (21)..(21): bicyclic nucleic acid (BNA)
  source: /note="3' tri-ethylene glycol (TEG)"
ccaacaucaaggaagauggca

SEQ ID NO: 6260 - RNA, 20 nt, Artificial Sequence
  source: /note="Description of Artificial Sequence: Synthetic oligonucleotide"
  source: /note="RNA"
  source: /note="5' tri-ethylene glycol (TEG)"
  modified_base (20)..(20): bicyclic nucleic acid (BNA)
  source: /note="3' tri-ethylene glycol (TEG)"
ccaacaucaaggaagauggc

SEQ ID NO: 6261 - RNA, 19 nt, Artificial Sequence
  source: /note="Description of Artificial Sequence: Synthetic oligonucleotide"
  source: /note="RNA"
  source: /note="5' tri-ethylene glycol (TEG)"
  modified_base (19)..(19): bicyclic nucleic acid (BNA)
  source: /note="3' tri-ethylene glycol (TEG)"
ccaacaucaaggaagaugg

SEQ ID NO: 6262 - RNA, 18 nt, Artificial Sequence
  source: /note="Description of Artificial Sequence: Synthetic oligonucleotide"
  source: /note="RNA"
  source: /note="5' tri-ethylene glycol (TEG)"
  modified_base (18)..(18): bicyclic nucleic acid (BNA)
  source: /note="3' tri-ethylene glycol (TEG)"
ccaacaucaaggaagaug

SEQ ID NO: 6263 - DNA, 17 bp, Artificial Sequence
  source: /note="Description of Artificial Sequence: Synthetic oligonucleotide"
  source: /note="Description of Combined DNA/RNA Molecule: Synthetic oligonucleotide"
  source: /note="DNA/RNA"
  source: /note="5' tri-ethylene glycol (TEG)"
  modified_base (17)..(17): bicyclic nucleic acid (BNA)
  source: /note="3' tri-ethylene glycol (TEG)"
ccaacaucaaggaagat

SEQ ID NO: 6264 - RNA, 16 nt, Artificial Sequence
  source: /note="Description of Artificial Sequence: Synthetic oligonucleotide"
  source: /note="RNA"
  source: /note="5' tri-ethylene glycol (TEG)"
  modified_base (16)..(16): bicyclic nucleic acid (BNA)
  source: /note="3' tri-ethylene glycol (TEG)"
ccaacaucaaggaaga

SEQ ID NO: 6265 - RNA, 15 nt, Artificial Sequence
  source: /note="Description of Artificial Sequence: Synthetic oligonucleotide"
  source: /note="RNA"
  source: /note="5' tri-ethylene glycol (TEG)"
  modified_base (15)..(15): bicyclic nucleic acid (BNA)
  source: /note="3' tri-ethylene glycol (TEG)"
ccaacaucaaggaag

SEQ ID NO: 6266 - RNA, 27 nt, Artificial Sequence
  source: /note="Description of Artificial Sequence: Synthetic oligonucleotide"
  source: /note="RNA"
  source: /note="5' tri-ethylene glycol (TEG)"
  modified_base (27)..(27): bicyclic nucleic acid (BNA)
  source: /note="3' tri-ethylene glycol (TEG)"
caacaucaaggaagauggcauuucuag

SEQ ID NO: 6267 - RNA, 26 nt, Artificial Sequence
  source: /note="Description of Artificial Sequence: Synthetic oligonucleotide"
  source: /note="RNA"
  source: /note="5' tri-ethylene glycol (TEG)"
  modified_base (26)..(26): bicyclic nucleic acid (BNA)
  source: /note="3' tri-ethylene glycol (TEG)"
caacaucaaggaagauggcauuucua

SEQ ID NO: 6268 - DNA, 25 bp, Artificial Sequence
  source: /note="Description of Artificial Sequence: Synthetic oligonucleotide"
  source: /note="Description of Combined DNA/RNA Molecule: Synthetic oligonucleotide"
  source: /note="DNA/RNA"
  source: /note="5' tri-ethylene glycol (TEG)"
  modified_base (25)..(25): bicyclic nucleic acid (BNA)
  source: /note="3' tri-ethylene glycol (TEG)"
caacaucaaggaagauggcauuuct

SEQ ID NO: 6269 - RNA, 24 nt, Artificial Sequence
  source: /note="Description of Artificial Sequence: Synthetic oligonucleotide"
  source: /note="RNA"
  source: /note="5' tri-ethylene glycol (TEG)"
  modified_base (24)..(24): bicyclic nucleic acid (BNA)
  source: /note="3' tri-ethylene glycol (TEG)"
caacaucaaggaagauggcauuuc

SEQ ID NO: 6270 - DNA, 23 bp, Artificial Sequence
  source: /note="Description of Artificial Sequence: Synthetic oligonucleotide"
  source: /note="Description of Combined DNA/RNA Molecule: Synthetic oligonucleotide"
  source: /note="DNA/RNA"
  source: /note="5' tri-ethylene glycol (TEG)"
  modified_base (23)..(23): bicyclic nucleic acid (BNA)
  source: /note="3' tri-ethylene glycol (TEG)"
caacaucaaggaagauggcauut

SEQ ID NO: 6271 - DNA, 22 bp, Artificial Sequence
  source: /note="Description of Artificial Sequence: Synthetic oligonucleotide"
  source: /note="Description of Combined DNA/RNA Molecule: Synthetic oligonucleotide"
  source: /note="DNA/RNA"
  source: /note="5' tri-ethylene glycol (TEG)"
  modified_base (22)..(22): bicyclic nucleic acid (BNA)
  source: /note="3' tri-ethylene glycol (TEG)"
caacaucaaggaagauggcaut

SEQ ID NO: 6272 - DNA, 21 bp, Artificial Sequence
  source: /note="Description of Artificial Sequence: Synthetic oligonucleotide"
  source: /note="Description of Combined DNA/RNA Molecule: Synthetic oligonucleotide"
  source: /note="DNA/RNA"
  source: /note="5' tri-ethylene glycol (TEG)"
  modified_base (21)..(21): bicyclic nucleic acid (BNA)
  source: /note="3' tri-ethylene glycol (TEG)"
caacaucaaggaagauggcat

SEQ ID NO: 6273 - RNA, 20 nt, Artificial Sequence
  source: /note="Description of Artificial Sequence: Synthetic oligonucleotide"
  source: /note="RNA"
  source: /note="5' tri-ethylene glycol (TEG)"
  modified_base (20)..(20): bicyclic nucleic acid (BNA)
  source: /note="3' tri-ethylene glycol (TEG)"
caacaucaaggaagauggca

SEQ ID NO: 6274 - RNA, 19 nt, Artificial Sequence
  source: /note="Description of Artificial Sequence: Synthetic oligonucleotide"
  source: /note="RNA"
  source: /note="5' tri-ethylene glycol (TEG)"
  modified_base (19)..(19): bicyclic nucleic acid (BNA)
  source: /note="3' tri-ethylene glycol (TEG)"
caacaucaaggaagauggc

SEQ ID NO: 6275 - RNA, 18 nt, Artificial Sequence
  source: /note="Description of Artificial Sequence: Synthetic oligonucleotide"
  source: /note="RNA"
  source: /note="5' tri-ethylene glycol (TEG)"
  modified_base (18)..(18): bicyclic nucleic acid (BNA)
  source: /note="3' tri-ethylene glycol (TEG)"
caacaucaaggaagaugg

SEQ ID NO: 6276 - RNA, 17 nt, Artificial Sequence
  source: /note="Description of Artificial Sequence: Synthetic oligonucleotide"
  source: /note="RNA"
  source: /note="5' tri-ethylene glycol (TEG)"
  modified_base (17)..(17): bicyclic nucleic acid (BNA)
  source: /note="3' tri-ethylene glycol (TEG)"
caacaucaaggaagaug

SEQ ID NO: 6277 - DNA, 16 bp, Artificial Sequence
  source: /note="Description of Artificial Sequence: Synthetic oligonucleotide"
  source: /note="Description of Combined DNA/RNA Molecule: Synthetic oligonucleotide"
  source: /note="DNA/RNA"
  source: /note="5' tri-ethylene glycol (TEG)"
  modified_base (16)..(16): bicyclic nucleic acid (BNA)
  source: /note="3' tri-ethylene glycol (TEG)"
caacaucaaggaagat

SEQ ID NO: 6278 - RNA, 15 nt, Artificial Sequence
  source: /note="Description of Artificial Sequence: Synthetic oligonucleotide"
  source: /note="RNA"
  source: /note="5' tri-ethylene glycol (TEG)"
  modified_base (15)..(15): bicyclic nucleic acid (BNA)
  source: /note="3' tri-ethylene glycol (TEG)"
caacaucaaggaaga

SEQ ID NO: 6279 - RNA, 14 nt, Artificial Sequence
  source: /note="Description of Artificial Sequence: Synthetic oligonucleotide"
  source: /note="RNA"
  source: /note="5' tri-ethylene glycol (TEG)"
  modified_base (14)..(14): bicyclic nucleic acid (BNA)
  source: /note="3' tri-ethylene glycol (TEG)"
caacaucaaggaag

SEQ ID NO: 6280 - RNA, 26 nt, Artificial Sequence
  source: /note="Description of Artificial Sequence: Synthetic oligonucleotide"
  source: /note="RNA"
  source: /note="5' tri-ethylene glycol (TEG)"
  modified_base (26)..(26): bicyclic nucleic acid (BNA)
  source: /note="3' tri-ethylene glycol (TEG)"
aacaucaaggaagauggcauuucuag

SEQ ID NO: 6281 - RNA, 25 nt, Artificial Sequence
  source: /note="Description of Artificial Sequence: Synthetic oligonucleotide"
  source: /note="RNA"
  source: /note="5' tri-ethylene glycol (TEG)"
  modified_base (25)..(25): bicyclic nucleic acid (BNA)
  source: /note="3' tri-ethylene glycol (TEG)"
aacaucaaggaagauggcauuucua

SEQ ID NO: 6282 - DNA, 24 bp, Artificial Sequence
  source: /note="Description of Artificial Sequence: Synthetic oligonucleotide"
  source: /note="Description of Combined DNA/RNA Molecule: Synthetic oligonucleotide"
  source: /note="DNA/RNA"
  source: /note="5' tri-ethylene glycol (TEG)"
  modified_base (24)..(24): bicyclic nucleic acid (BNA)
  source: /note="3' tri-ethylene glycol (TEG)"
aacaucaaggaagauggcauuuct

SEQ ID NO: 6283 - RNA, 23 nt, Artificial Sequence
  source: /note="Description of Artificial Sequence: Synthetic oligonucleotide"
  source: /note="RNA"
  source: /note="5' tri-ethylene glycol (TEG)"
  modified_base (23)..(23): bicyclic nucleic acid (BNA)
  source: /note="3' tri-ethylene glycol (TEG)"
aacaucaaggaagauggcauuuc

SEQ ID NO: 6284 - DNA, 22 bp, Artificial Sequence
  source: /note="Description of Artificial Sequence: Synthetic oligonucleotide"
  source: /note="Description of Combined DNA/RNA Molecule: Synthetic oligonucleotide"
  source: /note="DNA/RNA"
  source: /note="5' tri-ethylene glycol (TEG)"
  modified_base (22)..(22): bicyclic nucleic acid (BNA)
  source: /note="3' tri-ethylene glycol (TEG)"
aacaucaaggaagauggcauut

SEQ ID NO: 6285 - DNA, 21 bp, Artificial Sequence
  source: /note="Description of Artificial Sequence: Synthetic oligonucleotide"
  source: /note="Description of Combined DNA/RNA Molecule: Synthetic oligonucleotide"
  source: /note="DNA/RNA"
  source: /note="5' tri-ethylene glycol (TEG)"
  modified_base (21)..(21): bicyclic nucleic acid (BNA)
  source: /note="3' tri-ethylene glycol (TEG)"
aacaucaaggaagauggcaut

SEQ ID NO: 6286 - DNA, 20 bp, Artificial Sequence
  source: /note="Description of Artificial Sequence: Synthetic oligonucleotide"
  source: /note="Description of Combined DNA/RNA Molecule: Synthetic oligonucleotide"
  source: /note="DNA/RNA"
  source: /note="5' tri-ethylene glycol (TEG)"
  modified_base (20)..(20): bicyclic nucleic acid (BNA)
  source: /note="3' tri-ethylene glycol (TEG)"
aacaucaaggaagauggcat

SEQ ID NO: 6287 - RNA, 19 nt, Artificial Sequence
  source: /note="Description of Artificial Sequence: Synthetic oligonucleotide"
  source: /note="RNA"
  source: /note="5' tri-ethylene glycol (TEG)"
  modified_base (19)..(19): bicyclic nucleic acid (BNA)
  source: /note="3' tri-ethylene glycol (TEG)"
aacaucaaggaagauggca

SEQ ID NO: 6288 - RNA, 18 nt, Artificial Sequence
  source: /note="Description of Artificial Sequence: Synthetic oligonucleotide"
  source: /note="RNA"
  source: /note="5' tri-ethylene glycol (TEG)"
  modified_base (18)..(18): bicyclic nucleic acid (BNA)
  source: /note="3' tri-ethylene glycol (TEG)"
aacaucaaggaagauggc

SEQ ID NO: 6289 - RNA, 17 nt, Artificial Sequence
  source: /note="Description of Artificial Sequence: Synthetic oligonucleotide"
  source: /note="RNA"
  source: /note="5' tri-ethylene glycol (TEG)"
  modified_base (17)..(17): bicyclic nucleic acid (BNA)
  source: /note="3' tri-ethylene glycol (TEG)"
aacaucaaggaagaugg

SEQ ID NO: 6290 - RNA, 16 nt, Artificial Sequence
  source: /note="Description of Artificial Sequence: Synthetic oligonucleotide"
  source: /note="RNA"
  source: /note="5' tri-ethylene glycol (TEG)"
  modified_base (16)..(16): bicyclic nucleic acid (BNA)
  source: /note="3' tri-ethylene glycol (TEG)"
aacaucaaggaagaug

SEQ ID NO: 6291 - DNA, 15 bp, Artificial Sequence
  source: /note="Description of Artificial Sequence: Synthetic oligonucleotide"
  source: /note="Description of Combined DNA/RNA Molecule: Synthetic oligonucleotide"
  source: /note="DNA/RNA"
  source: /note="5' tri-ethylene glycol (TEG)"
  modified_base (15)..(15): bicyclic nucleic acid (BNA)
  source: /note="3' tri-ethylene glycol (TEG)"
aacaucaaggaagat

SEQ ID NO: 6292 - RNA, 14 nt, Artificial Sequence
  source: /note="Description of Artificial Sequence: Synthetic oligonucleotide"
  source: /note="RNA"
  source: /note="5' tri-ethylene glycol (TEG)"
  modified_base (14)..(14): bicyclic nucleic acid (BNA)
  source: /note="3' tri-ethylene glycol (TEG)"
aacaucaaggaaga

SEQ ID NO: 6293 - RNA, 13 nt, Artificial Sequence
  source: /note="Description of Artificial Sequence: Synthetic oligonucleotide"
  source: /note="RNA"
  source: /note="5' tri-ethylene glycol (TEG)"
  modified_base (13)..(13): bicyclic nucleic acid (BNA)
  source: /note="3' tri-ethylene glycol (TEG)"
aacaucaaggaag

SEQ ID NO: 6294 - RNA, 25 nt, Artificial Sequence
  source: /note="Description of Artificial Sequence: Synthetic oligonucleotide"
  source: /note="RNA"
  source: /note="5' tri-ethylene glycol (TEG)"
  modified_base (25)..(25): bicyclic nucleic acid (BNA)
  source: /note="3' tri-ethylene glycol (TEG)"
acaucaaggaagauggcauuucuag

SEQ ID NO: 6295 - RNA, 24 nt, Artificial Sequence
  source: /note="Description of Artificial Sequence: Synthetic oligonucleotide"
  source: /note="RNA"
  source: /note="5' tri-ethylene glycol (TEG)"
  modified_base (24)..(24): bicyclic nucleic acid (BNA)
  source: /note="3' tri-ethylene glycol (TEG)"
acaucaaggaagauggcauuucua

SEQ ID NO: 6296 - DNA, 23 bp, Artificial Sequence
  source: /note="Description of Artificial Sequence: Synthetic oligonucleotide"
  source: /note="Description of Combined DNA/RNA Molecule: Synthetic oligonucleotide"
  source: /note="DNA/RNA"
  source: /note="5' tri-ethylene glycol (TEG)"
  modified_base (23)..(23): bicyclic nucleic acid (BNA)
  source: /note="3' tri-ethylene glycol (TEG)"
acaucaaggaagauggcauuuct

SEQ ID NO: 6297 - RNA, 22 nt, Artificial Sequence
  source: /note="Description of Artificial Sequence: Synthetic oligonucleotide"
  source: /note="RNA"
  source: /note="5' tri-ethylene glycol (TEG)"
  modified_base (22)..(22): bicyclic nucleic acid (BNA)
  source: /note="3' tri-ethylene glycol (TEG)"
acaucaaggaagauggcauuuc

SEQ ID NO: 6298 - DNA, 21 bp, Artificial Sequence
  source: /note="Description of Artificial Sequence: Synthetic oligonucleotide"
  source: /note="Description of Combined DNA/RNA Molecule: Synthetic oligonucleotide"
  source: /note="DNA/RNA"
  source: /note="5' tri-ethylene glycol (TEG)"
  modified_base (21)..(21): bicyclic nucleic acid (BNA)
  source: /note="3' tri-ethylene glycol (TEG)"
acaucaaggaagauggcauut

SEQ ID NO: 6299 - DNA, 20 bp, Artificial Sequence
  source: /note="Description of Artificial Sequence: Synthetic oligonucleotide"
  source: /note="Description of Combined DNA/RNA Molecule: Synthetic oligonucleotide"
  source: /note="DNA/RNA"
  source: /note="5' tri-ethylene glycol (TEG)"
  modified_base (20)..(20): bicyclic nucleic acid (BNA)
  source: /note="3' tri-ethylene glycol (TEG)"
acaucaaggaagauggcaut

SEQ ID NO: 6300 - DNA, 19 bp, Artificial Sequence
  source: /note="Description of Artificial Sequence: Synthetic oligonucleotide"
  source: /note="Description of Combined DNA/RNA Molecule: Synthetic oligonucleotide"
  source: /note="DNA/RNA"
  source: /note="5' tri-ethylene glycol (TEG)"
  modified_base (19)..(19): bicyclic nucleic acid (BNA)
  source: /note="3' tri-ethylene glycol (TEG)"
acaucaaggaagauggcat

SEQ ID NO: 6301 - RNA, 18 nt, Artificial Sequence
  source: /note="Description of Artificial Sequence: Synthetic oligonucleotide"
  source: /note="RNA"
  source: /note="5' tri-ethylene glycol (TEG)"
  modified_base (18)..(18): bicyclic nucleic acid (BNA)
  source: /note="3' tri-ethylene glycol (TEG)"
acaucaaggaagauggca

SEQ ID NO: 6302 - RNA, 17 nt, Artificial Sequence
  source: /note="Description of Artificial Sequence: Synthetic oligonucleotide"
  source: /note="RNA"
  source: /note="5' tri-ethylene glycol (TEG)"
  modified_base (17)..(17): bicyclic nucleic acid (BNA)
  source: /note="3' tri-ethylene glycol (TEG)"
acaucaaggaagauggc

SEQ ID NO: 6303 - RNA, 16 nt, Artificial Sequence
  source: /note="Description of Artificial Sequence: Synthetic oligonucleotide"
  source: /note="RNA"
  source: /note="5' tri-ethylene glycol (TEG)"
  modified_base (16)..(16): bicyclic nucleic acid (BNA)
  source: /note="3' tri-ethylene glycol (TEG)"
acaucaaggaagaugg

SEQ ID NO: 6304 - RNA, 15 nt, Artificial Sequence
  source: /note="Description of Artificial Sequence: Synthetic oligonucleotide"
  source: /note="RNA"
  source: /note="5' tri-ethylene glycol (TEG)"
  modified_base (15)..(15): bicyclic nucleic acid (BNA)
  source: /note="3' tri-ethylene glycol (TEG)"
acaucaaggaagaug

SEQ ID NO: 6305 - DNA, 14 bp, Artificial Sequence
  source: /note="Description of Artificial Sequence: Synthetic oligonucleotide"
  source: /note="Description of Combined DNA/RNA Molecule: Synthetic oligonucleotide"
  source: /note="DNA/RNA"
  source: /note="5' tri-ethylene glycol (TEG)"
  modified_base (14)..(14): bicyclic nucleic acid (BNA)
  source: /note="3' tri-ethylene glycol (TEG)"
acaucaaggaagat

SEQ ID NO: 6306 - RNA, 13 nt, Artificial Sequence
  source: /note="Description of Artificial Sequence: Synthetic oligonucleotide"
  source: /note="RNA"
  source: /note="5' tri-ethylene glycol (TEG)"
  modified_base (13)..(13): bicyclic nucleic acid (BNA)
  source: /note="3' tri-ethylene glycol (TEG)"
acaucaaggaaga

SEQ ID NO: 6307 - RNA, 12 nt, Artificial Sequence
  source: /note="Description of Artificial Sequence: Synthetic oligonucleotide"
  source: /note="RNA"
  source: /note="5' tri-ethylene glycol (TEG)"
  modified_base (12)..(12): bicyclic nucleic acid (BNA)
  source: /note="3' tri-ethylene glycol (TEG)"
acaucaaggaag

SEQ ID NO: 6308 - RNA, 24 nt, Artificial Sequence
  source: /note="Description of Artificial Sequence: Synthetic oligonucleotide"
  source: /note="RNA"
  source: /note="5' tri-ethylene glycol (TEG)"
  modified_base (24)..(24): bicyclic nucleic acid (BNA)
  source: /note="3' tri-ethylene glycol (TEG)"
caucaaggaagauggcauuucuag

SEQ ID NO: 6309 - RNA, 23 nt, Artificial Sequence
  source: /note="Description of Artificial Sequence: Synthetic oligonucleotide"
  source: /note="RNA"
  source: /note="5' tri-ethylene glycol (TEG)"
  modified_base (23)..(23): bicyclic nucleic acid (BNA)
  source: /note="3' tri-ethylene glycol (TEG)"
caucaaggaagauggcauuucua

SEQ ID NO: 6310 - DNA, 22 bp, Artificial Sequence
  source: /note="Description of Artificial Sequence: Synthetic oligonucleotide"
  source: /note="Description of Combined DNA/RNA Molecule: Synthetic oligonucleotide"
  source: /note="DNA/RNA"
  source: /note="5' tri-ethylene glycol (TEG)"
  modified_base (22)..(22): bicyclic nucleic acid (BNA)
  source: /note="3' tri-ethylene glycol (TEG)"
caucaaggaagauggcauuuct

SEQ ID NO: 6311 - RNA, 21 nt, Artificial Sequence
  source: /note="Description of Artificial Sequence: Synthetic oligonucleotide"
  source: /note="RNA"
  source: /note="5' tri-ethylene glycol (TEG)"
  modified_base (21)..(21): bicyclic nucleic acid (BNA)
  source: /note="3' tri-ethylene glycol (TEG)"
caucaaggaagauggcauuuc

SEQ ID NO: 6312 - DNA, 20 bp, Artificial Sequence
  source: /note="Description of Artificial Sequence: Synthetic oligonucleotide"
  source: /note="Description of Combined DNA/RNA Molecule: Synthetic oligonucleotide"
  source: /note="DNA/RNA"
  source: /note="5' tri-ethylene glycol (TEG)"
  modified_base (20)..(20): bicyclic nucleic acid (BNA)
  source: /note="3' tri-ethylene glycol (TEG)"
caucaaggaagauggcauut

SEQ ID NO: 6313 - DNA, 19 bp, Artificial Sequence
  source: /note="Description of Artificial Sequence: Synthetic oligonucleotide"
  source: /note="Description of Combined DNA/RNA Molecule: Synthetic oligonucleotide"
  source: /note="DNA/RNA"
  source: /note="5' tri-ethylene glycol (TEG)"
  modified_base (19)..(19): bicyclic nucleic acid (BNA)
  source: /note="3' tri-ethylene glycol (TEG)"
caucaaggaagauggcaut

SEQ ID NO: 6314 - DNA, 18 bp, Artificial Sequence
  source: /note="Description of Artificial Sequence: Synthetic oligonucleotide"
  source: /note="Description of Combined DNA/RNA Molecule: Synthetic oligonucleotide"
  source: /note="DNA/RNA"
  source: /note="5' tri-ethylene glycol (TEG)"
  modified_base (18)..(18): bicyclic nucleic acid (BNA)
  source: /note="3' tri-ethylene glycol (TEG)"
caucaaggaagauggcat

SEQ ID NO: 6315 - RNA, 17 nt, Artificial Sequence
  source: /note="Description of Artificial Sequence: Synthetic oligonucleotide"
  source: /note="RNA"
  source: /note="5' tri-ethylene glycol (TEG)"
  modified_base (17)..(17): bicyclic nucleic acid (BNA)
  source: /note="3' tri-ethylene glycol (TEG)"
caucaaggaagauggca

SEQ ID NO: 6316 - RNA, 16 nt, Artificial Sequence
  source: /note="Description of Artificial Sequence: Synthetic oligonucleotide"
  source: /note="RNA"
  source: /note="5' tri-ethylene glycol (TEG)"
  modified_base (16)..(16): bicyclic nucleic acid (BNA)
  source: /note="3' tri-ethylene glycol (TEG)"
caucaaggaagauggc

SEQ ID NO: 6317 - RNA, 15 nt, Artificial Sequence
  source: /note="Description of Artificial Sequence: Synthetic oligonucleotide"
  source: /note="RNA"
  source: /note="5' tri-ethylene glycol (TEG)"
  modified_base (15)..(15): bicyclic nucleic acid (BNA)
  source: /note="3' tri-ethylene glycol (TEG)"
caucaaggaagaugg

SEQ ID NO: 6318 - RNA, 14 nt, Artificial Sequence
  source: /note="Description of Artificial Sequence: Synthetic oligonucleotide"
  source: /note="RNA"
  source: /note="5' tri-ethylene glycol (TEG)"
  modified_base (14)..(14): bicyclic nucleic acid (BNA)
  source: /note="3' tri-ethylene glycol (TEG)"
caucaaggaagaug

SEQ ID NO: 6319 - DNA, 13 bp, Artificial Sequence
  source: /note="Description of Artificial Sequence: Synthetic oligonucleotide"
  source: /note="Description of Combined DNA/RNA Molecule: Synthetic oligonucleotide"
  source: /note="DNA/RNA"
  source: /note="5' tri-ethylene glycol (TEG)"
  modified_base (13)..(13): bicyclic nucleic acid (BNA)
  source: /note="3' tri-ethylene glycol (TEG)"
caucaaggaagat

SEQ ID NO: 6320 - RNA, 12 nt, Artificial Sequence
  source: /note="Description of Artificial Sequence: Synthetic oligonucleotide"
  source: /note="RNA"
  source: /note="5' tri-ethylene glycol (TEG)"
  modified_base (12)..(12): bicyclic nucleic acid (BNA)
  source: /note="3' tri-ethylene glycol (TEG)"
caucaaggaaga

SEQ ID NO: 6321 - RNA, 11 nt, Artificial Sequence
  source: /note="Description of Artificial Sequence: Synthetic oligonucleotide"
  source: /note="RNA"
  source: /note="5' tri-ethylene glycol (TEG)"
  modified_base (11)..(11): bicyclic nucleic acid (BNA)
  source: /note="3' tri-ethylene glycol (TEG)"
caucaaggaag

SEQ ID NO: 6322 - RNA, 23 nt, Artificial Sequence
  source: /note="Description of Artificial Sequence: Synthetic oligonucleotide"
  source: /note="RNA"
  source: /note="5' tri-ethylene glycol (TEG)"
  modified_base (23)..(23): bicyclic nucleic acid (BNA)
  source: /note="3' tri-ethylene glycol (TEG)"
aucaaggaagauggcauuucuag

SEQ ID NO: 6323 - RNA, 22 nt, Artificial Sequence
  source: /note="Description of Artificial Sequence: Synthetic oligonucleotide"
  source: /note="RNA"
  source: /note="5' tri-ethylene glycol (TEG)"
  modified_base (22)..(22): bicyclic nucleic acid (BNA)
  source: /note="3' tri-ethylene glycol (TEG)"
aucaaggaagauggcauuucua

SEQ ID NO: 6324 - DNA, 21 bp, Artificial Sequence
  source: /note="Description of Artificial Sequence: Synthetic oligonucleotide"
  source: /note="Description of Combined DNA/RNA Molecule: Synthetic oligonucleotide"
  source: /note="DNA/RNA"
  source: /note="5' tri-ethylene glycol (TEG)"
  modified_base (21)..(21): bicyclic nucleic acid (BNA)
  source: /note="3' tri-ethylene glycol (TEG)"
aucaaggaagauggcauuuct

SEQ ID NO: 6325 - RNA, 20 nt, Artificial Sequence
  source: /note="Description of Artificial Sequence: Synthetic oligonucleotide"
  source: /note="RNA"
  source: /note="5' tri-ethylene glycol (TEG)"
  modified_base (20)..(20): bicyclic nucleic acid (BNA)
  source: /note="3' tri-ethylene glycol (TEG)"
aucaaggaagauggcauuuc

SEQ ID NO: 6326 - DNA, 19 bp, Artificial Sequence
  source: /note="Description of Artificial Sequence: Synthetic oligonucleotide"
  source: /note="Description of Combined DNA/RNA Molecule: Synthetic oligonucleotide"
  source: /note="DNA/RNA"
  source: /note="5' tri-ethylene glycol (TEG)"
  modified_base (19)..(19): bicyclic nucleic acid (BNA)
  source: /note="3' tri-ethylene glycol (TEG)"
aucaaggaagauggcauut

SEQ ID NO: 6327 - DNA, 18 bp, Artificial Sequence
  source: /note="Description of Artificial Sequence: Synthetic oligonucleotide"
  source: /note="Description of Combined DNA/RNA Molecule: Synthetic oligonucleotide"
  source: /note="DNA/RNA"
  source: /note="5' tri-ethylene glycol (TEG)"
  modified_base (18)..(18): bicyclic nucleic acid (BNA)
  source: /note="3' tri-ethylene glycol (TEG)"
aucaaggaagauggcaut

SEQ ID NO: 6328 - DNA, 17 bp, Artificial Sequence
  source: /note="Description of Artificial Sequence: Synthetic oligonucleotide"
  source: /note="Description of Combined DNA/RNA Molecule: Synthetic oligonucleotide"
  source: /note="DNA/RNA"
  source: /note="5' tri-ethylene glycol (TEG)"
  modified_base (17)..(17): bicyclic nucleic acid (BNA)
  source: /note="3' tri-ethylene glycol (TEG)"
aucaaggaagauggcat

SEQ ID NO: 6329 - RNA, 16 nt, Artificial Sequence
  source: /note="Description of Artificial Sequence: Synthetic oligonucleotide"
  source: /note="RNA"
  source: /note="5' tri-ethylene glycol (TEG)"
  modified_base (16)..(16): bicyclic nucleic acid (BNA)
  source: /note="3' tri-ethylene glycol (TEG)"
aucaaggaagauggca

SEQ ID NO: 6330 - RNA, 15 nt, Artificial Sequence
  source: /note="Description of Artificial Sequence: Synthetic oligonucleotide"
  source: /note="RNA"
  source: /note="5' tri-ethylene glycol (TEG)"
  modified_base (15)..(15): bicyclic nucleic acid (BNA)
  source: /note="3' tri-ethylene glycol (TEG)"
aucaaggaagauggc

SEQ ID NO: 6331 - RNA, 14 nt, Artificial Sequence
  source: /note="Description of Artificial Sequence: Synthetic oligonucleotide"
  source: /note="RNA"
  source: /note="5' tri-ethylene glycol (TEG)"
  modified_base (14)..(14): bicyclic nucleic acid (BNA)
  source: /note="3' tri-ethylene glycol (TEG)"
aucaaggaagaugg

SEQ ID NO: 6332 - RNA, 13 nt, Artificial Sequence
  source: /note="Description of Artificial Sequence: Synthetic oligonucleotide"
  source: /note="RNA"
  source: /note="5' tri-ethylene glycol (TEG)"
  modified_base (13)..(13): bicyclic nucleic acid (BNA)
  source: /note="3' tri-ethylene glycol (TEG)"
aucaaggaagaug

SEQ ID NO: 6333 - DNA, 12 bp, Artificial Sequence
  source: /note="Description of Artificial Sequence: Synthetic oligonucleotide"
  source: /note="Description of Combined DNA/RNA Molecule: Synthetic oligonucleotide"
  source: /note="DNA/RNA"
  source: /note="5' tri-ethylene glycol (TEG)"
  modified_base (12)..(12): bicyclic nucleic acid (BNA)
  source: /note="3' tri-ethylene glycol (TEG)"
aucaaggaagat

SEQ ID NO: 6334 - RNA, 11 nt, Artificial Sequence
  source: /note="Description of Artificial Sequence: Synthetic oligonucleotide"
  source: /note="RNA"
  source: /note="5' tri-ethylene glycol (TEG)"
  modified_base (11)..(11): bicyclic nucleic acid (BNA)
  source: /note="3' tri-ethylene glycol (TEG)"
aucaaggaaga

SEQ ID NO: 6335 - RNA, 10 nt, Artificial Sequence
  source: /note="Description of Artificial Sequence: Synthetic oligonucleotide"
  source: /note="RNA"
  source: /note="5' tri-ethylene glycol (TEG)"
  modified_base (10)..(10): bicyclic nucleic acid (BNA)
  source: /note="3' tri-ethylene glycol (TEG)"
aucaaggaag

SEQ ID NO: 6336 - RNA, 23 nt, Artificial Sequence
  source: /note="Description of Artificial Sequence: Synthetic oligonucleotide"
  source: /note="RNA"
  source: /note="5' tri-ethylene glycol (TEG)"
  modified_base (23)..(23): bicyclic nucleic acid (BNA)
  source: /note="3' tri-ethylene glycol (TEG)"
ccagagcagguaccuccaacauc

SEQ ID NO: 6337 - RNA, 18 nt, Artificial Sequence
  source: /note="Description of Artificial Sequence: Synthetic oligonucleotide"
  source: /note="RNA"
  source: /note="5' tri-ethylene glycol (TEG)"
  modified_base (18)..(18): bicyclic nucleic acid (BNA)
  source: /note="3' tri-ethylene glycol (TEG)"
ccagagcagguaccucca

SEQ ID NO: 6338 - DNA, 23 bp, Artificial Sequence
  source: /note="Description of Artificial Sequence: Synthetic oligonucleotide"
  source: /note="Description of Combined DNA/RNA Molecule: Synthetic oligonucleotide"
  source: /note="DNA/RNA"
  source: /note="5' tri-ethylene glycol (TEG)"
  modified_base (23)..(23): bicyclic nucleic acid (BNA)
  source: /note="3' tri-ethylene glycol (TEG)"
ccucugugauuuuauaacuugat

SEQ ID NO: 6339 - DNA, 17 bp, Artificial Sequence
  source: /note="Description of Artificial Sequence: Synthetic oligonucleotide"
  source: /note="Description of Combined DNA/RNA Molecule: Synthetic oligonucleotide"
  source: /note="DNA/RNA"
  source: /note="5' tri-ethylene glycol (TEG)"
  modified_base (17)..(17): bicyclic nucleic acid (BNA)
  source: /note="3' tri-ethylene glycol (TEG)"
ucacccaccaucaccct

SEQ ID NO: 6340 - RNA, 20 nt, Artificial Sequence
  source: /note="Description of Artificial Sequence: Synthetic oligonucleotide"
  source: /note="RNA"
  source: /note="5' tri-ethylene glycol (TEG)"
  modified_base (20)..(20): bicyclic nucleic acid (BNA)
  source: /note="3' tri-ethylene glycol (TEG)"
ugauauccucaaggucaccc

SEQ ID NO: 6341 - RNA, 22 nt, Artificial Sequence
  source: /note="Description of Artificial Sequence: Synthetic oligonucleotide"
  source: /note="RNA"
  source: /note="5' tri-ethylene glycol (TEG)"
  modified_base (22)..(22): bicyclic nucleic acid (BNA)
  source: /note="3' tri-ethylene glycol (TEG)"
cugcuugaugaucaucucguug

SEQ ID NO: 6342 - RNA, 18 nt, Artificial Sequence
  source: /note="Description of Artificial Sequence: Synthetic oligonucleotide"
  source: /note="RNA"
  source: /note="5' tri-ethylene glycol (TEG)"
  modified_base (18)..(18): bicyclic nucleic acid (BNA)
  source: /note="3' tri-ethylene glycol (TEG)"
cugcuugaugaucaucuc

SEQ ID NO: 6343 - RNA, 19 nt, Artificial Sequence
  source: /note="Description of Artificial Sequence: Synthetic oligonucleotide"
  source: /note="RNA"
  source: /note="5' tri-ethylene glycol (TEG)"
  modified_base (19)..(19): bicyclic nucleic acid (BNA)
  source: /note="3' tri-ethylene glycol (TEG)"
guuuccuuaguaaccacag

SEQ ID NO: 6344 - RNA, 17 nt, Artificial Sequence
  source: /note="Description of Artificial Sequence: Synthetic oligonucleotide"
  source: /note="RNA"
  source: /note="5' tri-ethylene glycol (TEG)"
  modified_base (17)..(17): bicyclic nucleic acid (BNA)
  source: /note="3' tri-ethylene glycol (TEG)"
guuuccuuaguaaccac

SEQ ID NO: 6345 - DNA, 20 bp, Artificial Sequence
  source: /note="Description of Artificial Sequence: Synthetic oligonucleotide"
  source: /note="Description of Combined DNA/RNA Molecule: Synthetic oligonucleotide"
  source: /note="DNA/RNA"
  modified_base (1)..(1): bicyclic nucleic acid (BNA)
  modified_base (20)..(20): bicyclic nucleic acid (BNA)
tcaaggaagauggcauuuct

SEQ ID NO: 6346 - DNA, 22 bp, Artificial Sequence
  source: /note="Description of Artificial Sequence: Synthetic oligonucleotide"
  source: /note="Description of Combined DNA/RNA Molecule: Synthetic oligonucleotide"
  source: /note="DNA/RNA"
  modified_base (1)..(1): bicyclic nucleic acid (BNA)
  modified_base (22)..(22): bicyclic nucleic acid (BNA)
tcaaggaagauggcauuucuag

SEQ ID NO: 6347 - RNA, 18 nt, Artificial Sequence
  source: /note="Description of Artificial Sequence: Synthetic oligonucleotide"
  source: /note="RNA"
  modified_base (1)..(1): bicyclic nucleic acid (BNA)
  modified_base (18)..(18): bicyclic nucleic acid (BNA)
gguaaguucuguccaagc

SEQ ID NO: 6348 - RNA, 18 nt, Artificial Sequence
  source: /note="Description of Artificial Sequence: Synthetic oligonucleotide"
  source: /note="RNA"
  modified_base (1)..(1): bicyclic nucleic acid (BNA)
  modified_base (18)..(18): bicyclic nucleic acid (BNA)
guaaguucuguccaagcc

SEQ ID NO: 6349 - RNA, 18 nt, Artificial Sequence
  source: /note="Description of Artificial Sequence: Synthetic oligonucleotide"
  source: /note="RNA"
  modified_base (1)..(1): bicyclic nucleic acid (BNA)
  modified_base (18)..(18): bicyclic nucleic acid (BNA)
agucgguaaguucugucc

SEQ ID NO: 6350 - RNA, 18 nt, Artificial Sequence
  source: /note="Description of Artificial Sequence: Synthetic oligonucleotide"
  source: /note="RNA"
  modified_base (1)..(1): bicyclic nucleic acid (BNA)
  modified_base (18)..(18): bicyclic nucleic acid (BNA)
cuguccaagcccgguuga

SEQ ID NO: 6351 - DNA, 15 bp, Artificial Sequence
  source: /note="Description of Artificial Sequence: Synthetic oligonucleotide"
  source: /note="Description of Combined DNA/RNA Molecule: Synthetic oligonucleotide"
  source: /note="DNA/RNA"
  modified_base (1)..(1): bicyclic nucleic acid (BNA)
  modified_base (15)..(15): bicyclic nucleic acid (BNA)
taaguucuguccaag

SEQ ID NO: 6352 - DNA, 20 bp, Artificial Sequence
  source: /note="Description of Artificial Sequence: Synthetic oligonucleotide"
  source: /note="Description of Combined DNA/RNA Molecule: Synthetic oligonucleotide"
  source: /note="DNA/RNA"
  modified_base (1)..(1): bicyclic nucleic acid (BNA)
  modified_base (20)..(20): bicyclic nucleic acid (BNA)
tucuguccaagcccgguuga

SEQ ID NO: 6353 - DNA, 19 bp, Artificial Sequence
  source: /note="Description of Artificial Sequence: Synthetic oligonucleotide"
  source: /note="Description of Combined DNA/RNA Molecule: Synthetic oligonucleotide"
  source: /note="DNA/RNA"
  modified_base (1)..(1): bicyclic nucleic acid (BNA)
  modified_base (19)..(19): bicyclic nucleic acid (BNA)
tucuguccaagcccgguug

SEQ ID NO: 6354 - DNA, 18 bp, Artificial Sequence
  source: /note="Description of Artificial Sequence: Synthetic oligonucleotide"
  source: /note="Description of Combined DNA/RNA Molecule: Synthetic oligonucleotide"
  source: /note="DNA/RNA"
  modified_base (1)..(1): bicyclic nucleic acid (BNA)
  modified_base (18)..(18): bicyclic nucleic acid (BNA)
tucuguccaagcccggut

SEQ ID NO: 6355 - DNA, 17 bp, Artificial Sequence
  source: /note="Description of Artificial Sequence: Synthetic oligonucleotide"
  source: /note="Description of Combined DNA/RNA Molecule: Synthetic oligonucleotide"
  source: /note="DNA/RNA"
  modified_base (1)..(1): bicyclic nucleic acid (BNA)
  modified_base (17)..(17): bicyclic nucleic acid (BNA)
tucuguccaagcccggt

SEQ ID NO: 6356 - DNA, 16 bp, Artificial Sequence
  source: /note="Description of Artificial Sequence: Synthetic oligonucleotide"
  source: /note="Description of Combined DNA/RNA Molecule: Synthetic oligonucleotide"
  source: /note="DNA/RNA"
  modified_base (1)..(1): bicyclic nucleic acid (BNA)
  modified_base (16)..(16): bicyclic nucleic acid (BNA)
tucuguccaagcccgg

SEQ ID NO: 6357 - DNA, 15 bp, Artificial Sequence
  source: /note="Description of Artificial Sequence: Synthetic oligonucleotide"
  source: /note="Description of Combined DNA/RNA Molecule: Synthetic oligonucleotide"
  source: /note="DNA/RNA"
  modified_base (1)..(1): bicyclic nucleic acid (BNA)
  modified_base (15)..(15): bicyclic nucleic acid (BNA)
tucuguccaagcccg

SEQ ID NO: 6358 - DNA, 14 bp, Artificial Sequence
  source: /note="Description of Artificial Sequence: Synthetic oligonucleotide"
  source: /note="Description of Combined DNA/RNA Molecule: Synthetic oligonucleotide"
  source: /note="DNA/RNA"
  modified_base (1)..(1): bicyclic nucleic acid (BNA)
  modified_base (14)..(14): bicyclic nucleic acid (BNA)
tucuguccaagccc

SEQ ID NO: 6359 - DNA, 13 bp, Artificial Sequence
  source: /note="Description of Artificial Sequence: Synthetic oligonucleotide"
  source: /note="Description of Combined DNA/RNA Molecule: Synthetic oligonucleotide"
  source: /note="DNA/RNA"
  modified_base (1)..(1): bicyclic nucleic acid (BNA)
  modified_base (13)..(13): bicyclic nucleic acid (BNA)
tucuguccaagcc

SEQ ID NO: 6360 - DNA, 12 bp, Artificial Sequence
  source: /note="Description of Artificial Sequence: Synthetic oligonucleotide"
  source: /note="Description of Combined DNA/RNA Molecule: Synthetic oligonucleotide"
  source: /note="DNA/RNA"
  modified_base (1)..(1): bicyclic nucleic acid (BNA)
  modified_base (12)..(12): bicyclic nucleic acid (BNA)
tucuguccaagc

SEQ ID NO: 6361 - DNA, 11 bp, Artificial Sequence
  source: /note="Description of Artificial Sequence: Synthetic oligonucleotide"
  source: /note="Description of Combined DNA/RNA Molecule: Synthetic oligonucleotide"
  source: /note="DNA/RNA"
  modified_base (1)..(1): bicyclic nucleic acid (BNA)
  modified_base (11)..(11): bicyclic nucleic acid (BNA)
tucuguccaag

SEQ ID NO: 6362 - DNA, 10 bp, Artificial Sequence
  source: /note="Description of Artificial Sequence: Synthetic oligonucleotide"
  source: /note="Description of Combined DNA/RNA Molecule: Synthetic oligonucleotide"
  source: /note="DNA/RNA"
  modified_base (1)..(1): bicyclic nucleic acid (BNA)
  modified_base (10)..(10): bicyclic nucleic acid (BNA)
tucuguccaa

SEQ ID NO: 6363 - DNA, 9 bp, Artificial Sequence
  source: /note="Description of Artificial Sequence: Synthetic oligonucleotide"
  source: /note="Description of Combined DNA/RNA Molecule: Synthetic oligonucleotide"
  source: /note="DNA/RNA"
  modified_base (1)..(1): bicyclic nucleic acid (BNA)
  modified_base (9)..(9): bicyclic nucleic acid (BNA)
tucugucca

SEQ ID NO: 6364 - DNA, 8 bp, Artificial Sequence
  source: /note="Description of Artificial Sequence: Synthetic oligonucleotide"
  source: /note="Description of Combined DNA/RNA Molecule: Synthetic oligonucleotide"
  source: /note="DNA/RNA"
  modified_base (1)..(1): bicyclic nucleic acid (BNA)
  modified_base (8)..(8): bicyclic nucleic acid (BNA)
tucugucc

SEQ ID NO: 6365 - DNA, 19 bp, Artificial Sequence
  source: /note="Description of Artificial Sequence: Synthetic oligonucleotide"
  source: /note="Description of Combined DNA/RNA Molecule: Synthetic oligonucleotide"
  source: /note="DNA/RNA"
  modified_base (1)..(1): bicyclic nucleic acid (BNA)
  modified_base (19)..(19): bicyclic nucleic acid (BNA)
tcuguccaagcccgguuga

SEQ ID NO: 6366 - DNA, 18 bp, Artificial Sequence
  source: /note="Description of Artificial Sequence: Synthetic oligonucleotide"
  source: /note="Description of Combined DNA/RNA Molecule: Synthetic oligonucleotide"
  source: /note="DNA/RNA"
  modified_base (1)..(1): bicyclic nucleic acid (BNA)
  modified_base (18)..(18): bicyclic nucleic acid (BNA)
tcuguccaagcccgguug

SEQ ID NO: 6367 - DNA, 17 bp, Artificial Sequence
  source: /note="Description of Artificial Sequence: Synthetic oligonucleotide"
  source: /note="Description of Combined DNA/RNA Molecule: Synthetic oligonucleotide"
  source: /note="DNA/RNA"
  modified_base (1)..(1): bicyclic nucleic acid (BNA)
  modified_base (17)..(17): bicyclic nucleic acid (BNA)
tcuguccaagcccggut

SEQ ID NO: 6368 - DNA, 16 bp, Artificial Sequence
  source: /note="Description of Artificial Sequence: Synthetic oligonucleotide"
  source: /note="Description of Combined DNA/RNA Molecule: Synthetic oligonucleotide"
  source: /note="DNA/RNA"
  modified_base (1)..(1): bicyclic nucleic acid (BNA)
  modified_base (16)..(16): bicyclic nucleic acid (BNA)
tcuguccaagcccggt

SEQ ID NO: 6369 - DNA, 15 bp, Artificial Sequence
  source: /note="Description of Artificial Sequence: Synthetic oligonucleotide"
  source: /note="Description of Combined DNA/RNA Molecule: Synthetic oligonucleotide"
  source: /note="DNA/RNA"
  modified_base (1)..(1): bicyclic nucleic acid (BNA)
  modified_base (15)..(15): bicyclic nucleic acid (BNA)
tcuguccaagcccgg

SEQ ID NO: 6370 - DNA, 14 bp, Artificial Sequence
  source: /note="Description of Artificial Sequence: Synthetic oligonucleotide"
  source: /note="Description of Combined DNA/RNA Molecule: Synthetic oligonucleotide"
  source: /note="DNA/RNA"
  modified_base (1)..(1): bicyclic nucleic acid (BNA)
  modified_base (14)..(14): bicyclic nucleic acid (BNA)
tcuguccaagcccg

SEQ ID NO: 6371 - DNA, 13 bp, Artificial Sequence
  source: /note="Description of Artificial Sequence: Synthetic oligonucleotide"
  source: /note="Description of Combined DNA/RNA Molecule: Synthetic oligonucleotide"
  source: /note="DNA/RNA"
  modified_base (1)..(1): bicyclic nucleic acid (BNA)
  modified_base (13)..(13): bicyclic nucleic acid (BNA)
tcuguccaagccc

SEQ ID NO: 6372 - DNA, 12 bp, Artificial Sequence
  source: /note="Description of Artificial Sequence: Synthetic oligonucleotide"
  source: /note="Description of Combined DNA/RNA Molecule: Synthetic oligonucleotide"
  source: /note="DNA/RNA"
  modified_base (1)..(1): bicyclic nucleic acid (BNA)
  modified_base (12)..(12): bicyclic nucleic acid (BNA)
tcuguccaagcc

SEQ ID NO: 6373 - DNA, 11 bp, Artificial Sequence
  source: /note="Description of Artificial Sequence: Synthetic oligonucleotide"
  source: /note="Description of Combined DNA/RNA Molecule: Synthetic oligonucleotide"
  source: /note="DNA/RNA"
  modified_base (1)..(1): bicyclic nucleic acid (BNA)
  modified_base (11)..(11): bicyclic nucleic acid (BNA)
tcuguccaagc

SEQ ID NO: 6374 - DNA, 10 bp, Artificial Sequence
  source: /note="Description of Artificial Sequence: Synthetic oligonucleotide"
  source: /note="Description of Combined DNA/RNA Molecule: Synthetic oligonucleotide"
  source: /note="DNA/RNA"
  modified_base (1)..(1): bicyclic nucleic acid (BNA)
  modified_base (10)..(10): bicyclic nucleic acid (BNA)
tcuguccaag

SEQ ID NO: 6375 - DNA, 9 bp, Artificial Sequence
  source: /note="Description of Artificial Sequence: Synthetic oligonucleotide"
  source: /note="Description of Combined DNA/RNA Molecule: Synthetic oligonucleotide"
  source: /note="DNA/RNA"
  modified_base (1)..(1): bicyclic nucleic acid (BNA)
  modified_base (9)..(9): bicyclic nucleic acid (BNA)
tcuguccaa

SEQ ID NO: 6376 - DNA, 8 bp, Artificial Sequence
  source: /note="Description of Artificial Sequence: Synthetic oligonucleotide"
  source: /note="Description of Combined DNA/RNA Molecule: Synthetic oligonucleotide"
  source: /note="DNA/RNA"
  modified_base (1)..(1): bicyclic nucleic acid (BNA)
  modified_base (8)..(8): bicyclic nucleic acid (BNA)
tcugucca

SEQ ID NO: 6377 - RNA, 17 nt, Artificial Sequence
  source: /note="Description of Artificial Sequence: Synthetic oligonucleotide"
  source: /note="RNA"
  modified_base (1)..(1): bicyclic nucleic acid (BNA)
  modified_base (17)..(17): bicyclic nucleic acid (BNA)
cuguccaagcccgguug

SEQ ID NO: 6378 - DNA, 16 bp, Artificial Sequence
  source: /note="Description of Artificial Sequence: Synthetic oligonucleotide"
  source: /note="Description of Combined DNA/RNA Molecule: Synthetic oligonucleotide"
  source: /note="DNA/RNA"
  modified_base (1)..(1): bicyclic nucleic acid (BNA)
  modified_base (16)..(16): bicyclic nucleic acid (BNA)
cuguccaagcccggut

SEQ ID NO: 6379 - DNA, 15 bp, Artificial Sequence
  source: /note="Description of Artificial Sequence: Synthetic oligonucleotide"
  source: /note="Description of Combined DNA/RNA Molecule: Synthetic oligonucleotide"
  source: /note="DNA/RNA"
  modified_base (1)..(1): bicyclic nucleic acid (BNA)
  modified_base (15)..(15): bicyclic nucleic acid (BNA)
cuguccaagcccggt

SEQ ID NO: 6380 - RNA, 14 nt, Artificial Sequence
  source: /note="Description of Artificial Sequence: Synthetic oligonucleotide"
  source: /note="RNA"
  modified_base (1)..(1): bicyclic nucleic acid (BNA)
  modified_base (14)..(14): bicyclic nucleic acid (BNA)
cuguccaagcccgg

SEQ ID NO: 6381 - RNA, 13 nt, Artificial Sequence
  source: /note="Description of Artificial Sequence: Synthetic oligonucleotide"
  source: /note="RNA"
  modified_base (1)..(1): bicyclic nucleic acid (BNA)
  modified_base (13)..(13): bicyclic nucleic acid (BNA)
cuguccaagcccg

SEQ ID NO: 6382 - RNA, 12 nt, Artificial Sequence
  source: /note="Description of Artificial Sequence: Synthetic oligonucleotide"
  source: /note="RNA"
  modified_base (1)..(1): bicyclic nucleic acid (BNA)
  modified_base (12)..(12): bicyclic nucleic acid (BNA)
cuguccaagccc

SEQ ID NO: 6383 - RNA, 11 nt, Artificial Sequence
  source: /note="Description of Artificial Sequence: Synthetic oligonucleotide"
  source: /note="RNA"
  modified_base (1)..(1): bicyclic nucleic acid (BNA)
  modified_base (11)..(11): bicyclic nucleic acid (BNA)
cuguccaagcc

SEQ ID NO: 6384 - RNA, 10 nt, Artificial Sequence
  source: /note="Description of Artificial Sequence: Synthetic oligonucleotide"
  source: /note="RNA"
  modified_base (1)..(1): bicyclic nucleic acid (BNA)
  modified_base (10)..(10): bicyclic nucleic acid (BNA)
cuguccaagc

SEQ ID NO: 6385 - RNA, 9 nt, Artificial Sequence
  source: /note="Description of Artificial Sequence: Synthetic oligonucleotide"
  source: /note="RNA"
  modified_base (1)..(1): bicyclic nucleic acid (BNA)
  modified_base (9)..(9): bicyclic nucleic acid (BNA)
cuguccaag

SEQ ID NO: 6386 - RNA, 8 nt, Artificial Sequence
  source: /note="Description of Artificial Sequence: Synthetic oligonucleotide"
  source: /note="RNA"
  modified_base (1)..(1): bicyclic nucleic acid (BNA)
  modified_base (8)..(8): bicyclic nucleic acid (BNA)
cuguccaa

SEQ ID NO: 6387 - RNA, 20 nt, Artificial Sequence
  source: /note="Description of Artificial Sequence: Synthetic oligonucleotide"
  source: /note="RNA"
  modified_base (1)..(1): bicyclic nucleic acid (BNA)
  modified_base (20)..(20): bicyclic nucleic acid (BNA)
guucuguccaagcccgguug

SEQ ID NO: 6388 - DNA, 19 bp, Artificial Sequence
  source: /note="Description of Artificial Sequence: Synthetic oligonucleotide"
  source: /note="Description of Combined DNA/RNA Molecule: Synthetic oligonucleotide"
  source: /note="DNA/RNA"
  modified_base (1)..(1): bicyclic nucleic acid (BNA)
  modified_base (19)..(19): bicyclic nucleic acid (BNA)
guucuguccaagcccggut

SEQ ID NO: 6389 - DNA, 18 bp, Artificial Sequence
  source: /note="Description of Artificial Sequence: Synthetic oligonucleotide"
  source: /note="Description of Combined DNA/RNA Molecule: Synthetic oligonucleotide"
  source: /note="DNA/RNA"
  modified_base (1)..(1): bicyclic nucleic acid (BNA)
  modified_base (18)..(18): bicyclic nucleic acid (BNA)
guucuguccaagcccggt

SEQ ID NO: 6390 - RNA, 17 nt, Artificial Sequence
  source: /note="Description of Artificial Sequence: Synthetic oligonucleotide"
  source: /note="RNA"
  modified_base (1)..(1): bicyclic nucleic acid (BNA)
  modified_base (17)..(17): bicyclic nucleic acid (BNA)
guucuguccaagcccgg

SEQ ID NO: 6391 - RNA, 16 nt, Artificial Sequence
  source: /note="Description of Artificial Sequence: Synthetic oligonucleotide"
  source: /note="RNA"
  modified_base (1)..(1): bicyclic nucleic acid (BNA)
  modified_base (16)..(16): bicyclic nucleic acid (BNA)
guucuguccaagcccg

SEQ ID NO: 6392 - RNA, 15 nt, Artificial Sequence
  source: /note="Description of Artificial Sequence: Synthetic oligonucleotide"
  source: /note="RNA"
  modified_base (1)..(1): bicyclic nucleic acid (BNA)
  modified_base (15)..(15): bicyclic nucleic acid (BNA)
guucuguccaagccc

SEQ ID NO: 6393 - RNA, 14 nt, Artificial Sequence
  source: /note="Description of Artificial Sequence: Synthetic oligonucleotide"
  source: /note="RNA"
  modified_base (1)..(1): bicyclic nucleic acid (BNA)
  modified_base (14)..(14): bicyclic nucleic acid (BNA)
guucuguccaagcc

SEQ ID NO: 6394 - RNA, 13 nt, Artificial Sequence
  source: /note="Description of Artificial Sequence: Synthetic oligonucleotide"
  source: /note="RNA"
  modified_base (1)..(1): bicyclic nucleic acid (BNA)
  modified_base (13)..(13): bicyclic nucleic acid (BNA)
guucuguccaagc

SEQ ID NO: 6395 - RNA, 12 nt, Artificial Sequence
  source: /note="Description of Artificial Sequence: Synthetic oligonucleotide"
  source: /note="RNA"
  modified_base (1)..(1): bicyclic nucleic acid (BNA)
  modified_base (12)..(12): bicyclic nucleic acid (BNA)
guucuguccaag

SEQ ID NO: 6396 - RNA, 11 nt, Artificial Sequence
  source: /note="Description of Artificial Sequence: Synthetic oligonucleotide"
  source: /note="RNA"
  modified_base (1)..(1): bicyclic nucleic acid (BNA)
  modified_base (11)..(11): bicyclic nucleic acid (BNA)
guucuguccaa

SEQ ID NO: 6397 - RNA, 10 nt, Artificial Sequence
  source: /note="Description of Artificial Sequence: Synthetic oligonucleotide"
  source: /note="RNA"
  modified_base (1)..(1): bicyclic nucleic acid (BNA)
  modified_base (10)..(10): bicyclic nucleic acid (BNA)
guucugucca

SEQ ID NO: 6398 - RNA, 9 nt, Artificial Sequence
  source: /note="Description of Artificial Sequence: Synthetic oligonucleotide"
  source: /note="RNA"
  modified_base (1)..(1): bicyclic nucleic acid (BNA)
  modified_base (9)..(9): bicyclic nucleic acid (BNA)
guucugucc

SEQ ID NO: 6399 - RNA, 8 nt, Artificial Sequence
  source: /note="Description of Artificial Sequence: Synthetic oligonucleotide"
  source: /note="RNA"
  modified_base (1)..(1): bicyclic nucleic acid (BNA)
  modified_base (8)..(8): bicyclic nucleic acid (BNA)
guucuguc

SEQ ID NO: 6400 - DNA, 20 bp, Artificial Sequence
  source: /note="Description of Artificial Sequence: Synthetic oligonucleotide"
  source: /note="Description of Combined DNA/RNA Molecule: Synthetic oligonucleotide"
  source: /note="DNA/RNA"
  modified_base (1)..(1): bicyclic nucleic acid (BNA)
  modified_base (20)..(20): bicyclic nucleic acid (BNA)
aguucuguccaagcccggut

SEQ ID NO: 6401 - DNA, 19 bp, Artificial Sequence
  source: /note="Description of Artificial Sequence: Synthetic oligonucleotide"
  source: /note="Description of Combined DNA/RNA Molecule: Synthetic oligonucleotide"
  source: /note="DNA/RNA"
  modified_base (1)..(1): bicyclic nucleic acid (BNA)
  modified_base (19)..(19): bicyclic nucleic acid (BNA)
aguucuguccaagcccggt

SEQ ID NO: 6402 - RNA, 18 nt, Artificial Sequence
  source: /note="Description of Artificial Sequence: Synthetic oligonucleotide"
  source: /note="RNA"
  modified_base (1)..(1): bicyclic nucleic acid (BNA)
  modified_base (18)..(18): bicyclic nucleic acid (BNA)
aguucuguccaagcccgg

SEQ ID NO: 6403 - RNA, 17 nt, Artificial Sequence
  source: /note="Description of Artificial Sequence: Synthetic oligonucleotide"
  source: /note="RNA"
  modified_base (1)..(1): bicyclic nucleic acid (BNA)
  modified_base (17)..(17): bicyclic nucleic acid (BNA)
aguucuguccaagcccg

SEQ ID NO: 6404 - RNA, 16 nt, Artificial Sequence
  source: /note="Description of Artificial Sequence: Synthetic oligonucleotide"
  source: /note="RNA"
  modified_base (1)..(1): bicyclic nucleic acid (BNA)
  modified_base (16)..(16): bicyclic nucleic acid (BNA)
aguucuguccaagccc

SEQ ID NO: 6405 - RNA, 15 nt, Artificial Sequence
  source: /note="Description of Artificial Sequence: Synthetic oligonucleotide"
  source: /note="RNA"
  modified_base (1)..(1): bicyclic nucleic acid (BNA)
  modified_base (15)..(15): bicyclic nucleic acid (BNA)
aguucuguccaagcc

SEQ ID NO: 6406 - RNA, 14 nt, Artificial Sequence
  source: /note="Description of Artificial Sequence: Synthetic oligonucleotide"
  source: /note="RNA"
  modified_base (1)..(1): bicyclic nucleic acid (BNA)
  modified_base (14)..(14): bicyclic nucleic acid (BNA)
aguucuguccaagc

SEQ ID NO: 6407 - RNA, 13 nt, Artificial Sequence
  source: /note="Description of Artificial Sequence: Synthetic oligonucleotide"
  source: /note="RNA"
  modified_base (1)..(1): bicyclic nucleic acid (BNA)
  modified_base (13)..(13): bicyclic nucleic acid (BNA)
aguucuguccaag

SEQ ID NO: 6408 - RNA, 12 nt, Artificial Sequence
  source: /note="Description of Artificial Sequence: Synthetic oligonucleotide"
  source: /note="RNA"
  modified_base (1)..(1): bicyclic nucleic acid (BNA)
  modified_base (12)..(12): bicyclic nucleic acid (BNA)
aguucuguccaa

SEQ ID NO: 6409 - RNA, 11 nt, Artificial Sequence
  source: /note="Description of Artificial Sequence: Synthetic oligonucleotide"
  source: /note="RNA"
  modified_base (1)..(1): bicyclic nucleic acid (BNA)
  modified_base (11)..(11): bicyclic nucleic acid (BNA)
aguucugucca

SEQ ID NO: 6410 - RNA, 10 nt, Artificial Sequence
  source: /note="Description of Artificial Sequence: Synthetic oligonucleotide"
  source: /note="RNA"
  modified_base (1)..(1): bicyclic nucleic acid (BNA)
  modified_base (10)..(10): bicyclic nucleic acid (BNA)
aguucugucc

SEQ ID NO: 6411 - RNA, 9 nt, Artificial Sequence
  source: /note="Description of Artificial Sequence: Synthetic oligonucleotide"
  source: /note="RNA"
  modified_base (1)..(1): bicyclic nucleic acid (BNA)
  modified_base (9)..(9): bicyclic nucleic acid (BNA)
aguucuguc

SEQ ID NO: 6412 - DNA, 8 bp, Artificial Sequence
  source: /note="Description of Artificial Sequence: Synthetic oligonucleotide"
  source: /note="Description of Combined DNA/RNA Molecule: Synthetic oligonucleotide"
  source: /note="DNA/RNA"
  modified_base (1)..(1): bicyclic nucleic acid (BNA)
  modified_base (8)..(8): bicyclic nucleic acid (BNA)
aguucugt

SEQ ID NO: 6413 - DNA, 20 bp, Artificial Sequence
  source: /note="Description of Artificial Sequence: Synthetic oligonucleotide"
  source: /note="Description of Combined DNA/RNA Molecule: Synthetic oligonucleotide"
  source: /note="DNA/RNA"
  modified_base (1)..(1): bicyclic nucleic acid (BNA)
  modified_base (20)..(20): bicyclic nucleic acid (BNA)
aaguucuguccaagcccggt

SEQ ID NO: 6414 - RNA, 19 nt, Artificial Sequence
  source: /note="Description of Artificial Sequence: Synthetic oligonucleotide"
  source: /note="RNA"
  modified_base (1)..(1): bicyclic nucleic acid (BNA)
  modified_base (19)..(19): bicyclic nucleic acid (BNA)
aaguucuguccaagcccgg

SEQ ID NO: 6415 - RNA, 18 nt, Artificial Sequence
  source: /note="Description of Artificial Sequence: Synthetic oligonucleotide"
  source: /note="RNA"
  modified_base (1)..(1): bicyclic nucleic acid (BNA)
  modified_base (18)..(18): bicyclic nucleic acid (BNA)
aaguucuguccaagcccg

SEQ ID NO: 6416 - RNA, 17 nt, Artificial Sequence
  source: /note="Description of Artificial Sequence: Synthetic oligonucleotide"
  source: /note="RNA"
  modified_base (1)..(1): bicyclic nucleic acid (BNA)
  modified_base (17)..(17): bicyclic nucleic acid (BNA)
aaguucuguccaagccc

SEQ ID NO: 6417 - RNA, 16 nt, Artificial Sequence
  source: /note="Description of Artificial Sequence: Synthetic oligonucleotide"
  source: /note="RNA"
  modified_base (1)..(1): bicyclic nucleic acid (BNA)
  modified_base (16)..(16): bicyclic nucleic acid (BNA)
aaguucuguccaagcc

SEQ ID NO: 6418 - RNA, 15 nt, Artificial Sequence
  source: /note="Description of Artificial Sequence: Synthetic oligonucleotide"
  source: /note="RNA"
  modified_base (1)..(1): bicyclic nucleic acid (BNA)
  modified_base (15)..(15): bicyclic nucleic acid (BNA)
aaguucuguccaagc

SEQ ID NO: 6419 - RNA, 14 nt, Artificial Sequence
  source: /note="Description of Artificial Sequence: Synthetic oligonucleotide"
  source: /note="RNA"
  modified_base (1)..(1): bicyclic nucleic acid (BNA)
  modified_base (14)..(14): bicyclic nucleic acid (BNA)
aaguucuguccaag

SEQ ID NO: 6420 - RNA, 13 nt, Artificial Sequence
  source: /note="Description of Artificial Sequence: Synthetic oligonucleotide"
  source: /note="RNA"
  modified_base (1)..(1): bicyclic nucleic acid (BNA)
  modified_base (13)..(13): bicyclic nucleic acid (BNA)
aaguucuguccaa

SEQ ID NO: 6421 - RNA, 12 nt, Artificial Sequence
  source: /note="Description of Artificial Sequence: Synthetic oligonucleotide"
  source: /note="RNA"
  modified_base (1)..(1): bicyclic nucleic acid (BNA)
  modified_base (12)..(12): bicyclic nucleic acid (BNA)
aaguucugucca

SEQ ID NO: 6422 - RNA, 11 nt, Artificial Sequence
  source: /note="Description of Artificial Sequence: Synthetic oligonucleotide"
  source: /note="RNA"
  modified_base (1)..(1): bicyclic nucleic acid (BNA)
  modified_base (11)..(11): bicyclic nucleic acid (BNA)
aaguucugucc

SEQ ID NO: 6423 - RNA, 10 nt, Artificial Sequence
  source: /note="Description of Artificial Sequence: Synthetic oligonucleotide"
  source: /note="RNA"
  modified_base (1)..(1): bicyclic nucleic acid (BNA)
  modified_base (10)..(10): bicyclic nucleic acid (BNA)
aaguucuguc

SEQ ID NO: 6424 - DNA, 9 bp, Artificial Sequence
  source: /note="Description of Artificial Sequence: Synthetic oligonucleotide"
  source: /note="Description of Combined DNA/RNA Molecule: Synthetic oligonucleotide"
  source: /note="DNA/RNA"
  modified_base (1)..(1): bicyclic nucleic acid (BNA)
  modified_base (9)..(9): bicyclic nucleic acid (BNA)
aaguucugt

SEQ ID NO: 6425 - RNA, 8 nt, Artificial Sequence
  source: /note="Description of Artificial Sequence: Synthetic oligonucleotide"
  source: /note="RNA"
  modified_base (1)..(1): bicyclic nucleic acid (BNA)
  modified_base (8)..(8): bicyclic nucleic acid (BNA)
aaguucug

SEQ ID NO: 6426 - DNA, 20 bp, Artificial Sequence
  source: /note="Description of Artificial Sequence: Synthetic oligonucleotide"
  source: /note="Description of Combined DNA/RNA Molecule: Synthetic oligonucleotide"
  source: /note="DNA/RNA"
  modified_base (1)..(1): bicyclic nucleic acid (BNA)
  modified_base (20)..(20): bicyclic nucleic acid (BNA)
taaguucuguccaagcccgg

SEQ ID NO: 6427 - DNA, 19 bp, Artificial Sequence
  source: /note="Description of Artificial Sequence: Synthetic oligonucleotide"
  source: /note="Description of Combined DNA/RNA Molecule: Synthetic oligonucleotide"
  source: /note="DNA/RNA"
  modified_base (1)..(1): bicyclic nucleic acid (BNA)
  modified_base (19)..(19): bicyclic nucleic acid (BNA)
taaguucuguccaagcccg

SEQ ID NO: 6428 - DNA, 18 bp, Artificial Sequence
  source: /note="Description of Artificial Sequence: Synthetic oligonucleotide"
  source: /note="Description of Combined DNA/RNA Molecule: Synthetic oligonucleotide"
  source: /note="DNA/RNA"
  modified_base (1)..(1): bicyclic nucleic acid (BNA)
  modified_base (18)..(18): bicyclic nucleic acid (BNA)
taaguucuguccaagccc

SEQ ID NO: 6429 - DNA, 17 bp, Artificial Sequence
  source: /note="Description of Artificial Sequence: Synthetic oligonucleotide"
  source: /note="Description of Combined DNA/RNA Molecule: Synthetic oligonucleotide"
  source: /note="DNA/RNA"
  modified_base (1)..(1): bicyclic nucleic acid (BNA)
  modified_base (17)..(17): bicyclic nucleic acid (BNA)
taaguucuguccaagcc

SEQ ID NO: 6430 - DNA, 16 bp, Artificial Sequence
  source: /note="Description of Artificial Sequence: Synthetic oligonucleotide"
  source: /note="Description of Combined DNA/RNA Molecule: Synthetic oligonucleotide"
  source: /note="DNA/RNA"
  modified_base (1)..(1): bicyclic nucleic acid (BNA)
  modified_base (16)..(16): bicyclic nucleic acid (BNA)
taaguucuguccaagc

SEQ ID NO: 6431 - DNA, 14 bp, Artificial Sequence
  source: /note="Description of Artificial Sequence: Synthetic oligonucleotide"
  source: /note="Description of Combined DNA/RNA Molecule: Synthetic oligonucleotide"
  source: /note="DNA/RNA"
  modified_base (1)..(1): bicyclic nucleic acid (BNA)
  modified_base (14)..(14): bicyclic nucleic acid (BNA)
taaguucuguccaa

SEQ ID NO: 6432 - DNA, 13 bp, Artificial Sequence
  source: /note="Description of Artificial Sequence: Synthetic oligonucleotide"
  source: /note="Description of Combined DNA/RNA Molecule: Synthetic oligonucleotide"
  source: /note="DNA/RNA"
  modified_base (1)..(1): bicyclic nucleic acid (BNA)
  modified_base (13)..(13): bicyclic nucleic acid (BNA)
taaguucugucca

SEQ ID NO: 6433 - DNA, 12 bp, Artificial Sequence
  source: /note="Description of Artificial Sequence: Synthetic oligonucleotide"
  source: /note="Description of Combined DNA/RNA Molecule: Synthetic oligonucleotide"
  source: /note="DNA/RNA"
  modified_base (1)..(1): bicyclic nucleic acid (BNA)
  modified_base (12)..(12): bicyclic nucleic acid (BNA)
taaguucugucc

SEQ ID NO: 6434 - DNA, 11 bp, Artificial Sequence
  source: /note="Description of Artificial Sequence: Synthetic oligonucleotide"
  source: /note="Description of Combined DNA/RNA Molecule: Synthetic oligonucleotide"
  source: /note="DNA/RNA"
  modified_base (1)..(1): bicyclic nucleic acid (BNA)
  modified_base (11)..(11): bicyclic nucleic acid (BNA)
taaguucuguc

SEQ ID NO: 6435 - DNA, 10 bp, Artificial Sequence
  source: /note="Description of Artificial Sequence: Synthetic oligonucleotide"
  source: /note="Description of Combined DNA/RNA Molecule: Synthetic oligonucleotide"
  source: /note="DNA/RNA"
  modified_base (1)..(1): bicyclic nucleic acid (BNA)
  modified_base (10)..(10): bicyclic nucleic acid (BNA)
taaguucugt

SEQ ID NO: 6436 - DNA, 9 bp, Artificial Sequence
  source: /note="Description of Artificial Sequence: Synthetic oligonucleotide"
  source: /note="Description of Combined DNA/RNA Molecule: Synthetic oligonucleotide"
  source: /note="DNA/RNA"
  modified_base (1)..(1): bicyclic nucleic acid (BNA)
  modified_base (9)..(9): bicyclic nucleic acid (BNA)
taaguucug

SEQ ID NO: 6437 - DNA, 8 bp, Artificial Sequence
  source: /note="Description of Artificial Sequence: Synthetic oligonucleotide"
  source: /note="Description of Combined DNA/RNA Molecule: Synthetic oligonucleotide"
  source: /note="DNA/RNA"
  modified_base (1)..(1): bicyclic nucleic acid (BNA)
  modified_base (8)..(8): bicyclic nucleic acid (BNA)
taaguuct

SEQ ID NO: 6438 - RNA, 20 nt, Artificial Sequence
  source: /note="Description of Artificial Sequence: Synthetic oligonucleotide"
  source: /note="RNA"
  modified_base (1)..(1): bicyclic nucleic acid (BNA)
  modified_base (20)..(20): bicyclic nucleic acid (BNA)
guaaguucuguccaagcccg

SEQ ID NO: 6439 - RNA, 19 nt, Artificial Sequence
  source: /note="Description of Artificial Sequence: Synthetic oligonucleotide"
  source: /note="RNA"
  modified_base (1)..(1): bicyclic nucleic acid (BNA)
  modified_base (19)..(19): bicyclic nucleic acid (BNA)
guaaguucuguccaagccc

SEQ ID NO: 6440 - RNA, 17 nt, Artificial Sequence
  source: /note="Description of Artificial Sequence: Synthetic oligonucleotide"
  source: /note="RNA"
  modified_base (1)..(1): bicyclic nucleic acid (BNA)
  modified_base (17)..(17): bicyclic nucleic acid (BNA)
guaaguucuguccaagc

SEQ ID NO: 6441 - RNA, 16 nt, Artificial Sequence
  source: /note="Description of Artificial Sequence: Synthetic oligonucleotide"
  source: /note="RNA"
  modified_base (1)..(1): bicyclic nucleic acid (BNA)
  modified_base (16)..(16): bicyclic nucleic acid (BNA)
guaaguucuguccaag

SEQ ID NO: 6442 - RNA, 15 nt, Artificial Sequence
  source: /note="Description of Artificial Sequence: Synthetic oligonucleotide"
  source: /note="RNA"
  modified_base (1)..(1): bicyclic nucleic acid (BNA)
  modified_base (15)..(15): bicyclic nucleic acid (BNA)
guaaguucuguccaa

SEQ ID NO: 6443 - RNA, 14 nt, Artificial Sequence
  source: /note="Description of Artificial Sequence: Synthetic oligonucleotide"
  source: /note="RNA"
  modified_base (1)..(1): bicyclic nucleic acid (BNA)
  modified_base (14)..(14): bicyclic nucleic acid (BNA)
guaaguucugucca

SEQ ID NO: 6444 - RNA, 13 nt, Artificial Sequence
  source: /note="Description of Artificial Sequence: Synthetic oligonucleotide"
  source: /note="RNA"
  modified_base (1)..(1): bicyclic nucleic acid (BNA)
  modified_base (13)..(13): bicyclic nucleic acid (BNA)
guaaguucugucc

SEQ ID NO: 6445 - RNA, 12 nt, Artificial Sequence
  source: /note="Description of Artificial Sequence: Synthetic oligonucleotide"
  source: /note="RNA"
  modified_base (1)..(1): bicyclic nucleic acid (BNA)
  modified_base (12)..(12): bicyclic nucleic acid (BNA)
guaaguucuguc

SEQ ID NO: 6446 - DNA, 11 bp, Artificial Sequence
  source: /note="Description of Artificial Sequence: Synthetic oligonucleotide"
  source: /note="Description of Combined DNA/RNA Molecule: Synthetic oligonucleotide"
  source: /note="DNA/RNA"
  modified_base (1)..(1): bicyclic nucleic acid (BNA)
  modified_base (11)..(11): bicyclic nucleic acid (BNA)
guaaguucugt

SEQ ID NO: 6447 - RNA, 10 nt, Artificial Sequence
  source: /note="Description of Artificial Sequence: Synthetic oligonucleotide"
  source: /note="RNA"
  modified_base (1)..(1): bicyclic nucleic acid (BNA)
  modified_base (10)..(10): bicyclic nucleic acid (BNA)
guaaguucug

SEQ ID NO: 6448 - DNA, 9 bp, Artificial Sequence
  source: /note="Description of Artificial Sequence: Synthetic oligonucleotide"
  source: /note="Description of Combined DNA/RNA Molecule: Synthetic oligonucleotide"
  source: /note="DNA/RNA"
  modified_base (1)..(1): bicyclic nucleic acid (BNA)
  modified_base (9)..(9): bicyclic nucleic acid (BNA)
guaaguuct

SEQ ID NO: 6449 - RNA, 8 nt, Artificial Sequence
  source: /note="Description of Artificial Sequence: Synthetic oligonucleotide"
  source: /note="RNA"
  modified_base (1)..(1): bicyclic nucleic acid (BNA)
  modified_base (8)..(8): bicyclic nucleic acid (BNA)
guaaguuc

SEQ ID NO: 6450 - RNA, 20 nt, Artificial Sequence
  source: /note="Description of Artificial Sequence: Synthetic oligonucleotide"
  source: /note="RNA"
  modified_base (1)..(1): bicyclic nucleic acid (BNA)
  modified_base (20)..(20): bicyclic nucleic acid (BNA)
gguaaguucuguccaagccc

SEQ ID NO: 6451 - RNA, 19 nt, Artificial Sequence
  source: /note="Description of Artificial Sequence: Synthetic oligonucleotide"
  source: /note="RNA"
  modified_base (1)..(1): bicyclic nucleic acid (BNA)
  modified_base (19)..(19): bicyclic nucleic acid (BNA)
gguaaguucuguccaagcc

SEQ ID NO: 6452 - RNA, 17 nt, Artificial Sequence
  source: /note="Description of Artificial Sequence: Synthetic oligonucleotide"
  source: /note="RNA"
  modified_base (1)..(1): bicyclic nucleic acid (BNA)
  modified_base (17)..(17): bicyclic nucleic acid (BNA)
gguaaguucuguccaag

SEQ ID NO: 6453 - RNA, 16 nt, Artificial Sequence
  source: /note="Description of Artificial Sequence: Synthetic oligonucleotide"
  source: /note="RNA"
  modified_base (1)..(1): bicyclic nucleic acid (BNA)
  modified_base (16)..(16): bicyclic nucleic acid (BNA)
gguaaguucuguccaa

SEQ ID NO: 6454 - RNA, 15 nt, Artificial Sequence
  source: /note="Description of Artificial Sequence: Synthetic oligonucleotide"
  source: /note="RNA"
  modified_base (1)..(1): bicyclic nucleic acid (BNA)
  modified_base (15)..(15): bicyclic nucleic acid (BNA)
gguaaguucugucca

SEQ ID NO: 6455 - RNA, 14 nt, Artificial Sequence
  source: /note="Description of Artificial Sequence: Synthetic oligonucleotide"
  source: /note="RNA"
  modified_base (1)..(1): bicyclic nucleic acid (BNA)
  modified_base (14)..(14): bicyclic nucleic acid (BNA)
gguaaguucugucc

SEQ ID NO: 6456 - RNA, 13 nt, Artificial Sequence
  source: /note="Description of Artificial Sequence: Synthetic oligonucleotide"
  source: /note="RNA"
  modified_base (1)..(1): bicyclic nucleic acid (BNA)
  modified_base (13)..(13): bicyclic nucleic acid (BNA)
gguaaguucuguc

SEQ ID NO: 6457 - DNA, 12 bp, Artificial Sequence
  source: /note="Description of Artificial Sequence: Synthetic oligonucleotide"
  source: /note="Description of Combined DNA/RNA Molecule: Synthetic oligonucleotide"
  source: /note="DNA/RNA"
  modified_base (1)..(1): bicyclic nucleic acid (BNA)
  modified_base (12)..(12): bicyclic nucleic acid (BNA)
gguaaguucugt

SEQ ID NO: 6458 - RNA, 11 nt, Artificial Sequence
  source: /note="Description of Artificial Sequence: Synthetic oligonucleotide"
  source: /note="RNA"
  modified_base (1)..(1): bicyclic nucleic acid (BNA)
  modified_base (11)..(11): bicyclic nucleic acid (BNA)
gguaaguucug

SEQ ID NO: 6459 - DNA, 10 bp, Artificial Sequence
  source: /note="Description of Artificial Sequence: Synthetic oligonucleotide"
  source: /note="Description of Combined DNA/RNA Molecule: Synthetic oligonucleotide"
  source: /note="DNA/RNA"
  modified_base (1)..(1): bicyclic nucleic acid (BNA)
  modified_base (10)..(10): bicyclic nucleic acid (BNA)
gguaaguuct

SEQ ID NO: 6460 - RNA, 9 nt, Artificial Sequence
  source: /note="Description of Artificial Sequence: Synthetic oligonucleotide"
  source: /note="RNA"
  modified_base (1)..(1): bicyclic nucleic acid (BNA)
  modified_base (9)..(9): bicyclic nucleic acid (BNA)
gguaaguuc

SEQ ID NO: 6461 - DNA, 8 bp, Artificial Sequence
  source: /note="Description of Artificial Sequence: Synthetic oligonucleotide"
  source: /note="Description of Combined DNA/RNA Molecule: Synthetic oligonucleotide"
  source: /note="DNA/RNA"
  modified_base (1)..(1): bicyclic nucleic acid (BNA)
  modified_base (8)..(8): bicyclic nucleic acid (BNA)
gguaagut

SEQ ID NO: 6462 - RNA, 20 nt, Artificial Sequence
  source: /note="Description of Artificial Sequence: Synthetic oligonucleotide"
  source: /note="RNA"
  modified_base (1)..(1): bicyclic nucleic acid (BNA)
  modified_base (20)..(20): bicyclic nucleic acid (BNA)
cgguaaguucuguccaagcc

SEQ ID NO: 6463 - RNA, 19 nt, Artificial Sequence
  source: /note="Description of Artificial Sequence: Synthetic oligonucleotide"
  source: /note="RNA"
  modified_base (1)..(1): bicyclic nucleic acid (BNA)
  modified_base (19)..(19): bicyclic nucleic acid (BNA)
cgguaaguucuguccaagc

SEQ ID NO: 6464 - RNA, 18 nt, Artificial Sequence
  source: /note="Description of Artificial Sequence: Synthetic oligonucleotide"
  source: /note="RNA"
  modified_base (1)..(1): bicyclic nucleic acid (BNA)
  modified_base (18)..(18): bicyclic nucleic acid (BNA)
cgguaaguucuguccaag

SEQ ID NO: 6465 - RNA, 17 nt, Artificial Sequence
  source: /note="Description of Artificial Sequence: Synthetic oligonucleotide"
  source: /note="RNA"
  modified_base (1)..(1): bicyclic nucleic acid (BNA)
  modified_base (17)..(17): bicyclic nucleic acid (BNA)
cgguaaguucuguccaa

SEQ ID NO: 6466 - RNA, 16 nt, Artificial Sequence
  source: /note="Description of Artificial Sequence: Synthetic oligonucleotide"
  source: /note="RNA"
  modified_base (1)..(1): bicyclic nucleic acid (BNA)
  modified_base (16)..(16): bicyclic nucleic acid (BNA)
cgguaaguucugucca

SEQ ID NO: 6467 - RNA, 15 nt, Artificial Sequence
  source: /note="Description of Artificial Sequence: Synthetic oligonucleotide"
  source: /note="RNA"
  modified_base (1)..(1): bicyclic nucleic acid (BNA)
  modified_base (15)..(15): bicyclic nucleic acid (BNA)
cgguaaguucugucc

SEQ ID NO: 6468 - RNA, 14 nt, Artificial Sequence
  source: /note="Description of Artificial Sequence: Synthetic oligonucleotide"
  source: /note="RNA"
  modified_base (1)..(1): bicyclic nucleic acid (BNA)
  modified_base (14)..(14): bicyclic nucleic acid (BNA)
cgguaaguucuguc

SEQ ID NO: 6469 - DNA, 13 bp, Artificial Sequence
  source: /note="Description of Artificial Sequence: Synthetic oligonucleotide"
  source: /note="Description of Combined DNA/RNA Molecule: Synthetic oligonucleotide"
  source: /note="DNA/RNA"
  modified_base (1)..(1): bicyclic nucleic acid (BNA)
  modified_base (13)..(13): bicyclic nucleic acid (BNA)
cgguaaguucugt

SEQ ID NO: 6470 - RNA, 12 nt, Artificial Sequence
  source: /note="Description of Artificial Sequence: Synthetic oligonucleotide"
  source: /note="RNA"
  modified_base (1)..(1): bicyclic nucleic acid (BNA)
  modified_base (12)..(12): bicyclic nucleic acid (BNA)
cgguaaguucug

SEQ ID NO: 6471 - DNA, 11 bp, Artificial Sequence
  source: /note="Description of Artificial Sequence: Synthetic oligonucleotide"
  source: /note="Description of Combined DNA/RNA Molecule: Synthetic oligonucleotide"
  source: /note="DNA/RNA"
  modified_base (1)..(1): bicyclic nucleic acid (BNA)
  modified_base (11)..(11): bicyclic nucleic acid (BNA)
cgguaaguuct

SEQ ID NO: 6472 - RNA, 10 nt, Artificial Sequence
  source: /note="Description of Artificial Sequence: Synthetic oligonucleotide"
  source: /note="RNA"
  modified_base (1)..(1): bicyclic nucleic acid (BNA)
  modified_base (10)..(10): bicyclic nucleic acid (BNA)
cgguaaguuc

SEQ ID NO: 6473 - DNA, 9 bp, Artificial Sequence
  source: /note="Description of Artificial Sequence: Synthetic oligonucleotide"
  source: /note="Description of Combined DNA/RNA Molecule: Synthetic oligonucleotide"
  source: /note="DNA/RNA"
  modified_base (1)..(1): bicyclic nucleic acid (BNA)
  modified_base (9)..(9): bicyclic nucleic acid (BNA)
cgguaagut

SEQ ID NO: 6474 - DNA, 8 bp, Artificial Sequence
  source: /note="Description of Artificial Sequence: Synthetic oligonucleotide"
  source: /note="Description of Combined DNA/RNA Molecule: Synthetic oligonucleotide"
  source: /note="DNA/RNA"
  modified_base (1)..(1): bicyclic nucleic acid (BNA)
  modified_base (8)..(8): bicyclic nucleic acid (BNA)
cgguaagt

SEQ ID NO: 6475 - DNA, 20 bp, Artificial Sequence
  source: /note="Description of Artificial Sequence: Synthetic oligonucleotide"
  source: /note="Description of Combined DNA/RNA Molecule: Synthetic oligonucleotide"
  source: /note="DNA/RNA"
  modified_base (1)..(1): bicyclic nucleic acid (BNA)
  modified_base (20)..(20): bicyclic nucleic acid (BNA)
tcgguaaguucuguccaagc

SEQ ID NO: 6476 - DNA, 19 bp, Artificial Sequence
  source: /note="Description of Artificial Sequence: Synthetic oligonucleotide"
  source: /note="Description of Combined DNA/RNA Molecule: Synthetic oligonucleotide"
  source: /note="DNA/RNA"
  modified_base (1)..(1): bicyclic nucleic acid (BNA)
  modified_base (19)..(19): bicyclic nucleic acid (BNA)
tcgguaaguucuguccaag

SEQ ID NO: 6477 - DNA, 18 bp, Artificial Sequence
  source: /note="Description of Artificial Sequence: Synthetic oligonucleotide"
  source: /note="Description of Combined DNA/RNA Molecule: Synthetic oligonucleotide"
  source: /note="DNA/RNA"
  modified_base (1)..(1): bicyclic nucleic acid (BNA)
  modified_base (18)..(18): bicyclic nucleic acid (BNA)
tcgguaaguucuguccaa

SEQ ID NO: 6478 - DNA, 17 bp, Artificial Sequence
  source: /note="Description of Artificial Sequence: Synthetic oligonucleotide"
  source: /note="Description of Combined DNA/RNA Molecule: Synthetic oligonucleotide"
  source: /note="DNA/RNA"
  modified_base (1)..(1): bicyclic nucleic acid (BNA)
  modified_base (17)..(17): bicyclic nucleic acid (BNA)
tcgguaaguucugucca

SEQ ID NO: 6479 - DNA, 16 bp, Artificial Sequence
  source: /note="Description of Artificial Sequence: Synthetic oligonucleotide"
  source: /note="Description of Combined DNA/RNA Molecule: Synthetic oligonucleotide"
  source: /note="DNA/RNA"
  modified_base (1)..(1): bicyclic nucleic acid (BNA)
  modified_base (16)..(16): bicyclic nucleic acid (BNA)
tcgguaaguucugucc

SEQ ID NO: 6480 - DNA, 15 bp, Artificial Sequence
  source: /note="Description of Artificial Sequence: Synthetic oligonucleotide"
  source: /note="Description of Combined DNA/RNA Molecule: Synthetic oligonucleotide"
  source: /note="DNA/RNA"
  modified_base (1)..(1): bicyclic nucleic acid (BNA)
  modified_base (15)..(15): bicyclic nucleic acid (BNA)
tcgguaaguucuguc

SEQ ID NO: 6481 - DNA, 14 bp, Artificial Sequence
  source: /note="Description of Artificial Sequence: Synthetic oligonucleotide"
  source: /note="Description of Combined DNA/RNA Molecule: Synthetic oligonucleotide"
  source: /note="DNA/RNA"
  modified_base (1)..(1): bicyclic nucleic acid (BNA)
  modified_base (14)..(14): bicyclic nucleic acid (BNA)
tcgguaaguucugt

SEQ ID NO: 6482 - DNA, 13 bp, Artificial Sequence
  source: /note="Description of Artificial Sequence: Synthetic oligonucleotide"
  source: /note="Description of Combined DNA/RNA Molecule: Synthetic oligonucleotide"
  source: /note="DNA/RNA"
  modified_base (1)..(1): bicyclic nucleic acid (BNA)
  modified_base (13)..(13): bicyclic nucleic acid (BNA)
tcgguaaguucug

SEQ ID NO: 6483 - DNA, 12 bp, Artificial Sequence
  source: /note="Description of Artificial Sequence: Synthetic oligonucleotide"
  source: /note="Description of Combined DNA/RNA Molecule: Synthetic oligonucleotide"
  source: /note="DNA/RNA"
  modified_base (1)..(1): bicyclic nucleic acid (BNA)
  modified_base (12)..(12): bicyclic nucleic acid (BNA)
tcgguaaguuct

SEQ ID NO: 6484 - DNA, 11 bp, Artificial Sequence
  source: /note="Description of Artificial Sequence: Synthetic oligonucleotide"
  source: /note="Description of Combined DNA/RNA Molecule: Synthetic oligonucleotide"
  source: /note="DNA/RNA"
  modified_base (1)..(1): bicyclic nucleic acid (BNA)
  modified_base (11)..(11): bicyclic nucleic acid (BNA)
tcgguaaguuc

SEQ ID NO: 6485 - DNA, 10 bp, Artificial Sequence
  source: /note="Description of Artificial Sequence: Synthetic oligonucleotide"
  source: /note="Description of Combined DNA/RNA Molecule: Synthetic oligonucleotide"
  source: /note="DNA/RNA"
  modified_base (1)..(1): bicyclic nucleic acid (BNA)
  modified_base (10)..(10): bicyclic nucleic acid (BNA)
tcgguaagut

SEQ ID NO: 6486 - DNA, 9 bp, Artificial Sequence
  source: /note="Description of Artificial Sequence: Synthetic oligonucleotide"
  source: /note="Description of Combined DNA/RNA Molecule: Synthetic oligonucleotide"
  source: /note="DNA/RNA"
  modified_base (1)..(1): bicyclic nucleic acid (BNA)
  modified_base (9)..(9): bicyclic nucleic acid (BNA)
tcgguaagt

SEQ ID NO: 6487 - RNA, 20 nt, Artificial Sequence
  source: /note="Description of Artificial Sequence: Synthetic oligonucleotide"
  source: /note="RNA"
  modified_base (1)..(1): bicyclic nucleic acid (BNA)
  modified_base (20)..(20): bicyclic nucleic acid (BNA)
gucgguaaguucuguccaag

SEQ ID NO: 6488 - RNA, 19 nt, Artificial Sequence
  source: /note="Description of Artificial Sequence: Synthetic oligonucleotide"
  source: /note="RNA"
  modified_base (1)..(1): bicyclic nucleic acid (BNA)
  modified_base (19)..(19): bicyclic nucleic acid (BNA)
gucgguaaguucuguccaa

SEQ ID NO: 6489 - RNA, 18 nt, Artificial Sequence
  source: /note="Description of Artificial Sequence: Synthetic oligonucleotide"
  source: /note="RNA"
  modified_base (1)..(1): bicyclic nucleic acid (BNA)
  modified_base (18)..(18): bicyclic nucleic acid (BNA)
gucgguaaguucugucca

SEQ ID NO: 6490 - RNA, 17 nt, Artificial Sequence
  source: /note="Description of Artificial Sequence: Synthetic oligonucleotide"
  source: /note="RNA"
  modified_base (1)..(1): bicyclic nucleic acid (BNA)
  modified_base (17)..(17): bicyclic nucleic acid (BNA)
gucgguaaguucugucc

SEQ ID NO: 6491 - RNA, 16 nt, Artificial Sequence
  source: /note="Description of Artificial Sequence: Synthetic oligonucleotide"
  source: /note="RNA"
  modified_base (1)..(1): bicyclic nucleic acid (BNA)
  modified_base (16)..(16): bicyclic nucleic acid (BNA)
gucgguaaguucuguc

SEQ ID NO: 6492 - DNA, 15 bp, Artificial Sequence
  source: /note="Description of Artificial Sequence: Synthetic oligonucleotide"
  source: /note="Description of Combined DNA/RNA Molecule: Synthetic oligonucleotide"
  source: /note="DNA/RNA"
  modified_base (1)..(1): bicyclic nucleic acid (BNA)
  modified_base (15)..(15): bicyclic nucleic acid (BNA)
gucgguaaguucugt

SEQ ID NO: 6493 - RNA, 14 nt, Artificial Sequence
  source: /note="Description of Artificial Sequence: Synthetic oligonucleotide"
  source: /note="RNA"
  modified_base (1)..(1): bicyclic nucleic acid (BNA)
  modified_base (14)..(14): bicyclic nucleic acid (BNA)
gucgguaaguucug

SEQ ID NO: 6494 - DNA, 13 bp, Artificial Sequence
  source: /note="Description of Artificial Sequence: Synthetic oligonucleotide"
  source: /note="Description of Combined DNA/RNA Molecule: Synthetic oligonucleotide"
  source: /note="DNA/RNA"
  modified_base (1)..(1): bicyclic nucleic acid (BNA)
  modified_base (13)..(13): bicyclic nucleic acid (BNA)
gucgguaaguuct

SEQ ID NO: 6495 - RNA, 12 nt, Artificial Sequence
  source: /note="Description of Artificial Sequence: Synthetic oligonucleotide"
  source: /note="RNA"
  modified_base (1)..(1): bicyclic nucleic acid (BNA)
  modified_base (12)..(12): bicyclic nucleic acid (BNA)
gucgguaaguuc

SEQ ID NO: 6496 - DNA, 11 bp, Artificial Sequence
  source: /note="Description of Artificial Sequence: Synthetic oligonucleotide"
  source: /note="Description of Combined DNA/RNA Molecule: Synthetic oligonucleotide"
  source: /note="DNA/RNA"
  modified_base (1)..(1): bicyclic nucleic acid (BNA)
  modified_base (11)..(11): bicyclic nucleic acid (BNA)
gucgguaagut

SEQ ID NO: 6497 - DNA, 10 bp, Artificial Sequence
  source: /note="Description of Artificial Sequence: Synthetic oligonucleotide"
  source: /note="Description of Combined DNA/RNA Molecule: Synthetic oligonucleotide"
  source: /note="DNA/RNA"
  modified_base (1)..(1): bicyclic nucleic acid (BNA)
  modified_base (10)..(10): bicyclic nucleic acid (BNA)
gucgguaagt

SEQ ID NO: 6498 - RNA, 20 nt, Artificial Sequence
  source: /note="Description of Artificial Sequence: Synthetic oligonucleotide"
  source: /note="RNA"
  modified_base (1)..(1): bicyclic nucleic acid (BNA)
  modified_base (20)..(20): bicyclic nucleic acid (BNA)
agucgguaaguucuguccaa

SEQ ID NO: 6499 - RNA, 19 nt, Artificial Sequence
  source: /note="Description of Artificial Sequence: Synthetic oligonucleotide"
  source: /note="RNA"
  modified_base (1)..(1): bicyclic nucleic acid (BNA)
  modified_base (19)..(19): bicyclic nucleic acid (BNA)
agucgguaaguucugucca

SEQ ID NO: 6500 - RNA, 17 nt, Artificial Sequence
  source: /note="Description of Artificial Sequence: Synthetic oligonucleotide"
  source: /note="RNA"
  modified_base (1)..(1): bicyclic nucleic acid (BNA)
  modified_base (17)..(17): bicyclic nucleic acid (BNA)
agucgguaaguucuguc

SEQ ID NO: 6501 - DNA, 16 bp, Artificial Sequence
  source: /note="Description of Artificial Sequence: Synthetic oligonucleotide"
  source: /note="Description of Combined DNA/RNA Molecule: Synthetic oligonucleotide"
  source: /note="DNA/RNA"
  modified_base (1)..(1): bicyclic nucleic acid (BNA)
  modified_base (16)..(16): bicyclic nucleic acid (BNA)
agucgguaaguucugt

SEQ ID NO: 6502 - RNA, 15 nt, Artificial Sequence
  source: /note="Description of Artificial Sequence: Synthetic oligonucleotide"
  source: /note="RNA"
  modified_base (1)..(1): bicyclic nucleic acid (BNA)
  modified_base (15)..(15): bicyclic nucleic acid (BNA)
agucgguaaguucug

SEQ ID NO: 6503 - DNA, 14 bp, Artificial Sequence
  source: /note="Description of Artificial Sequence: Synthetic oligonucleotide"
  source: /note="Description of Combined DNA/RNA Molecule: Synthetic oligonucleotide"
  source: /note="DNA/RNA"
  modified_base (1)..(1): bicyclic nucleic acid (BNA)
  modified_base (14)..(14): bicyclic nucleic acid (BNA)
agucgguaaguuct

SEQ ID NO: 6504 - RNA, 13 nt, Artificial Sequence
  source: /note="Description of Artificial Sequence: Synthetic oligonucleotide"
  source: /note="RNA"
  modified_base (1)..(1): bicyclic nucleic acid (BNA)
  modified_base (13)..(13): bicyclic nucleic acid (BNA)
agucgguaaguuc

SEQ ID NO: 6505 - DNA, 12 bp, Artificial Sequence
  source: /note="Description of Artificial Sequence: Synthetic oligonucleotide"
  source: /note="Description of Combined DNA/RNA Molecule: Synthetic oligonucleotide"
  source: /note="DNA/RNA"
  modified_base (1)..(1): bicyclic nucleic acid (BNA)
  modified_base (12)..(12): bicyclic nucleic acid (BNA)
agucgguaagut

SEQ ID NO: 6506 - DNA, 11 bp, Artificial Sequence
  source: /note="Description of Artificial Sequence: Synthetic oligonucleotide"
  source: /note="Description of Combined DNA/RNA Molecule: Synthetic oligonucleotide"
  source: /note="DNA/RNA"
  modified_base (1)..(1): bicyclic nucleic acid (BNA)
  modified_base (11)..(11): bicyclic nucleic acid (BNA)
agucgguaagt

SEQ ID NO: 6507 - RNA, 20 nt, Artificial Sequence
  source: /note="Description of Artificial Sequence: Synthetic oligonucleotide"
  source: /note="RNA"
  modified_base (1)..(1): bicyclic nucleic acid (BNA)
  modified_base (20)..(20): bicyclic nucleic acid (BNA)
cagucgguaaguucugucca

SEQ ID NO: 6508 - RNA, 19 nt, Artificial Sequence
  source: /note="Description of Artificial Sequence: Synthetic oligonucleotide"
  source: /note="RNA"
  modified_base (1)..(1): bicyclic nucleic acid (BNA)
  modified_base (19)..(19): bicyclic nucleic acid (BNA)
cagucgguaaguucugucc

SEQ ID NO: 6509 - RNA, 18 nt, Artificial Sequence
  source: /note="Description of Artificial Sequence: Synthetic oligonucleotide"
  source: /note="RNA"
  modified_base (1)..(1): bicyclic nucleic acid (BNA)
  modified_base (18)..(18): bicyclic nucleic acid (BNA)
cagucgguaaguucuguc

SEQ ID NO: 6510 - DNA, 17 bp, Artificial Sequence
  source: /note="Description of Artificial Sequence: Synthetic oligonucleotide"
  source: /note="Description of Combined DNA/RNA Molecule: Synthetic oligonucleotide"
  source: /note="DNA/RNA"
  modified_base (1)..(1): bicyclic nucleic acid (BNA)
  modified_base (17)..(17): bicyclic nucleic acid (BNA)
cagucgguaaguucugt

SEQ ID NO: 6511 - RNA, 16 nt, Artificial Sequence
  source: /note="Description of Artificial Sequence: Synthetic oligonucleotide"
  source: /note="RNA"
  modified_base (1)..(1): bicyclic nucleic acid (BNA)
  modified_base (16)..(16): bicyclic nucleic acid (BNA)
cagucgguaaguucug

SEQ ID NO: 6512 - DNA, 15 bp, Artificial Sequence
  source: /note="Description of Artificial Sequence: Synthetic oligonucleotide"
  source: /note="Description of Combined DNA/RNA Molecule: Synthetic oligonucleotide"
  source: /note="DNA/RNA"
  modified_base (1)..(1): bicyclic nucleic acid (BNA)
  modified_base (15)..(15): bicyclic nucleic acid (BNA)
cagucgguaaguuct

SEQ ID NO: 6513 - RNA, 14 nt, Artificial Sequence
  source: /note="Description of Artificial Sequence: Synthetic oligonucleotide"
  source: /note="RNA"
  modified_base (1)..(1): bicyclic nucleic acid (BNA)
  modified_base (14)..(14): bicyclic nucleic acid (BNA)
cagucgguaaguuc

SEQ ID NO: 6514 - DNA, 13 bp, Artificial Sequence
  source: /note="Description of Artificial Sequence: Synthetic oligonucleotide"
  source: /note="Description of Combined DNA/RNA Molecule: Synthetic oligonucleotide"
  source: /note="DNA/RNA"
  modified_base (1)..(1): bicyclic nucleic acid (BNA)
  modified_base (13)..(13): bicyclic nucleic acid (BNA)
cagucgguaagut

SEQ ID NO: 6515 - DNA, 12 bp, Artificial Sequence
  source: /note="Description of Artificial Sequence: Synthetic oligonucleotide"
  source: /note="Description of Combined DNA/RNA Molecule: Synthetic oligonucleotide"
  source: /note="DNA/RNA"
  modified_base (1)..(1): bicyclic nucleic acid (BNA)
  modified_base (12)..(12): bicyclic nucleic acid (BNA)
cagucgguaagt

SEQ ID NO: 6516 - RNA, 20 nt, Artificial Sequence
  source: /note="Description of Artificial Sequence: Synthetic oligonucleotide"
  source: /note="RNA"
  modified_base (1)..(1): bicyclic nucleic acid (BNA)
  modified_base (20)..(20): bicyclic nucleic acid (BNA)
ccagucgguaaguucugucc

SEQ ID NO: 6517 - RNA, 19 nt, Artificial Sequence
  source: /note="Description of Artificial Sequence: Synthetic oligonucleotide"
  source: /note="RNA"
  modified_base (1)..(1): bicyclic nucleic acid (BNA)
  modified_base (19)..(19): bicyclic nucleic acid (BNA)
ccagucgguaaguucuguc

SEQ ID NO: 6518 - DNA, 18 bp, Artificial Sequence
  source: /note="Description of Artificial Sequence: Synthetic oligonucleotide"
  source: /note="Description of Combined DNA/RNA Molecule: Synthetic oligonucleotide"
  source: /note="DNA/RNA"
  modified_base (1)..(1): bicyclic nucleic acid (BNA)
  modified_base (18)..(18): bicyclic nucleic acid (BNA)
ccagucgguaaguucugt

SEQ ID NO: 6519 - RNA, 17 nt, Artificial Sequence
  source: /note="Description of Artificial Sequence: Synthetic oligonucleotide"
  source: /note="RNA"
  modified_base (1)..(1): bicyclic nucleic acid (BNA)
  modified_base (17)..(17): bicyclic nucleic acid (BNA)
ccagucgguaaguucug

SEQ ID NO: 6520 - DNA, 16 bp, Artificial Sequence
  source: /note="Description of Artificial Sequence: Synthetic oligonucleotide"
  source: /note="Description of Combined DNA/RNA Molecule: Synthetic oligonucleotide"
  source: /note="DNA/RNA"
  modified_base (1)..(1): bicyclic nucleic acid (BNA)
  modified_base (16)..(16): bicyclic nucleic acid (BNA)
ccagucgguaaguuct

SEQ ID NO: 6521 - RNA, 15 nt, Artificial Sequence
  source: /note="Description of Artificial Sequence: Synthetic oligonucleotide"
  source: /note="RNA"
  modified_base (1)..(1): bicyclic nucleic acid (BNA)
  modified_base (15)..(15): bicyclic nucleic acid (BNA)
ccagucgguaaguuc

SEQ ID NO: 6522 - DNA, 14 bp, Artificial Sequence
  source: /note="Description of Artificial Sequence: Synthetic oligonucleotide"
  source: /note="Description of Combined DNA/RNA Molecule: Synthetic oligonucleotide"
  source: /note="DNA/RNA"
  modified_base (1)..(1): bicyclic nucleic acid (BNA)
  modified_base (14)..(14): bicyclic nucleic acid (BNA)
ccagucgguaagut

SEQ ID NO: 6523 - DNA, 13 bp, Artificial Sequence
  source: /note="Description of Artificial Sequence: Synthetic oligonucleotide"
  source: /note="Description of Combined DNA/RNA Molecule: Synthetic oligonucleotide"
  source: /note="DNA/RNA"
  modified_base (1)..(1): bicyclic nucleic acid (BNA)
  modified_base (13)..(13): bicyclic nucleic acid (BNA)
ccagucgguaagt

SEQ ID NO: 6524 - RNA, 20 nt, Artificial Sequence
  source: /note="Description of Artificial Sequence: Synthetic oligonucleotide"
  source: /note="RNA"
  modified_base (1)..(1): bicyclic nucleic acid (BNA)
  modified_base (20)..(20): bicyclic nucleic acid (BNA)
gccagucgguaaguucuguc

SEQ ID NO: 6525 - DNA, 19 bp, Artificial Sequence
  source: /note="Description of Artificial Sequence: Synthetic oligonucleotide"
  source: /note="Description of Combined DNA/RNA Molecule: Synthetic oligonucleotide"
  source: /note="DNA/RNA"
  modified_base (1)..(1): bicyclic nucleic acid (BNA)
  modified_base (19)..(19): bicyclic nucleic acid (BNA)
gccagucgguaaguucugt

SEQ ID NO: 6526 - RNA, 18 nt, Artificial Sequence
  source: /note="Description of Artificial Sequence: Synthetic oligonucleotide"
  source: /note="RNA"
  modified_base (1)..(1): bicyclic nucleic acid (BNA)
  modified_base (18)..(18): bicyclic nucleic acid (BNA)
gccagucgguaaguucug

SEQ ID NO: 6527 - DNA, 17 bp, Artificial Sequence
  source: /note="Description of Artificial Sequence: Synthetic oligonucleotide"
  source: /note="Description of Combined DNA/RNA Molecule: Synthetic oligonucleotide"
  source: /note="DNA/RNA"
  modified_base (1)..(1): bicyclic nucleic acid (BNA)
  modified_base (17)..(17): bicyclic nucleic acid (BNA)
gccagucgguaaguuct

SEQ ID NO: 6528 - RNA, 16 nt, Artificial Sequence
  source: /note="Description of Artificial Sequence: Synthetic oligonucleotide"
  source: /note="RNA"
  modified_base (1)..(1): bicyclic nucleic acid (BNA)
  modified_base (16)..(16): bicyclic nucleic acid (BNA)
gccagucgguaaguuc

SEQ ID NO: 6529 - DNA, 15 bp, Artificial Sequence
  source: /note="Description of Artificial Sequence: Synthetic oligonucleotide"
  source: /note="Description of Combined DNA/RNA Molecule: Synthetic oligonucleotide"
  source: /note="DNA/RNA"
  modified_base (1)..(1): bicyclic nucleic acid (BNA)
  modified_base (15)..(15): bicyclic nucleic acid (BNA)
gccagucgguaagut

SEQ ID NO: 6530 - DNA, 14 bp, Artificial Sequence
  source: /note="Description of Artificial Sequence: Synthetic oligonucleotide"
  source: /note="Description of Combined DNA/RNA Molecule: Synthetic oligonucleotide"
  source: /note="DNA/RNA"
  modified_base (1)..(1): bicyclic nucleic acid (BNA)
  modified_base (14)..(14): bicyclic nucleic acid (BNA)
gccagucgguaagt

SEQ ID NO: 6531 - DNA, 20 bp, Artificial Sequence
  source: /note="Description of Artificial Sequence: Synthetic oligonucleotide"
  source: /note="Description of Combined DNA/RNA Molecule: Synthetic oligonucleotide"
  source: /note="DNA/RNA"
  modified_base (1)..(1): bicyclic nucleic acid (BNA)
  modified_base (20)..(20): bicyclic nucleic acid (BNA)
tcaaggaagauggcauuuct

SEQ ID NO: 6532 - DNA, 22 bp, Artificial Sequence
  source: /note="Description of Artificial Sequence: Synthetic oligonucleotide"
  source: /note="Description of Combined DNA/RNA Molecule: Synthetic oligonucleotide"
  source: /note="DNA/RNA"
  modified_base (1)..(1): bicyclic nucleic acid (BNA)
  modified_base (22)..(22): bicyclic nucleic acid (BNA)
tcaaggaagauggcauuucuag

SEQ ID NO: 6533 - DNA, 16 bp, Artificial Sequence
  source: /note="Description of Artificial Sequence: Synthetic oligonucleotide"
  source: /note="Description of Combined DNA/RNA Molecule: Synthetic oligonucleotide"
  source: /note="DNA/RNA"
  modified_base (1)..(1): bicyclic nucleic acid (BNA)
  modified_base (16)..(16): bicyclic nucleic acid (BNA)
tcaaggaagauggcat

SEQ ID NO: 6534 - DNA, 15 bp, Artificial Sequence
  source: /note="Description of Artificial Sequence: Synthetic oligonucleotide"
  source: /note="Description of Combined DNA/RNA Molecule: Synthetic oligonucleotide"
  source: /note="DNA/RNA"
  modified_base (1)..(1): bicyclic nucleic acid (BNA)
  modified_base (15)..(15): bicyclic nucleic acid (BNA)
gaagauggcauuuct

SEQ ID NO: 6535 - DNA, 21 bp, Artificial Sequence
  source: /note="Description of Artificial Sequence: Synthetic oligonucleotide"
  source: /note="Description of Combined DNA/RNA Molecule: Synthetic oligonucleotide"
  source: /note="DNA/RNA"
  modified_base (1)..(1): bicyclic nucleic acid (BNA)
  modified_base (21)..(21): bicyclic nucleic acid (BNA)
tcaaggaagauggcauuucua

SEQ ID NO: 6536 - DNA, 19 bp, Artificial Sequence
  source: /note="Description of Artificial Sequence: Synthetic oligonucleotide"
  source: /note="Description of Combined DNA/RNA Molecule: Synthetic oligonucleotide"
  source: /note="DNA/RNA"
  modified_base (1)..(1): bicyclic nucleic acid (BNA)
  modified_base (19)..(19): bicyclic nucleic acid (BNA)
tcaaggaagauggcauuuc

SEQ ID NO: 6537 - DNA, 18 bp, Artificial Sequence
  source: /note="Description of Artificial Sequence: Synthetic oligonucleotide"
  source: /note="Description of Combined DNA/RNA Molecule: Synthetic oligonucleotide"
  source: /note="DNA/RNA"
  modified_base (1)..(1): bicyclic nucleic acid (BNA)
  modified_base (18)..(18): bicyclic nucleic acid (BNA)
tcaaggaagauggcauut

SEQ ID NO: 6538 - DNA, 17 bp, Artificial Sequence
  source: /note="Description of Artificial Sequence: Synthetic oligonucleotide"
  source: /note="Description of Combined DNA/RNA Molecule: Synthetic oligonucleotide"
  source: /note="DNA/RNA"
  modified_base (1)..(1): bicyclic nucleic acid (BNA)
  modified_base (17)..(17): bicyclic nucleic acid (BNA)
tcaaggaagauggcaut

SEQ ID NO: 6539 - DNA, 15 bp, Artificial Sequence
  source: /note="Description of Artificial Sequence: Synthetic oligonucleotide"
  source: /note="Description of Combined DNA/RNA Molecule: Synthetic oligonucleotide"
  source: /note="DNA/RNA"
  modified_base (1)..(1): bicyclic nucleic acid (BNA)
  modified_base (15)..(15): bicyclic nucleic acid (BNA)
tcaaggaagauggca

SEQ ID NO: 6540 - DNA, 14 bp, Artificial Sequence
  source: /note="Description of Artificial Sequence: Synthetic oligonucleotide"
  source: /note="Description of Combined DNA/RNA Molecule: Synthetic oligonucleotide"
  source: /note="DNA/RNA"
  modified_base (1)..(1): bicyclic nucleic acid (BNA)
  modified_base (14)..(14): bicyclic nucleic acid (BNA)
tcaaggaagauggc

SEQ ID NO: 6541 - DNA, 13 bp, Artificial Sequence
  source: /note="Description of Artificial Sequence: Synthetic oligonucleotide"
  source: /note="Description of Combined DNA/RNA Molecule: Synthetic oligonucleotide"
  source: /note="DNA/RNA"
  modified_base (1)..(1): bicyclic nucleic acid (BNA)
  modified_base (13)..(13): bicyclic nucleic acid (BNA)
tcaaggaagaugg

SEQ ID NO: 6542 - DNA, 12 bp, Artificial Sequence
  source: /note="Description of Artificial Sequence: Synthetic oligonucleotide"
  source: /note="Description of Combined DNA/RNA Molecule: Synthetic oligonucleotide"
  source: /note="DNA/RNA"
  modified_base (1)..(1): bicyclic nucleic acid (BNA)
  modified_base (12)..(12): bicyclic nucleic acid (BNA)
tcaaggaagaug

SEQ ID NO: 6543 - DNA, 11 bp, Artificial Sequence
  source: /note="Description of Artificial Sequence: Synthetic oligonucleotide"
  source: /note="DNA/RNA"
  modified_base (1)..(1): bicyclic nucleic acid (BNA)
  modified_base (11)..(11): bicyclic nucleic acid (BNA)
tcaaggaagat

SEQ ID NO: 6544 - DNA, 10 bp, Artificial Sequence
  source: /note="Description of Artificial Sequence: Synthetic oligonucleotide"
  source: /note="DNA/RNA"
  modified_base (1)..(1): bicyclic nucleic acid (BNA)
  modified_base (10)..(10): bicyclic nucleic acid (BNA)
tcaaggaaga

SEQ ID NO: 6545 - DNA, 9 bp, Artificial Sequence
  source: /note="Description of Artificial Sequence: Synthetic oligonucleotide"
  source: /note="DNA/RNA"
  modified_base (1)..(1): bicyclic nucleic acid (BNA)
  modified_base (9)..(9): bicyclic nucleic acid (BNA)
tcaaggaag

SEQ ID NO: 6546 - RNA, 21 nt, Artificial Sequence
  source: /note="Description of Artificial Sequence: Synthetic oligonucleotide"
  source: /note="RNA"
  modified_base (1)..(1): bicyclic nucleic acid (BNA)
  modified_base (21)..(21): bicyclic nucleic acid (BNA)
caaggaagauggcauuucuag

SEQ ID NO: 6547 - RNA, 20 nt, Artificial Sequence
  source: /note="Description of Artificial Sequence: Synthetic oligonucleotide"
  source: /note="RNA"
  modified_base (1)..(1): bicyclic nucleic acid (BNA)
  modified_base (20)..(20): bicyclic nucleic acid (BNA)
caaggaagauggcauuucua

SEQ ID NO: 6548 - DNA, 19 bp, Artificial Sequence
  source: /note="Description of Artificial Sequence: Synthetic oligonucleotide"
  source: /note="Description of Combined DNA/RNA Molecule: Synthetic oligonucleotide"
  source: /note="DNA/RNA"
  modified_base (1)..(1): bicyclic nucleic acid (BNA)
  modified_base (19)..(19): bicyclic nucleic acid (BNA)
caaggaagauggcauuuct

SEQ ID NO: 6549 - RNA, 18 nt, Artificial Sequence
  source: /note="Description of Artificial Sequence: Synthetic oligonucleotide"
  source: /note="RNA"
  modified_base (1)..(1): bicyclic nucleic acid (BNA)
  modified_base (18)..(18): bicyclic nucleic acid (BNA)
caaggaagauggcauuuc

SEQ ID NO: 6550 - DNA, 17 bp, Artificial Sequence
  source: /note="Description of Artificial Sequence: Synthetic oligonucleotide"
  source: /note="Description of Combined DNA/RNA Molecule: Synthetic oligonucleotide"
  source: /note="DNA/RNA"
  modified_base (1)..(1): bicyclic nucleic acid (BNA)
  modified_base (17)..(17): bicyclic nucleic acid (BNA)
caaggaagauggcauut

SEQ ID NO: 6551 - DNA, 16 bp, Artificial Sequence
  source: /note="Description of Artificial Sequence: Synthetic oligonucleotide"
  source: /note="Description of Combined DNA/RNA Molecule: Synthetic oligonucleotide"
  source: /note="DNA/RNA"
  modified_base (1)..(1): bicyclic nucleic acid (BNA)
  modified_base (16)..(16): bicyclic nucleic acid (BNA)
caaggaagauggcaut

SEQ ID NO: 6552 - DNA, 15 bp, Artificial Sequence
  source: /note="Description of Artificial Sequence: Synthetic oligonucleotide"
  source: /note="Description of Combined DNA/RNA Molecule: Synthetic oligonucleotide"
  source: /note="DNA/RNA"
  modified_base (1)..(1): bicyclic nucleic acid (BNA)
  modified_base (15)..(15): bicyclic nucleic acid (BNA)
caaggaagauggcat

SEQ ID NO: 6553 - RNA, 14 nt, Artificial Sequence
  source: /note="Description of Artificial Sequence: Synthetic oligonucleotide"
  source: /note="RNA"
  modified_base (1)..(1): bicyclic nucleic acid (BNA)
  modified_base (14)..(14): bicyclic nucleic acid (BNA)
caaggaagauggca

SEQ ID NO: 6554 - RNA, 13 nt, Artificial Sequence
  source: /note="Description of Artificial Sequence: Synthetic oligonucleotide"
  source: /note="RNA"
  modified_base (1)..(1): bicyclic nucleic acid (BNA)
  modified_base (13)..(13): bicyclic nucleic acid (BNA)
caaggaagauggc

SEQ ID NO: 6555 - RNA, 12 nt, Artificial Sequence
  source: /note="Description of Artificial Sequence: Synthetic oligonucleotide"
  source: /note="RNA"
  modified_base (1)..(1): bicyclic nucleic acid (BNA)
  modified_base (12)..(12): bicyclic nucleic acid (BNA)
caaggaagaugg

SEQ ID NO: 6556 - RNA, 11 nt, Artificial Sequence
  source: /note="Description of Artificial Sequence: Synthetic oligonucleotide"
  source: /note="RNA"
  modified_base (1)..(1): bicyclic nucleic acid (BNA)
  modified_base (11)..(11): bicyclic nucleic acid (BNA)
caaggaagaug

SEQ ID NO: 6557 - DNA, 10 bp, Artificial Sequence
  source: /note="Description of Artificial Sequence: Synthetic oligonucleotide"
  source: /note="DNA/RNA"
  modified_base (1)..(1): bicyclic nucleic acid (BNA)
  modified_base (10)..(10): bicyclic nucleic acid (BNA)
caaggaagat

SEQ ID NO: 6558 - RNA, 9 nt, Artificial Sequence
  source: /note="Description of Artificial Sequence: Synthetic oligonucleotide"
  source: /note="RNA/Antisense Oligonucleotide"
  modified_base (1)..(1): bicyclic nucleic acid (BNA)
  modified_base (9)..(9): bicyclic nucleic acid (BNA)
caaggaaga

SEQ ID NO: 6559 - RNA, 8 nt, Artificial Sequence
  source: /note="Description of Artificial Sequence: Synthetic oligonucleotide"
  source: /note="RNA/Antisense Oligonucleotide"
  modified_base (1)..(1): bicyclic nucleic acid (BNA)
  modified_base (8)..(8): bicyclic nucleic acid (BNA)
caaggaag

SEQ ID NO: 6560 - RNA, 20 nt, Artificial Sequence
  source: /note="Description of Artificial Sequence: Synthetic oligonucleotide"
  source: /note="RNA"
  modified_base (1)..(1): bicyclic nucleic acid (BNA)
  modified_base (20)..(20): bicyclic nucleic acid (BNA)
aaggaagauggcauuucuag

SEQ ID NO: 6561 - RNA, 19 nt, Artificial Sequence
  source: /note="Description of Artificial Sequence: Synthetic oligonucleotide"
  source: /note="RNA"
  modified_base (1)..(1): bicyclic nucleic acid (BNA)
  modified_base (19)..(19): bicyclic nucleic acid (BNA)
aaggaagauggcauuucua

SEQ ID NO: 6562 - DNA, 18 bp, Artificial Sequence
  source: /note="Description of Artificial Sequence: Synthetic oligonucleotide"
  source: /note="Description of Combined DNA/RNA Molecule: Synthetic oligonucleotide"
  source: /note="DNA/RNA"
  modified_base (1)..(1): bicyclic nucleic acid (BNA)
  modified_base (18)..(18): bicyclic nucleic acid (BNA)
aaggaagauggcauuuct

SEQ ID NO: 6563 - RNA, 17 nt, Artificial Sequence
  source: /note="Description of Artificial Sequence: Synthetic oligonucleotide"
  source: /note="RNA"
  modified_base (1)..(1): bicyclic nucleic acid (BNA)
  modified_base (17)..(17): bicyclic nucleic acid (BNA)
aaggaagauggcauuuc

SEQ ID NO: 6564 - DNA, 16 bp, Artificial Sequence
  source: /note="Description of Artificial Sequence: Synthetic oligonucleotide"
  source: /note="Description of Combined DNA/RNA Molecule: Synthetic oligonucleotide"
  source: /note="DNA/RNA"
  modified_base (1)..(1): bicyclic nucleic acid (BNA)
  modified_base (16)..(16): bicyclic nucleic acid (BNA)
aaggaagauggcauut

SEQ ID NO: 6565 - DNA, 15 bp, Artificial Sequence
  source: /note="Description of Artificial Sequence: Synthetic oligonucleotide"
  source: /note="Description of Combined DNA/RNA Molecule: Synthetic oligonucleotide"
  source: /note="DNA/RNA"
  modified_base (1)..(1): bicyclic nucleic acid (BNA)
  modified_base (15)..(15): bicyclic nucleic acid (BNA)
aaggaagauggcaut

SEQ ID NO: 6566 - DNA, 14 bp, Artificial Sequence
  source: /note="Description of Artificial Sequence: Synthetic oligonucleotide"
  source: /note="Description of Combined DNA/RNA Molecule: Synthetic oligonucleotide"
  source: /note="DNA/RNA"
  modified_base (1)..(1): bicyclic nucleic acid (BNA)
  modified_base (14)..(14): bicyclic nucleic acid (BNA)
aaggaagauggcat

SEQ ID NO: 6567 - RNA, 13 nt, Artificial Sequence
  source: /note="Description of Artificial Sequence: Synthetic oligonucleotide"
  source: /note="RNA"
  modified_base (1)..(1): bicyclic nucleic acid (BNA)
  modified_base (13)..(13): bicyclic nucleic acid (BNA)
aaggaagauggca

SEQ ID NO: 6568 - RNA, 12 nt, Artificial Sequence
  source: /note="Description of Artificial Sequence: Synthetic oligonucleotide"
  source: /note="RNA"
  modified_base (1)..(1): bicyclic nucleic acid (BNA)
  modified_base (12)..(12): bicyclic nucleic acid (BNA)
aaggaagauggc

SEQ ID NO: 6569 - RNA, 11 nt, Artificial Sequence
  source: /note="Description of Artificial Sequence: Synthetic oligonucleotide"
  source: /note="RNA"
  modified_base (1)..(1): bicyclic nucleic acid (BNA)
  modified_base (11)..(11): bicyclic nucleic acid (BNA)
aaggaagaugg

SEQ ID NO: 6570 - RNA, 10 nt, Artificial Sequence
  source: /note="Description of Artificial Sequence: Synthetic oligonucleotide"
  source: /note="RNA"
  modified_base (1)..(1): bicyclic nucleic acid (BNA)
  modified_base (10)..(10): bicyclic nucleic acid (BNA)
aaggaagaug

SEQ ID NO: 6571 - DNA, 9 bp, Artificial Sequence
  source: /note="Description of Artificial Sequence: Synthetic oligonucleotide"
  source: /note="DNA/RNA"
  modified_base (1)..(1): bicyclic nucleic acid (BNA)
  modified_base (9)..(9): bicyclic nucleic acid (BNA)
aaggaagat

SEQ ID NO: 6572 - RNA, 8 nt, Artificial Sequence
  source: /note="Description of Artificial Sequence: Synthetic oligonucleotide"
  source: /note="RNA/Antisense Oligonucleotide"
  modified_base (1)..(1): bicyclic nucleic acid (BNA)
  modified_base (8)..(8): bicyclic nucleic acid (BNA)
aaggaaga

SEQ ID NO: 6573 - RNA, 19 nt, Artificial Sequence
  source: /note="Description of Artificial Sequence: Synthetic oligonucleotide"
  source: /note="RNA"
  modified_base (1)..(1): bicyclic nucleic acid (BNA)
  modified_base (19)..(19): bicyclic nucleic acid (BNA)
aggaagauggcauuucuag

SEQ ID NO: 6574 - RNA, 18 nt, Artificial Sequence
  source: /note="Description of Artificial Sequence: Synthetic oligonucleotide"
  source: /note="RNA"
  modified_base (1)..(1): bicyclic nucleic acid (BNA)
  modified_base (18)..(18): bicyclic nucleic acid (BNA)
aggaagauggcauuucua

SEQ ID NO: 6575 - DNA, 17 bp, Artificial Sequence
  source: /note="Description of Artificial Sequence: Synthetic oligonucleotide"
  source: /note="Description of Combined DNA/RNA Molecule: Synthetic oligonucleotide"
  source: /note="DNA/RNA"
  modified_base (1)..(1): bicyclic nucleic acid (BNA)
  modified_base (17)..(17): bicyclic nucleic acid (BNA)
aggaagauggcauuuct

SEQ ID NO: 6576 - RNA, 16 nt, Artificial Sequence
  source: /note="Description of Artificial Sequence: Synthetic oligonucleotide"
  source: /note="RNA"
  modified_base (1)..(1): bicyclic nucleic acid (BNA)
  modified_base (16)..(16): bicyclic nucleic acid (BNA)
aggaagauggcauuuc

SEQ ID NO: 6577 - DNA, 15 bp, Artificial Sequence
  source: /note="Description of Artificial Sequence: Synthetic oligonucleotide"
  source: /note="Description of Combined DNA/RNA Molecule: Synthetic oligonucleotide"
  source: /note="DNA/RNA"
  modified_base (1)..(1): bicyclic nucleic acid (BNA)
  modified_base (15)..(15): bicyclic nucleic acid (BNA)
aggaagauggcauut

SEQ ID NO: 6578 - DNA, 14 bp, Artificial Sequence
  source: /note="Description of Artificial Sequence: Synthetic oligonucleotide"
  source: /note="Description of Combined DNA/RNA Molecule: Synthetic oligonucleotide"
  source: /note="DNA/RNA"
  modified_base (1)..(1): bicyclic nucleic acid (BNA)
  modified_base (14)..(14): bicyclic nucleic acid (BNA)
aggaagauggcaut

SEQ ID NO: 6579 - DNA, 13 bp, Artificial Sequence
  source: /note="Description of Artificial Sequence: Synthetic oligonucleotide"
  source: /note="Description of Combined DNA/RNA Molecule: Synthetic oligonucleotide"
  source: /note="DNA/RNA"
  modified_base (1)..(1): bicyclic nucleic acid (BNA)
  modified_base (13)..(13): bicyclic nucleic acid (BNA)
aggaagauggcat

SEQ ID NO: 6580 - RNA, 12 nt, Artificial Sequence
  source: /note="Description of Artificial Sequence: Synthetic oligonucleotide"
  source: /note="RNA"
  modified_base (1)..(1): bicyclic nucleic acid (BNA)
  modified_base (12)..(12): bicyclic nucleic acid (BNA)
aggaagauggca

SEQ ID NO: 6581 - RNA, 10 nt, Artificial Sequence
  source: /note="Description of Artificial Sequence: Synthetic oligonucleotide"
  source: /note="RNA"
  modified_base (1)..(1): bicyclic nucleic acid (BNA)
  modified_base (10)..(10): bicyclic nucleic acid (BNA)
aggaagaugg

SEQ ID NO: 6582 - RNA, 9 nt, Artificial Sequence
  source: /note="Description of Artificial Sequence: Synthetic oligonucleotide"
  source: /note="RNA"
  modified_base (1)..(1): bicyclic nucleic acid (BNA)
  modified_base (9)..(9): bicyclic nucleic acid (BNA)
aggaagaug

SEQ ID NO: 6583 - DNA, 8 bp, Artificial Sequence
  source: /note="Description of Artificial Sequence: Synthetic oligonucleotide"
  source: /note="DNA/RNA"
  modified_base (1)..(1): bicyclic nucleic acid (BNA)
  modified_base (8)..(8): bicyclic nucleic acid (BNA)
aggaagat

SEQ ID NO: 6584 - RNA, 18 nt, Artificial Sequence
  source: /note="Description of Artificial Sequence: Synthetic oligonucleotide"
  source: /note="RNA"
  modified_base (1)..(1): bicyclic nucleic acid (BNA)
  modified_base (18)..(18): bicyclic nucleic acid (BNA)
ggaagauggcauuucuag

SEQ ID NO: 6585 - RNA, 17 nt, Artificial Sequence
  source: /note="Description of Artificial Sequence: Synthetic oligonucleotide"
  source: /note="RNA"
  modified_base (1)..(1): bicyclic nucleic acid (BNA)
  modified_base (17)..(17): bicyclic nucleic acid (BNA)
ggaagauggcauuucua

SEQ ID NO: 6586 - DNA, 16 bp, Artificial Sequence
  source: /note="Description of Artificial Sequence: Synthetic oligonucleotide"
  source: /note="Description of Combined DNA/RNA Molecule: Synthetic oligonucleotide"
  source: /note="DNA/RNA"
  modified_base (1)..(1): bicyclic nucleic acid (BNA)
  modified_base (16)..(16): bicyclic nucleic acid (BNA)
ggaagauggcauuuct

SEQ ID NO: 6587 - RNA, 15 nt, Artificial Sequence
  source: /note="Description of Artificial Sequence: Synthetic oligonucleotide"
  source: /note="RNA"
  modified_base (1)..(1): bicyclic nucleic acid (BNA)
  modified_base (15)..(15): bicyclic nucleic acid (BNA)
ggaagauggcauuuc

SEQ ID NO: 6588 - DNA, 14 bp, Artificial Sequence
  source: /note="Description of Artificial Sequence: Synthetic oligonucleotide"
  source: /note="Description of Combined DNA/RNA Molecule: Synthetic oligonucleotide"
  source: /note="DNA/RNA"
  modified_base (1)..(1): bicyclic nucleic acid (BNA)
  modified_base (14)..(14): bicyclic nucleic acid (BNA)
ggaagauggcauut

SEQ ID NO: 6589 - DNA, 13 bp, Artificial Sequence
  source: /note="Description of Artificial Sequence: Synthetic oligonucleotide"
  source: /note="Description of Combined DNA/RNA Molecule: Synthetic oligonucleotide"
  source: /note="DNA/RNA"
  modified_base (1)..(1): bicyclic nucleic acid (BNA)
  modified_base (13)..(13): bicyclic nucleic acid (BNA)
ggaagauggcaut

SEQ ID NO: 6590 - DNA, 12 bp, Artificial Sequence
  source: /note="Description of Artificial Sequence: Synthetic oligonucleotide"
  source: /note="Description of Combined DNA/RNA Molecule: Synthetic oligonucleotide"
  source: /note="DNA/RNA"
  modified_base (1)..(1): bicyclic nucleic acid (BNA)
  modified_base (12)..(12): bicyclic nucleic acid (BNA)
ggaagauggcat

SEQ ID NO: 6591 - RNA, 11 nt, Artificial Sequence
  source: /note="Description of Artificial Sequence: Synthetic oligonucleotide"
  source: /note="RNA"
  modified_base (1)..(1): bicyclic nucleic acid (BNA)
  modified_base (11)..(11): bicyclic nucleic acid (BNA)
ggaagauggca

SEQ ID NO: 6592 - RNA, 10 nt, Artificial Sequence
  source: /note="Description of Artificial Sequence: Synthetic oligonucleotide"
  source: /note="RNA"
  modified_base (1)..(1): bicyclic nucleic acid (BNA)
  modified_base (10)..(10): bicyclic nucleic acid (BNA)
ggaagauggc

SEQ ID NO: 6593 - RNA, 8 nt, Artificial Sequence
  source: /note="Description of Artificial Sequence: Synthetic oligonucleotide"
  source: /note="RNA"
  modified_base (1)..(1): bicyclic nucleic acid (BNA)
  modified_base (8)..(8): bicyclic nucleic acid (BNA)
ggaagaug

SEQ ID NO: 6594 - RNA, 17 nt, Artificial Sequence
  source: /note="Description of Artificial Sequence: Synthetic oligonucleotide"
  source: /note="RNA"
  modified_base (1)..(1): bicyclic nucleic acid (BNA)
  modified_base (17)..(17): bicyclic nucleic acid (BNA)
gaagauggcauuucuag

SEQ ID NO: 6595 - RNA, 16 nt, Artificial Sequence
  source: /note="Description of Artificial Sequence: Synthetic oligonucleotide"
  source: /note="RNA"
  modified_base (1)..(1): bicyclic nucleic acid (BNA)
  modified_base (16)..(16): bicyclic nucleic acid (BNA)
gaagauggcauuucua

SEQ ID NO: 6596 - RNA, 14 nt, Artificial Sequence
  source: /note="Description of Artificial Sequence: Synthetic oligonucleotide"
  source: /note="RNA"
  modified_base (1)..(1): bicyclic nucleic acid (BNA)
  modified_base (14)..(14): bicyclic nucleic acid (BNA)
gaagauggcauuuc

SEQ ID NO: 6597 - DNA, 13 bp, Artificial Sequence
  source: /note="Description of Artificial Sequence: Synthetic oligonucleotide"
  source: /note="Description of Combined DNA/RNA Molecule: Synthetic oligonucleotide"
  source: /note="DNA/RNA"
  modified_base (1)..(1): bicyclic nucleic acid (BNA)
  modified_base (13)..(13): bicyclic nucleic acid (BNA)
gaagauggcauut

SEQ ID NO: 6598 - DNA, 12 bp, Artificial Sequence
  source: /note="Description of Artificial Sequence: Synthetic oligonucleotide"
  source: /note="Description of Combined DNA/RNA Molecule: Synthetic oligonucleotide"
  source: /note="DNA/RNA"
  modified_base (1)..(1): bicyclic nucleic acid (BNA)
  modified_base (12)..(12): bicyclic nucleic acid (BNA)
gaagauggcaut

SEQ ID NO: 6599 - DNA, 11 bp, Artificial Sequence
  source: /note="Description of Artificial Sequence: Synthetic oligonucleotide"
  source: /note="Description of Combined DNA/RNA Molecule: Synthetic oligonucleotide"
  source: /note="DNA/RNA"
  modified_base (1)..(1): bicyclic nucleic acid (BNA)
  modified_base (11)..(11): bicyclic nucleic acid (BNA)
gaagauggcat

SEQ ID NO: 6600 - RNA, 10 nt, Artificial Sequence
  source: /note="Description of Artificial Sequence: Synthetic oligonucleotide"
  source: /note="RNA"
  modified_base (1)..(1): bicyclic nucleic acid (BNA)
  modified_base (10)..(10): bicyclic nucleic acid (BNA)
gaagauggca

SEQ ID NO: 6601 - RNA, 9 nt, Artificial Sequence
  source: /note="Description of Artificial Sequence: Synthetic oligonucleotide"
  source: /note="RNA"
  modified_base (1)..(1): bicyclic nucleic acid (BNA)
  modified_base (9)..(9): bicyclic nucleic acid (BNA)
gaagauggc

SEQ ID NO: 6602 - RNA, 8 nt, Artificial Sequence
  source: /note="Description of Artificial Sequence: Synthetic oligonucleotide"
  source: /note="RNA"
  modified_base (1)..(1): bicyclic nucleic acid (BNA)
  modified_base (8)..(8): bicyclic nucleic acid (BNA)
gaagaugg

SEQ ID NO: 6603 - RNA, 16 nt, Artificial Sequence
  source: /note="Description of Artificial Sequence: Synthetic oligonucleotide"
  source: /note="RNA"
  modified_base (1)..(1): bicyclic nucleic acid (BNA)
  modified_base (16)..(16): bicyclic nucleic acid (BNA)
aagauggcauuucuag

SEQ ID NO: 6604 - RNA, 15 nt, Artificial Sequence
  source: /note="Description of Artificial Sequence: Synthetic oligonucleotide"
  source: /note="RNA"
  modified_base (1)..(1): bicyclic nucleic acid (BNA)
  modified_base (15)..(15): bicyclic nucleic acid (BNA)
aagauggcauuucua

SEQ ID NO: 6605 - DNA, 14 bp, Artificial Sequence
  source: /note="Description of Artificial Sequence: Synthetic oligonucleotide"
  source: /note="Description of Combined DNA/RNA Molecule: Synthetic oligonucleotide"
  source: /note="DNA/RNA"
  modified_base (1)..(1): bicyclic nucleic acid (BNA)
  modified_base (14)..(14): bicyclic nucleic acid (BNA)
aagauggcauuuct

SEQ ID NO: 6606 - RNA, 13 nt, Artificial Sequence
  source: /note="Description of Artificial Sequence: Synthetic oligonucleotide"
  source: /note="RNA"
  modified_base (1)..(1): bicyclic nucleic acid (BNA)
  modified_base (13)..(13): bicyclic nucleic acid (BNA)
aagauggcauuuc

SEQ ID NO: 6607 - DNA, 12 bp, Artificial Sequence
  source: /note="Description of Artificial Sequence: Synthetic oligonucleotide"
  source: /note="Description of Combined DNA/RNA Molecule: Synthetic oligonucleotide"
  source: /note="DNA/RNA"
  modified_base (1)..(1): bicyclic nucleic acid (BNA)
  modified_base (12)..(12): bicyclic nucleic acid (BNA)
aagauggcauut

SEQ ID NO: 6608 - DNA, 11 bp, Artificial Sequence
  source: /note="Description of Artificial Sequence: Synthetic oligonucleotide"
  source: /note="Description of Combined DNA/RNA Molecule: Synthetic oligonucleotide"
  source: /note="DNA/RNA"
  modified_base (1)..(1): bicyclic nucleic acid (BNA)
  modified_base (11)..(11): bicyclic nucleic acid (BNA)
aagauggcaut

SEQ ID NO: 6609 - DNA, 10 bp, Artificial Sequence
  source: /note="Description of Artificial Sequence: Synthetic oligonucleotide"
  source: /note="Description of Combined DNA/RNA Molecule: Synthetic oligonucleotide"
  source: /note="DNA/RNA"
  modified_base (1)..(1): bicyclic nucleic acid (BNA)
  modified_base (10)..(10): bicyclic nucleic acid (BNA)
aagauggcat

SEQ ID NO: 6610 - RNA, 9 nt, Artificial Sequence
  source: /note="Description of Artificial Sequence: Synthetic oligonucleotide"
  source: /note="RNA"
  modified_base (1)..(1): bicyclic nucleic acid (BNA)
  modified_base (9)..(9): bicyclic nucleic acid (BNA)
aagauggca

SEQ ID NO: 6611 - RNA, 8 nt, Artificial Sequence
  source: /note="Description of Artificial Sequence: Synthetic oligonucleotide"
  source: /note="RNA"
  modified_base (1)..(1): bicyclic nucleic acid (BNA)
  modified_base (8)..(8): bicyclic nucleic acid (BNA)
aagauggc

SEQ ID NO: 6612 - RNA, 15 nt, Artificial Sequence
  source: /note="Description of Artificial Sequence: Synthetic oligonucleotide"
  source: /note="RNA"
  modified_base (1)..(1): bicyclic nucleic acid (BNA)
  modified_base (15)..(15): bicyclic nucleic acid (BNA)
agauggcauuucuag

SEQ ID NO: 6613 - RNA, 14 nt, Artificial Sequence
  source: /note="Description of Artificial Sequence: Synthetic oligonucleotide"
  source: /note="RNA"
  modified_base (1)..(1): bicyclic nucleic acid (BNA)
  modified_base (14)..(14): bicyclic nucleic acid (BNA)
agauggcauuucua

SEQ ID NO: 6614 - DNA, 13 bp, Artificial Sequence
  source: /note="Description of Artificial Sequence: Synthetic oligonucleotide"
  source: /note="Description of Combined DNA/RNA Molecule: Synthetic oligonucleotide"
  source: /note="DNA/RNA"
  modified_base (1)..(1): bicyclic nucleic acid (BNA)
  modified_base (13)..(13): bicyclic nucleic acid (BNA)
agauggcauuuct

SEQ ID NO: 6615 - RNA, 12 nt, Artificial Sequence
  source: /note="Description of Artificial Sequence: Synthetic oligonucleotide"
  source: /note="RNA"
  modified_base (1)..(1): bicyclic nucleic acid (BNA)
  modified_base (12)..(12): bicyclic nucleic acid (BNA)
agauggcauuuc

SEQ ID NO: 6616 - DNA, 11 bp, Artificial Sequence
  source: /note="Description of Artificial Sequence: Synthetic oligonucleotide"
  source: /note="Description of Combined DNA/RNA Molecule: Synthetic oligonucleotide"
  source: /note="DNA/RNA"
  modified_base (1)..(1): bicyclic nucleic acid (BNA)
  modified_base (11)..(11): bicyclic nucleic acid (BNA)
agauggcauut

SEQ ID NO: 6617 - DNA, 10 bp, Artificial Sequence
  source: /note="Description of Artificial Sequence: Synthetic oligonucleotide"
  source: /note="Description of Combined DNA/RNA Molecule: Synthetic oligonucleotide"
  source: /note="DNA/RNA"
  modified_base (1)..(1): bicyclic nucleic acid (BNA)
  modified_base (10)..(10): bicyclic nucleic acid (BNA)
agauggcaut

SEQ ID NO: 6618 - DNA, 9 bp, Artificial Sequence
  source: /note="Description of Artificial Sequence: Synthetic oligonucleotide"
  source: /note="Description of Combined DNA/RNA Molecule: Synthetic oligonucleotide"
  source: /note="DNA/RNA"
  modified_base (1)..(1): bicyclic nucleic acid (BNA)
  modified_base (9)..(9): bicyclic nucleic acid (BNA)
agauggcat

SEQ ID NO: 6619 - RNA, 8 nt, Artificial Sequence
  source: /note="Description of Artificial Sequence: Synthetic oligonucleotide"
  source: /note="RNA"
  modified_base (1)..(1): bicyclic nucleic acid (BNA)
  modified_base (8)..(8): bicyclic nucleic acid (BNA)
agauggca

SEQ ID NO: 6620 - RNA, 30 nt, Artificial Sequence; identical to SEQ ID NO: 284
  source: /note="Description of Artificial Sequence: Synthetic oligonucleotide"
  source: /note="RNA"
  modified_base (1)..(1): bicyclic nucleic acid (BNA)
  modified_base (30)..(30): bicyclic nucleic acid (BNA)

SEQ ID NO: 6621 - RNA, 29 nt, Artificial Sequence
  source: /note="Description of Artificial Sequence: Synthetic oligonucleotide"
  source: /note="RNA"
  modified_base (1)..(1): bicyclic nucleic acid (BNA)
  modified_base (29)..(29): bicyclic nucleic acid (BNA)
cuccaacaucaaggaagauggcauuucua

SEQ ID NO: 6622 - DNA, 28 bp, Artificial Sequence
  source: /note="Description of Artificial Sequence: Synthetic oligonucleotide"
  source: /note="Description of Combined DNA/RNA Molecule: Synthetic oligonucleotide"
  source: /note="DNA/RNA"
  modified_base (1)..(1): bicyclic nucleic acid (BNA)
  modified_base (28)..(28): bicyclic nucleic acid (BNA)
cuccaacaucaaggaagauggcauuuct

SEQ ID NO: 6623 - RNA, 27 nt, Artificial Sequence
  source: /note="Description of Artificial Sequence: Synthetic oligonucleotide"
  source: /note="RNA"
  modified_base (1)..(1): bicyclic nucleic acid (BNA)
  modified_base (27)..(27): bicyclic nucleic acid (BNA)
cuccaacaucaaggaagauggcauuuc

SEQ ID NO: 6624 - DNA, 26 bp, Artificial Sequence
  source: /note="Description of Artificial Sequence: Synthetic oligonucleotide"
  source: /note="Description of Combined DNA/RNA Molecule: Synthetic oligonucleotide"
  source: /note="DNA/RNA"
  modified_base (1)..(1): bicyclic nucleic acid (BNA)
  modified_base (26)..(26): bicyclic nucleic acid (BNA)
cuccaacaucaaggaagauggcauut

SEQ ID NO: 6625 - DNA, 25 bp, Artificial Sequence
  source: /note="Description of Artificial Sequence: Synthetic oligonucleotide"
  source: /note="Description of Combined DNA/RNA Molecule: Synthetic oligonucleotide"
  source: /note="DNA/RNA"
  modified_base (1)..(1): bicyclic nucleic acid (BNA)
  modified_base (25)..(25): bicyclic nucleic acid (BNA)
cuccaacaucaaggaagauggcaut

SEQ ID NO: 6626 - DNA, 24 bp, Artificial Sequence
  source: /note="Description of Artificial Sequence: Synthetic oligonucleotide"
  source: /note="Description of Combined DNA/RNA Molecule: Synthetic oligonucleotide"
  source: /note="DNA/RNA"
  modified_base (1)..(1): bicyclic nucleic acid (BNA)
  modified_base (24)..(24): bicyclic nucleic acid (BNA)
cuccaacaucaaggaagauggcat

SEQ ID NO: 6627 - RNA, 23 nt, Artificial Sequence
  source: /note="Description of Artificial Sequence: Synthetic oligonucleotide"
  source: /note="RNA"
  modified_base (1)..(1): bicyclic nucleic acid (BNA)
  modified_base (23)..(23): bicyclic nucleic acid (BNA)
cuccaacaucaaggaagauggca

SEQ ID NO: 6628 - RNA, 22 nt, Artificial Sequence
  source: /note="Description of Artificial Sequence: Synthetic oligonucleotide"
  source: /note="RNA"
  modified_base (1)..(1): bicyclic nucleic acid (BNA)
  modified_base (22)..(22): bicyclic nucleic acid (BNA)
cuccaacaucaaggaagauggc

SEQ ID NO: 6629 - RNA, 21 nt, Artificial Sequence
  source: /note="Description of Artificial Sequence: Synthetic oligonucleotide"
  source: /note="RNA"
  modified_base (1)..(1): bicyclic nucleic acid (BNA)
  modified_base (21)..(21): bicyclic nucleic acid (BNA)
cuccaacaucaaggaagaugg

SEQ ID NO: 6630 - RNA, 20 nt, Artificial Sequence
  source: /note="Description of Artificial Sequence: Synthetic oligonucleotide"
  source: /note="RNA"
  modified_base (1)..(1): bicyclic nucleic acid (BNA)
  modified_base (20)..(20): bicyclic nucleic acid (BNA)
cuccaacaucaaggaagaug

SEQ ID NO: 6631 - DNA, 19 bp, Artificial Sequence
  source: /note="Description of Artificial Sequence: Synthetic oligonucleotide"
  source: /note="Description of Combined DNA/RNA Molecule: Synthetic oligonucleotide"
  source: /note="DNA/RNA"
  modified_base (1)..(1): bicyclic nucleic acid (BNA)
  modified_base (19)..(19): bicyclic nucleic acid (BNA)
cuccaacaucaaggaagat

SEQ ID NO: 6632 - RNA, 18 nt, Artificial Sequence
  source: /note="Description of Artificial Sequence: Synthetic oligonucleotide"
  source: /note="RNA"
  modified_base (1)..(1): bicyclic nucleic acid (BNA)
  modified_base (18)..(18): bicyclic nucleic acid (BNA)
cuccaacaucaaggaaga

SEQ ID NO: 6633 - RNA, 17 nt, Artificial Sequence
  source: /note="Description of Artificial Sequence: Synthetic oligonucleotide"
  source: /note="RNA"
  modified_base (1)..(1): bicyclic nucleic acid (BNA)
  modified_base (17)..(17): bicyclic nucleic acid (BNA)
cuccaacaucaaggaag

SEQ ID NO: 6634 - DNA, 29 bp, Artificial Sequence
  source: /note="Description of Artificial Sequence: Synthetic oligonucleotide"
  source: /note="Description of Combined DNA/RNA Molecule: Synthetic oligonucleotide"
  source: /note="DNA/RNA"
  modified_base (1)..(1): bicyclic nucleic acid (BNA)
  modified_base (29)..(29): bicyclic nucleic acid (BNA)
tccaacaucaaggaagauggcauuucuag

SEQ ID NO: 6635 - DNA, 28 bp, Artificial Sequence
  source: /note="Description of Artificial Sequence: Synthetic oligonucleotide"
  source: /note="Description of Combined DNA/RNA Molecule: Synthetic oligonucleotide"
  source: /note="DNA/RNA"
  modified_base (1)..(1): bicyclic nucleic acid (BNA)
  modified_base (28)..(28): bicyclic nucleic acid (BNA)
tccaacaucaaggaagauggcauuucua

SEQ ID NO: 6636 - DNA, 27 bp, Artificial Sequence
  source: /note="Description of Artificial Sequence: Synthetic oligonucleotide"
  source: /note="Description of Combined DNA/RNA Molecule: Synthetic oligonucleotide"
  source: /note="DNA/RNA"
  modified_base (1)..(1): bicyclic nucleic acid (BNA)
  modified_base (27)..(27): bicyclic nucleic acid (BNA)
tccaacaucaaggaagauggcauuuct

SEQ ID NO: 6637 - DNA, 26 bp, Artificial Sequence
  source: /note="Description of Artificial Sequence: Synthetic oligonucleotide"
  source: /note="Description of Combined DNA/RNA Molecule: Synthetic oligonucleotide"
  source: /note="DNA/RNA"
  modified_base (1)..(1): bicyclic nucleic acid (BNA)
  modified_base (26)..(26): bicyclic nucleic acid (BNA)
tccaacaucaaggaagauggcauuuc

SEQ ID NO: 6638 - DNA, 25 bp, Artificial Sequence
  source: /note="Description of Artificial Sequence: Synthetic oligonucleotide"
  source: /note="Description of Combined DNA/RNA Molecule: Synthetic oligonucleotide"
  source: /note="DNA/RNA"
  modified_base (1)..(1): bicyclic nucleic acid (BNA)
  modified_base (25)..(25): bicyclic nucleic acid (BNA)
tccaacaucaaggaagauggcauut

SEQ ID NO: 6639 - DNA, 24 bp, Artificial Sequence
  source: /note="Description of Artificial Sequence: Synthetic oligonucleotide"
  source: /note="Description of Combined DNA/RNA Molecule: Synthetic oligonucleotide"
  source: /note="DNA/RNA"
  modified_base (1)..(1): bicyclic nucleic acid (BNA)
  modified_base (24)..(24): bicyclic nucleic acid (BNA)
tccaacaucaaggaagauggcaut

SEQ ID NO: 6640 - DNA, 23 bp, Artificial Sequence
  source: /note="Description of Artificial Sequence: Synthetic oligonucleotide"
  source: /note="Description of Combined DNA/RNA Molecule: Synthetic oligonucleotide"
  source: /note="DNA/RNA"
  modified_base (1)..(1): bicyclic nucleic acid (BNA)
  modified_base (23)..(23): bicyclic nucleic acid (BNA)
tccaacaucaaggaagauggcat

SEQ ID NO: 6641 - DNA, 22 bp, Artificial Sequence
  source: /note="Description of Artificial Sequence: Synthetic oligonucleotide"
  source: /note="Description of Combined DNA/RNA Molecule: Synthetic oligonucleotide"
  source: /note="DNA/RNA"
  modified_base (1)..(1): bicyclic nucleic acid (BNA)
  modified_base (22)..(22): bicyclic nucleic acid (BNA)
tccaacaucaaggaagauggca

SEQ ID NO: 6642 - DNA, 21 bp, Artificial Sequence
  source: /note="Description of Artificial Sequence: Synthetic oligonucleotide"
  source: /note="Description of Combined DNA/RNA Molecule: Synthetic oligonucleotide"
  source: /note="DNA/RNA"
  modified_base (1)..(1): bicyclic nucleic acid (BNA)
  modified_base (21)..(21): bicyclic nucleic acid (BNA)
tccaacaucaaggaagauggc

SEQ ID NO: 6643 - DNA, 20 bp, Artificial Sequence
  source: /note="Description of Artificial Sequence: Synthetic oligonucleotide"
  source: /note="Description of Combined DNA/RNA Molecule: Synthetic oligonucleotide"
  source: /note="DNA/RNA"
  modified_base (1)..(1): bicyclic nucleic acid (BNA)
  modified_base (20)..(20): bicyclic nucleic acid (BNA)
tccaacaucaaggaagaugg

SEQ ID NO: 6644 - DNA, 19 bp, Artificial Sequence
  source: /note="Description of Artificial Sequence: Synthetic oligonucleotide"
  source: /note="Description of Combined DNA/RNA Molecule: Synthetic oligonucleotide"
  source: /note="DNA/RNA"
  modified_base (1)..(1): bicyclic nucleic acid (BNA)
  modified_base (19)..(19): bicyclic nucleic acid (BNA)
tccaacaucaaggaagaug

SEQ ID NO: 6645 - DNA, 18 bp, Artificial Sequence
  source: /note="Description of Artificial Sequence: Synthetic oligonucleotide"
  source: /note="Description of Combined DNA/RNA Molecule: Synthetic oligonucleotide"
  source: /note="DNA/RNA"
  modified_base (1)..(1): bicyclic nucleic acid (BNA)
  modified_base (18)..(18): bicyclic nucleic acid (BNA)
tccaacaucaaggaagat

SEQ ID NO: 6646 - DNA, 17 bp, Artificial Sequence
  source: /note="Description of Artificial Sequence: Synthetic oligonucleotide"
  source: /note="Description of Combined DNA/RNA Molecule: Synthetic oligonucleotide"
  source: /note="DNA/RNA"
  modified_base (1)..(1): bicyclic nucleic acid (BNA)
  modified_base (17)..(17): bicyclic nucleic acid (BNA)
tccaacaucaaggaaga

SEQ ID NO: 6647 - DNA, 16 bp, Artificial Sequence
  source: /note="Description of Artificial Sequence: Synthetic oligonucleotide"
  source: /note="Description of Combined DNA/RNA Molecule: Synthetic oligonucleotide"
  source: /note="DNA/RNA"
  modified_base (1)..(1): bicyclic nucleic acid (BNA)
  modified_base (16)..(16): bicyclic nucleic acid (BNA)
tccaacaucaaggaag

SEQ ID NO: 6648 - RNA, 28 nt, Artificial Sequence
  source: /note="Description of Artificial Sequence: Synthetic oligonucleotide"
  source: /note="RNA"
  modified_base (1)..(1): bicyclic nucleic acid (BNA)
  modified_base (28)..(28): bicyclic nucleic acid (BNA)
ccaacaucaaggaagauggcauuucuag

SEQ ID NO: 6649 - RNA, 27 nt, Artificial Sequence
  source: /note="Description of Artificial Sequence: Synthetic oligonucleotide"
  source: /note="RNA"
  modified_base (1)..(1): bicyclic nucleic acid (BNA)
  modified_base (27)..(27): bicyclic nucleic acid (BNA)
ccaacaucaaggaagauggcauuucua

SEQ ID NO: 6650 - DNA, 26 bp, Artificial Sequence
  source: /note="Description of Artificial Sequence: Synthetic oligonucleotide"
  source: /note="Description of Combined DNA/RNA Molecule: Synthetic oligonucleotide"
  source: /note="DNA/RNA"
  modified_base (1)..(1): bicyclic nucleic acid (BNA)
  modified_base (26)..(26): bicyclic nucleic acid (BNA)
ccaacaucaaggaagauggcauuuct

SEQ ID NO: 6651 - RNA, 25 nt, Artificial Sequence
  source: /note="Description of Artificial Sequence: Synthetic oligonucleotide"
  source: /note="RNA"
  modified_base (1)..(1): bicyclic nucleic acid (BNA)
  modified_base (25)..(25): bicyclic nucleic acid (BNA)
ccaacaucaaggaagauggcauuuc

SEQ ID NO: 6652 - DNA, 24 bp, Artificial Sequence
  source: /note="Description of Artificial Sequence: Synthetic oligonucleotide"
  source: /note="Description of Combined DNA/RNA Molecule: Synthetic oligonucleotide"
  source: /note="DNA/RNA"
  modified_base (1)..(1): bicyclic nucleic acid (BNA)
  modified_base (24)..(24): bicyclic nucleic acid (BNA)
ccaacaucaaggaagauggcauut

SEQ ID NO: 6653 - DNA, 23 bp, Artificial Sequence
  source: /note="Description of Artificial Sequence: Synthetic oligonucleotide"
  source: /note="Description of Combined DNA/RNA Molecule: Synthetic oligonucleotide"
  source: /note="DNA/RNA"
  modified_base (1)..(1): bicyclic nucleic acid (BNA)
  modified_base (23)..(23): bicyclic nucleic acid (BNA)
ccaacaucaaggaagauggcaut

SEQ ID NO: 6654 - DNA, 22 bp, Artificial Sequence
  source: /note="Description of Artificial Sequence: Synthetic oligonucleotide"
  source: /note="Description of Combined DNA/RNA Molecule: Synthetic oligonucleotide"
  source: /note="DNA/RNA"
  modified_base (1)..(1): bicyclic nucleic acid (BNA)
  modified_base (22)..(22): bicyclic nucleic acid (BNA)
ccaacaucaaggaagauggcat

SEQ ID NO: 6655 - RNA, 21 nt, Artificial Sequence
  source: /note="Description of Artificial Sequence: Synthetic oligonucleotide"
  source: /note="RNA"
  modified_base (1)..(1): bicyclic nucleic acid (BNA)
  modified_base (21)..(21): bicyclic nucleic acid (BNA)
ccaacaucaaggaagauggca

SEQ ID NO: 6656 - RNA, 20 nt, Artificial Sequence
  source: /note="Description of Artificial Sequence: Synthetic oligonucleotide"
  source: /note="RNA"
  modified_base (1)..(1): bicyclic nucleic acid (BNA)
  modified_base (20)..(20): bicyclic nucleic acid (BNA)
ccaacaucaaggaagauggc

SEQ ID NO: 6657 - RNA, 19 nt, Artificial Sequence
  source: /note="Description of Artificial Sequence: Synthetic oligonucleotide"
  source: /note="RNA"
  modified_base (1)..(1): bicyclic nucleic acid (BNA)
  modified_base (19)..(19): bicyclic nucleic acid (BNA)
ccaacaucaaggaagaugg

SEQ ID NO: 6658 - RNA, 18 nt, Artificial Sequence
  source: /note="Description of Artificial Sequence: Synthetic oligonucleotide"
  source: /note="RNA"
  modified_base (1)..(1): bicyclic nucleic acid (BNA)
  modified_base (18)..(18): bicyclic nucleic acid (BNA)
ccaacaucaaggaagaug

SEQ ID NO: 6659 - DNA, 17 bp, Artificial Sequence
  source: /note="Description of Artificial Sequence: Synthetic oligonucleotide"
  source: /note="Description of Combined DNA/RNA Molecule: Synthetic oligonucleotide"
  source: /note="DNA/RNA"
  modified_base (1)..(1): bicyclic nucleic acid (BNA)
  modified_base (17)..(17): bicyclic nucleic acid (BNA)
ccaacaucaaggaagat

SEQ ID NO: 6660 - RNA, 16 nt, Artificial Sequence
  source: /note="Description of Artificial Sequence: Synthetic oligonucleotide"
  source: /note="RNA"
  modified_base (1)..(1): bicyclic nucleic acid (BNA)
  modified_base (16)..(16): bicyclic nucleic acid (BNA)
ccaacaucaaggaaga

SEQ ID NO: 6661 - RNA, 15 nt, Artificial Sequence
  source: /note="Description of Artificial Sequence: Synthetic oligonucleotide"
  source: /note="RNA"
  modified_base (1)..(1): bicyclic nucleic acid (BNA)
  modified_base (15)..(15): bicyclic nucleic acid (BNA)
ccaacaucaaggaag

SEQ ID NO: 6662 - RNA, 27 nt, Artificial Sequence
  source: /note="Description of Artificial Sequence: Synthetic oligonucleotide"
  source: /note="RNA"
  modified_base (1)..(1): bicyclic nucleic acid (BNA)
  modified_base (27)..(27): bicyclic nucleic acid (BNA)
caacaucaaggaagauggcauuucuag

SEQ ID NO: 6663 - RNA, 26 nt, Artificial Sequence
  source: /note="Description of Artificial Sequence: Synthetic oligonucleotide"
  source: /note="RNA"
  modified_base (1)..(1): bicyclic nucleic acid (BNA)
  modified_base (26)..(26): bicyclic nucleic acid (BNA)
caacaucaaggaagauggcauuucua

SEQ ID NO: 6664 - DNA, 25 bp, Artificial Sequence
  source: /note="Description of Artificial Sequence: Synthetic oligonucleotide"
  source: /note="Description of Combined DNA/RNA Molecule: Synthetic oligonucleotide"
  source: /note="DNA/RNA"
  modified_base (1)..(1): bicyclic nucleic acid (BNA)
  modified_base (25)..(25): bicyclic nucleic acid (BNA)
caacaucaaggaagauggcauuuct

SEQ ID NO: 6665 - RNA, 24 nt, Artificial Sequence
  source: /note="Description of Artificial Sequence: Synthetic oligonucleotide"
  source: /note="RNA"
  modified_base (1)..(1): bicyclic nucleic acid (BNA)
  modified_base (24)..(24): bicyclic nucleic acid (BNA)
caacaucaaggaagauggcauuuc

SEQ ID NO: 6666 - DNA, 23 bp, Artificial Sequence
  source: /note="Description of Artificial Sequence: Synthetic oligonucleotide"
  source: /note="Description of Combined DNA/RNA Molecule: Synthetic oligonucleotide"
  source: /note="DNA/RNA"
  modified_base (1)..(1): bicyclic nucleic acid (BNA)
  modified_base (23)..(23): bicyclic nucleic acid (BNA)
caacaucaaggaagauggcauut

SEQ ID NO: 6667 - DNA, 22 bp, Artificial Sequence
  source: /note="Description of Artificial Sequence: Synthetic oligonucleotide"
  source: /note="Description of Combined DNA/RNA Molecule: Synthetic oligonucleotide"
  source: /note="DNA/RNA"
  modified_base (1)..(1): bicyclic nucleic acid (BNA)
  modified_base (22)..(22): bicyclic nucleic acid (BNA)
caacaucaaggaagauggcaut

SEQ ID NO: 6668 - DNA, 21 bp, Artificial Sequence
  source: /note="Description of Artificial Sequence: Synthetic oligonucleotide"
  source: /note="Description of Combined DNA/RNA Molecule: Synthetic oligonucleotide"
  source: /note="DNA/RNA"
  modified_base (1)..(1): bicyclic nucleic acid (BNA)
  modified_base (21)..(21): bicyclic nucleic acid (BNA)
caacaucaaggaagauggcat

SEQ ID NO: 6669 - RNA, 20 nt, Artificial Sequence
  source: /note="Description of Artificial Sequence: Synthetic oligonucleotide"
  source: /note="RNA"
  modified_base (1)..(1): bicyclic nucleic acid (BNA)
  modified_base (20)..(20): bicyclic nucleic acid (BNA)
caacaucaaggaagauggca

SEQ ID NO: 6670 - RNA, 19 nt, Artificial Sequence
  source: /note="Description of Artificial Sequence: Synthetic oligonucleotide"
  source: /note="RNA"
  modified_base (1)..(1): bicyclic nucleic acid (BNA)
  modified_base (19)..(19): bicyclic nucleic acid (BNA)
caacaucaaggaagauggc

SEQ ID NO: 6671 - RNA, 18 nt, Artificial Sequence
  source: /note="Description of Artificial Sequence: Synthetic oligonucleotide"
  source: /note="RNA"
  modified_base (1)..(1): bicyclic nucleic acid (BNA)
  modified_base (18)..(18): bicyclic nucleic acid (BNA)
caacaucaaggaagaugg

SEQ ID NO: 6672 - RNA, 17 nt, Artificial Sequence
  source: /note="Description of Artificial Sequence: Synthetic oligonucleotide"
  source: /note="RNA"
  modified_base (1)..(1): bicyclic nucleic acid (BNA)
  modified_base (17)..(17): bicyclic nucleic acid (BNA)
caacaucaaggaagaug

SEQ ID NO: 6673 - DNA, 16 bp, Artificial Sequence
  source: /note="Description of Artificial Sequence: Synthetic oligonucleotide"
  source: /note="Description of Combined DNA/RNA Molecule: Synthetic oligonucleotide"
  source: /note="DNA/RNA"
  modified_base (1)..(1): bicyclic nucleic acid (BNA)
  modified_base (16)..(16): bicyclic nucleic acid (BNA)
caacaucaaggaagat

SEQ ID NO: 6674 - RNA, 15 nt, Artificial Sequence
  source: /note="Description of Artificial Sequence: Synthetic oligonucleotide"
  source: /note="RNA"
  modified_base (1)..(1): bicyclic nucleic acid (BNA)
  modified_base (15)..(15): bicyclic nucleic acid (BNA)
caacaucaaggaaga

SEQ ID NO: 6675 - RNA, 14 nt, Artificial Sequence
  source: /note="Description of Artificial Sequence: Synthetic oligonucleotide"
  source: /note="RNA"
  modified_base (1)..(1): bicyclic nucleic acid (BNA)
  modified_base (14)..(14): bicyclic nucleic acid (BNA)
caacaucaaggaag

SEQ ID NO: 6676 - RNA, 26 nt, Artificial Sequence
  source: /note="Description of Artificial Sequence: Synthetic oligonucleotide"
  source: /note="RNA"
  modified_base (1)..(1): bicyclic nucleic acid (BNA)
  modified_base (26)..(26): bicyclic nucleic acid (BNA)
aacaucaaggaagauggcauuucuag

SEQ ID NO: 6677 - RNA, 25 nt, Artificial Sequence
  source: /note="Description of Artificial Sequence: Synthetic oligonucleotide"
  source: /note="RNA"
  modified_base (1)..(1): bicyclic nucleic acid (BNA)
  modified_base (25)..(25): bicyclic nucleic acid (BNA)
aacaucaaggaagauggcauuucua

SEQ ID NO: 6678 - DNA, 24 bp, Artificial Sequence
  source: /note="Description of Artificial Sequence: Synthetic oligonucleotide"
  source: /note="Description of Combined DNA/RNA Molecule: Synthetic oligonucleotide"
  source: /note="DNA/RNA"
  modified_base (1)..(1): bicyclic nucleic acid (BNA)
  modified_base (24)..(24): bicyclic nucleic acid (BNA)
aacaucaaggaagauggcauuuct

SEQ ID NO: 6679 - RNA, 23 nt, Artificial Sequence
  source: /note="Description of Artificial Sequence: Synthetic oligonucleotide"
  source: /note="RNA"
  modified_base (1)..(1): bicyclic nucleic acid (BNA)
  modified_base (23)..(23): bicyclic nucleic acid (BNA)
aacaucaaggaagauggcauuuc

SEQ ID NO: 6680 - DNA, 22 bp, Artificial Sequence
  source: /note="Description of Artificial Sequence: Synthetic oligonucleotide"
  source: /note="Description of Combined DNA/RNA Molecule: Synthetic oligonucleotide"
  source: /note="DNA/RNA"
  modified_base (1)..(1): bicyclic nucleic acid (BNA)
  modified_base (22)..(22): bicyclic nucleic acid (BNA)
aacaucaaggaagauggcauut

SEQ ID NO: 6681 - DNA, 21 bp, Artificial Sequence
  source: /note="Description of Artificial Sequence: Synthetic oligonucleotide"
  source: /note="Description of Combined DNA/RNA Molecule: Synthetic oligonucleotide"
  source: /note="DNA/RNA"
  modified_base (1)..(1): bicyclic nucleic acid (BNA)
  modified_base (21)..(21): bicyclic nucleic acid (BNA)
aacaucaaggaagauggcaut

SEQ ID NO: 6682 - DNA, 20 bp, Artificial Sequence
  source: /note="Description of Artificial Sequence: Synthetic oligonucleotide"
  source: /note="Description of Combined DNA/RNA Molecule: Synthetic oligonucleotide"
  source: /note="DNA/RNA"
  modified_base (1)..(1): bicyclic nucleic acid (BNA)
  modified_base (20)..(20): bicyclic nucleic acid (BNA)
aacaucaaggaagauggcat

SEQ ID NO: 6683 - RNA, 19 nt, Artificial Sequence
  source: /note="Description of Artificial Sequence: Synthetic oligonucleotide"
  source: /note="RNA"
  modified_base (1)..(1): bicyclic nucleic acid (BNA)
  modified_base (19)..(19): bicyclic nucleic acid (BNA)
aacaucaaggaagauggca

SEQ ID NO: 6684 - RNA, 18 nt, Artificial Sequence
  source: /note="Description of Artificial Sequence: Synthetic oligonucleotide"
  source: /note="RNA"
  modified_base (1)..(1): bicyclic nucleic acid (BNA)
  modified_base (18)..(18): bicyclic nucleic acid (BNA)
aacaucaaggaagauggc

SEQ ID NO: 6685 - RNA, 17 nt, Artificial Sequence
  source: /note="Description of Artificial Sequence: Synthetic oligonucleotide"
  source: /note="RNA"
  modified_base (1)..(1): bicyclic nucleic acid (BNA)
  modified_base (17)..(17): bicyclic nucleic acid (BNA)
aacaucaaggaagaugg

SEQ ID NO: 6686 - RNA, 16 nt, Artificial Sequence
  source: /note="Description of Artificial Sequence: Synthetic oligonucleotide"
  source: /note="RNA"
  modified_base (1)..(1): bicyclic nucleic acid (BNA)
  modified_base (16)..(16): bicyclic nucleic acid (BNA)
aacaucaaggaagaug

SEQ ID NO: 6687 - DNA, 15 bp, Artificial Sequence
  source: /note="Description of Artificial Sequence: Synthetic oligonucleotide"
  source: /note="Description of Combined DNA/RNA Molecule: Synthetic oligonucleotide"
  source: /note="DNA/RNA"
  modified_base (1)..(1): bicyclic nucleic acid (BNA)
  modified_base (15)..(15): bicyclic nucleic acid (BNA)
aacaucaaggaagat

SEQ ID NO: 6688 - RNA, 14 nt, Artificial Sequence
  source: /note="Description of Artificial Sequence: Synthetic oligonucleotide"
  source: /note="RNA"
  modified_base (1)..(1): bicyclic nucleic acid (BNA)
  modified_base (14)..(14): bicyclic nucleic acid (BNA)
aacaucaaggaaga

SEQ ID NO: 6689 - RNA, 13 nt, Artificial Sequence
  source: /note="Description of Artificial Sequence: Synthetic oligonucleotide"
  source: /note="RNA"
  modified_base (1)..(1): bicyclic nucleic acid (BNA)
  modified_base (13)..(13): bicyclic nucleic acid (BNA)
aacaucaaggaag

SEQ ID NO: 6690 - RNA, 25 nt, Artificial Sequence
  source: /note="Description of Artificial Sequence: Synthetic oligonucleotide"
  source: /note="RNA"
  modified_base (1)..(1): bicyclic nucleic acid (BNA)
  modified_base (25)..(25): bicyclic nucleic acid (BNA)
acaucaaggaagauggcauuucuag

SEQ ID NO: 6691 - RNA, 24 nt, Artificial Sequence
  source: /note="Description of Artificial Sequence: Synthetic oligonucleotide"
  source: /note="RNA"
  modified_base (1)..(1): bicyclic nucleic acid (BNA)
  modified_base (24)..(24): bicyclic nucleic acid (BNA)
acaucaaggaagauggcauuucua

SEQ ID NO: 6692 - DNA, 23 bp, Artificial Sequence
  source: /note="Description of Artificial Sequence: Synthetic oligonucleotide"
  source: /note="Description of Combined DNA/RNA Molecule: Synthetic oligonucleotide"
  source: /note="DNA/RNA"
  modified_base (1)..(1): bicyclic nucleic acid (BNA)
  modified_base (23)..(23): bicyclic nucleic acid (BNA)
acaucaaggaagauggcauuuct

SEQ ID NO: 6693 - RNA, 22 nt, Artificial Sequence
  source: /note="Description of Artificial Sequence: Synthetic oligonucleotide"
  source: /note="RNA"
  modified_base (1)..(1): bicyclic nucleic acid (BNA)
  modified_base (22)..(22): bicyclic nucleic acid (BNA)
acaucaaggaagauggcauuuc

SEQ ID NO: 6694 - DNA, 21 bp, Artificial Sequence
  source: /note="Description of Artificial Sequence: Synthetic oligonucleotide"
  source: /note="Description of Combined DNA/RNA Molecule: Synthetic oligonucleotide"
  source: /note="DNA/RNA"
  modified_base (1)..(1): bicyclic nucleic acid (BNA)
  modified_base (21)..(21): bicyclic nucleic acid (BNA)
acaucaaggaagauggcauut

SEQ ID NO: 6695 - DNA, 20 bp, Artificial Sequence
  source: /note="Description of Artificial Sequence: Synthetic oligonucleotide"
  source: /note="Description of Combined DNA/RNA Molecule: Synthetic oligonucleotide"
  source: /note="DNA/RNA"
  modified_base (1)..(1): bicyclic nucleic acid (BNA)
  modified_base (20)..(20): bicyclic nucleic acid (BNA)
acaucaaggaagauggcaut

SEQ ID NO: 6696 - DNA, 19 bp, Artificial Sequence
  source: /note="Description of Artificial Sequence: Synthetic oligonucleotide"
  source: /note="Description of Combined DNA/RNA Molecule: Synthetic oligonucleotide"
  source: /note="DNA/RNA"
  modified_base (1)..(1): bicyclic nucleic acid (BNA)
  modified_base (19)..(19): bicyclic nucleic acid (BNA)
acaucaaggaagauggcat

SEQ ID NO: 6697 - RNA, 18 nt, Artificial Sequence
  source: /note="Description of Artificial Sequence: Synthetic oligonucleotide"
  source: /note="RNA"
  modified_base (1)..(1): bicyclic nucleic acid (BNA)
  modified_base (18)..(18): bicyclic nucleic acid (BNA)
acaucaaggaagauggca

SEQ ID NO: 6698 - RNA, 17 nt, Artificial Sequence
  source: /note="Description of Artificial Sequence: Synthetic oligonucleotide"
  source: /note="RNA"
  modified_base (1)..(1): bicyclic nucleic acid (BNA)
  modified_base (17)..(17): bicyclic nucleic acid (BNA)
acaucaaggaagauggc

SEQ ID NO: 6699 - RNA, 16 nt, Artificial Sequence
  source: /note="Description of Artificial Sequence: Synthetic oligonucleotide"
  source: /note="RNA"
  modified_base (1)..(1): bicyclic nucleic acid (BNA)
  modified_base (16)..(16): bicyclic nucleic acid (BNA)
acaucaaggaagaugg

SEQ ID NO: 6700 - RNA, 15 nt, Artificial Sequence
  source: /note="Description of Artificial Sequence: Synthetic oligonucleotide"
  source: /note="RNA"
  modified_base (1)..(1): bicyclic nucleic acid (BNA)
  modified_base (15)..(15): bicyclic nucleic acid (BNA)
acaucaaggaagaug

SEQ ID NO: 6701 - DNA, 14 bp, Artificial Sequence
  source: /note="Description of Artificial Sequence: Synthetic oligonucleotide"
  source: /note="Description of Combined DNA/RNA Molecule: Synthetic oligonucleotide"
  source: /note="DNA/RNA"
  modified_base (1)..(1): bicyclic nucleic acid (BNA)
  modified_base (14)..(14): bicyclic nucleic acid (BNA)
acaucaaggaagat

SEQ ID NO: 6702 - RNA, 13 nt, Artificial Sequence
  source: /note="Description of Artificial Sequence: Synthetic oligonucleotide"
  source: /note="RNA"
  modified_base (1)..(1): bicyclic nucleic acid (BNA)
  modified_base (13)..(13): bicyclic nucleic acid (BNA)
acaucaaggaaga

SEQ ID NO: 6703 - RNA, 12 nt, Artificial Sequence
  source: /note="Description of Artificial Sequence: Synthetic oligonucleotide"
  source: /note="RNA"
  modified_base (1)..(1): bicyclic nucleic acid (BNA)
  modified_base (12)..(12): bicyclic nucleic acid (BNA)
acaucaaggaag

SEQ ID NO: 6704 - RNA, 24 nt, Artificial Sequence
  source: /note="Description of Artificial Sequence: Synthetic oligonucleotide"
  source: /note="RNA"
  modified_base (1)..(1): bicyclic nucleic acid (BNA)
  modified_base (24)..(24): bicyclic nucleic acid (BNA)
caucaaggaagauggcauuucuag

SEQ ID NO: 6705 - RNA, 23 nt, Artificial Sequence
  source: /note="Description of Artificial Sequence: Synthetic oligonucleotide"
  source: /note="RNA"
  modified_base (1)..(1): bicyclic nucleic acid (BNA)
  modified_base (23)..(23): bicyclic nucleic acid (BNA)
caucaaggaagauggcauuucua

SEQ ID NO: 6706 - DNA, 22 bp, Artificial Sequence
  source: /note="Description of Artificial Sequence: Synthetic oligonucleotide"
  source: /note="Description of Combined DNA/RNA Molecule: Synthetic oligonucleotide"
  source: /note="DNA/RNA"
  modified_base (1)..(1): bicyclic nucleic acid (BNA)
  modified_base (22)..(22): bicyclic nucleic acid (BNA)
caucaaggaagauggcauuuct

SEQ ID NO: 6707 - RNA, 21 nt, Artificial Sequence
  source: /note="Description of Artificial Sequence: Synthetic oligonucleotide"
  source: /note="RNA"
  modified_base (1)..(1): bicyclic nucleic acid (BNA)
  modified_base (21)..(21): bicyclic nucleic acid (BNA)
caucaaggaagauggcauuuc

SEQ ID NO: 6708 - DNA, 20 bp, Artificial Sequence
  source: /note="Description of Artificial Sequence: Synthetic oligonucleotide"
  source: /note="Description of Combined DNA/RNA Molecule: Synthetic oligonucleotide"
  source: /note="DNA/RNA"
  modified_base (1)..(1): bicyclic nucleic acid (BNA)
  modified_base (20)..(20): bicyclic nucleic acid (BNA)
caucaaggaagauggcauut

SEQ ID NO: 6709 - DNA, 19 bp, Artificial Sequence
  source: /note="Description of Artificial Sequence: Synthetic oligonucleotide"
  source: /note="Description of Combined DNA/RNA Molecule: Synthetic oligonucleotide"
  source: /note="DNA/RNA"
  modified_base (1)..(1): bicyclic nucleic acid (BNA)
  modified_base (19)..(19): bicyclic nucleic acid (BNA)
caucaaggaagauggcaut

SEQ ID NO: 6710 - DNA, 18 bp, Artificial Sequence
  source: /note="Description of Artificial Sequence: Synthetic oligonucleotide"
  source: /note="Description of Combined DNA/RNA Molecule: Synthetic oligonucleotide"
  source: /note="DNA/RNA"
  modified_base (1)..(1): bicyclic nucleic acid (BNA)
  modified_base (18)..(18): bicyclic nucleic acid (BNA)
caucaaggaagauggcat

SEQ ID NO: 6711 - RNA, 17 nt, Artificial Sequence
  source: /note="Description of Artificial Sequence: Synthetic oligonucleotide"
  source: /note="RNA"
  modified_base (1)..(1): bicyclic nucleic acid (BNA)
  modified_base (17)..(17): bicyclic nucleic acid (BNA)
caucaaggaagauggca

SEQ ID NO: 6712 - RNA, 16 nt, Artificial Sequence
  source: /note="Description of Artificial Sequence: Synthetic oligonucleotide"
  source: /note="RNA"
  modified_base (1)..(1): bicyclic nucleic acid (BNA)
  modified_base (16)..(16): bicyclic nucleic acid (BNA)
caucaaggaagauggc

SEQ ID NO: 6713 - RNA, 15 nt, Artificial Sequence
  source: /note="Description of Artificial Sequence: Synthetic oligonucleotide"
  source: /note="RNA"
  modified_base (1)..(1): bicyclic nucleic acid (BNA)
  modified_base (15)..(15): bicyclic nucleic acid (BNA)
caucaaggaagaugg

SEQ ID NO: 6714 - RNA, 14 nt, Artificial Sequence
  source: /note="Description of Artificial Sequence: Synthetic oligonucleotide"
  source: /note="RNA"
  modified_base (1)..(1): bicyclic nucleic acid (BNA)
  modified_base (14)..(14): bicyclic nucleic acid (BNA)
caucaaggaagaug

SEQ ID NO: 6715 - DNA, 13 bp, Artificial Sequence
  source: /note="Description of Artificial Sequence: Synthetic oligonucleotide"
  source: /note="Description of Combined DNA/RNA Molecule: Synthetic oligonucleotide"
  source: /note="DNA/RNA"
  modified_base (1)..(1): bicyclic nucleic acid (BNA)
  modified_base (13)..(13): bicyclic nucleic acid (BNA)
caucaaggaagat

SEQ ID NO: 6716 - RNA, 12 nt, Artificial Sequence
  source: /note="Description of Artificial Sequence: Synthetic oligonucleotide"
  source: /note="RNA"
  modified_base (1)..(1): bicyclic nucleic acid (BNA)
  modified_base (12)..(12): bicyclic nucleic acid (BNA)
caucaaggaaga

SEQ ID NO: 6717 - RNA, 11 nt, Artificial Sequence
  source: /note="Description of Artificial Sequence: Synthetic oligonucleotide"
  source: /note="RNA"
  modified_base (1)..(1): bicyclic nucleic acid (BNA)
  modified_base (11)..(11): bicyclic nucleic acid (BNA)
caucaaggaag

SEQ ID NO: 6718 - RNA, 23 nt, Artificial Sequence
  source: /note="Description of Artificial Sequence: Synthetic oligonucleotide"
  source: /note="RNA"
  modified_base (1)..(1): bicyclic nucleic acid (BNA)
  modified_base (23)..(23): bicyclic nucleic acid (BNA)
aucaaggaagauggcauuucuag

SEQ ID NO: 6719 - RNA, 22 nt, Artificial Sequence
  source: /note="Description of Artificial Sequence: Synthetic oligonucleotide"
  source: /note="RNA"
  modified_base (1)..(1): bicyclic nucleic acid (BNA)
  modified_base (22)..(22): bicyclic nucleic acid (BNA)
aucaaggaagauggcauuucua

SEQ ID NO: 6720 - DNA, 21 bp, Artificial Sequence
  source: /note="Description of Artificial Sequence: Synthetic oligonucleotide"
  source: /note="Description of Combined DNA/RNA Molecule: Synthetic oligonucleotide"
  source: /note="DNA/RNA"
  modified_base (1)..(1): bicyclic nucleic acid (BNA)
  modified_base (21)..(21): bicyclic nucleic acid (BNA)
aucaaggaagauggcauuuct

SEQ ID NO: 6721 - RNA, 20 nt, Artificial Sequence
  source: /note="Description of Artificial Sequence: Synthetic oligonucleotide"
  source: /note="RNA"
  modified_base (1)..(1): bicyclic nucleic acid (BNA)
  modified_base (20)..(20): bicyclic nucleic acid (BNA)
aucaaggaagauggcauuuc

SEQ ID NO: 6722 - DNA, 19 bp, Artificial Sequence
  source: /note="Description of Artificial Sequence: Synthetic oligonucleotide"
  source: /note="Description of Combined DNA/RNA Molecule: Synthetic oligonucleotide"
  source: /note="DNA/RNA"
  modified_base (1)..(1): bicyclic nucleic acid (BNA)
  modified_base (19)..(19): bicyclic nucleic acid (BNA)
aucaaggaagauggcauut

SEQ ID NO: 6723 - DNA, 18 bp, Artificial Sequence
  source: /note="Description of Artificial Sequence: Synthetic oligonucleotide"
  source: /note="Description of Combined DNA/RNA Molecule: Synthetic oligonucleotide"
  source: /note="DNA/RNA"
  modified_base (1)..(1): bicyclic nucleic acid (BNA)
  modified_base (18)..(18): bicyclic nucleic acid (BNA)
aucaaggaagauggcaut

SEQ ID NO: 6724 - DNA, 17 bp, Artificial Sequence
  source: /note="Description of Artificial Sequence: Synthetic oligonucleotide"
  source: /note="Description of Combined DNA/RNA Molecule: Synthetic oligonucleotide"
  source: /note="DNA/RNA"
  modified_base (1)..(1): bicyclic nucleic acid (BNA)
  modified_base (17)..(17): bicyclic nucleic acid (BNA)
aucaaggaagauggcat

SEQ ID NO: 6725 - RNA, 16 nt, Artificial Sequence
  source: /note="Description of Artificial Sequence: Synthetic oligonucleotide"
  source: /note="RNA"
  modified_base (1)..(1): bicyclic nucleic acid (BNA)
  modified_base (16)..(16): bicyclic nucleic acid (BNA)
aucaaggaagauggca

SEQ ID NO: 6726 - RNA, 15 nt, Artificial Sequence
  source: /note="Description of Artificial Sequence: Synthetic oligonucleotide"
  source: /note="RNA"
  modified_base (1)..(1): bicyclic nucleic acid (BNA)
  modified_base (15)..(15): bicyclic nucleic acid (BNA)
aucaaggaagauggc

SEQ ID NO: 6727 - RNA, 14 nt, Artificial Sequence
  source: /note="Description of Artificial Sequence: Synthetic oligonucleotide"
  source: /note="RNA"
  modified_base (1)..(1): bicyclic nucleic acid (BNA)
  modified_base (14)..(14): bicyclic nucleic acid (BNA)
aucaaggaagaugg

SEQ ID NO: 6728 - RNA, 13 nt, Artificial Sequence
  source: /note="Description of Artificial Sequence: Synthetic oligonucleotide"
  source: /note="RNA"
  modified_base (1)..(1): bicyclic nucleic acid (BNA)
  modified_base (13)..(13): bicyclic nucleic acid (BNA)
aucaaggaagaug

SEQ ID NO: 6729 - DNA, 12 bp, Artificial Sequence
  source: /note="Description of Artificial Sequence: Synthetic oligonucleotide"
  source: /note="Description of Combined DNA/RNA Molecule: Synthetic oligonucleotide"
  source: /note="DNA/RNA"
  modified_base (1)..(1): bicyclic nucleic acid (BNA)
  modified_base (12)..(12): bicyclic nucleic acid (BNA)
aucaaggaagat

SEQ ID NO: 6730 - RNA, 11 nt, Artificial Sequence
  source: /note="Description of Artificial Sequence: Synthetic oligonucleotide"
  source: /note="RNA"
  modified_base (1)..(1): bicyclic nucleic acid (BNA)
  modified_base (11)..(11): bicyclic nucleic acid (BNA)
aucaaggaaga

SEQ ID NO: 6731 - RNA, 10 nt, Artificial Sequence
  source: /note="Description of Artificial Sequence: Synthetic oligonucleotide"
  source: /note="RNA"
  modified_base (1)..(1): bicyclic nucleic acid (BNA)
  modified_base (10)..(10): bicyclic nucleic acid (BNA)
aucaaggaag

SEQ ID NO: 6732 - RNA, 23 nt, Artificial Sequence
  source: /note="Description of Artificial Sequence: Synthetic oligonucleotide"
  source: /note="RNA"
  modified_base (1)..(1): bicyclic nucleic acid (BNA)
  modified_base (23)..(23): bicyclic nucleic acid (BNA)
ccagagcagguaccuccaacauc

SEQ ID NO: 6733 - RNA, 18 nt, Artificial Sequence
  source: /note="Description of Artificial Sequence: Synthetic oligonucleotide"
  source: /note="RNA"
  modified_base (1)..(1): bicyclic nucleic acid (BNA)
  modified_base (18)..(18): bicyclic nucleic acid (BNA)
ccagagcagguaccucca

SEQ ID NO: 6734 - DNA, 23 bp, Artificial Sequence
  source: /note="Description of Artificial Sequence: Synthetic oligonucleotide"
  source: /note="Description of Combined DNA/RNA Molecule: Synthetic oligonucleotide"
  source: /note="DNA/RNA"
  modified_base (1)..(1): bicyclic nucleic acid (BNA)
  modified_base (23)..(23): bicyclic nucleic acid (BNA)
ccucugugauuuuauaacuugat

SEQ ID NO: 6735 - DNA, 17 bp, Artificial Sequence
  source: /note="Description of Artificial Sequence: Synthetic oligonucleotide"
  source: /note="Description of Combined DNA/RNA Molecule: Synthetic oligonucleotide"
  source: /note="DNA/RNA"
  modified_base (1)..(1): bicyclic nucleic acid (BNA)
  modified_base (17)..(17): bicyclic nucleic acid (BNA)
tcacccaccaucaccct

SEQ ID NO: 6736 - DNA, 20 bp, Artificial Sequence
  source: /note="Description of Artificial Sequence: Synthetic oligonucleotide"
  source: /note="Description of Combined DNA/RNA Molecule: Synthetic oligonucleotide"
  source: /note="DNA/RNA"
  modified_base (1)..(1): bicyclic nucleic acid (BNA)
  modified_base (20)..(20): bicyclic nucleic acid (BNA)
tgauauccucaaggucaccc

SEQ ID NO: 6737 - RNA, 22 nt, Artificial Sequence
  source: /note="Description of Artificial Sequence: Synthetic oligonucleotide"
  source: /note="RNA"
  modified_base (1)..(1): bicyclic nucleic acid (BNA)
  modified_base (22)..(22): bicyclic nucleic acid (BNA)
cugcuugaugaucaucucguug

SEQ ID NO: 6738 - RNA, 18 nt, Artificial Sequence
  source: /note="Description of Artificial Sequence: Synthetic oligonucleotide"
  source: /note="RNA"
  modified_base (1)..(1): bicyclic nucleic acid (BNA)
  modified_base (18)..(18): bicyclic nucleic acid (BNA)
cugcuugaugaucaucuc

SEQ ID NO: 6739 - RNA, 19 nt, Artificial Sequence
  source: /note="Description of Artificial Sequence: Synthetic oligonucleotide"
  source: /note="RNA"
  modified_base (1)..(1): bicyclic nucleic acid (BNA)
  modified_base (19)..(19): bicyclic nucleic acid (BNA)
guuuccuuaguaaccacag

SEQ ID NO: 6740 - RNA, 17 nt, Artificial Sequence
  source: /note="Description of Artificial Sequence: Synthetic oligonucleotide"
  source: /note="RNA"
  modified_base (1)..(1): bicyclic nucleic acid (BNA)
  modified_base (17)..(17): bicyclic nucleic acid (BNA)
guuuccuuaguaaccac

SEQ ID NO: 6741 - DNA, 20 bp, Artificial Sequence
  source: /note="Description of Artificial Sequence: Synthetic oligonucleotide"
  source: /note="Description of Combined DNA/RNA Molecule: Synthetic oligonucleotide"
  source: /note="DNA/RNA"
  source: /note="5' tri-ethylene glycol (TEG)"
  modified_base (1)..(1): bicyclic nucleic acid (BNA)
  modified_base (20)..(20): bicyclic nucleic acid (BNA)
tcaaggaagauggcauuuct

SEQ ID NO: 6742 - DNA, 22 bp, Artificial Sequence
  source: /note="Description of Artificial Sequence: Synthetic oligonucleotide"
  source: /note="Description of Combined DNA/RNA Molecule: Synthetic oligonucleotide"
  source: /note="DNA/RNA"
  source: /note="5' tri-ethylene glycol (TEG)"
  modified_base (1)..(1): bicyclic nucleic acid (BNA)
  modified_base (22)..(22): bicyclic nucleic acid (BNA)
tcaaggaagauggcauuucuag

SEQ ID NO: 6743 - RNA, 18 nt, Artificial Sequence
  source: /note="Description of Artificial Sequence: Synthetic oligonucleotide"
  source: /note="RNA"
  source: /note="5' tri-ethylene glycol (TEG)"
  modified_base (1)..(1): bicyclic nucleic acid (BNA)
  modified_base (18)..(18): bicyclic nucleic acid (BNA)
gguaaguucuguccaagc

SEQ ID NO: 6744 - RNA, 18 nt, Artificial Sequence
  source: /note="Description of Artificial Sequence: Synthetic oligonucleotide"
  source: /note="RNA"
  source: /note="5' tri-ethylene glycol (TEG)"
  modified_base (1)..(1): bicyclic nucleic acid (BNA)
  modified_base (18)..(18): bicyclic nucleic acid (BNA)
guaaguucuguccaagcc

SEQ ID NO: 6745 - RNA, 18 nt, Artificial Sequence
  source: /note="Description of Artificial Sequence: Synthetic oligonucleotide"
  source: /note="RNA"
  source: /note="5' tri-ethylene glycol (TEG)"
  modified_base (1)..(1): bicyclic nucleic acid (BNA)
  modified_base (18)..(18): bicyclic nucleic acid (BNA)
agucgguaaguucugucc

SEQ ID NO: 6746 - RNA, 18 nt, Artificial Sequence
  source: /note="Description of Artificial Sequence: Synthetic oligonucleotide"
  source: /note="RNA"
  source: /note="5' tri-ethylene glycol (TEG)"
  modified_base (1)..(1): bicyclic nucleic acid (BNA)
  modified_base (18)..(18): bicyclic nucleic acid (BNA)
cuguccaagcccgguuga

SEQ ID NO: 6747 - DNA, 15 bp, Artificial Sequence
  source: /note="Description of Artificial Sequence: Synthetic oligonucleotide"
  source: /note="Description of Combined DNA/RNA Molecule: Synthetic oligonucleotide"
  source: /note="DNA/RNA"
  source: /note="5' tri-ethylene glycol (TEG)"
  modified_base (1)..(1): bicyclic nucleic acid (BNA)
  modified_base (15)..(15): bicyclic nucleic acid (BNA)
taaguucuguccaag

SEQ ID NO: 6748 - DNA, 20 bp, Artificial Sequence
  source: /note="Description of Artificial Sequence: Synthetic oligonucleotide"
  source: /note="Description of Combined DNA/RNA Molecule: Synthetic oligonucleotide"
  source: /note="DNA/RNA"
  source: /note="5' tri-ethylene glycol (TEG)"
  modified_base (1)..(1): bicyclic nucleic acid (BNA)
  modified_base (20)..(20): bicyclic nucleic acid (BNA)
tucuguccaagcccgguuga

SEQ ID NO: 6749 - DNA, 19 bp, Artificial Sequence
  source: /note="Description of Artificial Sequence: Synthetic oligonucleotide"
  source: /note="Description of Combined DNA/RNA Molecule: Synthetic oligonucleotide"
  source: /note="DNA/RNA"
  source: /note="5' tri-ethylene glycol (TEG)"
  modified_base (1)..(1): bicyclic nucleic acid (BNA)
  modified_base (19)..(19): bicyclic nucleic acid (BNA)
tucuguccaagcccgguug

SEQ ID NO: 6750 - DNA, 18 bp, Artificial Sequence
  source: /note="Description of Artificial Sequence: Synthetic oligonucleotide"
  source: /note="Description of Combined DNA/RNA Molecule: Synthetic oligonucleotide"
  source: /note="DNA/RNA"
  source: /note="5' tri-ethylene glycol (TEG)"
  modified_base (1)..(1): bicyclic nucleic acid (BNA)
  modified_base (18)..(18): bicyclic nucleic acid (BNA)
tucuguccaagcccggut

SEQ ID NO: 6751 - DNA, 17 bp, Artificial Sequence
  source: /note="Description of Artificial Sequence: Synthetic oligonucleotide"
  source: /note="Description of Combined DNA/RNA Molecule: Synthetic oligonucleotide"
  source: /note="DNA/RNA"
  source: /note="5' tri-ethylene glycol (TEG)"
  modified_base (1)..(1): bicyclic nucleic acid (BNA)
  modified_base (17)..(17): bicyclic nucleic acid (BNA)
tucuguccaagcccggt

SEQ ID NO: 6752 - DNA, 16 bp, Artificial Sequence
  source: /note="Description of Artificial Sequence: Synthetic oligonucleotide"
  source: /note="Description of Combined DNA/RNA Molecule: Synthetic oligonucleotide"
  source: /note="DNA/RNA"
  source: /note="5' tri-ethylene glycol (TEG)"
  modified_base (1)..(1): bicyclic nucleic acid (BNA)
  modified_base (16)..(16): bicyclic nucleic acid (BNA)
tucuguccaagcccgg

SEQ ID NO: 6753 - DNA, 15 bp, Artificial Sequence
  source: /note="Description of Artificial Sequence: Synthetic oligonucleotide"
  source: /note="Description of Combined DNA/RNA Molecule: Synthetic oligonucleotide"
  source: /note="DNA/RNA"
  source: /note="5' tri-ethylene glycol (TEG)"
  modified_base (1)..(1): bicyclic nucleic acid (BNA)
  modified_base (15)..(15): bicyclic nucleic acid (BNA)
tucuguccaagcccg

SEQ ID NO: 6754 - DNA, 14 bp, Artificial Sequence
  source: /note="Description of Artificial Sequence: Synthetic oligonucleotide"
  source: /note="Description of Combined DNA/RNA Molecule: Synthetic oligonucleotide"
  source: /note="DNA/RNA"
  source: /note="5' tri-ethylene glycol (TEG)"
  modified_base (1)..(1): bicyclic nucleic acid (BNA)
  modified_base (14)..(14): bicyclic nucleic acid (BNA)
tucuguccaagccc

SEQ ID NO: 6755 - DNA, 13 bp, Artificial Sequence
  source: /note="Description of Artificial Sequence: Synthetic oligonucleotide"
  source: /note="Description of Combined DNA/RNA Molecule: Synthetic oligonucleotide"
  source: /note="DNA/RNA"
  source: /note="5' tri-ethylene glycol (TEG)"
  modified_base (1)..(1): bicyclic nucleic acid (BNA)
  modified_base (13)..(13): bicyclic nucleic acid (BNA)
tucuguccaagcc

SEQ ID NO: 6756 - DNA, 12 bp, Artificial Sequence
  source: /note="Description of Artificial Sequence: Synthetic oligonucleotide"
  source: /note="Description of Combined DNA/RNA Molecule: Synthetic oligonucleotide"
  source: /note="DNA/RNA"
  source: /note="5' tri-ethylene glycol (TEG)"
  modified_base (1)..(1): bicyclic nucleic acid (BNA)
  modified_base (12)..(12): bicyclic nucleic acid (BNA)
tucuguccaagc

SEQ ID NO: 6757 - DNA, 11 bp, Artificial Sequence
  source: /note="Description of Artificial Sequence: Synthetic oligonucleotide"
  source: /note="Description of Combined DNA/RNA Molecule: Synthetic oligonucleotide"
  source: /note="DNA/RNA"
  source: /note="5' tri-ethylene glycol (TEG)"
  modified_base (1)..(1): bicyclic nucleic acid (BNA)
  modified_base (11)..(11): bicyclic nucleic acid (BNA)
tucuguccaag

SEQ ID NO: 6758 - DNA, 10 bp, Artificial Sequence
  source: /note="Description of Artificial Sequence: Synthetic oligonucleotide"
  source: /note="Description of Combined DNA/RNA Molecule: Synthetic oligonucleotide"
  source: /note="DNA/RNA"
  source: /note="5' tri-ethylene glycol (TEG)"
  modified_base (1)..(1): bicyclic nucleic acid (BNA)
  modified_base (10)..(10): bicyclic nucleic acid (BNA)
tucuguccaa

SEQ ID NO: 6759 - DNA, 9 bp, Artificial Sequence
  source: /note="Description of Artificial Sequence: Synthetic oligonucleotide"
  source: /note="Description of Combined DNA/RNA Molecule: Synthetic oligonucleotide"
  source: /note="DNA/RNA"
  source: /note="5' tri-ethylene glycol (TEG)"
  modified_base (1)..(1): bicyclic nucleic acid (BNA)
  modified_base (9)..(9): bicyclic nucleic acid (BNA)
tucugucca

SEQ ID NO: 6760 - DNA, 8 bp, Artificial Sequence
  source: /note="Description of Artificial Sequence: Synthetic oligonucleotide"
  source: /note="Description of Combined DNA/RNA Molecule: Synthetic oligonucleotide"
  source: /note="DNA/RNA"
  source: /note="5' tri-ethylene glycol (TEG)"
  modified_base (1)..(1): bicyclic nucleic acid (BNA)
  modified_base (8)..(8): bicyclic nucleic acid (BNA)
tucugucc

SEQ ID NO: 6761 - DNA, 19 bp, Artificial Sequence
  source: /note="Description of Artificial Sequence: Synthetic oligonucleotide"
  source: /note="Description of Combined DNA/RNA Molecule: Synthetic oligonucleotide"
  source: /note="DNA/RNA"
  source: /note="5' tri-ethylene glycol (TEG)"
  modified_base (1)..(1): bicyclic nucleic acid (BNA)
  modified_base (19)..(19): bicyclic nucleic acid (BNA)
tcuguccaagcccgguuga

SEQ ID NO: 6762 - DNA, 18 bp, Artificial Sequence
  source: /note="Description of Artificial Sequence: Synthetic oligonucleotide"
  source: /note="Description of Combined DNA/RNA Molecule: Synthetic oligonucleotide"
  source: /note="DNA/RNA"
  source: /note="5' tri-ethylene glycol (TEG)"
  modified_base (1)..(1): bicyclic nucleic acid (BNA)
  modified_base (18)..(18): bicyclic nucleic acid (BNA)
tcuguccaagcccgguug

SEQ ID NO: 6763 - DNA, 17 bp, Artificial Sequence
  source: /note="Description of Artificial Sequence: Synthetic oligonucleotide"
  source: /note="Description of Combined DNA/RNA Molecule: Synthetic oligonucleotide"
  source: /note="DNA/RNA"
  source: /note="5' tri-ethylene glycol (TEG)"
  modified_base (1)..(1): bicyclic nucleic acid (BNA)
  modified_base (17)..(17): bicyclic nucleic acid (BNA)
tcuguccaagcccggut

SEQ ID NO: 6764 - DNA, 16 bp, Artificial Sequence
  source: /note="Description of Artificial Sequence: Synthetic oligonucleotide"
  source: /note="Description of Combined DNA/RNA Molecule: Synthetic oligonucleotide"
  source: /note="DNA/RNA"
  source: /note="5' tri-ethylene glycol (TEG)"
  modified_base (1)..(1): bicyclic nucleic acid (BNA)
  modified_base (16)..(16): bicyclic nucleic acid (BNA)
tcuguccaagcccggt

SEQ ID NO: 6765 - DNA, 15 bp, Artificial Sequence
  source: /note="Description of Artificial Sequence: Synthetic oligonucleotide"
  source: /note="Description of Combined DNA/RNA Molecule: Synthetic oligonucleotide"
  source: /note="DNA/RNA"
  source: /note="5' tri-ethylene glycol (TEG)"
  modified_base (1)..(1): bicyclic nucleic acid (BNA)
  modified_base (15)..(15): bicyclic nucleic acid (BNA)
tcuguccaagcccgg

SEQ ID NO: 6766 - DNA, 14 bp, Artificial Sequence
  source: /note="Description of Artificial Sequence: Synthetic oligonucleotide"
  source: /note="Description of Combined DNA/RNA Molecule: Synthetic oligonucleotide"
  source: /note="DNA/RNA"
  source: /note="5' tri-ethylene glycol (TEG)"
  modified_base (1)..(1): bicyclic nucleic acid (BNA)
  modified_base (14)..(14): bicyclic nucleic acid (BNA)
tcuguccaagcccg

SEQ ID NO: 6767 - DNA, 13 bp, Artificial Sequence
  source: /note="Description of Artificial Sequence: Synthetic oligonucleotide"
  source: /note="Description of Combined DNA/RNA Molecule: Synthetic oligonucleotide"
  source: /note="DNA/RNA"
  source: /note="5' tri-ethylene glycol (TEG)"
  modified_base (1)..(1): bicyclic nucleic acid (BNA)
  modified_base (13)..(13): bicyclic nucleic acid (BNA)
tcuguccaagccc

SEQ ID NO: 6768 - DNA, 12 bp, Artificial Sequence
  source: /note="Description of Artificial Sequence: Synthetic oligonucleotide"
  source: /note="Description of Combined DNA/RNA Molecule: Synthetic oligonucleotide"
  source: /note="DNA/RNA"
  source: /note="5' tri-ethylene glycol (TEG)"
  modified_base (1)..(1): bicyclic nucleic acid (BNA)
  modified_base (12)..(12): bicyclic nucleic acid (BNA)
tcuguccaagcc

SEQ ID NO: 6769 - DNA, 11 bp, Artificial Sequence
  source: /note="Description of Artificial Sequence: Synthetic oligonucleotide"
  source: /note="Description of Combined DNA/RNA Molecule: Synthetic oligonucleotide"
  source: /note="DNA/RNA"
  source: /note="5' tri-ethylene glycol (TEG)"
  modified_base (1)..(1): bicyclic nucleic acid (BNA)
  modified_base (11)..(11): bicyclic nucleic acid (BNA)
tcuguccaagc

SEQ ID NO: 6770 - DNA, 10 bp, Artificial Sequence
  source: /note="Description of Artificial Sequence: Synthetic oligonucleotide"
  source: /note="Description of Combined DNA/RNA Molecule: Synthetic oligonucleotide"
  source: /note="DNA/RNA"
  source: /note="5' tri-ethylene glycol (TEG)"
  modified_base (1)..(1): bicyclic nucleic acid (BNA)
  modified_base (10)..(10): bicyclic nucleic acid (BNA)
tcuguccaag

SEQ ID NO: 6771 - DNA, 9 bp, Artificial Sequence
  source: /note="Description of Artificial Sequence: Synthetic oligonucleotide"
  source: /note="Description of Combined DNA/RNA Molecule: Synthetic oligonucleotide"
  source: /note="DNA/RNA"
  source: /note="5' tri-ethylene glycol (TEG)"
  modified_base (1)..(1): bicyclic nucleic acid (BNA)
  modified_base (9)..(9): bicyclic nucleic acid (BNA)
tcuguccaa

SEQ ID NO: 6772 - DNA, 8 bp, Artificial Sequence
  source: /note="Description of Artificial Sequence: Synthetic oligonucleotide"
  source: /note="Description of Combined DNA/RNA Molecule: Synthetic oligonucleotide"
  source: /note="DNA/RNA"
  source: /note="5' tri-ethylene glycol (TEG)"
  modified_base (1)..(1): bicyclic nucleic acid (BNA)
  modified_base (8)..(8): bicyclic nucleic acid (BNA)
tcugucca

SEQ ID NO: 6773 - RNA, 17 nt, Artificial Sequence
  source: /note="Description of Artificial Sequence: Synthetic oligonucleotide"
  source: /note="RNA"
  source: /note="5' tri-ethylene glycol (TEG)"
  modified_base (1)..(1): bicyclic nucleic acid (BNA)
  modified_base (17)..(17): bicyclic nucleic acid (BNA)
cuguccaagcccgguug

SEQ ID NO: 6774 - DNA, 16 bp, Artificial Sequence
  source: /note="Description of Artificial Sequence: Synthetic oligonucleotide"
  source: /note="Description of Combined DNA/RNA Molecule: Synthetic oligonucleotide"
  source: /note="DNA/RNA"
  source: /note="5' tri-ethylene glycol (TEG)"
  modified_base (1)..(1): bicyclic nucleic acid (BNA)
  modified_base (16)..(16): bicyclic nucleic acid (BNA)
cuguccaagcccggut

SEQ ID NO: 6775 - DNA, 15 bp, Artificial Sequence
  source: /note="Description of Artificial Sequence: Synthetic oligonucleotide"
  source: /note="Description of Combined DNA/RNA Molecule: Synthetic oligonucleotide"
  source: /note="DNA/RNA"
  source: /note="5' tri-ethylene glycol (TEG)"
  modified_base (1)..(1): bicyclic nucleic acid (BNA)
  modified_base (15)..(15): bicyclic nucleic acid (BNA)
cuguccaagcccggt

SEQ ID NO: 6776 - RNA, 14 nt, Artificial Sequence
  source: /note="Description of Artificial Sequence: Synthetic oligonucleotide"
  source: /note="RNA"
  source: /note="5' tri-ethylene glycol (TEG)"
  modified_base (1)..(1): bicyclic nucleic acid (BNA)
  modified_base (14)..(14): bicyclic nucleic acid (BNA)
cuguccaagcccgg

SEQ ID NO: 6777 - RNA, 13 nt, Artificial Sequence
  source: /note="Description of Artificial Sequence: Synthetic oligonucleotide"
  source: /note="RNA"
  source: /note="5' tri-ethylene glycol (TEG)"
  modified_base (1)..(1): bicyclic nucleic acid (BNA)
  modified_base (13)..(13): bicyclic nucleic acid (BNA)
cuguccaagcccg

SEQ ID NO: 6778 - RNA, 12 nt, Artificial Sequence
  source: /note="Description of Artificial Sequence: Synthetic oligonucleotide"
  source: /note="RNA"
  source: /note="5' tri-ethylene glycol (TEG)"
  modified_base (1)..(1): bicyclic nucleic acid (BNA)
  modified_base (12)..(12): bicyclic nucleic acid (BNA)
cuguccaagccc

SEQ ID NO: 6779 - RNA, 11 nt, Artificial Sequence
  source: /note="Description of Artificial Sequence: Synthetic oligonucleotide"
  source: /note="RNA"
  source: /note="5' tri-ethylene glycol (TEG)"
  modified_base (1)..(1): bicyclic nucleic acid (BNA)
  modified_base (11)..(11): bicyclic nucleic acid (BNA)
cuguccaagcc

SEQ ID NO: 6780 - RNA, 10 nt, Artificial Sequence
  source: /note="Description of Artificial Sequence: Synthetic oligonucleotide"
  source: /note="RNA"
  source: /note="5' tri-ethylene glycol (TEG)"
  modified_base (1)..(1): bicyclic nucleic acid (BNA)
  modified_base (10)..(10): bicyclic nucleic acid (BNA)
cuguccaagc

SEQ ID NO: 6781 - RNA, 9 nt, Artificial Sequence
  source: /note="Description of Artificial Sequence: Synthetic oligonucleotide"
  source: /note="RNA"
  source: /note="5' tri-ethylene glycol (TEG)"
  modified_base (1)..(1): bicyclic nucleic acid (BNA)
  modified_base (9)..(9): bicyclic nucleic acid (BNA)
cuguccaag

SEQ ID NO: 6782 - RNA, 8 nt, Artificial Sequence
  source: /note="Description of Artificial Sequence: Synthetic oligonucleotide"
  source: /note="RNA"
  source: /note="5' tri-ethylene glycol (TEG)"
  modified_base (1)..(1): bicyclic nucleic acid (BNA)
  modified_base (8)..(8): bicyclic nucleic acid (BNA)
cuguccaa

SEQ ID NO: 6783 - RNA, 20 nt, Artificial Sequence
  source: /note="Description of Artificial Sequence: Synthetic oligonucleotide"
  source: /note="RNA"
  source: /note="5' tri-ethylene glycol (TEG)"
  modified_base (1)..(1): bicyclic nucleic acid (BNA)
  modified_base (20)..(20): bicyclic nucleic acid (BNA)
guucuguccaagcccgguug

SEQ ID NO: 6784 - DNA, 19 bp, Artificial Sequence
  source: /note="Description of Artificial Sequence: Synthetic oligonucleotide"
  source: /note="Description of Combined DNA/RNA Molecule: Synthetic oligonucleotide"
  source: /note="DNA/RNA"
  source: /note="5' tri-ethylene glycol (TEG)"
  modified_base (1)..(1): bicyclic nucleic acid (BNA)
  modified_base (19)..(19): bicyclic nucleic acid (BNA)
guucuguccaagcccggut

SEQ ID NO: 6785 - DNA, 18 bp, Artificial Sequence
  source: /note="Description of Artificial Sequence: Synthetic oligonucleotide"
  source: /note="Description of Combined DNA/RNA Molecule: Synthetic oligonucleotide"
  source: /note="DNA/RNA"
  source: /note="5' tri-ethylene glycol (TEG)"
  modified_base (1)..(1): bicyclic nucleic acid (BNA)
  modified_base (18)..(18): bicyclic nucleic acid (BNA)
guucuguccaagcccggt

SEQ ID NO: 6786 - RNA, 17 nt, Artificial Sequence
  source: /note="Description of Artificial Sequence: Synthetic oligonucleotide"
  source: /note="RNA"
  source: /note="5' tri-ethylene glycol (TEG)"
  modified_base (1)..(1): bicyclic nucleic acid (BNA)
  modified_base (17)..(17): bicyclic nucleic acid (BNA)
guucuguccaagcccgg

SEQ ID NO: 6787 - RNA, 16 nt, Artificial Sequence
  source: /note="Description of Artificial Sequence: Synthetic oligonucleotide"
  source: /note="RNA"
  source: /note="5' tri-ethylene glycol (TEG)"
  modified_base (1)..(1): bicyclic nucleic acid (BNA)
  modified_base (16)..(16): bicyclic nucleic acid (BNA)
guucuguccaagcccg

SEQ ID NO: 6788 - RNA, 15 nt, Artificial Sequence
  source: /note="Description of Artificial Sequence: Synthetic oligonucleotide"
  source: /note="RNA"
  source: /note="5' tri-ethylene glycol (TEG)"
  modified_base (1)..(1): bicyclic nucleic acid (BNA)
  modified_base (15)..(15): bicyclic nucleic acid (BNA)
guucuguccaagccc

SEQ ID NO: 6789 - RNA, 14 nt, Artificial Sequence
  source: /note="Description of Artificial Sequence: Synthetic oligonucleotide"
  source: /note="RNA"
  source: /note="5' tri-ethylene glycol (TEG)"
  modified_base (1)..(1): bicyclic nucleic acid (BNA)
  modified_base (14)..(14): bicyclic nucleic acid (BNA)
guucuguccaagcc

SEQ ID NO: 6790 - RNA, 13 nt, Artificial Sequence
  source: /note="Description of Artificial Sequence: Synthetic oligonucleotide"
  source: /note="RNA"
  source: /note="5' tri-ethylene glycol (TEG)"
  modified_base (1)..(1): bicyclic nucleic acid (BNA)
  modified_base (13)..(13): bicyclic nucleic acid (BNA)
guucuguccaagc

SEQ ID NO: 6791 - RNA, 12 nt, Artificial Sequence
  source: /note="Description of Artificial Sequence: Synthetic oligonucleotide"
  source: /note="RNA"
  source: /note="5' tri-ethylene glycol (TEG)"
  modified_base (1)..(1): bicyclic nucleic acid (BNA)
  modified_base (12)..(12): bicyclic nucleic acid (BNA)
guucuguccaag

SEQ ID NO: 6792 - RNA, 11 nt, Artificial Sequence
  source: /note="Description of Artificial Sequence: Synthetic oligonucleotide"
  source: /note="RNA"
  source: /note="5' tri-ethylene glycol (TEG)"
  modified_base (1)..(1): bicyclic nucleic acid (BNA)
  modified_base (11)..(11): bicyclic nucleic acid (BNA)
guucuguccaa

SEQ ID NO: 6793 - RNA, 10 nt, Artificial Sequence
  source: /note="Description of Artificial Sequence: Synthetic oligonucleotide"
  source: /note="RNA"
  source: /note="5' tri-ethylene glycol (TEG)"
  modified_base (1)..(1): bicyclic nucleic acid (BNA)
  modified_base (10)..(10): bicyclic nucleic acid (BNA)
guucugucca

SEQ ID NO: 6794 - RNA, 9 nt, Artificial Sequence
  source: /note="Description of Artificial Sequence: Synthetic oligonucleotide"
  source: /note="RNA"
  source: /note="5' tri-ethylene glycol (TEG)"
  modified_base (1)..(1): bicyclic nucleic acid (BNA)
  modified_base (9)..(9): bicyclic nucleic acid (BNA)
guucugucc

SEQ ID NO: 6795 - RNA, 8 nt, Artificial Sequence
  source: /note="Description of Artificial Sequence: Synthetic oligonucleotide"
  source: /note="RNA"
  source: /note="5' tri-ethylene glycol (TEG)"
  modified_base (1)..(1): bicyclic nucleic acid (BNA)
  modified_base (8)..(8): bicyclic nucleic acid (BNA)
guucuguc

SEQ ID NO: 6796 - DNA, 20 bp, Artificial Sequence
  source: /note="Description of Artificial Sequence: Synthetic oligonucleotide"
  source: /note="Description of Combined DNA/RNA Molecule: Synthetic oligonucleotide"
  source: /note="DNA/RNA"
  source: /note="5' tri-ethylene glycol (TEG)"
  modified_base (1)..(1): bicyclic nucleic acid (BNA)
  modified_base (20)..(20): bicyclic nucleic acid (BNA)
aguucuguccaagcccggut

SEQ ID NO: 6797 - DNA, 19 bp, Artificial Sequence
  source: /note="Description of Artificial Sequence: Synthetic oligonucleotide"
  source: /note="Description of Combined DNA/RNA Molecule: Synthetic oligonucleotide"
  source: /note="DNA/RNA"
  source: /note="5' tri-ethylene glycol (TEG)"
  modified_base (1)..(1): bicyclic nucleic acid (BNA)
  modified_base (19)..(19): bicyclic nucleic acid (BNA)
aguucuguccaagcccggt

SEQ ID NO: 6798 - RNA, 18 nt, Artificial Sequence
  source: /note="Description of Artificial Sequence: Synthetic oligonucleotide"
  source: /note="RNA"
  source: /note="5' tri-ethylene glycol (TEG)"
  modified_base (1)..(1): bicyclic nucleic acid (BNA)
  modified_base (18)..(18): bicyclic nucleic acid (BNA)
aguucuguccaagcccgg

SEQ ID NO: 6799 - RNA, 17 nt, Artificial Sequence
  source: /note="Description of Artificial Sequence: Synthetic oligonucleotide"
  source: /note="RNA"
  source: /note="5' tri-ethylene glycol (TEG)"
  modified_base (1)..(1): bicyclic nucleic acid (BNA)
  modified_base (17)..(17): bicyclic nucleic acid (BNA)
aguucuguccaagcccg

SEQ ID NO: 6800 - RNA, 16 nt, Artificial Sequence
  source: /note="Description of Artificial Sequence: Synthetic oligonucleotide"
  source: /note="RNA"
  source: /note="5' tri-ethylene glycol (TEG)"
  modified_base (1)..(1): bicyclic nucleic acid (BNA)
  modified_base (16)..(16): bicyclic nucleic acid (BNA)
aguucuguccaagccc

SEQ ID NO: 6801 - RNA, 15 nt, Artificial Sequence
  source: /note="Description of Artificial Sequence: Synthetic oligonucleotide"
  source: /note="RNA"
  source: /note="5' tri-ethylene glycol (TEG)"
  modified_base (1)..(1): bicyclic nucleic acid (BNA)
  modified_base (15)..(15): bicyclic nucleic acid (BNA)
aguucuguccaagcc

SEQ ID NO: 6802 - RNA, 14 nt, Artificial Sequence
  source: /note="Description of Artificial Sequence: Synthetic oligonucleotide"
  source: /note="RNA"
  source: /note="5' tri-ethylene glycol (TEG)"
  modified_base (1)..(1): bicyclic nucleic acid (BNA)
  modified_base (14)..(14): bicyclic nucleic acid (BNA)
aguucuguccaagc

SEQ ID NO: 6803 - RNA, 13 nt, Artificial Sequence
  source: /note="Description of Artificial Sequence: Synthetic oligonucleotide"
  source: /note="RNA"
  source: /note="5' tri-ethylene glycol (TEG)"
  modified_base (1)..(1): bicyclic nucleic acid (BNA)
  modified_base (13)..(13): bicyclic nucleic acid (BNA)
aguucuguccaag

SEQ ID NO: 6804 - RNA, 12 nt, Artificial Sequence
  source: /note="Description of Artificial Sequence: Synthetic oligonucleotide"
  source: /note="RNA"
  source: /note="5' tri-ethylene glycol (TEG)"
  modified_base (1)..(1): bicyclic nucleic acid (BNA)
  modified_base (12)..(12): bicyclic nucleic acid (BNA)
aguucuguccaa

SEQ ID NO: 6805 - RNA, 11 nt, Artificial Sequence
  source: /note="Description of Artificial Sequence: Synthetic oligonucleotide"
  source: /note="RNA"
  source: /note="5' tri-ethylene glycol (TEG)"
  modified_base (1)..(1): bicyclic nucleic acid (BNA)
  modified_base (11)..(11): bicyclic nucleic acid (BNA)
aguucugucca

SEQ ID NO: 6806 - RNA, 10 nt, Artificial Sequence
  source: /note="Description of Artificial Sequence: Synthetic oligonucleotide"
  source: /note="RNA"
  source: /note="5' tri-ethylene glycol (TEG)"
  modified_base (1)..(1): bicyclic nucleic acid (BNA)
  modified_base (10)..(10): bicyclic nucleic acid (BNA)
aguucugucc

SEQ ID NO: 6807 - RNA, 9 nt, Artificial Sequence
  source: /note="Description of Artificial Sequence: Synthetic oligonucleotide"
  source: /note="RNA"
  source: /note="5' tri-ethylene glycol (TEG)"
  modified_base (1)..(1): bicyclic nucleic acid (BNA)
  modified_base (9)..(9): bicyclic nucleic acid (BNA)
aguucuguc

SEQ ID NO: 6808 - DNA, 8 bp, Artificial Sequence
  source: /note="Description of Artificial Sequence: Synthetic oligonucleotide"
  source: /note="Description of Combined DNA/RNA Molecule: Synthetic oligonucleotide"
  source: /note="DNA/RNA"
  source: /note="5' tri-ethylene glycol (TEG)"
  modified_base (1)..(1): bicyclic nucleic acid (BNA)
  modified_base (8)..(8): bicyclic nucleic acid (BNA)
aguucugt

SEQ ID NO: 6809 - DNA, 20 bp, Artificial Sequence
  source: /note="Description of Artificial Sequence: Synthetic oligonucleotide"
  source: /note="Description of Combined DNA/RNA Molecule: Synthetic oligonucleotide"
  source: /note="DNA/RNA"
  source: /note="5' tri-ethylene glycol (TEG)"
  modified_base (1)..(1): bicyclic nucleic acid (BNA)
  modified_base (20)..(20): bicyclic nucleic acid (BNA)
aaguucuguccaagcccggt

SEQ ID NO: 6810 - RNA, 19 nt, Artificial Sequence
  source: /note="Description of Artificial Sequence: Synthetic oligonucleotide"
  source: /note="RNA"
  source: /note="5' tri-ethylene glycol (TEG)"
  modified_base (1)..(1): bicyclic nucleic acid (BNA)
  modified_base (19)..(19): bicyclic nucleic acid (BNA)
aaguucuguccaagcccgg

SEQ ID NO: 6811 - RNA, 18 nt, Artificial Sequence
  source: /note="Description of Artificial Sequence: Synthetic oligonucleotide"
  source: /note="RNA"
  source: /note="5' tri-ethylene glycol (TEG)"
  modified_base (1)..(1): bicyclic nucleic acid (BNA)
  modified_base (18)..(18): bicyclic nucleic acid (BNA)
aaguucuguccaagcccg

SEQ ID NO: 6812 - RNA, 17 nt, Artificial Sequence
  source: /note="Description of Artificial Sequence: Synthetic oligonucleotide"
  source: /note="RNA"
  source: /note="5' tri-ethylene glycol (TEG)"
  modified_base (1)..(1): bicyclic nucleic acid (BNA)
  modified_base (17)..(17): bicyclic nucleic acid (BNA)
aaguucuguccaagccc

SEQ ID NO: 6813 - RNA, 16 nt, Artificial Sequence
  source: /note="Description of Artificial Sequence: Synthetic oligonucleotide"
  source: /note="RNA"
  source: /note="5' tri-ethylene glycol (TEG)"
  modified_base (1)..(1): bicyclic nucleic acid (BNA)
  modified_base (16)..(16): bicyclic nucleic acid (BNA)
aaguucuguccaagcc

SEQ ID NO: 6814 - RNA, 15 nt, Artificial Sequence
  source: /note="Description of Artificial Sequence: Synthetic oligonucleotide"
  source: /note="RNA"
  source: /note="5' tri-ethylene glycol (TEG)"
  modified_base (1)..(1): bicyclic nucleic acid (BNA)
  modified_base (15)..(15): bicyclic nucleic acid (BNA)
aaguucuguccaagc

SEQ ID NO: 6815 - RNA, 14 nt, Artificial Sequence
  source: /note="Description of Artificial Sequence: Synthetic oligonucleotide"
  source: /note="RNA"
  source: /note="5' tri-ethylene glycol (TEG)"
  modified_base (1)..(1): bicyclic nucleic acid (BNA)
  modified_base (14)..(14): bicyclic nucleic acid (BNA)
aaguucuguccaag

SEQ ID NO: 6816 - RNA, 13 nt, Artificial Sequence
  source: /note="Description of Artificial Sequence: Synthetic oligonucleotide"
  source: /note="RNA"
  source: /note="5' tri-ethylene glycol (TEG)"
  modified_base (1)..(1): bicyclic nucleic acid (BNA)
  modified_base (13)..(13): bicyclic nucleic acid (BNA)
aaguucuguccaa

SEQ ID NO: 6817 - RNA, 12 nt, Artificial Sequence
  source: /note="Description of Artificial Sequence: Synthetic oligonucleotide"
  source: /note="RNA"
  source: /note="5' tri-ethylene glycol (TEG)"
  modified_base (1)..(1): bicyclic nucleic acid (BNA)
  modified_base (12)..(12): bicyclic nucleic acid (BNA)
aaguucugucca

SEQ ID NO: 6818 - RNA, 11 nt, Artificial Sequence
  source: /note="Description of Artificial Sequence: Synthetic oligonucleotide"
  source: /note="RNA"
  source: /note="5' tri-ethylene glycol (TEG)"
  modified_base (1)..(1): bicyclic nucleic acid (BNA)
  modified_base (11)..(11): bicyclic nucleic acid (BNA)
aaguucugucc

SEQ ID NO: 6819 - RNA, 10 nt, Artificial Sequence
  source: /note="Description of Artificial Sequence: Synthetic oligonucleotide"
  source: /note="RNA"
  source: /note="5' tri-ethylene glycol (TEG)"
  modified_base (1)..(1): bicyclic nucleic acid (BNA)
  modified_base (10)..(10): bicyclic nucleic acid (BNA)
aaguucuguc

SEQ ID NO: 6820 - DNA, 9 bp, Artificial Sequence
  source: /note="Description of Artificial Sequence: Synthetic oligonucleotide"
  source: /note="Description of Combined DNA/RNA Molecule: Synthetic oligonucleotide"
  source: /note="DNA/RNA"
  source: /note="5' tri-ethylene glycol (TEG)"
  modified_base (1)..(1): bicyclic nucleic acid (BNA)
  modified_base (9)..(9): bicyclic nucleic acid (BNA)
aaguucugt

SEQ ID NO: 6821 - RNA, 8 nt, Artificial Sequence
  source: /note="Description of Artificial Sequence: Synthetic oligonucleotide"
  source: /note="RNA"
  source: /note="5' tri-ethylene glycol (TEG)"
  modified_base (1)..(1): bicyclic nucleic acid (BNA)
  modified_base (8)..(8): bicyclic nucleic acid (BNA)
aaguucug

SEQ ID NO: 6822 - DNA, 20 bp, Artificial Sequence
  source: /note="Description of Artificial Sequence: Synthetic oligonucleotide"
  source: /note="Description of Combined DNA/RNA Molecule: Synthetic oligonucleotide"
  source: /note="DNA/RNA"
  source: /note="5' tri-ethylene glycol (TEG)"
  modified_base (1)..(1): bicyclic nucleic acid (BNA)
  modified_base (20)..(20): bicyclic nucleic acid (BNA)
taaguucuguccaagcccgg

SEQ ID NO: 6823 - DNA, 19 bp, Artificial Sequence
  source: /note="Description of Artificial Sequence: Synthetic oligonucleotide"
  source: /note="Description of Combined DNA/RNA Molecule: Synthetic oligonucleotide"
  source: /note="DNA/RNA"
  source: /note="5' tri-ethylene glycol (TEG)"
  modified_base (1)..(1): bicyclic nucleic acid (BNA)
  modified_base (19)..(19): bicyclic nucleic acid (BNA)
taaguucuguccaagcccg

SEQ ID NO: 6824 - DNA, 18 bp, Artificial Sequence
  source: /note="Description of Artificial Sequence: Synthetic oligonucleotide"
  source: /note="Description of Combined DNA/RNA Molecule: Synthetic oligonucleotide"
  source: /note="DNA/RNA"
  source: /note="5' tri-ethylene glycol (TEG)"
  modified_base (1)..(1): bicyclic nucleic acid (BNA)
  modified_base (18)..(18): bicyclic nucleic acid (BNA)
taaguucuguccaagccc

SEQ ID NO: 6825 - DNA, 17 bp, Artificial Sequence
  source: /note="Description of Artificial Sequence: Synthetic oligonucleotide"
  source: /note="Description of Combined DNA/RNA Molecule: Synthetic oligonucleotide"
  source: /note="DNA/RNA"
  source: /note="5' tri-ethylene glycol (TEG)"
  modified_base (1)..(1): bicyclic nucleic acid (BNA)
  modified_base (17)..(17): bicyclic nucleic acid (BNA)
taaguucuguccaagcc

SEQ ID NO: 6826 - DNA, 16 bp, Artificial Sequence
  source: /note="Description of Artificial Sequence: Synthetic oligonucleotide"
  source: /note="Description of Combined DNA/RNA Molecule: Synthetic oligonucleotide"
  source: /note="DNA/RNA"
  source: /note="5' tri-ethylene glycol (TEG)"
  modified_base (1)..(1): bicyclic nucleic acid (BNA)
  modified_base (16)..(16): bicyclic nucleic acid (BNA)
taaguucuguccaagc

SEQ ID NO: 6827 - DNA, 14 bp, Artificial Sequence
  source: /note="Description of Artificial Sequence: Synthetic oligonucleotide"
  source: /note="Description of Combined DNA/RNA Molecule: Synthetic oligonucleotide"
  source: /note="DNA/RNA"
  source: /note="5' tri-ethylene glycol (TEG)"
  modified_base (1)..(1): bicyclic nucleic acid (BNA)
  modified_base (14)..(14): bicyclic nucleic acid (BNA)
taaguucuguccaa

SEQ ID NO: 6828 - DNA, 13 bp, Artificial Sequence
  source: /note="Description of Artificial Sequence: Synthetic oligonucleotide"
  source: /note="Description of Combined DNA/RNA Molecule: Synthetic oligonucleotide"
  source: /note="DNA/RNA"
  source: /note="5' tri-ethylene glycol (TEG)"
  modified_base (1)..(1): bicyclic nucleic acid (BNA)
  modified_base (13)..(13): bicyclic nucleic acid (BNA)
taaguucugucca

SEQ ID NO: 6829 - DNA, 12 bp, Artificial Sequence
  source: /note="Description of Artificial Sequence: Synthetic oligonucleotide"
  source: /note="Description of Combined DNA/RNA Molecule: Synthetic oligonucleotide"
  source: /note="DNA/RNA"
  source: /note="5' tri-ethylene glycol (TEG)"
  modified_base (1)..(1): bicyclic nucleic acid (BNA)
  modified_base (12)..(12): bicyclic nucleic acid (BNA)
taaguucugucc

SEQ ID NO: 6830 - DNA, 11 bp, Artificial Sequence
  source: /note="Description of Artificial Sequence: Synthetic oligonucleotide"
  source: /note="Description of Combined DNA/RNA Molecule: Synthetic oligonucleotide"
  source: /note="DNA/RNA"
  source: /note="5' tri-ethylene glycol (TEG)"
  modified_base (1)..(1): bicyclic nucleic acid (BNA)
  modified_base (11)..(11): bicyclic nucleic acid (BNA)
taaguucuguc

SEQ ID NO: 6831 - DNA, 10 bp, Artificial Sequence
  source: /note="Description of Artificial Sequence: Synthetic oligonucleotide"
  source: /note="Description of Combined DNA/RNA Molecule: Synthetic oligonucleotide"
  source: /note="DNA/RNA"
  source: /note="5' tri-ethylene glycol (TEG)"
  modified_base (1)..(1): bicyclic nucleic acid (BNA)
  modified_base (10)..(10): bicyclic nucleic acid (BNA)
taaguucugt

SEQ ID NO: 6832 - DNA, 9 bp, Artificial Sequence
  source: /note="Description of Artificial Sequence: Synthetic oligonucleotide"
  source: /note="Description of Combined DNA/RNA Molecule: Synthetic oligonucleotide"
  source: /note="DNA/RNA"
  source: /note="5' tri-ethylene glycol (TEG)"
  modified_base (1)..(1): bicyclic nucleic acid (BNA)
  modified_base (9)..(9): bicyclic nucleic acid (BNA)
taaguucug

SEQ ID NO: 6833 - DNA, 8 bp, Artificial Sequence
  source: /note="Description of Artificial Sequence: Synthetic oligonucleotide"
  source: /note="Description of Combined DNA/RNA Molecule: Synthetic oligonucleotide"
  source: /note="DNA/RNA"
  source: /note="5' tri-ethylene glycol (TEG)"
  modified_base (1)..(1): bicyclic nucleic acid (BNA)
  modified_base (8)..(8): bicyclic nucleic acid (BNA)
taaguuct

SEQ ID NO: 6834 - RNA, 20 nt, Artificial Sequence
  source: /note="Description of Artificial Sequence: Synthetic oligonucleotide"
  source: /note="RNA"
  source: /note="5' tri-ethylene glycol (TEG)"
  modified_base (1)..(1): bicyclic nucleic acid (BNA)
  modified_base (20)..(20): bicyclic nucleic acid (BNA)
guaaguucuguccaagcccg

SEQ ID NO: 6835 - RNA, 19 nt, Artificial Sequence
  source: /note="Description of Artificial Sequence: Synthetic oligonucleotide"
  source: /note="RNA"
  source: /note="5' tri-ethylene glycol (TEG)"
  modified_base (1)..(1): bicyclic nucleic acid (BNA)
  modified_base (19)..(19): bicyclic nucleic acid (BNA)
guaaguucuguccaagccc

SEQ ID NO: 6836 - RNA, 17 nt, Artificial Sequence
  source: /note="Description of Artificial Sequence: Synthetic oligonucleotide"
  source: /note="RNA"
  source: /note="5' tri-ethylene glycol (TEG)"
  modified_base (1)..(1): bicyclic nucleic acid (BNA)
  modified_base (17)..(17): bicyclic nucleic acid (BNA)
guaaguucuguccaagc

SEQ ID NO: 6837 - RNA, 16 nt, Artificial Sequence
  source: /note="Description of Artificial Sequence: Synthetic oligonucleotide"
  source: /note="RNA"
  source: /note="5' tri-ethylene glycol (TEG)"
  modified_base (1)..(1): bicyclic nucleic acid (BNA)
  modified_base (16)..(16): bicyclic nucleic acid (BNA)
guaaguucuguccaag

SEQ ID NO: 6838 - RNA, 15 nt, Artificial Sequence
  source: /note="Description of Artificial Sequence: Synthetic oligonucleotide"
  source: /note="RNA"
  source: /note="5' tri-ethylene glycol (TEG)"
  modified_base (1)..(1): bicyclic nucleic acid (BNA)
  modified_base (15)..(15): bicyclic nucleic acid (BNA)
guaaguucuguccaa

SEQ ID NO: 6839 - RNA, 14 nt, Artificial Sequence
  source: /note="Description of Artificial Sequence: Synthetic oligonucleotide"
  source: /note="RNA"
  source: /note="5' tri-ethylene glycol (TEG)"
  modified_base (1)..(1): bicyclic nucleic acid (BNA)
  modified_base (14)..(14): bicyclic nucleic acid (BNA)
guaaguucugucca

SEQ ID NO: 6840 - RNA, 13 nt, Artificial Sequence
  source: /note="Description of Artificial Sequence: Synthetic oligonucleotide"
  source: /note="RNA"
  source: /note="5' tri-ethylene glycol (TEG)"
  modified_base (1)..(1): bicyclic nucleic acid (BNA)
  modified_base (13)..(13): bicyclic nucleic acid (BNA)
guaaguucugucc

SEQ ID NO: 6841 - RNA, 12 nt, Artificial Sequence
  source: /note="Description of Artificial Sequence: Synthetic oligonucleotide"
  source: /note="RNA"
  source: /note="5' tri-ethylene glycol (TEG)"
  modified_base (1)..(1): bicyclic nucleic acid (BNA)
  modified_base (12)..(12): bicyclic nucleic acid (BNA)
guaaguucuguc

SEQ ID NO: 6842 - DNA, 11 bp, Artificial Sequence
  source: /note="Description of Artificial Sequence: Synthetic oligonucleotide"
  source: /note="Description of Combined DNA/RNA Molecule: Synthetic oligonucleotide"
  source: /note="DNA/RNA"
  source: /note="5' tri-ethylene glycol (TEG)"
  modified_base (1)..(1): bicyclic nucleic acid (BNA)
  modified_base (11)..(11): bicyclic nucleic acid (BNA)
guaaguucugt

SEQ ID NO: 6843 - RNA, 10 nt, Artificial Sequence
  source: /note="Description of Artificial Sequence: Synthetic oligonucleotide"
  source: /note="RNA"
  source: /note="5' tri-ethylene glycol (TEG)"
  modified_base (1)..(1): bicyclic nucleic acid (BNA)
  modified_base (10)..(10): bicyclic nucleic acid (BNA)
guaaguucug

SEQ ID NO: 6844 - DNA, 9 bp, Artificial Sequence
  source: /note="Description of Artificial Sequence: Synthetic oligonucleotide"
  source: /note="Description of Combined DNA/RNA Molecule: Synthetic oligonucleotide"
  source: /note="DNA/RNA"
  source: /note="5' tri-ethylene glycol (TEG)"
  modified_base (1)..(1): bicyclic nucleic acid (BNA)
  modified_base (9)..(9): bicyclic nucleic acid (BNA)
guaaguuct

SEQ ID NO: 6845 - RNA, 8 nt, Artificial Sequence
  source: /note="Description of Artificial Sequence: Synthetic oligonucleotide"
  source: /note="RNA"
  source: /note="5' tri-ethylene glycol (TEG)"
  modified_base (1)..(1): bicyclic nucleic acid (BNA)
  modified_base (8)..(8): bicyclic nucleic acid (BNA)
guaaguuc

SEQ ID NO: 6846 - RNA, 20 nt, Artificial Sequence
  source: /note="Description of Artificial Sequence: Synthetic oligonucleotide"
  source: /note="RNA"
  source: /note="5' tri-ethylene glycol (TEG)"
  modified_base (1)..(1): bicyclic nucleic acid (BNA)
  modified_base (20)..(20): bicyclic nucleic acid (BNA)
gguaaguucuguccaagccc

SEQ ID NO: 6847 - RNA, 19 nt, Artificial Sequence
  source: /note="Description of Artificial Sequence: Synthetic oligonucleotide"
  source: /note="RNA"
  source: /note="5' tri-ethylene glycol (TEG)"
  modified_base (1)..(1): bicyclic nucleic acid (BNA)
  modified_base (19)..(19): bicyclic nucleic acid (BNA)
gguaaguucuguccaagcc

SEQ ID NO: 6848 - RNA, 17 nt, Artificial Sequence
  source: /note="Description of Artificial Sequence: Synthetic oligonucleotide"
  source: /note="RNA"
  source: /note="5' tri-ethylene glycol (TEG)"
  modified_base (1)..(1): bicyclic nucleic acid (BNA)
  modified_base (17)..(17): bicyclic nucleic acid (BNA)
gguaaguucuguccaag

SEQ ID NO: 6849 - RNA, 16 nt, Artificial Sequence
  source: /note="Description of Artificial Sequence: Synthetic oligonucleotide"
  source: /note="RNA"
  source: /note="5' tri-ethylene glycol (TEG)"
  modified_base (1)..(1): bicyclic nucleic acid (BNA)
  modified_base (16)..(16): bicyclic nucleic acid (BNA)
gguaaguucuguccaa

SEQ ID NO: 6850 - RNA, 15 nt, Artificial Sequence
  source: /note="Description of Artificial Sequence: Synthetic oligonucleotide"
  source: /note="RNA"
  source: /note="5' tri-ethylene glycol (TEG)"
  modified_base (1)..(1): bicyclic nucleic acid (BNA)
  modified_base (15)..(15): bicyclic nucleic acid (BNA)
gguaaguucugucca

SEQ ID NO: 6851 - RNA, 14 nt, Artificial Sequence
  source: /note="Description of Artificial Sequence: Synthetic oligonucleotide"
  source: /note="RNA"
  source: /note="5' tri-ethylene glycol (TEG)"
  modified_base (1)..(1): bicyclic nucleic acid (BNA)
  modified_base (14)..(14): bicyclic nucleic acid (BNA)
gguaaguucugucc

SEQ ID NO: 6852 - RNA, 13 nt, Artificial Sequence
  source: /note="Description of Artificial Sequence: Synthetic oligonucleotide"
  source: /note="RNA"
  source: /note="5' tri-ethylene glycol (TEG)"
  modified_base (1)..(1): bicyclic nucleic acid (BNA)
  modified_base (13)..(13): bicyclic nucleic acid (BNA)
gguaaguucuguc

SEQ ID NO: 6853 - DNA, 12 bp, Artificial Sequence
  source: /note="Description of Artificial Sequence: Synthetic oligonucleotide"
  source: /note="Description of Combined DNA/RNA Molecule: Synthetic oligonucleotide"
  source: /note="DNA/RNA"
  source: /note="5' tri-ethylene glycol (TEG)"
  modified_base (1)..(1): bicyclic nucleic acid (BNA)
  modified_base (12)..(12): bicyclic nucleic acid (BNA)
gguaaguucugt

SEQ ID NO: 6854 - RNA, 11 nt, Artificial Sequence
  source: /note="Description of Artificial Sequence: Synthetic oligonucleotide"
  source: /note="RNA"
  source: /note="5' tri-ethylene glycol (TEG)"
  modified_base (1)..(1): bicyclic nucleic acid (BNA)
  modified_base (11)..(11): bicyclic nucleic acid (BNA)
gguaaguucug

SEQ ID NO: 6855 - DNA, 10 bp, Artificial Sequence
  source: /note="Description of Artificial Sequence: Synthetic oligonucleotide"
  source: /note="Description of Combined DNA/RNA Molecule: Synthetic oligonucleotide"
  source: /note="DNA/RNA"
  source: /note="5' tri-ethylene glycol (TEG)"
  modified_base (1)..(1): bicyclic nucleic acid (BNA)
  modified_base (10)..(10): bicyclic nucleic acid (BNA)
gguaaguuct

SEQ ID NO: 6856 - RNA, 9 nt, Artificial Sequence
  source: /note="Description of Artificial Sequence: Synthetic oligonucleotide"
  source: /note="RNA"
  source: /note="5' tri-ethylene glycol (TEG)"
  modified_base (1)..(1): bicyclic nucleic acid (BNA)
  modified_base (9)..(9): bicyclic nucleic acid (BNA)
gguaaguuc

SEQ ID NO: 6857 - DNA, 8 bp, Artificial Sequence
  source: /note="Description of Artificial Sequence: Synthetic oligonucleotide"
  source: /note="Description of Combined DNA/RNA Molecule: Synthetic oligonucleotide"
  source: /note="DNA/RNA"
  source: /note="5' tri-ethylene glycol (TEG)"
  modified_base (1)..(1): bicyclic nucleic acid (BNA)
  modified_base (8)..(8): bicyclic nucleic acid (BNA)
gguaagut

SEQ ID NO: 6858 - RNA, 20 nt, Artificial Sequence
  source: /note="Description of Artificial Sequence: Synthetic oligonucleotide"
  source: /note="RNA"
  source: /note="5' tri-ethylene glycol (TEG)"
  modified_base (1)..(1): bicyclic nucleic acid (BNA)
  modified_base (20)..(20): bicyclic nucleic acid (BNA)
cgguaaguucuguccaagcc

SEQ ID NO: 6859 - RNA, 19 nt, Artificial Sequence
  source: /note="Description of Artificial Sequence: Synthetic oligonucleotide"
  source: /note="RNA"
  source: /note="5' tri-ethylene glycol (TEG)"
  modified_base (1)..(1): bicyclic nucleic acid (BNA)
  modified_base (19)..(19): bicyclic nucleic acid (BNA)
cgguaaguucuguccaagc

SEQ ID NO: 6860 - RNA, 18 nt, Artificial Sequence
  source: /note="Description of Artificial Sequence: Synthetic oligonucleotide"
  source: /note="RNA"
  source: /note="5' tri-ethylene glycol (TEG)"
  modified_base (1)..(1): bicyclic nucleic acid (BNA)
  modified_base (18)..(18): bicyclic nucleic acid (BNA)
cgguaaguucuguccaag

SEQ ID NO: 6861 - RNA, 17 nt, Artificial Sequence
  source: /note="Description of Artificial Sequence: Synthetic oligonucleotide"
  source: /note="RNA"
  source: /note="5' tri-ethylene glycol (TEG)"
  modified_base (1)..(1): bicyclic nucleic acid (BNA)
  modified_base (17)..(17): bicyclic nucleic acid (BNA)
cgguaaguucuguccaa

SEQ ID NO: 6862 - RNA, 16 nt, Artificial Sequence
  source: /note="Description of Artificial Sequence: Synthetic oligonucleotide"
  source: /note="RNA"
  source: /note="5' tri-ethylene glycol (TEG)"
  modified_base (1)..(1): bicyclic nucleic acid (BNA)
  modified_base (16)..(16): bicyclic nucleic acid (BNA)
cgguaaguucugucca

SEQ ID NO: 6863 - RNA, 15 nt, Artificial Sequence
  source: /note="Description of Artificial Sequence: Synthetic oligonucleotide"
  source: /note="RNA"
  source: /note="5' tri-ethylene glycol (TEG)"
  modified_base (1)..(1): bicyclic nucleic acid (BNA)
  modified_base (15)..(15): bicyclic nucleic acid (BNA)
cgguaaguucugucc

SEQ ID NO: 6864 - RNA, 14 nt, Artificial Sequence
  source: /note="Description of Artificial Sequence: Synthetic oligonucleotide"
  source: /note="RNA"
  source: /note="5' tri-ethylene glycol (TEG)"
  modified_base (1)..(1): bicyclic nucleic acid (BNA)
  modified_base (14)..(14): bicyclic nucleic acid (BNA)
cgguaaguucuguc

SEQ ID NO: 6865 - DNA, 13 bp, Artificial Sequence
  source: /note="Description of Artificial Sequence: Synthetic oligonucleotide"
  source: /note="Description of Combined DNA/RNA Molecule: Synthetic oligonucleotide"
  source: /note="DNA/RNA"
  source: /note="5' tri-ethylene glycol (TEG)"
  modified_base (1)..(1): bicyclic nucleic acid (BNA)
  modified_base (13)..(13): bicyclic nucleic acid (BNA)
cgguaaguucugt

SEQ ID NO: 6866 - RNA, 12 nt, Artificial Sequence
  source: /note="Description of Artificial Sequence: Synthetic oligonucleotide"
  source: /note="RNA"
  source: /note="5' tri-ethylene glycol (TEG)"
  modified_base (1)..(1): bicyclic nucleic acid (BNA)
  modified_base (12)..(12): bicyclic nucleic acid (BNA)
cgguaaguucug

SEQ ID NO: 6867 - DNA, 11 bp, Artificial Sequence
  source: /note="Description of Artificial Sequence: Synthetic oligonucleotide"
  source: /note="Description of Combined DNA/RNA Molecule: Synthetic oligonucleotide"
  source: /note="DNA/RNA"
  source: /note="5' tri-ethylene glycol (TEG)"
  modified_base (1)..(1): bicyclic nucleic acid (BNA)
  modified_base (11)..(11): bicyclic nucleic acid (BNA)
cgguaaguuct

SEQ ID NO: 6868 - RNA, 10 nt, Artificial Sequence
  source: /note="Description of Artificial Sequence: Synthetic oligonucleotide"
  source: /note="RNA"
  source: /note="5' tri-ethylene glycol (TEG)"
  modified_base (1)..(1): bicyclic nucleic acid (BNA)
  modified_base (10)..(10): bicyclic nucleic acid (BNA)
cgguaaguuc

SEQ ID NO: 6869 - DNA, 9 bp, Artificial Sequence
  source: /note="Description of Artificial Sequence: Synthetic oligonucleotide"
  source: /note="Description of Combined DNA/RNA Molecule: Synthetic oligonucleotide"
  source: /note="DNA/RNA"
  source: /note="5' tri-ethylene glycol (TEG)"
  modified_base (1)..(1): bicyclic nucleic acid (BNA)
  modified_base (9)..(9): bicyclic nucleic acid (BNA)
cgguaagut

SEQ ID NO: 6870 - DNA, 8 bp, Artificial Sequence
  source: /note="Description of Artificial Sequence: Synthetic oligonucleotide"
  source: /note="Description of Combined DNA/RNA Molecule: Synthetic oligonucleotide"
  source: /note="DNA/RNA"
  source: /note="5' tri-ethylene glycol (TEG)"
  modified_base (1)..(1): bicyclic nucleic acid (BNA)
  modified_base (8)..(8): bicyclic nucleic acid (BNA)
cgguaagt

SEQ ID NO: 6871 - DNA, 20 bp, Artificial Sequence
  source: /note="Description of Artificial Sequence: Synthetic oligonucleotide"
  source: /note="Description of Combined DNA/RNA Molecule: Synthetic oligonucleotide"
  source: /note="DNA/RNA"
  source: /note="5' tri-ethylene glycol (TEG)"
  modified_base (1)..(1): bicyclic nucleic acid (BNA)
  modified_base (20)..(20): bicyclic nucleic acid (BNA)
tcgguaaguucuguccaagc

SEQ ID NO: 6872 - DNA, 19 bp, Artificial Sequence
  source: /note="Description of Artificial Sequence: Synthetic oligonucleotide"
  source: /note="Description of Combined DNA/RNA Molecule: Synthetic oligonucleotide"
  source: /note="DNA/RNA"
  source: /note="5' tri-ethylene glycol (TEG)"
  modified_base (1)..(1): bicyclic nucleic acid (BNA)
  modified_base (19)..(19): bicyclic nucleic acid (BNA)
tcgguaaguucuguccaag

SEQ ID NO: 6873 - DNA, 18 bp, Artificial Sequence
  source: /note="Description of Artificial Sequence: Synthetic oligonucleotide"
  source: /note="Description of Combined DNA/RNA Molecule: Synthetic oligonucleotide"
  source: /note="DNA/RNA"
  source: /note="5' tri-ethylene glycol (TEG)"
  modified_base (1)..(1): bicyclic nucleic acid (BNA)
  modified_base (18)..(18): bicyclic nucleic acid (BNA)
tcgguaaguucuguccaa

SEQ ID NO: 6874 - DNA, 17 bp, Artificial Sequence
  source: /note="Description of Artificial Sequence: Synthetic oligonucleotide"
  source: /note="Description of Combined DNA/RNA Molecule: Synthetic oligonucleotide"
  source: /note="DNA/RNA"
  source: /note="5' tri-ethylene glycol (TEG)"
  modified_base (1)..(1): bicyclic nucleic acid (BNA)
  modified_base (17)..(17): bicyclic nucleic acid (BNA)
tcgguaaguucugucca

SEQ ID NO: 6875 - DNA, 16 bp, Artificial Sequence
  source: /note="Description of Artificial Sequence: Synthetic oligonucleotide"
  source: /note="Description of Combined DNA/RNA Molecule: Synthetic oligonucleotide"
  source: /note="DNA/RNA"
  source: /note="5' tri-ethylene glycol (TEG)"
  modified_base (1)..(1): bicyclic nucleic acid (BNA)
  modified_base (16)..(16): bicyclic nucleic acid (BNA)
tcgguaaguucugucc

SEQ ID NO: 6876 - DNA, 15 bp, Artificial Sequence
  source: /note="Description of Artificial Sequence: Synthetic oligonucleotide"
  source: /note="Description of Combined DNA/RNA Molecule: Synthetic oligonucleotide"
  source: /note="DNA/RNA"
  source: /note="5' tri-ethylene glycol (TEG)"
  modified_base (1)..(1): bicyclic nucleic acid (BNA)
  modified_base (15)..(15): bicyclic nucleic acid (BNA)
tcgguaaguucuguc

SEQ ID NO: 6877 - DNA, 14 bp, Artificial Sequence
  source: /note="Description of Artificial Sequence: Synthetic oligonucleotide"
  source: /note="Description of Combined DNA/RNA Molecule: Synthetic oligonucleotide"
  source: /note="DNA/RNA"
  source: /note="5' tri-ethylene glycol (TEG)"
  modified_base (1)..(1): bicyclic nucleic acid (BNA)
  modified_base (14)..(14): bicyclic nucleic acid (BNA)
tcgguaaguucugt

SEQ ID NO: 6878 - DNA, 13 bp, Artificial Sequence
  source: /note="Description of Artificial Sequence: Synthetic oligonucleotide"
  source: /note="Description of Combined DNA/RNA Molecule: Synthetic oligonucleotide"
  source: /note="DNA/RNA"
  source: /note="5' tri-ethylene glycol (TEG)"
  modified_base (1)..(1): bicyclic nucleic acid (BNA)
  modified_base (13)..(13): bicyclic nucleic acid (BNA)
tcgguaaguucug

SEQ ID NO: 6879 - DNA, 12 bp, Artificial Sequence
  source: /note="Description of Artificial Sequence: Synthetic oligonucleotide"
  source: /note="Description of Combined DNA/RNA Molecule: Synthetic oligonucleotide"
  source: /note="DNA/RNA"
  source: /note="5' tri-ethylene glycol (TEG)"
  modified_base (1)..(1): bicyclic nucleic acid (BNA)
  modified_base (12)..(12): bicyclic nucleic acid (BNA)
tcgguaaguuct

SEQ ID NO: 6880 - DNA, 11 bp, Artificial Sequence
  source: /note="Description of Artificial Sequence: Synthetic oligonucleotide"
  source: /note="Description of Combined DNA/RNA Molecule: Synthetic oligonucleotide"
  source: /note="DNA/RNA"
  source: /note="5' tri-ethylene glycol (TEG)"
  modified_base (1)..(1): bicyclic nucleic acid (BNA)
  modified_base (11)..(11): bicyclic nucleic acid (BNA)
tcgguaaguuc

SEQ ID NO: 6881 - DNA, 10 bp, Artificial Sequence
  source: /note="Description of Artificial Sequence: Synthetic oligonucleotide"
  source: /note="Description of Combined DNA/RNA Molecule: Synthetic oligonucleotide"
  source: /note="DNA/RNA"
  source: /note="5' tri-ethylene glycol (TEG)"
  modified_base (1)..(1): bicyclic nucleic acid (BNA)
  modified_base (10)..(10): bicyclic nucleic acid (BNA)
tcgguaagut

SEQ ID NO: 6882 - DNA, 9 bp, Artificial Sequence
  source: /note="Description of Artificial Sequence: Synthetic oligonucleotide"
  source: /note="Description of Combined DNA/RNA Molecule: Synthetic oligonucleotide"
  source: /note="DNA/RNA"
  source: /note="5' tri-ethylene glycol (TEG)"
  modified_base (1)..(1): bicyclic nucleic acid (BNA)
  modified_base (9)..(9): bicyclic nucleic acid (BNA)
tcgguaagt

SEQ ID NO: 6883 - RNA, 20 nt, Artificial Sequence
  source: /note="Description of Artificial Sequence: Synthetic oligonucleotide"
  source: /note="RNA"
  source: /note="5' tri-ethylene glycol (TEG)"
  modified_base (1)..(1): bicyclic nucleic acid (BNA)
  modified_base (20)..(20): bicyclic nucleic acid (BNA)
gucgguaaguucuguccaag

SEQ ID NO: 6884 - RNA, 19 nt, Artificial Sequence
  source: /note="Description of Artificial Sequence: Synthetic oligonucleotide"
  source: /note="RNA"
  source: /note="5' tri-ethylene glycol (TEG)"
  modified_base (1)..(1): bicyclic nucleic acid (BNA)
  modified_base (19)..(19): bicyclic nucleic acid (BNA)
gucgguaaguucuguccaa

SEQ ID NO: 6885 - RNA, 18 nt, Artificial Sequence
  source: /note="Description of Artificial Sequence: Synthetic oligonucleotide"
  source: /note="RNA"
  source: /note="5' tri-ethylene glycol (TEG)"
  modified_base (1)..(1): bicyclic nucleic acid (BNA)
  modified_base (18)..(18): bicyclic nucleic acid (BNA)
gucgguaaguucugucca

SEQ ID NO: 6886 - RNA, 17 nt, Artificial Sequence
  source: /note="Description of Artificial Sequence: Synthetic oligonucleotide"
  source: /note="RNA"
  source: /note="5' tri-ethylene glycol (TEG)"
  modified_base (1)..(1): bicyclic nucleic acid (BNA)
  modified_base (17)..(17): bicyclic nucleic acid (BNA)
gucgguaaguucugucc

SEQ ID NO: 6887 - RNA, 16 nt, Artificial Sequence
  source: /note="Description of Artificial Sequence: Synthetic oligonucleotide"
  source: /note="RNA"
  source: /note="5' tri-ethylene glycol (TEG)"
  modified_base (1)..(1): bicyclic nucleic acid (BNA)
  modified_base (16)..(16): bicyclic nucleic acid (BNA)
gucgguaaguucuguc

SEQ ID NO: 6888 - DNA, 15 bp, Artificial Sequence
  source: /note="Description of Artificial Sequence: Synthetic oligonucleotide"
  source: /note="Description of Combined DNA/RNA Molecule: Synthetic oligonucleotide"
  source: /note="DNA/RNA"
  source: /note="5' tri-ethylene glycol (TEG)"
  modified_base (1)..(1): bicyclic nucleic acid (BNA)
  modified_base (15)..(15): bicyclic nucleic acid (BNA)
gucgguaaguucugt

SEQ ID NO: 6889 - RNA, 14 nt, Artificial Sequence
  source: /note="Description of Artificial Sequence: Synthetic oligonucleotide"
  source: /note="RNA"
  source: /note="5' tri-ethylene glycol (TEG)"
  modified_base (1)..(1): bicyclic nucleic acid (BNA)
  modified_base (14)..(14): bicyclic nucleic acid (BNA)
gucgguaaguucug

SEQ ID NO: 6890 - DNA, 13 bp, Artificial Sequence
  source: /note="Description of Artificial Sequence: Synthetic oligonucleotide"
  source: /note="Description of Combined DNA/RNA Molecule: Synthetic oligonucleotide"
  source: /note="DNA/RNA"
  source: /note="5' tri-ethylene glycol (TEG)"
  modified_base (1)..(1): bicyclic nucleic acid (BNA)
  modified_base (13)..(13): bicyclic nucleic acid (BNA)
gucgguaaguuct

SEQ ID NO: 6891 - RNA, 12 nt, Artificial Sequence
  source: /note="Description of Artificial Sequence: Synthetic oligonucleotide"
  source: /note="RNA"
  source: /note="5' tri-ethylene glycol (TEG)"
  modified_base (1)..(1): bicyclic nucleic acid (BNA)
  modified_base (12)..(12): bicyclic nucleic acid (BNA)
gucgguaaguuc

SEQ ID NO: 6892 - DNA, 11 bp, Artificial Sequence
  source: /note="Description of Artificial Sequence: Synthetic oligonucleotide"
  source: /note="Description of Combined DNA/RNA Molecule: Synthetic oligonucleotide"
  source: /note="DNA/RNA"
  source: /note="5' tri-ethylene glycol (TEG)"
  modified_base (1)..(1): bicyclic nucleic acid (BNA)
  modified_base (11)..(11): bicyclic nucleic acid (BNA)
gucgguaagut

SEQ ID NO: 6893 - DNA, 10 bp, Artificial Sequence
  source: /note="Description of Artificial Sequence: Synthetic oligonucleotide"
  source: /note="Description of Combined DNA/RNA Molecule: Synthetic oligonucleotide"
  source: /note="DNA/RNA"
  source: /note="5' tri-ethylene glycol (TEG)"
  modified_base (1)..(1): bicyclic nucleic acid (BNA)
  modified_base (10)..(10): bicyclic nucleic acid (BNA)
gucgguaagt

SEQ ID NO: 6894 - RNA, 20 nt, Artificial Sequence
  source: /note="Description of Artificial Sequence: Synthetic oligonucleotide"
  source: /note="RNA"
  source: /note="5' tri-ethylene glycol (TEG)"
  modified_base (1)..(1): bicyclic nucleic acid (BNA)
  modified_base (20)..(20): bicyclic nucleic acid (BNA)
agucgguaaguucuguccaa

SEQ ID NO: 6895 - RNA, 19 nt, Artificial Sequence
  source: /note="Description of Artificial Sequence: Synthetic oligonucleotide"
  source: /note="RNA"
  source: /note="5' tri-ethylene glycol (TEG)"
  modified_base (1)..(1): bicyclic nucleic acid (BNA)
  modified_base (19)..(19): bicyclic nucleic acid (BNA)
agucgguaaguucugucca

SEQ ID NO: 6896 - RNA, 17 nt, Artificial Sequence
  source: /note="Description of Artificial Sequence: Synthetic oligonucleotide"
  source: /note="RNA"
  source: /note="5' tri-ethylene glycol (TEG)"
  modified_base (1)..(1): bicyclic nucleic acid (BNA)
  modified_base (17)..(17): bicyclic nucleic acid (BNA)
agucgguaaguucuguc

SEQ ID NO: 6897 - DNA, 16 bp, Artificial Sequence
  source: /note="Description of Artificial Sequence: Synthetic oligonucleotide"
  source: /note="Description of Combined DNA/RNA Molecule: Synthetic oligonucleotide"
  source: /note="DNA/RNA"
  source: /note="5' tri-ethylene glycol (TEG)"
  modified_base (1)..(1): bicyclic nucleic acid (BNA)
  modified_base (16)..(16): bicyclic nucleic acid (BNA)
agucgguaaguucugt

SEQ ID NO: 6898 - RNA, 15 nt, Artificial Sequence
  source: /note="Description of Artificial Sequence: Synthetic oligonucleotide"
  source: /note="RNA"
  source: /note="5' tri-ethylene glycol (TEG)"
  modified_base (1)..(1): bicyclic nucleic acid (BNA)
  modified_base (15)..(15): bicyclic nucleic acid (BNA)
agucgguaaguucug

SEQ ID NO: 6899 - DNA, 14 bp, Artificial Sequence
  source: /note="Description of Artificial Sequence: Synthetic oligonucleotide"
  source: /note="Description of Combined DNA/RNA Molecule: Synthetic oligonucleotide"
  source: /note="DNA/RNA"
  source: /note="5' tri-ethylene glycol (TEG)"
  modified_base (1)..(1): bicyclic nucleic acid (BNA)
  modified_base (14)..(14): bicyclic nucleic acid (BNA)
agucgguaaguuct

SEQ ID NO: 6900 - RNA, 13 nt, Artificial Sequence
  source: /note="Description of Artificial Sequence: Synthetic oligonucleotide"
  source: /note="RNA"
  source: /note="5' tri-ethylene glycol (TEG)"
  modified_base (1)..(1): bicyclic nucleic acid (BNA)
  modified_base (13)..(13): bicyclic nucleic acid (BNA)
agucgguaaguuc

SEQ ID NO: 6901 - DNA, 12 bp, Artificial Sequence
  source: /note="Description of Artificial Sequence: Synthetic oligonucleotide"
  source: /note="Description of Combined DNA/RNA Molecule: Synthetic oligonucleotide"
  source: /note="DNA/RNA"
  source: /note="5' tri-ethylene glycol (TEG)"
  modified_base (1)..(1): bicyclic nucleic acid (BNA)
  modified_base (12)..(12): bicyclic nucleic acid (BNA)
agucgguaagut

SEQ ID NO: 6902 - DNA, 11 bp, Artificial Sequence
  source: /note="Description of Artificial Sequence: Synthetic oligonucleotide"
  source: /note="Description of Combined DNA/RNA Molecule: Synthetic oligonucleotide"
  source: /note="DNA/RNA"
  source: /note="5' tri-ethylene glycol (TEG)"
  modified_base (1)..(1): bicyclic nucleic acid (BNA)
  modified_base (11)..(11): bicyclic nucleic acid (BNA)
agucgguaagt

SEQ ID NO: 6903 - RNA, 20 nt, Artificial Sequence
  source: /note="Description of Artificial Sequence: Synthetic oligonucleotide"
  source: /note="RNA"
  source: /note="5' tri-ethylene glycol (TEG)"
  modified_base (1)..(1): bicyclic nucleic acid (BNA)
  modified_base (20)..(20): bicyclic nucleic acid (BNA)
cagucgguaaguucugucca

SEQ ID NO: 6904 - RNA, 19 nt, Artificial Sequence
  source: /note="Description of Artificial Sequence: Synthetic oligonucleotide"
  source: /note="RNA"
  source: /note="5' tri-ethylene glycol (TEG)"
  modified_base (1)..(1): bicyclic nucleic acid (BNA)
  modified_base (19)..(19): bicyclic nucleic acid (BNA)
cagucgguaaguucugucc

SEQ ID NO: 6905 - RNA, 18 nt, Artificial Sequence
  source: /note="Description of Artificial Sequence: Synthetic oligonucleotide"
  source: /note="RNA"
  source: /note="5' tri-ethylene glycol (TEG)"
  modified_base (1)..(1): bicyclic nucleic acid (BNA)
  modified_base (18)..(18): bicyclic nucleic acid (BNA)
cagucgguaaguucuguc

SEQ ID NO: 6906 - DNA, 17 bp, Artificial Sequence
  source: /note="Description of Artificial Sequence: Synthetic oligonucleotide"
  source: /note="Description of Combined DNA/RNA Molecule: Synthetic oligonucleotide"
  source: /note="DNA/RNA"
  source: /note="5' tri-ethylene glycol (TEG)"
  modified_base (1)..(1): bicyclic nucleic acid (BNA)
  modified_base (17)..(17): bicyclic nucleic acid (BNA)
cagucgguaaguucugt

SEQ ID NO: 6907 - RNA, 16 nt, Artificial Sequence
  source: /note="Description of Artificial Sequence: Synthetic oligonucleotide"
  source: /note="RNA"
  source: /note="5' tri-ethylene glycol (TEG)"
  modified_base (1)..(1): bicyclic nucleic acid (BNA)
  modified_base (16)..(16): bicyclic nucleic acid (BNA)
cagucgguaaguucug

SEQ ID NO: 6908 - DNA, 15 bp, Artificial Sequence
  source: /note="Description of Artificial Sequence: Synthetic oligonucleotide"
  source: /note="Description of Combined DNA/RNA Molecule: Synthetic oligonucleotide"
  source: /note="DNA/RNA"
  source: /note="5' tri-ethylene glycol (TEG)"
  modified_base (1)..(1): bicyclic nucleic acid (BNA)
  modified_base (15)..(15): bicyclic nucleic acid (BNA)
cagucgguaaguuct

SEQ ID NO: 6909 - RNA, 14 nt, Artificial Sequence
  source: /note="Description of Artificial Sequence: Synthetic oligonucleotide"
  source: /note="RNA"
  source: /note="5' tri-ethylene glycol (TEG)"
  modified_base (1)..(1): bicyclic nucleic acid (BNA)
  modified_base (14)..(14): bicyclic nucleic acid (BNA)
cagucgguaaguuc

SEQ ID NO: 6910 - DNA, 13 bp, Artificial Sequence
  source: /note="Description of Artificial Sequence: Synthetic oligonucleotide"
  source: /note="Description of Combined DNA/RNA Molecule: Synthetic oligonucleotide"
  source: /note="DNA/RNA"
  source: /note="5' tri-ethylene glycol (TEG)"
  modified_base (1)..(1): bicyclic nucleic acid (BNA)
  modified_base (13)..(13): bicyclic nucleic acid (BNA)
cagucgguaagut

SEQ ID NO: 6911 - DNA, 12 bp, Artificial Sequence
  source: /note="Description of Artificial Sequence: Synthetic oligonucleotide"
  source: /note="Description of Combined DNA/RNA Molecule: Synthetic oligonucleotide"
  source: /note="DNA/RNA"
  source: /note="5' tri-ethylene glycol (TEG)"
  modified_base (1)..(1): bicyclic nucleic acid (BNA)
  modified_base (12)..(12): bicyclic nucleic acid (BNA)
cagucgguaagt

SEQ ID NO: 6912 - RNA, 20 nt, Artificial Sequence
  source: /note="Description of Artificial Sequence: Synthetic oligonucleotide"
  source: /note="RNA"
  source: /note="5' tri-ethylene glycol (TEG)"
  modified_base (1)..(1): bicyclic nucleic acid (BNA)
  modified_base (20)..(20): bicyclic nucleic acid (BNA)
ccagucgguaaguucugucc

SEQ ID NO: 6913 - RNA, 19 nt, Artificial Sequence
  source: /note="Description of Artificial Sequence: Synthetic oligonucleotide"
  source: /note="RNA"
  source: /note="5' tri-ethylene glycol (TEG)"
  modified_base (1)..(1): bicyclic nucleic acid (BNA)
  modified_base (19)..(19): bicyclic nucleic acid (BNA)
ccagucgguaaguucuguc

SEQ ID NO: 6914 - DNA, 18 bp, Artificial Sequence
  source: /note="Description of Artificial Sequence: Synthetic oligonucleotide"
  source: /note="Description of Combined DNA/RNA Molecule: Synthetic oligonucleotide"
  source: /note="DNA/RNA"
  source: /note="5' tri-ethylene glycol (TEG)"
  modified_base (1)..(1): bicyclic nucleic acid (BNA)
  modified_base (18)..(18): bicyclic nucleic acid (BNA)
ccagucgguaaguucugt

SEQ ID NO: 6915 - RNA, 17 nt, Artificial Sequence
  source: /note="Description of Artificial Sequence: Synthetic oligonucleotide"
  source: /note="RNA"
  source: /note="5' tri-ethylene glycol (TEG)"
  modified_base (1)..(1): bicyclic nucleic acid (BNA)
  modified_base (17)..(17): bicyclic nucleic acid (BNA)
ccagucgguaaguucug

SEQ ID NO: 6916 - DNA, 16 bp, Artificial Sequence
  source: /note="Description of Artificial Sequence: Synthetic oligonucleotide"
  source: /note="Description of Combined DNA/RNA Molecule: Synthetic oligonucleotide"
  source: /note="DNA/RNA"
  source: /note="5' tri-ethylene glycol (TEG)"
  modified_base (1)..(1): bicyclic nucleic acid (BNA)
  modified_base (16)..(16): bicyclic nucleic acid (BNA)
ccagucgguaaguuct

SEQ ID NO: 6917 - RNA, 15 nt, Artificial Sequence
  source: /note="Description of Artificial Sequence: Synthetic oligonucleotide"
  source: /note="RNA"
  source: /note="5' tri-ethylene glycol (TEG)"
  modified_base (1)..(1): bicyclic nucleic acid (BNA)
  modified_base (15)..(15): bicyclic nucleic acid (BNA)
ccagucgguaaguuc

SEQ ID NO: 6918 - DNA, 14 bp, Artificial Sequence
  source: /note="Description of Artificial Sequence: Synthetic oligonucleotide"
  source: /note="Description of Combined DNA/RNA Molecule: Synthetic oligonucleotide"
  source: /note="DNA/RNA"
  source: /note="5' tri-ethylene glycol (TEG)"
  modified_base (1)..(1): bicyclic nucleic acid (BNA)
  modified_base (14)..(14): bicyclic nucleic acid (BNA)
ccagucgguaagut

SEQ ID NO: 6919 - DNA, 13 bp, Artificial Sequence
  source: /note="Description of Artificial Sequence: Synthetic oligonucleotide"
  source: /note="Description of Combined DNA/RNA Molecule: Synthetic oligonucleotide"
  source: /note="DNA/RNA"
  source: /note="5' tri-ethylene glycol (TEG)"
  modified_base (1)..(1): bicyclic nucleic acid (BNA)
  modified_base (13)..(13): bicyclic nucleic acid (BNA)
ccagucgguaagt

SEQ ID NO: 6920 - RNA, 20 nt, Artificial Sequence
  source: /note="Description of Artificial Sequence: Synthetic oligonucleotide"
  source: /note="RNA"
  source: /note="5' tri-ethylene glycol (TEG)"
  modified_base (1)..(1): bicyclic nucleic acid (BNA)
  modified_base (20)..(20): bicyclic nucleic acid (BNA)
gccagucgguaaguucuguc

SEQ ID NO: 6921 - DNA, 19 bp, Artificial Sequence
  source: /note="Description of Artificial Sequence: Synthetic oligonucleotide"
  source: /note="Description of Combined DNA/RNA Molecule: Synthetic oligonucleotide"
  source: /note="DNA/RNA"
  source: /note="5' tri-ethylene glycol (TEG)"
  modified_base (1)..(1): bicyclic nucleic acid (BNA)
  modified_base (19)..(19): bicyclic nucleic acid (BNA)
gccagucgguaaguucugt

SEQ ID NO: 6922 - RNA, 18 nt, Artificial Sequence
  source: /note="Description of Artificial Sequence: Synthetic oligonucleotide"
  source: /note="RNA"
  source: /note="5' tri-ethylene glycol (TEG)"
  modified_base (1)..(1): bicyclic nucleic acid (BNA)
  modified_base (18)..(18): bicyclic nucleic acid (BNA)
gccagucgguaaguucug

SEQ ID NO: 6923 - DNA, 17 bp, Artificial Sequence
  source: /note="Description of Artificial Sequence: Synthetic oligonucleotide"
  source: /note="Description of Combined DNA/RNA Molecule: Synthetic oligonucleotide"
  source: /note="DNA/RNA"
  source: /note="5' tri-ethylene glycol (TEG)"
  modified_base (1)..(1): bicyclic nucleic acid (BNA)
  modified_base (17)..(17): bicyclic nucleic acid (BNA)
gccagucgguaaguuct

SEQ ID NO: 6924 - RNA, 16 nt, Artificial Sequence
  source: /note="Description of Artificial Sequence: Synthetic oligonucleotide"
  source: /note="RNA"
  source: /note="5' tri-ethylene glycol (TEG)"
  modified_base (1)..(1): bicyclic nucleic acid (BNA)
  modified_base (16)..(16): bicyclic nucleic acid (BNA)
gccagucgguaaguuc

SEQ ID NO: 6925 - DNA, 15 bp, Artificial Sequence
  source: /note="Description of Artificial Sequence: Synthetic oligonucleotide"
  source: /note="Description of Combined DNA/RNA Molecule: Synthetic oligonucleotide"
  source: /note="DNA/RNA"
  source: /note="5' tri-ethylene glycol (TEG)"
  modified_base (1)..(1): bicyclic nucleic acid (BNA)
  modified_base (15)..(15): bicyclic nucleic acid (BNA)
gccagucgguaagut

SEQ ID NO: 6926 - DNA, 14 bp, Artificial Sequence
  source: /note="Description of Artificial Sequence: Synthetic oligonucleotide"
  source: /note="Description of Combined DNA/RNA Molecule: Synthetic oligonucleotide"
  source: /note="DNA/RNA"
  source: /note="5' tri-ethylene glycol (TEG)"
  modified_base (1)..(1): bicyclic nucleic acid (BNA)
  modified_base (14)..(14): bicyclic nucleic acid (BNA)
gccagucgguaagt

SEQ ID NO: 6927 - DNA, 20 bp, Artificial Sequence
  source: /note="Description of Artificial Sequence: Synthetic oligonucleotide"
  source: /note="Description of Combined DNA/RNA Molecule: Synthetic oligonucleotide"
  source: /note="DNA/RNA"
  source: /note="5' tri-ethylene glycol (TEG)"
  modified_base (1)..(1): bicyclic nucleic acid (BNA)
  modified_base (20)..(20): bicyclic nucleic acid (BNA)
tcaaggaagauggcauuuct

SEQ ID NO: 6928 - DNA, 22 bp, Artificial Sequence
  source: /note="Description of Artificial Sequence: Synthetic oligonucleotide"
  source: /note="Description of Combined DNA/RNA Molecule: Synthetic oligonucleotide"
  source: /note="DNA/RNA"
  source: /note="5' tri-ethylene glycol (TEG)"
  modified_base (1)..(1): bicyclic nucleic acid (BNA)
  modified_base (22)..(22): bicyclic nucleic acid (BNA)
tcaaggaagauggcauuucuag

SEQ ID NO: 6929 - DNA, 16 bp, Artificial Sequence
  source: /note="Description of Artificial Sequence: Synthetic oligonucleotide"
  source: /note="Description of Combined DNA/RNA Molecule: Synthetic oligonucleotide"
  source: /note="DNA/RNA"
  source: /note="5' tri-ethylene glycol (TEG)"
  modified_base (1)..(1): bicyclic nucleic acid (BNA)
  modified_base (16)..(16): bicyclic nucleic acid (BNA)
tcaaggaagauggcat

SEQ ID NO: 6930 - DNA, 15 bp, Artificial Sequence
  source: /note="Description of Artificial Sequence: Synthetic oligonucleotide"
  source: /note="Description of Combined DNA/RNA Molecule: Synthetic oligonucleotide"
  source: /note="DNA/RNA"
  source: /note="5' tri-ethylene glycol (TEG)"
  modified_base (1)..(1): bicyclic nucleic acid (BNA)
  modified_base (15)..(15): bicyclic nucleic acid (BNA)
gaagauggcauuuct

SEQ ID NO: 6931 - DNA, 21 bp, Artificial Sequence
  source: /note="Description of Artificial Sequence: Synthetic oligonucleotide"
  source: /note="Description of Combined DNA/RNA Molecule: Synthetic oligonucleotide"
  source: /note="DNA/RNA"
  source: /note="5' tri-ethylene glycol (TEG)"
  modified_base (1)..(1): bicyclic nucleic acid (BNA)
  modified_base (21)..(21): bicyclic nucleic acid (BNA)
tcaaggaagauggcauuucua

SEQ ID NO: 6932 - DNA, 19 bp, Artificial Sequence
  source: /note="Description of Artificial Sequence: Synthetic oligonucleotide"
  source: /note="Description of Combined DNA/RNA Molecule: Synthetic oligonucleotide"
  source: /note="DNA/RNA"
  source: /note="5' tri-ethylene glycol (TEG)"
  modified_base (1)..(1): bicyclic nucleic acid (BNA)
  modified_base (19)..(19): bicyclic nucleic acid (BNA)
tcaaggaagauggcauuuc

SEQ ID NO: 6933 - DNA, 18 bp, Artificial Sequence
  source: /note="Description of Artificial Sequence: Synthetic oligonucleotide"
  source: /note="Description of Combined DNA/RNA Molecule: Synthetic oligonucleotide"
  source: /note="DNA/RNA"
  source: /note="5' tri-ethylene glycol (TEG)"
  modified_base (1)..(1): bicyclic nucleic acid (BNA)
  modified_base (18)..(18): bicyclic nucleic acid (BNA)
tcaaggaagauggcauut

SEQ ID NO: 6934 - DNA, 17 bp, Artificial Sequence
  source: /note="Description of Artificial Sequence: Synthetic oligonucleotide"
  source: /note="Description of Combined DNA/RNA Molecule: Synthetic oligonucleotide"
  source: /note="DNA/RNA"
  source: /note="5' tri-ethylene glycol (TEG)"
  modified_base (1)..(1): bicyclic nucleic acid (BNA)
  modified_base (17)..(17): bicyclic nucleic acid (BNA)
tcaaggaagauggcaut

SEQ ID NO: 6935 - DNA, 15 bp, Artificial Sequence
  source: /note="Description of Artificial Sequence: Synthetic oligonucleotide"
  source: /note="Description of Combined DNA/RNA Molecule: Synthetic oligonucleotide"
  source: /note="DNA/RNA"
  source: /note="5' tri-ethylene glycol (TEG)"
  modified_base (1)..(1): bicyclic nucleic acid (BNA)
  modified_base (15)..(15): bicyclic nucleic acid (BNA)
tcaaggaagauggca

SEQ ID NO: 6936 - DNA, 14 bp, Artificial Sequence
  source: /note="Description of Artificial Sequence: Synthetic oligonucleotide"
  source: /note="Description of Combined DNA/RNA Molecule: Synthetic oligonucleotide"
  source: /note="DNA/RNA"
  source: /note="5' tri-ethylene glycol (TEG)"
  modified_base (1)..(1): bicyclic nucleic acid (BNA)
  modified_base (14)..(14): bicyclic nucleic acid (BNA)
tcaaggaagauggc

SEQ ID NO: 6937 - DNA, 13 bp, Artificial Sequence
  source: /note="Description of Artificial Sequence: Synthetic oligonucleotide"
  source: /note="Description of Combined DNA/RNA Molecule: Synthetic oligonucleotide"
  source: /note="DNA/RNA"
  source: /note="5' tri-ethylene glycol (TEG)"
  modified_base (1)..(1): bicyclic nucleic acid (BNA)
  modified_base (13)..(13): bicyclic nucleic acid (BNA)
tcaaggaagaugg

SEQ ID NO: 6938 - DNA, 12 bp, Artificial Sequence
  source: /note="Description of Artificial Sequence: Synthetic oligonucleotide"
  source: /note="Description of Combined DNA/RNA Molecule: Synthetic oligonucleotide"
  source: /note="DNA/RNA"
  source: /note="5' tri-ethylene glycol (TEG)"
  modified_base (1)..(1): bicyclic nucleic acid (BNA)
  modified_base (12)..(12): bicyclic nucleic acid (BNA)
tcaaggaagaug

SEQ ID NO: 6939 - DNA, 11 bp, Artificial Sequence
  source: /note="Description of Artificial Sequence: Synthetic oligonucleotide"
  source: /note="DNA/RNA"
  source: /note="5' tri-ethylene glycol (TEG)"
  modified_base (1)..(1): bicyclic nucleic acid (BNA)
  modified_base (11)..(11): bicyclic nucleic acid (BNA)
tcaaggaagat

SEQ ID NO: 6940 - DNA, 10 bp, Artificial Sequence
  source: /note="Description of Artificial Sequence: Synthetic oligonucleotide"
  source: /note="DNA/RNA"
  source: /note="5' tri-ethylene glycol (TEG)"
  modified_base (1)..(1): bicyclic nucleic acid (BNA)
  modified_base (10)..(10): bicyclic nucleic acid (BNA)
tcaaggaaga

SEQ ID NO: 6941 - DNA, 9 bp, Artificial Sequence
  source: /note="Description of Artificial Sequence: Synthetic oligonucleotide"
  source: /note="DNA/RNA"
  source: /note="5' tri-ethylene glycol (TEG)"
  modified_base (1)..(1): bicyclic nucleic acid (BNA)
  modified_base (9)..(9): bicyclic nucleic acid (BNA)
tcaaggaag

SEQ ID NO: 6942 - RNA, 21 nt, Artificial Sequence
  source: /note="Description of Artificial Sequence: Synthetic oligonucleotide"
  source: /note="RNA"
  source: /note="5' tri-ethylene glycol (TEG)"
  modified_base (1)..(1): bicyclic nucleic acid (BNA)
  modified_base (21)..(21): bicyclic nucleic acid (BNA)
caaggaagauggcauuucuag

SEQ ID NO: 6943 - RNA, 20 nt, Artificial Sequence
  source: /note="Description of Artificial Sequence: Synthetic oligonucleotide"
  source: /note="RNA"
  source: /note="5' tri-ethylene glycol (TEG)"
  modified_base (1)..(1): bicyclic nucleic acid (BNA)
  modified_base (20)..(20): bicyclic nucleic acid (BNA)
caaggaagauggcauuucua

SEQ ID NO: 6944 - DNA, 19 bp, Artificial Sequence
  source: /note="Description of Artificial Sequence: Synthetic oligonucleotide"
  source: /note="Description of Combined DNA/RNA Molecule: Synthetic oligonucleotide"
  source: /note="DNA/RNA"
  source: /note="5' tri-ethylene glycol (TEG)"
  modified_base (1)..(1): bicyclic nucleic acid (BNA)
  modified_base (19)..(19): bicyclic nucleic acid (BNA)
caaggaagauggcauuuct

SEQ ID NO: 6945 - RNA, 18 nt, Artificial Sequence
  source: /note="Description of Artificial Sequence: Synthetic oligonucleotide"
  source: /note="RNA"
  source: /note="5' tri-ethylene glycol (TEG)"
  modified_base (1)..(1): bicyclic nucleic acid (BNA)
  modified_base (18)..(18): bicyclic nucleic acid (BNA)
caaggaagauggcauuuc

SEQ ID NO: 6946 - DNA, 17 bp, Artificial Sequence
  source: /note="Description of Artificial Sequence: Synthetic oligonucleotide"
  source: /note="Description of Combined DNA/RNA Molecule: Synthetic oligonucleotide"
  source: /note="DNA/RNA"
  source: /note="5' tri-ethylene glycol (TEG)"
  modified_base (1)..(1): bicyclic nucleic acid (BNA)
  modified_base (17)..(17): bicyclic nucleic acid (BNA)
caaggaagauggcauut

SEQ ID NO: 6947 - DNA, 16 bp, Artificial Sequence
  source: /note="Description of Artificial Sequence: Synthetic oligonucleotide"
  source: /note="Description of Combined DNA/RNA Molecule: Synthetic oligonucleotide"
  source: /note="DNA/RNA"
  source: /note="5' tri-ethylene glycol (TEG)"
  modified_base (1)..(1): bicyclic nucleic acid (BNA)
  modified_base (16)..(16): bicyclic nucleic acid (BNA)
caaggaagauggcaut

SEQ ID NO: 6948 - DNA, 15 bp, Artificial Sequence
  source: /note="Description of Artificial Sequence: Synthetic oligonucleotide"
  source: /note="Description of Combined DNA/RNA Molecule: Synthetic oligonucleotide"
  source: /note="DNA/RNA"
  source: /note="5' tri-ethylene glycol (TEG)"
  modified_base (1)..(1): bicyclic nucleic acid (BNA)
  modified_base (15)..(15): bicyclic nucleic acid (BNA)
caaggaagauggcat

SEQ ID NO: 6949 - RNA, 14 nt, Artificial Sequence
  source: /note="Description of Artificial Sequence: Synthetic oligonucleotide"
  source: /note="RNA"
  source: /note="5' tri-ethylene glycol (TEG)"
  modified_base (1)..(1): bicyclic nucleic acid (BNA)
  modified_base (14)..(14): bicyclic nucleic acid (BNA)
caaggaagauggca

SEQ ID NO: 6950 - RNA, 13 nt, Artificial Sequence
  source: /note="Description of Artificial Sequence: Synthetic oligonucleotide"
  source: /note="RNA"
  source: /note="5' tri-ethylene glycol (TEG)"
  modified_base (1)..(1): bicyclic nucleic acid (BNA)
  modified_base (13)..(13): bicyclic nucleic acid (BNA)
caaggaagauggc

SEQ ID NO: 6951 - RNA, 12 nt, Artificial Sequence
  source: /note="Description of Artificial Sequence: Synthetic oligonucleotide"
  source: /note="RNA"
  source: /note="5' tri-ethylene glycol (TEG)"
  modified_base (1)..(1): bicyclic nucleic acid (BNA)
  modified_base (12)..(12): bicyclic nucleic acid (BNA)
caaggaagaugg

SEQ ID NO: 6952 - RNA, 11 nt, Artificial Sequence
  source: /note="Description of Artificial Sequence: Synthetic oligonucleotide"
  source: /note="RNA"
  source: /note="5' tri-ethylene glycol (TEG)"
  modified_base (1)..(1): bicyclic nucleic acid (BNA)
  modified_base (11)..(11): bicyclic nucleic acid (BNA)
caaggaagaug

SEQ ID NO: 6953 - DNA, 10 bp, Artificial Sequence
  source: /note="Description of Artificial Sequence: Synthetic oligonucleotide"
  source: /note="DNA/RNA"
  source: /note="5' tri-ethylene glycol (TEG)"
  modified_base (1)..(1): bicyclic nucleic acid (BNA)
  modified_base (10)..(10): bicyclic nucleic acid (BNA)
caaggaagat

SEQ ID NO: 6954 - RNA, 9 nt, Artificial Sequence
  source: /note="Description of Artificial Sequence: Synthetic oligonucleotide"
  source: /note="RNA/Antisense Oligonucleotide"
  source: /note="5' tri-ethylene glycol (TEG)"
  modified_base (1)..(1): bicyclic nucleic acid (BNA)
  modified_base (9)..(9): bicyclic nucleic acid (BNA)
caaggaaga

SEQ ID NO: 6955 - RNA, 8 nt, Artificial Sequence
  source: /note="Description of Artificial Sequence: Synthetic oligonucleotide"
  source: /note="RNA/Antisense Oligonucleotide"
  source: /note="5' tri-ethylene glycol (TEG)"
  modified_base (1)..(1): bicyclic nucleic acid (BNA)
  modified_base (8)..(8): bicyclic nucleic acid (BNA)
caaggaag

SEQ ID NO: 6956 - RNA, 20 nt, Artificial Sequence
  source: /note="Description of Artificial Sequence: Synthetic oligonucleotide"
  source: /note="RNA"
  source: /note="5' tri-ethylene glycol (TEG)"
  modified_base (1)..(1): bicyclic nucleic acid (BNA)
  modified_base (20)..(20): bicyclic nucleic acid (BNA)
aaggaagauggcauuucuag

SEQ ID NO: 6957 - RNA, 19 nt, Artificial Sequence
  source: /note="Description of Artificial Sequence: Synthetic oligonucleotide"
  source: /note="RNA"
  source: /note="5' tri-ethylene glycol (TEG)"
  modified_base (1)..(1): bicyclic nucleic acid (BNA)
  modified_base (19)..(19): bicyclic nucleic acid (BNA)
aaggaagauggcauuucua

SEQ ID NO: 6958 - DNA, 18 bp, Artificial Sequence
  source: /note="Description of Artificial Sequence: Synthetic oligonucleotide"
  source: /note="Description of Combined DNA/RNA Molecule: Synthetic oligonucleotide"
  source: /note="DNA/RNA"
  source: /note="5' tri-ethylene glycol (TEG)"
  modified_base (1)..(1): bicyclic nucleic acid (BNA)
  modified_base (18)..(18): bicyclic nucleic acid (BNA)
aaggaagauggcauuuct

SEQ ID NO: 6959 - RNA, 17 nt, Artificial Sequence
  source: /note="Description of Artificial Sequence: Synthetic oligonucleotide"
  source: /note="RNA"
  source: /note="5' tri-ethylene glycol (TEG)"
  modified_base (1)..(1): bicyclic nucleic acid (BNA)
  modified_base (17)..(17): bicyclic nucleic acid (BNA)
aaggaagauggcauuuc

SEQ ID NO: 6960 - DNA, 16 bp, Artificial Sequence
  source: /note="Description of Artificial Sequence: Synthetic oligonucleotide"
  source: /note="Description of Combined DNA/RNA Molecule: Synthetic oligonucleotide"
  source: /note="DNA/RNA"
  source: /note="5' tri-ethylene glycol (TEG)"
  modified_base (1)..(1): bicyclic nucleic acid (BNA)
  modified_base (16)..(16): bicyclic nucleic acid (BNA)
aaggaagauggcauut

SEQ ID NO: 6961 - DNA, 15 bp, Artificial Sequence
  source: /note="Description of Artificial Sequence: Synthetic oligonucleotide"
  source: /note="Description of Combined DNA/RNA Molecule: Synthetic oligonucleotide"
  source: /note="DNA/RNA"
  source: /note="5' tri-ethylene glycol (TEG)"
  modified_base (1)..(1): bicyclic nucleic acid (BNA)
  modified_base (15)..(15): bicyclic nucleic acid (BNA)
aaggaagauggcaut

SEQ ID NO: 6962 - DNA, 14 bp, Artificial Sequence
  source: /note="Description of Artificial Sequence: Synthetic oligonucleotide"
  source: /note="Description of Combined DNA/RNA Molecule: Synthetic oligonucleotide"
  source: /note="DNA/RNA"
  source: /note="5' tri-ethylene glycol (TEG)"
  modified_base (1)..(1): bicyclic nucleic acid (BNA)
  modified_base (14)..(14): bicyclic nucleic acid (BNA)
aaggaagauggcat

SEQ ID NO: 6963 - RNA, 13 nt, Artificial Sequence
  source: /note="Description of Artificial Sequence: Synthetic oligonucleotide"
  source: /note="RNA"
  source: /note="5' tri-ethylene glycol (TEG)"
  modified_base (1)..(1): bicyclic nucleic acid (BNA)
  modified_base (13)..(13): bicyclic nucleic acid (BNA)
aaggaagauggca

SEQ ID NO: 6964 - RNA, 12 nt, Artificial Sequence
  source: /note="Description of Artificial Sequence: Synthetic oligonucleotide"
  source: /note="RNA"
  source: /note="5' tri-ethylene glycol (TEG)"
  modified_base (1)..(1): bicyclic nucleic acid (BNA)
  modified_base (12)..(12): bicyclic nucleic acid (BNA)
aaggaagauggc

SEQ ID NO: 6965 - RNA, 11 nt, Artificial Sequence
  source: /note="Description of Artificial Sequence: Synthetic oligonucleotide"
  source: /note="RNA"
  source: /note="5' tri-ethylene glycol (TEG)"
  modified_base (1)..(1): bicyclic nucleic acid (BNA)
  modified_base (11)..(11): bicyclic nucleic acid (BNA)
aaggaagaugg

SEQ ID NO: 6966 - RNA, 10 nt, Artificial Sequence
  source: /note="Description of Artificial Sequence: Synthetic oligonucleotide"
  source: /note="RNA"
  source: /note="5' tri-ethylene glycol (TEG)"
  modified_base (1)..(1): bicyclic nucleic acid (BNA)
  modified_base (10)..(10): bicyclic nucleic acid (BNA)
aaggaagaug

SEQ ID NO: 6967 - DNA, 9 bp, Artificial Sequence
  source: /note="Description of Artificial Sequence: Synthetic oligonucleotide"
  source: /note="DNA/RNA"
  source: /note="5' tri-ethylene glycol (TEG)"
  modified_base (1)..(1): bicyclic nucleic acid (BNA)
  modified_base (9)..(9): bicyclic nucleic acid (BNA)
aaggaagat

SEQ ID NO: 6968 - RNA, 8 nt, Artificial Sequence
  source: /note="Description of Artificial Sequence: Synthetic oligonucleotide"
  source: /note="RNA/Antisense Oligonucleotide"
  source: /note="5' tri-ethylene glycol (TEG)"
  modified_base (1)..(1): bicyclic nucleic acid (BNA)
  modified_base (8)..(8): bicyclic nucleic acid (BNA)
aaggaaga

SEQ ID NO: 6969 - RNA, 19 nt, Artificial Sequence
  source: /note="Description of Artificial Sequence: Synthetic oligonucleotide"
  source: /note="RNA"
  source: /note="5' tri-ethylene glycol (TEG)"
  modified_base (1)..(1): bicyclic nucleic acid (BNA)
  modified_base (19)..(19): bicyclic nucleic acid (BNA)
aggaagauggcauuucuag

SEQ ID NO: 6970 - RNA, 18 nt, Artificial Sequence
  source: /note="Description of Artificial Sequence: Synthetic oligonucleotide"
  source: /note="RNA"
  source: /note="5' tri-ethylene glycol (TEG)"
  modified_base (1)..(1): bicyclic nucleic acid (BNA)
  modified_base (18)..(18): bicyclic nucleic acid (BNA)
aggaagauggcauuucua

SEQ ID NO: 6971 - DNA, 17 bp, Artificial Sequence
  source: /note="Description of Artificial Sequence: Synthetic oligonucleotide"
  source: /note="Description of Combined DNA/RNA Molecule: Synthetic oligonucleotide"
  source: /note="DNA/RNA"
  source: /note="5' tri-ethylene glycol (TEG)"
  modified_base (1)..(1): bicyclic nucleic acid (BNA)
  modified_base (17)..(17): bicyclic nucleic acid (BNA)
aggaagauggcauuuct

SEQ ID NO: 6972 - RNA, 16 nt, Artificial Sequence
  source: /note="Description of Artificial Sequence: Synthetic oligonucleotide"
  source: /note="RNA"
  source: /note="5' tri-ethylene glycol (TEG)"
  modified_base (1)..(1): bicyclic nucleic acid (BNA)
  modified_base (16)..(16): bicyclic nucleic acid (BNA)
aggaagauggcauuuc

SEQ ID NO: 6973 - DNA, 15 bp, Artificial Sequence
  source: /note="Description of Artificial Sequence: Synthetic oligonucleotide"
  source: /note="Description of Combined DNA/RNA Molecule: Synthetic oligonucleotide"
  source: /note="DNA/RNA"
  source: /note="5' tri-ethylene glycol (TEG)"
  modified_base (1)..(1): bicyclic nucleic acid (BNA)
  modified_base (15)..(15): bicyclic nucleic acid (BNA)
aggaagauggcauut

SEQ ID NO: 6974 - DNA, 14 bp, Artificial Sequence
  source: /note="Description of Artificial Sequence: Synthetic oligonucleotide"
  source: /note="Description of Combined DNA/RNA Molecule: Synthetic oligonucleotide"
  source: /note="DNA/RNA"
  source: /note="5' tri-ethylene glycol (TEG)"
  modified_base (1)..(1): bicyclic nucleic acid (BNA)
  modified_base (14)..(14): bicyclic nucleic acid (BNA)
aggaagauggcaut

SEQ ID NO: 6975 - DNA, 13 bp, Artificial Sequence
  source: /note="Description of Artificial Sequence: Synthetic oligonucleotide"
  source: /note="Description of Combined DNA/RNA Molecule: Synthetic oligonucleotide"
  source: /note="DNA/RNA"
  source: /note="5' tri-ethylene glycol (TEG)"
  modified_base (1)..(1): bicyclic nucleic acid (BNA)
  modified_base (13)..(13): bicyclic nucleic acid (BNA)
aggaagauggcat

SEQ ID NO: 6976 - RNA, 12 nt, Artificial Sequence
  source: /note="Description of Artificial Sequence: Synthetic oligonucleotide"
  source: /note="RNA"
  source: /note="5' tri-ethylene glycol (TEG)"
  modified_base (1)..(1): bicyclic nucleic acid (BNA)
  modified_base (12)..(12): bicyclic nucleic acid (BNA)
aggaagauggca

SEQ ID NO: 6977 - RNA, 10 nt, Artificial Sequence
  source: /note="Description of Artificial Sequence: Synthetic oligonucleotide"
  source: /note="RNA"
  source: /note="5' tri-ethylene glycol (TEG)"
  modified_base (1)..(1): bicyclic nucleic acid (BNA)
  modified_base (10)..(10): bicyclic nucleic acid (BNA)
aggaagaugg

SEQ ID NO: 6978 - RNA, 9 nt, Artificial Sequence
  source: /note="Description of Artificial Sequence: Synthetic oligonucleotide"
  source: /note="RNA"
  source: /note="5' tri-ethylene glycol (TEG)"
  modified_base (1)..(1): bicyclic nucleic acid (BNA)
  modified_base (9)..(9): bicyclic nucleic acid (BNA)
aggaagaug

SEQ ID NO: 6979 - DNA, 8 bp, Artificial Sequence
  source: /note="Description of Artificial Sequence: Synthetic oligonucleotide"
  source: /note="DNA/RNA"
  source: /note="5' tri-ethylene glycol (TEG)"
  modified_base (1)..(1): bicyclic nucleic acid (BNA)
  modified_base (8)..(8): bicyclic nucleic acid (BNA)
aggaagat

SEQ ID NO: 6980 - RNA, 18 nt, Artificial Sequence
  source: /note="Description of Artificial Sequence: Synthetic oligonucleotide"
  source: /note="RNA"
  source: /note="5' tri-ethylene glycol (TEG)"
  modified_base (1)..(1): bicyclic nucleic acid (BNA)
  modified_base (18)..(18): bicyclic nucleic acid (BNA)
ggaagauggcauuucuag

SEQ ID NO: 6981 - RNA, 17 nt, Artificial Sequence
  source: /note="Description of Artificial Sequence: Synthetic oligonucleotide"
  source: /note="RNA"
  source: /note="5' tri-ethylene glycol (TEG)"
  modified_base (1)..(1): bicyclic nucleic acid (BNA)
  modified_base (17)..(17): bicyclic nucleic acid (BNA)
ggaagauggcauuucua

SEQ ID NO: 6982 - DNA, 16 bp, Artificial Sequence
  source: /note="Description of Artificial Sequence: Synthetic oligonucleotide"
  source: /note="Description of Combined DNA/RNA Molecule: Synthetic oligonucleotide"
  source: /note="DNA/RNA"
  source: /note="5' tri-ethylene glycol (TEG)"
  modified_base (1)..(1): bicyclic nucleic acid (BNA)
  modified_base (16)..(16): bicyclic nucleic acid (BNA)
ggaagauggcauuuct

SEQ ID NO: 6983 - RNA, 15 nt, Artificial Sequence
  source: /note="Description of Artificial Sequence: Synthetic oligonucleotide"
  source: /note="RNA"
  source: /note="5' tri-ethylene glycol (TEG)"
  modified_base (1)..(1): bicyclic nucleic acid (BNA)
  modified_base (15)..(15): bicyclic nucleic acid (BNA)
ggaagauggcauuuc

SEQ ID NO: 6984 - DNA, 14 bp, Artificial Sequence
  source: /note="Description of Artificial Sequence: Synthetic oligonucleotide"
  source: /note="Description of Combined DNA/RNA Molecule: Synthetic oligonucleotide"
  source: /note="DNA/RNA"
  source: /note="5' tri-ethylene glycol (TEG)"
  modified_base (1)..(1): bicyclic nucleic acid (BNA)
  modified_base (14)..(14): bicyclic nucleic acid (BNA)
ggaagauggcauut

SEQ ID NO: 6985 - DNA, 13 bp, Artificial Sequence
  source: /note="Description of Artificial Sequence: Synthetic oligonucleotide"
  source: /note="Description of Combined DNA/RNA Molecule: Synthetic oligonucleotide"
  source: /note="DNA/RNA"
  source: /note="5' tri-ethylene glycol (TEG)"
  modified_base (1)..(1): bicyclic nucleic acid (BNA)
  modified_base (13)..(13): bicyclic nucleic acid (BNA)
ggaagauggcaut

SEQ ID NO: 6986 - DNA, 12 bp, Artificial Sequence
  source: /note="Description of Artificial Sequence: Synthetic oligonucleotide"
  source: /note="Description of Combined DNA/RNA Molecule: Synthetic oligonucleotide"
  source: /note="DNA/RNA"
  source: /note="5' tri-ethylene glycol (TEG)"
  modified_base (1)..(1): bicyclic nucleic acid (BNA)
  modified_base (12)..(12): bicyclic nucleic acid (BNA)
ggaagauggcat

SEQ ID NO: 6987 - RNA, 11 nt, Artificial Sequence
  source: /note="Description of Artificial Sequence: Synthetic oligonucleotide"
  source: /note="RNA"
  source: /note="5' tri-ethylene glycol (TEG)"
  modified_base (1)..(1): bicyclic nucleic acid (BNA)
  modified_base (11)..(11): bicyclic nucleic acid (BNA)
ggaagauggca

SEQ ID NO: 6988 - RNA, 10 nt, Artificial Sequence
  source: /note="Description of Artificial Sequence: Synthetic oligonucleotide"
  source: /note="RNA"
  source: /note="5' tri-ethylene glycol (TEG)"
  modified_base (1)..(1): bicyclic nucleic acid (BNA)
  modified_base (10)..(10): bicyclic nucleic acid (BNA)
ggaagauggc

SEQ ID NO: 6989 - RNA, 8 nt, Artificial Sequence
  source: /note="Description of Artificial Sequence: Synthetic oligonucleotide"
  source: /note="RNA"
  source: /note="5' tri-ethylene glycol (TEG)"
  modified_base (1)..(1): bicyclic nucleic acid (BNA)
  modified_base (8)..(8): bicyclic nucleic acid (BNA)
ggaagaug

SEQ ID NO: 6990 - RNA, 17 nt, Artificial Sequence
  source: /note="Description of Artificial Sequence: Synthetic oligonucleotide"
  source: /note="RNA"
  source: /note="5' tri-ethylene glycol (TEG)"
  modified_base (1)..(1): bicyclic nucleic acid (BNA)
  modified_base (17)..(17): bicyclic nucleic acid (BNA)
gaagauggcauuucuag

SEQ ID NO: 6991 - RNA, 16 nt, Artificial Sequence
  source: /note="Description of Artificial Sequence: Synthetic oligonucleotide"
  source: /note="RNA"
  source: /note="5' tri-ethylene glycol (TEG)"
  modified_base (1)..(1): bicyclic nucleic acid (BNA)
  modified_base (16)..(16): bicyclic nucleic acid (BNA)
gaagauggcauuucua

SEQ ID NO: 6992 - RNA, 14 nt, Artificial Sequence
  source: /note="Description of Artificial Sequence: Synthetic oligonucleotide"
  source: /note="RNA"
  source: /note="5' tri-ethylene glycol (TEG)"
  modified_base (1)..(1): bicyclic nucleic acid (BNA)
  modified_base (14)..(14): bicyclic nucleic acid (BNA)
gaagauggcauuuc

SEQ ID NO: 6993 - DNA, 13 bp, Artificial Sequence
  source: /note="Description of Artificial Sequence: Synthetic oligonucleotide"
  source: /note="Description of Combined DNA/RNA Molecule: Synthetic oligonucleotide"
  source: /note="DNA/RNA"
  source: /note="5' tri-ethylene glycol (TEG)"
  modified_base (1)..(1): bicyclic nucleic acid (BNA)
  modified_base (13)..(13): bicyclic nucleic acid (BNA)
gaagauggcauut

SEQ ID NO: 6994 - DNA, 12 bp, Artificial Sequence
  source: /note="Description of Artificial Sequence: Synthetic oligonucleotide"
  source: /note="Description of Combined DNA/RNA Molecule: Synthetic oligonucleotide"
  source: /note="DNA/RNA"
  source: /note="5' tri-ethylene glycol (TEG)"
  modified_base (1)..(1): bicyclic nucleic acid (BNA)
  modified_base (12)..(12): bicyclic nucleic acid (BNA)
gaagauggcaut

SEQ ID NO: 6995 - DNA, 11 bp, Artificial Sequence
  source: /note="Description of Artificial Sequence: Synthetic oligonucleotide"
  source: /note="Description of Combined DNA/RNA Molecule: Synthetic oligonucleotide"
  source: /note="DNA/RNA"
  source: /note="5' tri-ethylene glycol (TEG)"
  modified_base (1)..(1): bicyclic nucleic acid (BNA)
  modified_base (11)..(11): bicyclic nucleic acid (BNA)
gaagauggcat

SEQ ID NO: 6996 - RNA, 10 nt, Artificial Sequence
  source: /note="Description of Artificial Sequence: Synthetic oligonucleotide"
  source: /note="RNA"
  source: /note="5' tri-ethylene glycol (TEG)"
  modified_base (1)..(1): bicyclic nucleic acid (BNA)
  modified_base (10)..(10): bicyclic nucleic acid (BNA)
gaagauggca

SEQ ID NO: 6997 - RNA, 9 nt, Artificial Sequence
  source: /note="Description of Artificial Sequence: Synthetic oligonucleotide"
  source: /note="RNA"
  source: /note="5' tri-ethylene glycol (TEG)"
  modified_base (1)..(1): bicyclic nucleic acid (BNA)
  modified_base (9)..(9): bicyclic nucleic acid (BNA)
gaagauggc

SEQ ID NO: 6998 - RNA, 8 nt, Artificial Sequence
  source: /note="Description of Artificial Sequence: Synthetic oligonucleotide"
  source: /note="RNA"
  source: /note="5' tri-ethylene glycol (TEG)"
  modified_base (1)..(1): bicyclic nucleic acid (BNA)
  modified_base (8)..(8): bicyclic nucleic acid (BNA)
gaagaugg

SEQ ID NO: 6999 - RNA, 16 nt, Artificial Sequence
  source: /note="Description of Artificial Sequence: Synthetic oligonucleotide"
  source: /note="RNA"
  source: /note="5' tri-ethylene glycol (TEG)"
  modified_base (1)..(1): bicyclic nucleic acid (BNA)
  modified_base (16)..(16): bicyclic nucleic acid (BNA)
aagauggcauuucuag

SEQ ID NO: 7000 - RNA, 15 nt, Artificial Sequence
  source: /note="Description of Artificial Sequence: Synthetic oligonucleotide"
  source: /note="RNA"
  source: /note="5' tri-ethylene glycol (TEG)"
  modified_base (1)..(1): bicyclic nucleic acid (BNA)
  modified_base (15)..(15): bicyclic nucleic acid (BNA)
aagauggcauuucua

SEQ ID NO: 7001 - DNA, 14 bp, Artificial Sequence
  source: /note="Description of Artificial Sequence: Synthetic oligonucleotide"
  source: /note="Description of Combined DNA/RNA Molecule: Synthetic oligonucleotide"
  source: /note="DNA/RNA"
  source: /note="5' tri-ethylene glycol (TEG)"
  modified_base (1)..(1): bicyclic nucleic acid (BNA)
  modified_base (14)..(14): bicyclic nucleic acid (BNA)
aagauggcauuuct

SEQ ID NO: 7002 - RNA, 13 nt, Artificial Sequence
  source: /note="Description of Artificial Sequence: Synthetic oligonucleotide"
  source: /note="RNA"
  source: /note="5' tri-ethylene glycol (TEG)"
  modified_base (1)..(1): bicyclic nucleic acid (BNA)
  modified_base (13)..(13): bicyclic nucleic acid (BNA)
aagauggcauuuc

SEQ ID NO: 7003 - DNA, 12 bp, Artificial Sequence
  source: /note="Description of Artificial Sequence: Synthetic oligonucleotide"
  source: /note="Description of Combined DNA/RNA Molecule: Synthetic oligonucleotide"
  source: /note="DNA/RNA"
  source: /note="5' tri-ethylene glycol (TEG)"
  modified_base (1)..(1): bicyclic nucleic acid (BNA)
  modified_base (12)..(12): bicyclic nucleic acid (BNA)
aagauggcauut

SEQ ID NO: 7004 - DNA, 11 bp, Artificial Sequence
  source: /note="Description of Artificial Sequence: Synthetic oligonucleotide"
  source: /note="Description of Combined DNA/RNA Molecule: Synthetic oligonucleotide"
  source: /note="DNA/RNA"
  source: /note="5' tri-ethylene glycol (TEG)"
  modified_base (1)..(1): bicyclic nucleic acid (BNA)
  modified_base (11)..(11): bicyclic nucleic acid (BNA)
aagauggcaut

SEQ ID NO: 7005 - DNA, 10 bp, Artificial Sequence
  source: /note="Description of Artificial Sequence: Synthetic oligonucleotide"
  source: /note="Description of Combined DNA/RNA Molecule: Synthetic oligonucleotide"
  source: /note="DNA/RNA"
  source: /note="5' tri-ethylene glycol (TEG)"
  modified_base (1)..(1): bicyclic nucleic acid (BNA)
  modified_base (10)..(10): bicyclic nucleic acid (BNA)
aagauggcat

SEQ ID NO: 7006 - RNA, 9 nt, Artificial Sequence
  source: /note="Description of Artificial Sequence: Synthetic oligonucleotide"
  source: /note="RNA"
  source: /note="5' tri-ethylene glycol (TEG)"
  modified_base (1)..(1): bicyclic nucleic acid (BNA)
  modified_base (9)..(9): bicyclic nucleic acid (BNA)
aagauggca

SEQ ID NO: 7007 - RNA, 8 nt, Artificial Sequence
  source: /note="Description of Artificial Sequence: Synthetic oligonucleotide"
  source: /note="RNA"
  source: /note="5' tri-ethylene glycol (TEG)"
  modified_base (1)..(1): bicyclic nucleic acid (BNA)
  modified_base (8)..(8): bicyclic nucleic acid (BNA)
aagauggc

SEQ ID NO: 7008 - RNA, 15 nt, Artificial Sequence
  source: /note="Description of Artificial Sequence: Synthetic oligonucleotide"
  source: /note="RNA"
  source: /note="5' tri-ethylene glycol (TEG)"
  modified_base (1)..(1): bicyclic nucleic acid (BNA)
  modified_base (15)..(15): bicyclic nucleic acid (BNA)
agauggcauuucuag

SEQ ID NO: 7009 - RNA, 14 nt, Artificial Sequence
  source: /note="Description of Artificial Sequence: Synthetic oligonucleotide"
  source: /note="RNA"
  source: /note="5' tri-ethylene glycol (TEG)"
  modified_base (1)..(1): bicyclic nucleic acid (BNA)
  modified_base (14)..(14): bicyclic nucleic acid (BNA)
agauggcauuucua

SEQ ID NO: 7010 - DNA, 13 bp, Artificial Sequence
  source: /note="Description of Artificial Sequence: Synthetic oligonucleotide"
  source: /note="Description of Combined DNA/RNA Molecule: Synthetic oligonucleotide"
  source: /note="DNA/RNA"
  source: /note="5' tri-ethylene glycol (TEG)"
  modified_base (1)..(1): bicyclic nucleic acid (BNA)
  modified_base (13)..(13): bicyclic nucleic acid (BNA)
agauggcauuuct

SEQ ID NO: 7011 - RNA, 12 nt, Artificial Sequence
  source: /note="Description of Artificial Sequence: Synthetic oligonucleotide"
  source: /note="RNA"
  source: /note="5' tri-ethylene glycol (TEG)"
  modified_base (1)..(1): bicyclic nucleic acid (BNA)
  modified_base (12)..(12): bicyclic nucleic acid (BNA)
agauggcauuuc

SEQ ID NO: 7012 - DNA, 11 bp, Artificial Sequence
  source: /note="Description of Artificial Sequence: Synthetic oligonucleotide"
  source: /note="Description of Combined DNA/RNA Molecule: Synthetic oligonucleotide"
  source: /note="DNA/RNA"
  source: /note="5' tri-ethylene glycol (TEG)"
  modified_base (1)..(1): bicyclic nucleic acid (BNA)
  modified_base (11)..(11): bicyclic nucleic acid (BNA)
agauggcauut

SEQ ID NO: 7013 - DNA, 10 bp, Artificial Sequence
  source: /note="Description of Artificial Sequence: Synthetic oligonucleotide"
  source: /note="Description of Combined DNA/RNA Molecule: Synthetic oligonucleotide"
  source: /note="DNA/RNA"
  source: /note="5' tri-ethylene glycol (TEG)"
  modified_base (1)..(1): bicyclic nucleic acid (BNA)
  modified_base (10)..(10): bicyclic nucleic acid (BNA)
agauggcaut

SEQ ID NO: 7014 - DNA, 9 bp, Artificial Sequence
  source: /note="Description of Artificial Sequence: Synthetic oligonucleotide"
  source: /note="Description of Combined DNA/RNA Molecule: Synthetic oligonucleotide"
  source: /note="DNA/RNA"
  source: /note="5' tri-ethylene glycol (TEG)"
  modified_base (1)..(1): bicyclic nucleic acid (BNA)
  modified_base (9)..(9): bicyclic nucleic acid (BNA)
agauggcat

SEQ ID NO: 7015 - RNA, 8 nt, Artificial Sequence
  source: /note="Description of Artificial Sequence: Synthetic oligonucleotide"
  source: /note="RNA"
  source: /note="5' tri-ethylene glycol (TEG)"
  modified_base (1)..(1): bicyclic nucleic acid (BNA)
  modified_base (8)..(8): bicyclic nucleic acid (BNA)
agauggca

SEQ ID NO: 7016 - RNA, 30 nt, Artificial Sequence; identical to SEQ ID NO: 284
  source: /note="Description of Artificial Sequence: Synthetic oligonucleotide"
  source: /note="RNA"
  source: /note="5' tri-ethylene glycol (TEG)"
  modified_base (1)..(1): bicyclic nucleic acid (BNA)
  modified_base (30)..(30): bicyclic nucleic acid (BNA)

SEQ ID NO: 7017 - RNA, 29 nt, Artificial Sequence
  source: /note="Description of Artificial Sequence: Synthetic oligonucleotide"
  source: /note="RNA"
  source: /note="5' tri-ethylene glycol (TEG)"
  modified_base (1)..(1): bicyclic nucleic acid (BNA)
  modified_base (29)..(29): bicyclic nucleic acid (BNA)
cuccaacaucaaggaagauggcauuucua

SEQ ID NO: 7018 - DNA, 28 bp, Artificial Sequence
  source: /note="Description of Artificial Sequence: Synthetic oligonucleotide"
  source: /note="Description of Combined DNA/RNA Molecule: Synthetic oligonucleotide"
  source: /note="DNA/RNA"
  source: /note="5' tri-ethylene glycol (TEG)"
  modified_base (1)..(1): bicyclic nucleic acid (BNA)
  modified_base (28)..(28): bicyclic nucleic acid (BNA)
cuccaacaucaaggaagauggcauuuct

SEQ ID NO: 7019 - RNA, 27 nt, Artificial Sequence
  source: /note="Description of Artificial Sequence: Synthetic oligonucleotide"
  source: /note="RNA"
  source: /note="5' tri-ethylene glycol (TEG)"
  modified_base (1)..(1): bicyclic nucleic acid (BNA)
  modified_base (27)..(27): bicyclic nucleic acid (BNA)
cuccaacaucaaggaagauggcauuuc

SEQ ID NO: 7020 - DNA, 26 bp, Artificial Sequence
  source: /note="Description of Artificial Sequence: Synthetic oligonucleotide"
  source: /note="Description of Combined DNA/RNA Molecule: Synthetic oligonucleotide"
  source: /note="DNA/RNA"
  source: /note="5' tri-ethylene glycol (TEG)"
  modified_base (1)..(1): bicyclic nucleic acid (BNA)
  modified_base (26)..(26): bicyclic nucleic acid (BNA)
cuccaacaucaaggaagauggcauut

SEQ ID NO: 7021 - DNA, 25 bp, Artificial Sequence
  source: /note="Description of Artificial Sequence: Synthetic oligonucleotide"
  source: /note="Description of Combined DNA/RNA Molecule: Synthetic oligonucleotide"
  source: /note="DNA/RNA"
  source: /note="5' tri-ethylene glycol (TEG)"
  modified_base (1)..(1): bicyclic nucleic acid (BNA)
  modified_base (25)..(25): bicyclic nucleic acid (BNA)
cuccaacaucaaggaagauggcaut

SEQ ID NO: 7022 - DNA, 24 bp, Artificial Sequence
  source: /note="Description of Artificial Sequence: Synthetic oligonucleotide"
  source: /note="Description of Combined DNA/RNA Molecule: Synthetic oligonucleotide"
  source: /note="DNA/RNA"
  source: /note="5' tri-ethylene glycol (TEG)"
  modified_base (1)..(1): bicyclic nucleic acid (BNA)
  modified_base (24)..(24): bicyclic nucleic acid (BNA)
cuccaacaucaaggaagauggcat

SEQ ID NO: 7023 - RNA, 23 nt, Artificial Sequence
  source: /note="Description of Artificial Sequence: Synthetic oligonucleotide"
  source: /note="RNA"
  source: /note="5' tri-ethylene glycol (TEG)"
  modified_base (1)..(1): bicyclic nucleic acid (BNA)
  modified_base (23)..(23): bicyclic nucleic acid (BNA)
cuccaacaucaaggaagauggca

SEQ ID NO: 7024 - RNA, 22 nt, Artificial Sequence
  source: /note="Description of Artificial Sequence: Synthetic oligonucleotide"
  source: /note="RNA"
  source: /note="5' tri-ethylene glycol (TEG)"
  modified_base (1)..(1): bicyclic nucleic acid (BNA)
  modified_base (22)..(22): bicyclic nucleic acid (BNA)
cuccaacaucaaggaagauggc

SEQ ID NO: 7025 - RNA, 21 nt, Artificial Sequence
  source: /note="Description of Artificial Sequence: Synthetic oligonucleotide"
  source: /note="RNA"
  source: /note="5' tri-ethylene glycol (TEG)"
  modified_base (1)..(1): bicyclic nucleic acid (BNA)
  modified_base (21)..(21): bicyclic nucleic acid (BNA)
cuccaacaucaaggaagaugg

SEQ ID NO: 7026 - RNA, 20 nt, Artificial Sequence
  source: /note="Description of Artificial Sequence: Synthetic oligonucleotide"
  source: /note="RNA"
  source: /note="5' tri-ethylene glycol (TEG)"
  modified_base (1)..(1): bicyclic nucleic acid (BNA)
  modified_base (20)..(20): bicyclic nucleic acid (BNA)
cuccaacaucaaggaagaug

SEQ ID NO: 7027 - DNA, 19 bp, Artificial Sequence
  source: /note="Description of Artificial Sequence: Synthetic oligonucleotide"
  source: /note="Description of Combined DNA/RNA Molecule: Synthetic oligonucleotide"
  source: /note="DNA/RNA"
  source: /note="5' tri-ethylene glycol (TEG)"
  modified_base (1)..(1): bicyclic nucleic acid (BNA)
  modified_base (19)..(19): bicyclic nucleic acid (BNA)
cuccaacaucaaggaagat

SEQ ID NO: 7028 - RNA, 18 nt, Artificial Sequence
  source: /note="Description of Artificial Sequence: Synthetic oligonucleotide"
  source: /note="RNA"
  source: /note="5' tri-ethylene glycol (TEG)"
  modified_base (1)..(1): bicyclic nucleic acid (BNA)
  modified_base (18)..(18): bicyclic nucleic acid (BNA)
cuccaacaucaaggaaga

SEQ ID NO: 7029 - RNA, 17 nt, Artificial Sequence
  source: /note="Description of Artificial Sequence: Synthetic oligonucleotide"
  source: /note="RNA"
  source: /note="5' tri-ethylene glycol (TEG)"
  modified_base (1)..(1): bicyclic nucleic acid (BNA)
  modified_base (17)..(17): bicyclic nucleic acid (BNA)
cuccaacaucaaggaag

SEQ ID NO: 7030 - DNA, 29 bp, Artificial Sequence
  source: /note="Description of Artificial Sequence: Synthetic oligonucleotide"
  source: /note="Description of Combined DNA/RNA Molecule: Synthetic oligonucleotide"
  source: /note="DNA/RNA"
  source: /note="5' tri-ethylene glycol (TEG)"
  modified_base (1)..(1): bicyclic nucleic acid (BNA)
  modified_base (29)..(29): bicyclic nucleic acid (BNA)
tccaacaucaaggaagauggcauuucuag

SEQ ID NO: 7031 - DNA, 28 bp, Artificial Sequence
  source: /note="Description of Artificial Sequence: Synthetic oligonucleotide"
  source: /note="Description of Combined DNA/RNA Molecule: Synthetic oligonucleotide"
  source: /note="DNA/RNA"
  source: /note="5' tri-ethylene glycol (TEG)"
  modified_base (1)..(1): bicyclic nucleic acid (BNA)
  modified_base (28)..(28): bicyclic nucleic acid (BNA)
tccaacaucaaggaagauggcauuucua

SEQ ID NO: 7032 - DNA, 27 bp, Artificial Sequence
  source: /note="Description of Artificial Sequence: Synthetic oligonucleotide"
  source: /note="Description of Combined DNA/RNA Molecule: Synthetic oligonucleotide"
  source: /note="DNA/RNA"
  source: /note="5' tri-ethylene glycol (TEG)"
  modified_base (1)..(1): bicyclic nucleic acid (BNA)
  modified_base (27)..(27): bicyclic nucleic acid (BNA)
tccaacaucaaggaagauggcauuuct

SEQ ID NO: 7033 - DNA, 26 bp, Artificial Sequence
  source: /note="Description of Artificial Sequence: Synthetic oligonucleotide"
  source: /note="Description of Combined DNA/RNA Molecule: Synthetic oligonucleotide"
  source: /note="DNA/RNA"
  source: /note="5' tri-ethylene glycol (TEG)"
  modified_base (1)..(1): bicyclic nucleic acid (BNA)
  modified_base (26)..(26): bicyclic nucleic acid (BNA)
tccaacaucaaggaagauggcauuuc

SEQ ID NO: 7034 - DNA, 25 bp, Artificial Sequence
  source: /note="Description of Artificial Sequence: Synthetic oligonucleotide"
  source: /note="Description of Combined DNA/RNA Molecule: Synthetic oligonucleotide"
  source: /note="DNA/RNA"
  source: /note="5' tri-ethylene glycol (TEG)"
  modified_base (1)..(1): bicyclic nucleic acid (BNA)
  modified_base (25)..(25): bicyclic nucleic acid (BNA)
tccaacaucaaggaagauggcauut

SEQ ID NO: 7035 - DNA, 24 bp, Artificial Sequence
  source: /note="Description of Artificial Sequence: Synthetic oligonucleotide"
  source: /note="Description of Combined DNA/RNA Molecule: Synthetic oligonucleotide"
  source: /note="DNA/RNA"
  source: /note="5' tri-ethylene glycol (TEG)"
  modified_base (1)..(1): bicyclic nucleic acid (BNA)
  modified_base (24)..(24): bicyclic nucleic acid (BNA)
tccaacaucaaggaagauggcaut

SEQ ID NO: 7036 - DNA, 23 bp, Artificial Sequence
  source: /note="Description of Artificial Sequence: Synthetic oligonucleotide"
  source: /note="Description of Combined DNA/RNA Molecule: Synthetic oligonucleotide"
  source: /note="DNA/RNA"
  source: /note="5' tri-ethylene glycol (TEG)"
  modified_base (1)..(1): bicyclic nucleic acid (BNA)
  modified_base (23)..(23): bicyclic nucleic acid (BNA)
tccaacaucaaggaagauggcat

SEQ ID NO: 7037 - DNA, 22 bp, Artificial Sequence
  source: /note="Description of Artificial Sequence: Synthetic oligonucleotide"
  source: /note="Description of Combined DNA/RNA Molecule: Synthetic oligonucleotide"
  source: /note="DNA/RNA"
  source: /note="5' tri-ethylene glycol (TEG)"
  modified_base (1)..(1): bicyclic nucleic acid (BNA)
  modified_base (22)..(22): bicyclic nucleic acid (BNA)
tccaacaucaaggaagauggca

SEQ ID NO: 7038 - DNA, 21 bp, Artificial Sequence
  source: /note="Description of Artificial Sequence: Synthetic oligonucleotide"
  source: /note="Description of Combined DNA/RNA Molecule: Synthetic oligonucleotide"
  source: /note="DNA/RNA"
  source: /note="5' tri-ethylene glycol (TEG)"
  modified_base (1)..(1): bicyclic nucleic acid (BNA)
  modified_base (21)..(21): bicyclic nucleic acid (BNA)
tccaacaucaaggaagauggc

SEQ ID NO: 7039 - DNA, 20 bp, Artificial Sequence
  source: /note="Description of Artificial Sequence: Synthetic oligonucleotide"
  source: /note="Description of Combined DNA/RNA Molecule: Synthetic oligonucleotide"
  source: /note="DNA/RNA"
  source: /note="5' tri-ethylene glycol (TEG)"
  modified_base (1)..(1): bicyclic nucleic acid (BNA)
  modified_base (20)..(20): bicyclic nucleic acid (BNA)
tccaacaucaaggaagaugg

SEQ ID NO: 7040 - DNA, 19 bp, Artificial Sequence
  source: /note="Description of Artificial Sequence: Synthetic oligonucleotide"
  source: /note="Description of Combined DNA/RNA Molecule: Synthetic oligonucleotide"
  source: /note="DNA/RNA"
  source: /note="5' tri-ethylene glycol (TEG)"
  modified_base (1)..(1): bicyclic nucleic acid (BNA)
  modified_base (19)..(19): bicyclic nucleic acid (BNA)
tccaacaucaaggaagaug

SEQ ID NO: 7041 - DNA, 18 bp, Artificial Sequence
  source: /note="Description of Artificial Sequence: Synthetic oligonucleotide"
  source: /note="Description of Combined DNA/RNA Molecule: Synthetic oligonucleotide"
  source: /note="DNA/RNA"
  source: /note="5' tri-ethylene glycol (TEG)"
  modified_base (1)..(1): bicyclic nucleic acid (BNA)
  modified_base (18)..(18): bicyclic nucleic acid (BNA)
tccaacaucaaggaagat

SEQ ID NO: 7042 - DNA, 17 bp, Artificial Sequence
  source: /note="Description of Artificial Sequence: Synthetic oligonucleotide"
  source: /note="Description of Combined DNA/RNA Molecule: Synthetic oligonucleotide"
  source: /note="DNA/RNA"
  source: /note="5' tri-ethylene glycol (TEG)"
  modified_base (1)..(1): bicyclic nucleic acid (BNA)
  modified_base (17)..(17): bicyclic nucleic acid (BNA)
tccaacaucaaggaaga

SEQ ID NO: 7043 - DNA, 16 bp, Artificial Sequence
  source: /note="Description of Artificial Sequence: Synthetic oligonucleotide"
  source: /note="Description of Combined DNA/RNA Molecule: Synthetic oligonucleotide"
  source: /note="DNA/RNA"
  source: /note="5' tri-ethylene glycol (TEG)"
  modified_base (1)..(1): bicyclic nucleic acid (BNA)
  modified_base (16)..(16): bicyclic nucleic acid (BNA)
tccaacaucaaggaag

SEQ ID NO: 7044 - RNA, 28 nt, Artificial Sequence
  source: /note="Description of Artificial Sequence: Synthetic oligonucleotide"
  source: /note="RNA"
  source: /note="5' tri-ethylene glycol (TEG)"
  modified_base (1)..(1): bicyclic nucleic acid (BNA)
  modified_base (28)..(28): bicyclic nucleic acid (BNA)
ccaacaucaaggaagauggcauuucuag

SEQ ID NO: 7045 - RNA, 27 nt, Artificial Sequence
  source: /note="Description of Artificial Sequence: Synthetic oligonucleotide"
  source: /note="RNA"
  source: /note="5' tri-ethylene glycol (TEG)"
  modified_base (1)..(1): bicyclic nucleic acid (BNA)
  modified_base (27)..(27): bicyclic nucleic acid (BNA)
ccaacaucaaggaagauggcauuucua

SEQ ID NO: 7046 - DNA, 26 bp, Artificial Sequence
  source: /note="Description of Artificial Sequence: Synthetic oligonucleotide"
  source: /note="Description of Combined DNA/RNA Molecule: Synthetic oligonucleotide"
  source: /note="DNA/RNA"
  source: /note="5' tri-ethylene glycol (TEG)"
  modified_base (1)..(1): bicyclic nucleic acid (BNA)
  modified_base (26)..(26): bicyclic nucleic acid (BNA)
ccaacaucaaggaagauggcauuuct

SEQ ID NO: 7047 - RNA, 25 nt, Artificial Sequence
  source: /note="Description of Artificial Sequence: Synthetic oligonucleotide"
  source: /note="RNA"
  source: /note="5' tri-ethylene glycol (TEG)"
  modified_base (1)..(1): bicyclic nucleic acid (BNA)
  modified_base (25)..(25): bicyclic nucleic acid (BNA)
ccaacaucaaggaagauggcauuuc

SEQ ID NO: 7048 - DNA, 24 bp, Artificial Sequence
  source: /note="Description of Artificial Sequence: Synthetic oligonucleotide"
  source: /note="Description of Combined DNA/RNA Molecule: Synthetic oligonucleotide"
  source: /note="DNA/RNA"
  source: /note="5' tri-ethylene glycol (TEG)"
  modified_base (1)..(1): bicyclic nucleic acid (BNA)
  modified_base (24)..(24): bicyclic nucleic acid (BNA)
ccaacaucaaggaagauggcauut

SEQ ID NO: 7049 - DNA, 23 bp, Artificial Sequence
  source: /note="Description of Artificial Sequence: Synthetic oligonucleotide"
  source: /note="Description of Combined DNA/RNA Molecule: Synthetic oligonucleotide"
  source: /note="DNA/RNA"
  source: /note="5' tri-ethylene glycol (TEG)"
  modified_base (1)..(1): bicyclic nucleic acid (BNA)
  modified_base (23)..(23): bicyclic nucleic acid (BNA)
ccaacaucaaggaagauggcaut

SEQ ID NO: 7050 - DNA, 22 bp, Artificial Sequence
  source: /note="Description of Artificial Sequence: Synthetic oligonucleotide"
  source: /note="Description of Combined DNA/RNA Molecule: Synthetic oligonucleotide"
  source: /note="DNA/RNA"
  source: /note="5' tri-ethylene glycol (TEG)"
  modified_base (1)..(1): bicyclic nucleic acid (BNA)
  modified_base (22)..(22): bicyclic nucleic acid (BNA)
ccaacaucaaggaagauggcat

SEQ ID NO: 7051 - RNA, 21 nt, Artificial Sequence
  source: /note="Description of Artificial Sequence: Synthetic oligonucleotide"
  source: /note="RNA"
  source: /note="5' tri-ethylene glycol (TEG)"
  modified_base (1)..(1): bicyclic nucleic acid (BNA)
  modified_base (21)..(21): bicyclic nucleic acid (BNA)
ccaacaucaaggaagauggca

SEQ ID NO: 7052 - RNA, 20 nt, Artificial Sequence
  source: /note="Description of Artificial Sequence: Synthetic oligonucleotide"
  source: /note="RNA"
  source: /note="5' tri-ethylene glycol (TEG)"
  modified_base (1)..(1): bicyclic nucleic acid (BNA)
  modified_base (20)..(20): bicyclic nucleic acid (BNA)
ccaacaucaaggaagauggc

SEQ ID NO: 7053 - RNA, 19 nt, Artificial Sequence
  source: /note="Description of Artificial Sequence: Synthetic oligonucleotide"
  source: /note="RNA"
  source: /note="5' tri-ethylene glycol (TEG)"
  modified_base (1)..(1): bicyclic nucleic acid (BNA)
  modified_base (19)..(19): bicyclic nucleic acid (BNA)
ccaacaucaaggaagaugg

SEQ ID NO: 7054 - RNA, 18 nt, Artificial Sequence
  source: /note="Description of Artificial Sequence: Synthetic oligonucleotide"
  source: /note="RNA"
  source: /note="5' tri-ethylene glycol (TEG)"
  modified_base (1)..(1): bicyclic nucleic acid (BNA)
  modified_base (18)..(18): bicyclic nucleic acid (BNA)
ccaacaucaaggaagaug

SEQ ID NO: 7055 - DNA, 17 bp, Artificial Sequence
  source: /note="Description of Artificial Sequence: Synthetic oligonucleotide"
  source: /note="Description of Combined DNA/RNA Molecule: Synthetic oligonucleotide"
  source: /note="DNA/RNA"
  source: /note="5' tri-ethylene glycol (TEG)"
  modified_base (1)..(1): bicyclic nucleic acid (BNA)
  modified_base (17)..(17): bicyclic nucleic acid (BNA)
ccaacaucaaggaagat

SEQ ID NO: 7056 - RNA, 16 nt, Artificial Sequence
  source: /note="Description of Artificial Sequence: Synthetic oligonucleotide"
  source: /note="RNA"
  source: /note="5' tri-ethylene glycol (TEG)"
  modified_base (1)..(1): bicyclic nucleic acid (BNA)
  modified_base (16)..(16): bicyclic nucleic acid (BNA)
ccaacaucaaggaaga

SEQ ID NO: 7057 - RNA, 15 nt, Artificial Sequence
  source: /note="Description of Artificial Sequence: Synthetic oligonucleotide"
  source: /note="RNA"
  source: /note="5' tri-ethylene glycol (TEG)"
  modified_base (1)..(1): bicyclic nucleic acid (BNA)
  modified_base (15)..(15): bicyclic nucleic acid (BNA)
ccaacaucaaggaag

SEQ ID NO: 7058 - RNA, 27 nt, Artificial Sequence
  source: /note="Description of Artificial Sequence: Synthetic oligonucleotide"
  source: /note="RNA"
  source: /note="5' tri-ethylene glycol (TEG)"
  modified_base (1)..(1): bicyclic nucleic acid (BNA)
  modified_base (27)..(27): bicyclic nucleic acid (BNA)
caacaucaaggaagauggcauuucuag

SEQ ID NO: 7059 - RNA, 26 nt, Artificial Sequence
  source: /note="Description of Artificial Sequence: Synthetic oligonucleotide"
  source: /note="RNA"
  source: /note="5' tri-ethylene glycol (TEG)"
  modified_base (1)..(1): bicyclic nucleic acid (BNA)
  modified_base (26)..(26): bicyclic nucleic acid (BNA)
caacaucaaggaagauggcauuucua

SEQ ID NO: 7060 - DNA, 25 bp, Artificial Sequence
  source: /note="Description of Artificial Sequence: Synthetic oligonucleotide"
  source: /note="Description of Combined DNA/RNA Molecule: Synthetic oligonucleotide"
  source: /note="DNA/RNA"
  source: /note="5' tri-ethylene glycol (TEG)"
  modified_base (1)..(1): bicyclic nucleic acid (BNA)
  modified_base (25)..(25): bicyclic nucleic acid (BNA)
caacaucaaggaagauggcauuuct

SEQ ID NO: 7061 - RNA, 24 nt, Artificial Sequence
  source: /note="Description of Artificial Sequence: Synthetic oligonucleotide"
  source: /note="RNA"
  source: /note="5' tri-ethylene glycol (TEG)"
  modified_base (1)..(1): bicyclic nucleic acid (BNA)
  modified_base (24)..(24): bicyclic nucleic acid (BNA)
caacaucaaggaagauggcauuuc

SEQ ID NO: 7062 - DNA, 23 bp, Artificial Sequence
  source: /note="Description of Artificial Sequence: Synthetic oligonucleotide"
  source: /note="Description of Combined DNA/RNA Molecule: Synthetic oligonucleotide"
  source: /note="DNA/RNA"
  source: /note="5' tri-ethylene glycol (TEG)"
  modified_base (1)..(1): bicyclic nucleic acid (BNA)
  modified_base (23)..(23): bicyclic nucleic acid (BNA)
caacaucaaggaagauggcauut

SEQ ID NO: 7063 - DNA, 22 bp, Artificial Sequence
  source: /note="Description of Artificial Sequence: Synthetic oligonucleotide"
  source: /note="Description of Combined DNA/RNA Molecule: Synthetic oligonucleotide"
  source: /note="DNA/RNA"
  source: /note="5' tri-ethylene glycol (TEG)"
  modified_base (1)..(1): bicyclic nucleic acid (BNA)
  modified_base (22)..(22): bicyclic nucleic acid (BNA)
caacaucaaggaagauggcaut

SEQ ID NO: 7064 - DNA, 21 bp, Artificial Sequence
  source: /note="Description of Artificial Sequence: Synthetic oligonucleotide"
  source: /note="Description of Combined DNA/RNA Molecule: Synthetic oligonucleotide"
  source: /note="DNA/RNA"
  source: /note="5' tri-ethylene glycol (TEG)"
  modified_base (1)..(1): bicyclic nucleic acid (BNA)
  modified_base (21)..(21): bicyclic nucleic acid (BNA)
caacaucaaggaagauggcat

SEQ ID NO: 7065 - RNA, 20 nt, Artificial Sequence
  source: /note="Description of Artificial Sequence: Synthetic oligonucleotide"
  source: /note="RNA"
  source: /note="5' tri-ethylene glycol (TEG)"
  modified_base (1)..(1): bicyclic nucleic acid (BNA)
  modified_base (20)..(20): bicyclic nucleic acid (BNA)
caacaucaaggaagauggca

SEQ ID NO: 7066 - RNA, 19 nt, Artificial Sequence
  source: /note="Description of Artificial Sequence: Synthetic oligonucleotide"
  source: /note="RNA"
  source: /note="5' tri-ethylene glycol (TEG)"
  modified_base (1)..(1): bicyclic nucleic acid (BNA)
  modified_base (19)..(19): bicyclic nucleic acid (BNA)
caacaucaaggaagauggc

SEQ ID NO: 7067 - RNA, 18 nt, Artificial Sequence
  source: /note="Description of Artificial Sequence: Synthetic oligonucleotide"
  source: /note="RNA"
  source: /note="5' tri-ethylene glycol (TEG)"
  modified_base (1)..(1): bicyclic nucleic acid (BNA)
  modified_base (18)..(18): bicyclic nucleic acid (BNA)
caacaucaaggaagaugg

SEQ ID NO: 7068 - RNA, 17 nt, Artificial Sequence
  source: /note="Description of Artificial Sequence: Synthetic oligonucleotide"
  source: /note="RNA"
  source: /note="5' tri-ethylene glycol (TEG)"
  modified_base (1)..(1): bicyclic nucleic acid (BNA)
  modified_base (17)..(17): bicyclic nucleic acid (BNA)
caacaucaaggaagaug

SEQ ID NO: 7069 - DNA, 16 bp, Artificial Sequence
  source: /note="Description of Artificial Sequence: Synthetic oligonucleotide"
  source: /note="Description of Combined DNA/RNA Molecule: Synthetic oligonucleotide"
  source: /note="DNA/RNA"
  source: /note="5' tri-ethylene glycol (TEG)"
  modified_base (1)..(1): bicyclic nucleic acid (BNA)
  modified_base (16)..(16): bicyclic nucleic acid (BNA)
caacaucaaggaagat

SEQ ID NO: 7070 - RNA, 15 nt, Artificial Sequence
  source: /note="Description of Artificial Sequence: Synthetic oligonucleotide"
  source: /note="RNA"
  source: /note="5' tri-ethylene glycol (TEG)"
  modified_base (1)..(1): bicyclic nucleic acid (BNA)
  modified_base (15)..(15): bicyclic nucleic acid (BNA)
caacaucaaggaaga

SEQ ID NO: 7071 - RNA, 14 nt, Artificial Sequence
  source: /note="Description of Artificial Sequence: Synthetic oligonucleotide"
  source: /note="RNA"
  source: /note="5' tri-ethylene glycol (TEG)"
  modified_base (1)..(1): bicyclic nucleic acid (BNA)
  modified_base (14)..(14): bicyclic nucleic acid (BNA)
caacaucaaggaag

SEQ ID NO: 7072 - RNA, 26 nt, Artificial Sequence
  source: /note="Description of Artificial Sequence: Synthetic oligonucleotide"
  source: /note="RNA"
  source: /note="5' tri-ethylene glycol (TEG)"
  modified_base (1)..(1): bicyclic nucleic acid (BNA)
  modified_base (26)..(26): bicyclic nucleic acid (BNA)
aacaucaaggaagauggcauuucuag

SEQ ID NO: 7073 - RNA, 25 nt, Artificial Sequence
  source: /note="Description of Artificial Sequence: Synthetic oligonucleotide"
  source: /note="RNA"
  source: /note="5' tri-ethylene glycol (TEG)"
  modified_base (1)..(1): bicyclic nucleic acid (BNA)
  modified_base (25)..(25): bicyclic nucleic acid (BNA)
aacaucaaggaagauggcauuucua

SEQ ID NO: 7074 - DNA, 24 bp, Artificial Sequence
  source: /note="Description of Artificial Sequence: Synthetic oligonucleotide"
  source: /note="Description of Combined DNA/RNA Molecule: Synthetic oligonucleotide"
  source: /note="DNA/RNA"
  source: /note="5' tri-ethylene glycol (TEG)"
  modified_base (1)..(1): bicyclic nucleic acid (BNA)
  modified_base (24)..(24): bicyclic nucleic acid (BNA)
aacaucaaggaagauggcauuuct

SEQ ID NO: 7075 - RNA, 23 nt, Artificial Sequence
  source: /note="Description of Artificial Sequence: Synthetic oligonucleotide"
  source: /note="RNA"
  source: /note="5' tri-ethylene glycol (TEG)"
  modified_base (1)..(1): bicyclic nucleic acid (BNA)
  modified_base (23)..(23): bicyclic nucleic acid (BNA)
aacaucaaggaagauggcauuuc

SEQ ID NO: 7076 - DNA, 22 bp, Artificial Sequence
  source: /note="Description of Artificial Sequence: Synthetic oligonucleotide"
  source: /note="Description of Combined DNA/RNA Molecule: Synthetic oligonucleotide"
  source: /note="DNA/RNA"
  source: /note="5' tri-ethylene glycol (TEG)"
  modified_base (1)..(1): bicyclic nucleic acid (BNA)
  modified_base (22)..(22): bicyclic nucleic acid (BNA)
aacaucaaggaagauggcauut

SEQ ID NO: 7077 - DNA, 21 bp, Artificial Sequence
  source: /note="Description of Artificial Sequence: Synthetic oligonucleotide"
  source: /note="Description of Combined DNA/RNA Molecule: Synthetic oligonucleotide"
  source: /note="DNA/RNA"
  source: /note="5' tri-ethylene glycol (TEG)"
  modified_base (1)..(1): bicyclic nucleic acid (BNA)
  modified_base (21)..(21): bicyclic nucleic acid (BNA)
aacaucaaggaagauggcaut

SEQ ID NO: 7078 - DNA, 20 bp, Artificial Sequence
  source: /note="Description of Artificial Sequence: Synthetic oligonucleotide"
  source: /note="Description of Combined DNA/RNA Molecule: Synthetic oligonucleotide"
  source: /note="DNA/RNA"
  source: /note="5' tri-ethylene glycol (TEG)"
  modified_base (1)..(1): bicyclic nucleic acid (BNA)
  modified_base (20)..(20): bicyclic nucleic acid (BNA)
aacaucaaggaagauggcat

SEQ ID NO: 7079 - RNA, 19 nt, Artificial Sequence
  source: /note="Description of Artificial Sequence: Synthetic oligonucleotide"
  source: /note="RNA"
  source: /note="5' tri-ethylene glycol (TEG)"
  modified_base (1)..(1): bicyclic nucleic acid (BNA)
  modified_base (19)..(19): bicyclic nucleic acid (BNA)
aacaucaaggaagauggca

SEQ ID NO: 7080 - RNA, 18 nt, Artificial Sequence
  source: /note="Description of Artificial Sequence: Synthetic oligonucleotide"
  source: /note="RNA"
  source: /note="5' tri-ethylene glycol (TEG)"
  modified_base (1)..(1): bicyclic nucleic acid (BNA)
  modified_base (18)..(18): bicyclic nucleic acid (BNA)
aacaucaaggaagauggc

SEQ ID NO: 7081 - RNA, 17 nt, Artificial Sequence
  source: /note="Description of Artificial Sequence: Synthetic oligonucleotide"
  source: /note="RNA"
  source: /note="5' tri-ethylene glycol (TEG)"
  modified_base (1)..(1): bicyclic nucleic acid (BNA)
  modified_base (17)..(17): bicyclic nucleic acid (BNA)
aacaucaaggaagaugg

SEQ ID NO: 7082 - RNA, 16 nt, Artificial Sequence
  source: /note="Description of Artificial Sequence: Synthetic oligonucleotide"
  source: /note="RNA"
  source: /note="5' tri-ethylene glycol (TEG)"
  modified_base (1)..(1): bicyclic nucleic acid (BNA)
  modified_base (16)..(16): bicyclic nucleic acid (BNA)
aacaucaaggaagaug

SEQ ID NO: 7083 - DNA, 15 bp, Artificial Sequence
  source: /note="Description of Artificial Sequence: Synthetic oligonucleotide"
  source: /note="Description of Combined DNA/RNA Molecule: Synthetic oligonucleotide"
  source: /note="DNA/RNA"
  source: /note="5' tri-ethylene glycol (TEG)"
  modified_base (1)..(1): bicyclic nucleic acid (BNA)
  modified_base (15)..(15): bicyclic nucleic acid (BNA)
aacaucaaggaagat

SEQ ID NO: 7084 - RNA, 14 nt, Artificial Sequence
  source: /note="Description of Artificial Sequence: Synthetic oligonucleotide"
  source: /note="RNA"
  source: /note="5' tri-ethylene glycol (TEG)"
  modified_base (1)..(1): bicyclic nucleic acid (BNA)
  modified_base (14)..(14): bicyclic nucleic acid (BNA)
aacaucaaggaaga

SEQ ID NO: 7085 - RNA, 13 nt, Artificial Sequence
  source: /note="Description of Artificial Sequence: Synthetic oligonucleotide"
  source: /note="RNA"
  source: /note="5' tri-ethylene glycol (TEG)"
  modified_base (1)..(1): bicyclic nucleic acid (BNA)
  modified_base (13)..(13): bicyclic nucleic acid (BNA)
aacaucaaggaag

SEQ ID NO: 7086 - RNA, 25 nt, Artificial Sequence
  source: /note="Description of Artificial Sequence: Synthetic oligonucleotide"
  source: /note="RNA"
  source: /note="5' tri-ethylene glycol (TEG)"
  modified_base (1)..(1): bicyclic nucleic acid (BNA)
  modified_base (25)..(25): bicyclic nucleic acid (BNA)
acaucaaggaagauggcauuucuag

SEQ ID NO: 7087 - RNA, 24 nt, Artificial Sequence
  source: /note="Description of Artificial Sequence: Synthetic oligonucleotide"
  source: /note="RNA"
  source: /note="5' tri-ethylene glycol (TEG)"
  modified_base (1)..(1): bicyclic nucleic acid (BNA)
  modified_base (24)..(24): bicyclic nucleic acid (BNA)
acaucaaggaagauggcauuucua

SEQ ID NO: 7088 - DNA, 23 bp, Artificial Sequence
  source: /note="Description of Artificial Sequence: Synthetic oligonucleotide"
  source: /note="Description of Combined DNA/RNA Molecule: Synthetic oligonucleotide"
  source: /note="DNA/RNA"
  source: /note="5' tri-ethylene glycol (TEG)"
  modified_base (1)..(1): bicyclic nucleic acid (BNA)
  modified_base (23)..(23): bicyclic nucleic acid (BNA)
acaucaaggaagauggcauuuct

SEQ ID NO: 7089 - RNA, 22 nt, Artificial Sequence
  source: /note="Description of Artificial Sequence: Synthetic oligonucleotide"
  source: /note="RNA"
  source: /note="5' tri-ethylene glycol (TEG)"
  modified_base (1)..(1): bicyclic nucleic acid (BNA)
  modified_base (22)..(22): bicyclic nucleic acid (BNA)
acaucaaggaagauggcauuuc

SEQ ID NO: 7090 - DNA, 21 bp, Artificial Sequence
  source: /note="Description of Artificial Sequence: Synthetic oligonucleotide"
  source: /note="Description of Combined DNA/RNA Molecule: Synthetic oligonucleotide"
  source: /note="DNA/RNA"
  source: /note="5' tri-ethylene glycol (TEG)"
  modified_base (1)..(1): bicyclic nucleic acid (BNA)
  modified_base (21)..(21): bicyclic nucleic acid (BNA)
acaucaaggaagauggcauut

SEQ ID NO: 7091 - DNA, 20 bp, Artificial Sequence
  source: /note="Description of Artificial Sequence: Synthetic oligonucleotide"
  source: /note="Description of Combined DNA/RNA Molecule: Synthetic oligonucleotide"
  source: /note="DNA/RNA"
  source: /note="5' tri-ethylene glycol (TEG)"
  modified_base (1)..(1): bicyclic nucleic acid (BNA)
  modified_base (20)..(20): bicyclic nucleic acid (BNA)
acaucaaggaagauggcaut

SEQ ID NO: 7092 - DNA, 19 bp, Artificial Sequence
  source: /note="Description of Artificial Sequence: Synthetic oligonucleotide"
  source: /note="Description of Combined DNA/RNA Molecule: Synthetic oligonucleotide"
  source: /note="DNA/RNA"
  source: /note="5' tri-ethylene glycol (TEG)"
  modified_base (1)..(1): bicyclic nucleic acid (BNA)
  modified_base (19)..(19): bicyclic nucleic acid (BNA)
acaucaaggaagauggcat

SEQ ID NO: 7093 - RNA, 18 nt, Artificial Sequence
  source: /note="Description of Artificial Sequence: Synthetic oligonucleotide"
  source: /note="RNA"
  source: /note="5' tri-ethylene glycol (TEG)"
  modified_base (1)..(1): bicyclic nucleic acid (BNA)
  modified_base (18)..(18): bicyclic nucleic acid (BNA)
acaucaaggaagauggca

SEQ ID NO: 7094 - RNA, 17 nt, Artificial Sequence
  source: /note="Description of Artificial Sequence: Synthetic oligonucleotide"
  source: /note="RNA"
  source: /note="5' tri-ethylene glycol (TEG)"
  modified_base (1)..(1): bicyclic nucleic acid (BNA)
  modified_base (17)..(17): bicyclic nucleic acid (BNA)
acaucaaggaagauggc

SEQ ID NO: 7095 - RNA, 16 nt, Artificial Sequence
  source: /note="Description of Artificial Sequence: Synthetic oligonucleotide"
  source: /note="RNA"
  source: /note="5' tri-ethylene glycol (TEG)"
  modified_base (1)..(1): bicyclic nucleic acid (BNA)
  modified_base (16)..(16): bicyclic nucleic acid (BNA)
acaucaaggaagaugg

SEQ ID NO: 7096 - RNA, 15 nt, Artificial Sequence
  source: /note="Description of Artificial Sequence: Synthetic oligonucleotide"
  source: /note="RNA"
  source: /note="5' tri-ethylene glycol (TEG)"
  modified_base (1)..(1): bicyclic nucleic acid (BNA)
  modified_base (15)..(15): bicyclic nucleic acid (BNA)
acaucaaggaagaug

SEQ ID NO: 7097 - DNA, 14 bp, Artificial Sequence
  source: /note="Description of Artificial Sequence: Synthetic oligonucleotide"
  source: /note="Description of Combined DNA/RNA Molecule: Synthetic oligonucleotide"
  source: /note="DNA/RNA"
  source: /note="5' tri-ethylene glycol (TEG)"
  modified_base (1)..(1): bicyclic nucleic acid (BNA)
  modified_base (14)..(14): bicyclic nucleic acid (BNA)
acaucaaggaagat

SEQ ID NO: 7098 - RNA, 13 nt, Artificial Sequence
  source: /note="Description of Artificial Sequence: Synthetic oligonucleotide"
  source: /note="RNA"
  source: /note="5' tri-ethylene glycol (TEG)"
  modified_base (1)..(1): bicyclic nucleic acid (BNA)
  modified_base (13)..(13): bicyclic nucleic acid (BNA)
acaucaaggaaga

SEQ ID NO: 7099 - RNA, 12 nt, Artificial Sequence
  source: /note="Description of Artificial Sequence: Synthetic oligonucleotide"
  source: /note="RNA"
  source: /note="5' tri-ethylene glycol (TEG)"
  modified_base (1)..(1): bicyclic nucleic acid (BNA)
  modified_base (12)..(12): bicyclic nucleic acid (BNA)
acaucaaggaag

SEQ ID NO: 7100 - RNA, 24 nt, Artificial Sequence
  source: /note="Description of Artificial Sequence: Synthetic oligonucleotide"
  source: /note="RNA"
  source: /note="5' tri-ethylene glycol (TEG)"
  modified_base (1)..(1): bicyclic nucleic acid (BNA)
  modified_base (24)..(24): bicyclic nucleic acid (BNA)
caucaaggaagauggcauuucuag

SEQ ID NO: 7101 - RNA, 23 nt, Artificial Sequence
  source: /note="Description of Artificial Sequence: Synthetic oligonucleotide"
  source: /note="RNA"
  source: /note="5' tri-ethylene glycol (TEG)"
  modified_base (1)..(1): bicyclic nucleic acid (BNA)
  modified_base (23)..(23): bicyclic nucleic acid (BNA)
caucaaggaagauggcauuucua

SEQ ID NO: 7102 - DNA, 22 bp, Artificial Sequence
  source: /note="Description of Artificial Sequence: Synthetic oligonucleotide"
  source: /note="Description of Combined DNA/RNA Molecule: Synthetic oligonucleotide"
  source: /note="DNA/RNA"
  source: /note="5' tri-ethylene glycol (TEG)"
  modified_base (1)..(1): bicyclic nucleic acid (BNA)
  modified_base (22)..(22): bicyclic nucleic acid (BNA)
caucaaggaagauggcauuuct

SEQ ID NO: 7103 - RNA, 21 nt, Artificial Sequence
  source: /note="Description of Artificial Sequence: Synthetic oligonucleotide"
  source: /note="RNA"
  source: /note="5' tri-ethylene glycol (TEG)"
  modified_base (1)..(1): bicyclic nucleic acid (BNA)
  modified_base (21)..(21): bicyclic nucleic acid (BNA)
caucaaggaagauggcauuuc

SEQ ID NO: 7104 - DNA, 20 bp, Artificial Sequence
  source: /note="Description of Artificial Sequence: Synthetic oligonucleotide"
  source: /note="Description of Combined DNA/RNA Molecule: Synthetic oligonucleotide"
  source: /note="DNA/RNA"
  source: /note="5' tri-ethylene glycol (TEG)"
  modified_base (1)..(1): bicyclic nucleic acid (BNA)
  modified_base (20)..(20): bicyclic nucleic acid (BNA)
caucaaggaagauggcauut

SEQ ID NO: 7105 - DNA, 19 bp, Artificial Sequence
  source: /note="Description of Artificial Sequence: Synthetic oligonucleotide"
  source: /note="Description of Combined DNA/RNA Molecule: Synthetic oligonucleotide"
  source: /note="DNA/RNA"
  source: /note="5' tri-ethylene glycol (TEG)"
  modified_base (1)..(1): bicyclic nucleic acid (BNA)
  modified_base (19)..(19): bicyclic nucleic acid (BNA)
caucaaggaagauggcaut

SEQ ID NO: 7106 - DNA, 18 bp, Artificial Sequence
  source: /note="Description of Artificial Sequence: Synthetic oligonucleotide"
  source: /note="Description of Combined DNA/RNA Molecule: Synthetic oligonucleotide"
  source: /note="DNA/RNA"
  source: /note="5' tri-ethylene glycol (TEG)"
  modified_base (1)..(1): bicyclic nucleic acid (BNA)
  modified_base (18)..(18): bicyclic nucleic acid (BNA)
caucaaggaagauggcat

SEQ ID NO: 7107 - RNA, 17 nt, Artificial Sequence
  source: /note="Description of Artificial Sequence: Synthetic oligonucleotide"
  source: /note="RNA"
  source: /note="5' tri-ethylene glycol (TEG)"
  modified_base (1)..(1): bicyclic nucleic acid (BNA)
  modified_base (17)..(17): bicyclic nucleic acid (BNA)
caucaaggaagauggca

SEQ ID NO: 7108 - RNA, 16 nt, Artificial Sequence
  source: /note="Description of Artificial Sequence: Synthetic oligonucleotide"
  source: /note="RNA"
  source: /note="5' tri-ethylene glycol (TEG)"
  modified_base (1)..(1): bicyclic nucleic acid (BNA)
  modified_base (16)..(16): bicyclic nucleic acid (BNA)
caucaaggaagauggc

SEQ ID NO: 7109 - RNA, 15 nt, Artificial Sequence
  source: /note="Description of Artificial Sequence: Synthetic oligonucleotide"
  source: /note="RNA"
  source: /note="5' tri-ethylene glycol (TEG)"
  modified_base (1)..(1): bicyclic nucleic acid (BNA)
  modified_base (15)..(15): bicyclic nucleic acid (BNA)
caucaaggaagaugg

SEQ ID NO: 7110 - RNA, 14 nt, Artificial Sequence
  source: /note="Description of Artificial Sequence: Synthetic oligonucleotide"
  source: /note="RNA"
  source: /note="5' tri-ethylene glycol (TEG)"
  modified_base (1)..(1): bicyclic nucleic acid (BNA)
  modified_base (14)..(14): bicyclic nucleic acid (BNA)
caucaaggaagaug

SEQ ID NO: 7111 - DNA, 13 bp, Artificial Sequence
  source: /note="Description of Artificial Sequence: Synthetic oligonucleotide"
  source: /note="Description of Combined DNA/RNA Molecule: Synthetic oligonucleotide"
  source: /note="DNA/RNA"
  source: /note="5' tri-ethylene glycol (TEG)"
  modified_base (1)..(1): bicyclic nucleic acid (BNA)
  modified_base (13)..(13): bicyclic nucleic acid (BNA)
caucaaggaagat

SEQ ID NO: 7112 - RNA, 12 nt, Artificial Sequence
  source: /note="Description of Artificial Sequence: Synthetic oligonucleotide"
  source: /note="RNA"
  source: /note="5' tri-ethylene glycol (TEG)"
  modified_base (1)..(1): bicyclic nucleic acid (BNA)
  modified_base (12)..(12): bicyclic nucleic acid (BNA)
caucaaggaaga

SEQ ID NO: 7113 - RNA, 11 nt, Artificial Sequence
  source: /note="Description of Artificial Sequence: Synthetic oligonucleotide"
  source: /note="RNA"
  source: /note="5' tri-ethylene glycol (TEG)"
  modified_base (1)..(1): bicyclic nucleic acid (BNA)
  modified_base (11)..(11): bicyclic nucleic acid (BNA)
caucaaggaag

SEQ ID NO: 7114 - RNA, 23 nt, Artificial Sequence
  source: /note="Description of Artificial Sequence: Synthetic oligonucleotide"
  source: /note="RNA"
  source: /note="5' tri-ethylene glycol (TEG)"
  modified_base (1)..(1): bicyclic nucleic acid (BNA)
  modified_base (23)..(23): bicyclic nucleic acid (BNA)
aucaaggaagauggcauuucuag

SEQ ID NO: 7115 - RNA, 22 nt, Artificial Sequence
  source: /note="Description of Artificial Sequence: Synthetic oligonucleotide"
  source: /note="RNA"
  source: /note="5' tri-ethylene glycol (TEG)"
  modified_base (1)..(1): bicyclic nucleic acid (BNA)
  modified_base (22)..(22): bicyclic nucleic acid (BNA)
aucaaggaagauggcauuucua

SEQ ID NO: 7116 - DNA, 21 bp, Artificial Sequence
  source: /note="Description of Artificial Sequence: Synthetic oligonucleotide"
  source: /note="Description of Combined DNA/RNA Molecule: Synthetic oligonucleotide"
  source: /note="DNA/RNA"
  source: /note="5' tri-ethylene glycol (TEG)"
  modified_base (1)..(1): bicyclic nucleic acid (BNA)
  modified_base (21)..(21): bicyclic nucleic acid (BNA)
aucaaggaagauggcauuuct

SEQ ID NO: 7117 - RNA, 20 nt, Artificial Sequence
  source: /note="Description of Artificial Sequence: Synthetic oligonucleotide"
  source: /note="RNA"
  source: /note="5' tri-ethylene glycol (TEG)"
  modified_base (1)..(1): bicyclic nucleic acid (BNA)
  modified_base (20)..(20): bicyclic nucleic acid (BNA)
aucaaggaagauggcauuuc

SEQ ID NO: 7118 - DNA, 19 bp, Artificial Sequence
  source: /note="Description of Artificial Sequence: Synthetic oligonucleotide"
  source: /note="Description of Combined DNA/RNA Molecule: Synthetic oligonucleotide"
  source: /note="DNA/RNA"
  source: /note="5' tri-ethylene glycol (TEG)"
  modified_base (1)..(1): bicyclic nucleic acid (BNA)
  modified_base (19)..(19): bicyclic nucleic acid (BNA)
aucaaggaagauggcauut

SEQ ID NO: 7119 - DNA, 18 bp, Artificial Sequence
  source: /note="Description of Artificial Sequence: Synthetic oligonucleotide"
  source: /note="Description of Combined DNA/RNA Molecule: Synthetic oligonucleotide"
  source: /note="DNA/RNA"
  source: /note="5' tri-ethylene glycol (TEG)"
  modified_base (1)..(1): bicyclic nucleic acid (BNA)
  modified_base (18)..(18): bicyclic nucleic acid (BNA)
aucaaggaagauggcaut

SEQ ID NO: 7120 - DNA, 17 bp, Artificial Sequence
  source: /note="Description of Artificial Sequence: Synthetic oligonucleotide"
  source: /note="Description of Combined DNA/RNA Molecule: Synthetic oligonucleotide"
  source: /note="DNA/RNA"
  source: /note="5' tri-ethylene glycol (TEG)"
  modified_base (1)..(1): bicyclic nucleic acid (BNA)
  modified_base (17)..(17): bicyclic nucleic acid (BNA)
aucaaggaagauggcat

SEQ ID NO: 7121 - RNA, 16 nt, Artificial Sequence
  source: /note="Description of Artificial Sequence: Synthetic oligonucleotide"
  source: /note="RNA"
  source: /note="5' tri-ethylene glycol (TEG)"
  modified_base (1)..(1): bicyclic nucleic acid (BNA)
  modified_base (16)..(16): bicyclic nucleic acid (BNA)
aucaaggaagauggca

SEQ ID NO: 7122 - RNA, 15 nt, Artificial Sequence
  source: /note="Description of Artificial Sequence: Synthetic oligonucleotide"
  source: /note="RNA"
  source: /note="5' tri-ethylene glycol (TEG)"
  modified_base (1)..(1): bicyclic nucleic acid (BNA)
  modified_base (15)..(15): bicyclic nucleic acid (BNA)
aucaaggaagauggc

SEQ ID NO: 7123 - RNA, 14 nt, Artificial Sequence
  source: /note="Description of Artificial Sequence: Synthetic oligonucleotide"
  source: /note="RNA"
  source: /note="5' tri-ethylene glycol (TEG)"
  modified_base (1)..(1): bicyclic nucleic acid (BNA)
  modified_base (14)..(14): bicyclic nucleic acid (BNA)
aucaaggaagaugg

SEQ ID NO: 7124 - RNA, 13 nt, Artificial Sequence
  source: /note="Description of Artificial Sequence: Synthetic oligonucleotide"
  source: /note="RNA"
  source: /note="5' tri-ethylene glycol (TEG)"
  modified_base (1)..(1): bicyclic nucleic acid (BNA)
  modified_base (13)..(13): bicyclic nucleic acid (BNA)
aucaaggaagaug

SEQ ID NO: 7125 - DNA, 12 bp, Artificial Sequence
  source: /note="Description of Artificial Sequence: Synthetic oligonucleotide"
  source: /note="Description of Combined DNA/RNA Molecule: Synthetic oligonucleotide"
  source: /note="DNA/RNA"
  source: /note="5' tri-ethylene glycol (TEG)"
  modified_base (1)..(1): bicyclic nucleic acid (BNA)
  modified_base (12)..(12): bicyclic nucleic acid (BNA)
aucaaggaagat

SEQ ID NO: 7126 - RNA, 11 nt, Artificial Sequence
  source: /note="Description of Artificial Sequence: Synthetic oligonucleotide"
  source: /note="RNA"
  source: /note="5' tri-ethylene glycol (TEG)"
  modified_base (1)..(1): bicyclic nucleic acid (BNA)
  modified_base (11)..(11): bicyclic nucleic acid (BNA)
aucaaggaaga

SEQ ID NO: 7127 - RNA, 10 nt, Artificial Sequence
  source: /note="Description of Artificial Sequence: Synthetic oligonucleotide"
  source: /note="RNA"
  source: /note="5' tri-ethylene glycol (TEG)"
  modified_base (1)..(1): bicyclic nucleic acid (BNA)
  modified_base (10)..(10): bicyclic nucleic acid (BNA)
aucaaggaag

SEQ ID NO: 7128 - RNA, 23 nt, Artificial Sequence
  source: /note="Description of Artificial Sequence: Synthetic oligonucleotide"
  source: /note="RNA"
  source: /note="5' tri-ethylene glycol (TEG)"
  modified_base (1)..(1): bicyclic nucleic acid (BNA)
  modified_base (23)..(23): bicyclic nucleic acid (BNA)
ccagagcagguaccuccaacauc

SEQ ID NO: 7129 - RNA, 18 nt, Artificial Sequence
  source: /note="Description of Artificial Sequence: Synthetic oligonucleotide"
  source: /note="RNA"
  source: /note="5' tri-ethylene glycol (TEG)"
  modified_base (1)..(1): bicyclic nucleic acid (BNA)
  modified_base (18)..(18): bicyclic nucleic acid (BNA)
ccagagcagguaccucca

SEQ ID NO: 7130 - DNA, 23 bp, Artificial Sequence
  source: /note="Description of Artificial Sequence: Synthetic oligonucleotide"
  source: /note="Description of Combined DNA/RNA Molecule: Synthetic oligonucleotide"
  source: /note="DNA/RNA"
  source: /note="5' tri-ethylene glycol (TEG)"
  modified_base (1)..(1): bicyclic nucleic acid (BNA)
  modified_base (23)..(23): bicyclic nucleic acid (BNA)
ccucugugauuuuauaacuugat

SEQ ID NO: 7131 - DNA, 17 bp, Artificial Sequence
  source: /note="Description of Artificial Sequence: Synthetic oligonucleotide"
  source: /note="Description of Combined DNA/RNA Molecule: Synthetic oligonucleotide"
  source: /note="DNA/RNA"
  source: /note="5' tri-ethylene glycol (TEG)"
  modified_base (1)..(1): bicyclic nucleic acid (BNA)
  modified_base (17)..(17): bicyclic nucleic acid (BNA)
tcacccaccaucaccct

SEQ ID NO: 7132 - DNA, 20 bp, Artificial Sequence
  source: /note="Description of Artificial Sequence: Synthetic oligonucleotide"
  source: /note="Description of Combined DNA/RNA Molecule: Synthetic oligonucleotide"
  source: /note="DNA/RNA"
  source: /note="5' tri-ethylene glycol (TEG)"
  modified_base (1)..(1): bicyclic nucleic acid (BNA)
  modified_base (20)..(20): bicyclic nucleic acid (BNA)
tgauauccucaaggucaccc

SEQ ID NO: 7133 - RNA, 22 nt, Artificial Sequence
  source: /note="Description of Artificial Sequence: Synthetic oligonucleotide"
  source: /note="RNA"
  source: /note="5' tri-ethylene glycol (TEG)"
  modified_base (1)..(1): bicyclic nucleic acid (BNA)
  modified_base (22)..(22): bicyclic nucleic acid (BNA)
cugcuugaugaucaucucguug

SEQ ID NO: 7134 - RNA, 18 nt, Artificial Sequence
  source: /note="Description of Artificial Sequence: Synthetic oligonucleotide"
  source: /note="RNA"
  source: /note="5' tri-ethylene glycol (TEG)"
  modified_base (1)..(1): bicyclic nucleic acid (BNA)
  modified_base (18)..(18): bicyclic nucleic acid (BNA)
cugcuugaugaucaucuc

SEQ ID NO: 7135 - RNA, 19 nt, Artificial Sequence
  source: /note="Description of Artificial Sequence: Synthetic oligonucleotide"
  source: /note="RNA"
  source: /note="5' tri-ethylene glycol (TEG)"
  modified_base (1)..(1): bicyclic nucleic acid (BNA)
  modified_base (19)..(19): bicyclic nucleic acid (BNA)
guuuccuuaguaaccacag

SEQ ID NO: 7136 - RNA, 17 nt, Artificial Sequence
  source: /note="Description of Artificial Sequence: Synthetic oligonucleotide"
  source: /note="RNA"
  source: /note="5' tri-ethylene glycol (TEG)"
  modified_base (1)..(1): bicyclic nucleic acid (BNA)
  modified_base (17)..(17): bicyclic nucleic acid (BNA)
guuuccuuaguaaccac

SEQ ID NO: 7137 - DNA, 20 bp, Artificial Sequence
  source: /note="Description of Artificial Sequence: Synthetic oligonucleotide"
  source: /note="Description of Combined DNA/RNA Molecule: Synthetic oligonucleotide"
  source: /note="DNA/RNA"
  modified_base (1)..(1): bicyclic nucleic acid (BNA)
  modified_base (20)..(20): bicyclic nucleic acid (BNA)
  source: /note="3' tri-ethylene glycol (TEG)"
tcaaggaagauggcauuuct

SEQ ID NO: 7138 - DNA, 22 bp, Artificial Sequence
  source: /note="Description of Artificial Sequence: Synthetic oligonucleotide"
  source: /note="Description of Combined DNA/RNA Molecule: Synthetic oligonucleotide"
  source: /note="DNA/RNA"
  modified_base (1)..(1): bicyclic nucleic acid (BNA)
  modified_base (22)..(22): bicyclic nucleic acid (BNA)
  source: /note="3' tri-ethylene glycol (TEG)"
tcaaggaagauggcauuucuag

SEQ ID NO: 7139 - RNA, 18 nt, Artificial Sequence
  source: /note="Description of Artificial Sequence: Synthetic oligonucleotide"
  source: /note="RNA"
  modified_base (1)..(1): bicyclic nucleic acid (BNA)
  modified_base (18)..(18): bicyclic nucleic acid (BNA)
  source: /note="3' tri-ethylene glycol (TEG)"
gguaaguucuguccaagc

SEQ ID NO: 7140 - RNA, 18 nt, Artificial Sequence
  source: /note="Description of Artificial Sequence: Synthetic oligonucleotide"
  source: /note="RNA"
  modified_base (1)..(1): bicyclic nucleic acid (BNA)
  modified_base (18)..(18): bicyclic nucleic acid (BNA)
  source: /note="3' tri-ethylene glycol (TEG)"
guaaguucuguccaagcc

SEQ ID NO: 7141 - RNA, 18 nt, Artificial Sequence
  source: /note="Description of Artificial Sequence: Synthetic oligonucleotide"
  source: /note="RNA"
  modified_base (1)..(1): bicyclic nucleic acid (BNA)
  modified_base (18)..(18): bicyclic nucleic acid (BNA)
  source: /note="3' tri-ethylene glycol (TEG)"
agucgguaaguucugucc

SEQ ID NO: 7142 - RNA, 18 nt, Artificial Sequence
  source: /note="Description of Artificial Sequence: Synthetic oligonucleotide"
  source: /note="RNA"
  modified_base (1)..(1): bicyclic nucleic acid (BNA)
  modified_base (18)..(18): bicyclic nucleic acid (BNA)
  source: /note="3' tri-ethylene glycol (TEG)"
cuguccaagcccgguuga

SEQ ID NO: 7143 - DNA, 15 bp, Artificial Sequence
  source: /note="Description of Artificial Sequence: Synthetic oligonucleotide"
  source: /note="Description of Combined DNA/RNA Molecule: Synthetic oligonucleotide"
  source: /note="DNA/RNA"
  modified_base (1)..(1): bicyclic nucleic acid (BNA)
  modified_base (15)..(15): bicyclic nucleic acid (BNA)
  source: /note="3' tri-ethylene glycol (TEG)"
taaguucuguccaag

SEQ ID NO: 7144 - DNA, 20 bp, Artificial Sequence
  source: /note="Description of Artificial Sequence: Synthetic oligonucleotide"
  source: /note="Description of Combined DNA/RNA Molecule: Synthetic oligonucleotide"
  source: /note="DNA/RNA"
  modified_base (1)..(1): bicyclic nucleic acid (BNA)
  modified_base (20)..(20): bicyclic nucleic acid (BNA)
  source: /note="3' tri-ethylene glycol (TEG)"
tucuguccaagcccgguuga

SEQ ID NO: 7145 - DNA, 19 bp, Artificial Sequence
  source: /note="Description of Artificial Sequence: Synthetic oligonucleotide"
  source: /note="Description of Combined DNA/RNA Molecule: Synthetic oligonucleotide"
  source: /note="DNA/RNA"
  modified_base (1)..(1): bicyclic nucleic acid (BNA)
  modified_base (19)..(19): bicyclic nucleic acid (BNA)
  source: /note="3' tri-ethylene glycol (TEG)"
tucuguccaagcccgguug

SEQ ID NO: 7146 - DNA, 18 bp, Artificial Sequence
  source: /note="Description of Artificial Sequence: Synthetic oligonucleotide"
  source: /note="Description of Combined DNA/RNA Molecule: Synthetic oligonucleotide"
  source: /note="DNA/RNA"
  modified_base (1)..(1): bicyclic nucleic acid (BNA)
  modified_base (18)..(18): bicyclic nucleic acid (BNA)
  source: /note="3' tri-ethylene glycol (TEG)"
tucuguccaagcccggut

SEQ ID NO: 7147 - DNA, 17 bp, Artificial Sequence
  source: /note="Description of Artificial Sequence: Synthetic oligonucleotide"
  source: /note="Description of Combined DNA/RNA Molecule: Synthetic oligonucleotide"
  source: /note="DNA/RNA"
  modified_base (1)..(1): bicyclic nucleic acid (BNA)
  modified_base (17)..(17): bicyclic nucleic acid (BNA)
  source: /note="3' tri-ethylene glycol (TEG)"
tucuguccaagcccggt

SEQ ID NO: 7148 - DNA, 16 bp, Artificial Sequence
  source: /note="Description of Artificial Sequence: Synthetic oligonucleotide"
  source: /note="Description of Combined DNA/RNA Molecule: Synthetic oligonucleotide"
  source: /note="DNA/RNA"
  modified_base (1)..(1): bicyclic nucleic acid (BNA)
  modified_base (16)..(16): bicyclic nucleic acid (BNA)
  source: /note="3' tri-ethylene glycol (TEG)"
tucuguccaagcccgg

SEQ ID NO: 7149 - DNA, 15 bp, Artificial Sequence
  source: /note="Description of Artificial Sequence: Synthetic oligonucleotide"
  source: /note="Description of Combined DNA/RNA Molecule: Synthetic oligonucleotide"
  source: /note="DNA/RNA"
  modified_base (1)..(1): bicyclic nucleic acid (BNA)
  modified_base (15)..(15): bicyclic nucleic acid (BNA)
  source: /note="3' tri-ethylene glycol (TEG)"
tucuguccaagcccg

SEQ ID NO: 7150 - DNA, 14 bp, Artificial Sequence
  source: /note="Description of Artificial Sequence: Synthetic oligonucleotide"
  source: /note="Description of Combined DNA/RNA Molecule: Synthetic oligonucleotide"
  source: /note="DNA/RNA"
  modified_base (1)..(1): bicyclic nucleic acid (BNA)
  modified_base (14)..(14): bicyclic nucleic acid (BNA)
  source: /note="3' tri-ethylene glycol (TEG)"
tucuguccaagccc

SEQ ID NO: 7151 - DNA, 13 bp, Artificial Sequence
  source: /note="Description of Artificial Sequence: Synthetic oligonucleotide"
  source: /note="Description of Combined DNA/RNA Molecule: Synthetic oligonucleotide"
  source: /note="DNA/RNA"
  modified_base (1)..(1): bicyclic nucleic acid (BNA)
  modified_base (13)..(13): bicyclic nucleic acid (BNA)
  source: /note="3' tri-ethylene glycol (TEG)"
tucuguccaagcc

SEQ ID NO: 7152 - DNA, 12 bp, Artificial Sequence
  source: /note="Description of Artificial Sequence: Synthetic oligonucleotide"
  source: /note="Description of Combined DNA/RNA Molecule: Synthetic oligonucleotide"
  source: /note="DNA/RNA"
  modified_base (1)..(1): bicyclic nucleic acid (BNA)
  modified_base (12)..(12): bicyclic nucleic acid (BNA)
  source: /note="3' tri-ethylene glycol (TEG)"
tucuguccaagc

SEQ ID NO: 7153 - DNA, 11 bp, Artificial Sequence
  source: /note="Description of Artificial Sequence: Synthetic oligonucleotide"
  source: /note="Description of Combined DNA/RNA Molecule: Synthetic oligonucleotide"
  source: /note="DNA/RNA"
  modified_base (1)..(1): bicyclic nucleic acid (BNA)
  modified_base (11)..(11): bicyclic nucleic acid (BNA)
  source: /note="3' tri-ethylene glycol (TEG)"
tucuguccaag

SEQ ID NO: 7154 - DNA, 10 bp, Artificial Sequence
  source: /note="Description of Artificial Sequence: Synthetic oligonucleotide"
  source: /note="Description of Combined DNA/RNA Molecule: Synthetic oligonucleotide"
  source: /note="DNA/RNA"
  modified_base (1)..(1): bicyclic nucleic acid (BNA)
  modified_base (10)..(10): bicyclic nucleic acid (BNA)
  source: /note="3' tri-ethylene glycol (TEG)"
tucuguccaa

SEQ ID NO: 7155 - DNA, 9 bp, Artificial Sequence
  source: /note="Description of Artificial Sequence: Synthetic oligonucleotide"
  source: /note="Description of Combined DNA/RNA Molecule: Synthetic oligonucleotide"
  source: /note="DNA/RNA"
  modified_base (1)..(1): bicyclic nucleic acid (BNA)
  modified_base (9)..(9): bicyclic nucleic acid (BNA)
  source: /note="3' tri-ethylene glycol (TEG)"
tucugucca

SEQ ID NO: 7156 - DNA, 8 bp, Artificial Sequence
  source: /note="Description of Artificial Sequence: Synthetic oligonucleotide"
  source: /note="Description of Combined DNA/RNA Molecule: Synthetic oligonucleotide"
  source: /note="DNA/RNA"
  modified_base (1)..(1): bicyclic nucleic acid (BNA)
  modified_base (8)..(8): bicyclic nucleic acid (BNA)
  source: /note="3' tri-ethylene glycol (TEG)"
tucugucc

SEQ ID NO: 7157 - DNA, 19 bp, Artificial Sequence
  source: /note="Description of Artificial Sequence: Synthetic oligonucleotide"
  source: /note="Description of Combined DNA/RNA Molecule: Synthetic oligonucleotide"
  source: /note="DNA/RNA"
  modified_base (1)..(1): bicyclic nucleic acid (BNA)
  modified_base (19)..(19): bicyclic nucleic acid (BNA)
  source: /note="3' tri-ethylene glycol (TEG)"
tcuguccaagcccgguuga

SEQ ID NO: 7158 - DNA, 18 bp, Artificial Sequence
  source: /note="Description of Artificial Sequence: Synthetic oligonucleotide"
  source: /note="Description of Combined DNA/RNA Molecule: Synthetic oligonucleotide"
  source: /note="DNA/RNA"
  modified_base (1)..(1): bicyclic nucleic acid (BNA)
  modified_base (18)..(18): bicyclic nucleic acid (BNA)
  source: /note="3' tri-ethylene glycol (TEG)"
tcuguccaagcccgguug

SEQ ID NO: 7159 - DNA, 17 bp, Artificial Sequence
  source: /note="Description of Artificial Sequence: Synthetic oligonucleotide"
  source: /note="Description of Combined DNA/RNA Molecule: Synthetic oligonucleotide"
  source: /note="DNA/RNA"
  modified_base (1)..(1): bicyclic nucleic acid (BNA)
  modified_base (17)..(17): bicyclic nucleic acid (BNA)
  source: /note="3' tri-ethylene glycol (TEG)"
tcuguccaagcccggut

SEQ ID NO: 7160 - DNA, 16 bp, Artificial Sequence
  source: /note="Description of Artificial Sequence: Synthetic oligonucleotide"
  source: /note="Description of Combined DNA/RNA Molecule: Synthetic oligonucleotide"
  source: /note="DNA/RNA"
  modified_base (1)..(1): bicyclic nucleic acid (BNA)
  modified_base (16)..(16): bicyclic nucleic acid (BNA)
  source: /note="3' tri-ethylene glycol (TEG)"
tcuguccaagcccggt

SEQ ID NO: 7161 - DNA, 15 bp, Artificial Sequence
  source: /note="Description of Artificial Sequence: Synthetic oligonucleotide"
  source: /note="Description of Combined DNA/RNA Molecule: Synthetic oligonucleotide"
  source: /note="DNA/RNA"
  modified_base (1)..(1): bicyclic nucleic acid (BNA)
  modified_base (15)..(15): bicyclic nucleic acid (BNA)
  source: /note="3' tri-ethylene glycol (TEG)"
tcuguccaagcccgg

SEQ ID NO: 7162 - DNA, 14 bp, Artificial Sequence
  source: /note="Description of Artificial Sequence: Synthetic oligonucleotide"
  source: /note="Description of Combined DNA/RNA Molecule: Synthetic oligonucleotide"
  source: /note="DNA/RNA"
  modified_base (1)..(1): bicyclic nucleic acid (BNA)
  modified_base (14)..(14): bicyclic nucleic acid (BNA)
  source: /note="3' tri-ethylene glycol (TEG)"
tcuguccaagcccg

SEQ ID NO: 7163 - DNA, 13 bp, Artificial Sequence
  source: /note="Description of Artificial Sequence: Synthetic oligonucleotide"
  source: /note="Description of Combined DNA/RNA Molecule: Synthetic oligonucleotide"
  source: /note="DNA/RNA"
  modified_base (1)..(1): bicyclic nucleic acid (BNA)
  modified_base (13)..(13): bicyclic nucleic acid (BNA)
  source: /note="3' tri-ethylene glycol (TEG)"
tcuguccaagccc

SEQ ID NO: 7164 - DNA, 12 bp, Artificial Sequence
  source: /note="Description of Artificial Sequence: Synthetic oligonucleotide"
  source: /note="Description of Combined DNA/RNA Molecule: Synthetic oligonucleotide"
  source: /note="DNA/RNA"
  modified_base (1)..(1): bicyclic nucleic acid (BNA)
  modified_base (12)..(12): bicyclic nucleic acid (BNA)
  source: /note="3' tri-ethylene glycol (TEG)"
tcuguccaagcc

SEQ ID NO: 7165 - DNA, 11 bp, Artificial Sequence
  source: /note="Description of Artificial Sequence: Synthetic oligonucleotide"
  source: /note="Description of Combined DNA/RNA Molecule: Synthetic oligonucleotide"
  source: /note="DNA/RNA"
  modified_base (1)..(1): bicyclic nucleic acid (BNA)
  modified_base (11)..(11): bicyclic nucleic acid (BNA)
  source: /note="3' tri-ethylene glycol (TEG)"
tcuguccaagc

SEQ ID NO: 7166 - DNA, 10 bp, Artificial Sequence
  source: /note="Description of Artificial Sequence: Synthetic oligonucleotide"
  source: /note="Description of Combined DNA/RNA Molecule: Synthetic oligonucleotide"
  source: /note="DNA/RNA"
  modified_base (1)..(1): bicyclic nucleic acid (BNA)
  modified_base (10)..(10): bicyclic nucleic acid (BNA)
  source: /note="3' tri-ethylene glycol (TEG)"
tcuguccaag

SEQ ID NO: 7167 - DNA, 9 bp, Artificial Sequence
  source: /note="Description of Artificial Sequence: Synthetic oligonucleotide"
  source: /note="Description of Combined DNA/RNA Molecule: Synthetic oligonucleotide"
  source: /note="DNA/RNA"
  modified_base (1)..(1): bicyclic nucleic acid (BNA)
  modified_base (9)..(9): bicyclic nucleic acid (BNA)
  source: /note="3' tri-ethylene glycol (TEG)"
tcuguccaa

SEQ ID NO: 7168 - DNA, 8 bp, Artificial Sequence
  source: /note="Description of Artificial Sequence: Synthetic oligonucleotide"
  source: /note="Description of Combined DNA/RNA Molecule: Synthetic oligonucleotide"
  source: /note="DNA/RNA"
  modified_base (1)..(1): bicyclic nucleic acid (BNA)
  modified_base (8)..(8): bicyclic nucleic acid (BNA)
  source: /note="3' tri-ethylene glycol (TEG)"
tcugucca

SEQ ID NO: 7169 - RNA, 17 nt, Artificial Sequence
  source: /note="Description of Artificial Sequence: Synthetic oligonucleotide"
  source: /note="RNA"
  modified_base (1)..(1): bicyclic nucleic acid (BNA)
  modified_base (17)..(17): bicyclic nucleic acid (BNA)
  source: /note="3' tri-ethylene glycol (TEG)"
cuguccaagcccgguug

SEQ ID NO: 7170 - DNA, 16 bp, Artificial Sequence
  source: /note="Description of Artificial Sequence: Synthetic oligonucleotide"
  source: /note="Description of Combined DNA/RNA Molecule: Synthetic oligonucleotide"
  source: /note="DNA/RNA"
  modified_base (1)..(1): bicyclic nucleic acid (BNA)
  modified_base (16)..(16): bicyclic nucleic acid (BNA)
  source: /note="3' tri-ethylene glycol (TEG)"
cuguccaagcccggut

SEQ ID NO: 7171 - DNA, 15 bp, Artificial Sequence
  source: /note="Description of Artificial Sequence: Synthetic oligonucleotide"
  source: /note="Description of Combined DNA/RNA Molecule: Synthetic oligonucleotide"
  source: /note="DNA/RNA"
  modified_base (1)..(1): bicyclic nucleic acid (BNA)
  modified_base (15)..(15): bicyclic nucleic acid (BNA)
  source: /note="3' tri-ethylene glycol (TEG)"
cuguccaagcccggt

SEQ ID NO: 7172 - RNA, 14 nt, Artificial Sequence
  source: /note="Description of Artificial Sequence: Synthetic oligonucleotide"
  source: /note="RNA"
  modified_base (1)..(1): bicyclic nucleic acid (BNA)
  modified_base (14)..(14): bicyclic nucleic acid (BNA)
  source: /note="3' tri-ethylene glycol (TEG)"
cuguccaagcccgg

SEQ ID NO: 7173 - RNA, 13 nt, Artificial Sequence
  source: /note="Description of Artificial Sequence: Synthetic oligonucleotide"
  source: /note="RNA"
  modified_base (1)..(1): bicyclic nucleic acid (BNA)
  modified_base (13)..(13): bicyclic nucleic acid (BNA)
  source: /note="3' tri-ethylene glycol (TEG)"
cuguccaagcccg

SEQ ID NO: 7174 - RNA, 12 nt, Artificial Sequence
  source: /note="Description of Artificial Sequence: Synthetic oligonucleotide"
  source: /note="RNA"
  modified_base (1)..(1): bicyclic nucleic acid (BNA)
  modified_base (12)..(12): bicyclic nucleic acid (BNA)
  source: /note="3' tri-ethylene glycol (TEG)"
cuguccaagccc

SEQ ID NO: 7175 - RNA, 11 nt, Artificial Sequence
  source: /note="Description of Artificial Sequence: Synthetic oligonucleotide"
  source: /note="RNA"
  modified_base (1)..(1): bicyclic nucleic acid (BNA)
  modified_base (11)..(11): bicyclic nucleic acid (BNA)
  source: /note="3' tri-ethylene glycol (TEG)"
cuguccaagcc

SEQ ID NO: 7176 - RNA, 10 nt, Artificial Sequence
  source: /note="Description of Artificial Sequence: Synthetic oligonucleotide"
  source: /note="RNA"
  modified_base (1)..(1): bicyclic nucleic acid (BNA)
  modified_base (10)..(10): bicyclic nucleic acid (BNA)
  source: /note="3' tri-ethylene glycol (TEG)"
cuguccaagc

SEQ ID NO: 7177 - RNA, 9 nt, Artificial Sequence
  source: /note="Description of Artificial Sequence: Synthetic oligonucleotide"
  source: /note="RNA"
  modified_base (1)..(1): bicyclic nucleic acid (BNA)
  modified_base (9)..(9): bicyclic nucleic acid (BNA)
  source: /note="3' tri-ethylene glycol (TEG)"
cuguccaag

SEQ ID NO: 7178 - RNA, 8 nt, Artificial Sequence
  source: /note="Description of Artificial Sequence: Synthetic oligonucleotide"
  source: /note="RNA"
  modified_base (1)..(1): bicyclic nucleic acid (BNA)
  modified_base (8)..(8): bicyclic nucleic acid (BNA)
  source: /note="3' tri-ethylene glycol (TEG)"
cuguccaa

SEQ ID NO: 7179 - RNA, 20 nt, Artificial Sequence
  source: /note="Description of Artificial Sequence: Synthetic oligonucleotide"
  source: /note="RNA"
  modified_base (1)..(1): bicyclic nucleic acid (BNA)
  modified_base (20)..(20): bicyclic nucleic acid (BNA)
  source: /note="3' tri-ethylene glycol (TEG)"
guucuguccaagcccgguug

SEQ ID NO: 7180 - DNA, 19 bp, Artificial Sequence
  source: /note="Description of Artificial Sequence: Synthetic oligonucleotide"
  source: /note="Description of Combined DNA/RNA Molecule: Synthetic oligonucleotide"
  source: /note="DNA/RNA"
  modified_base (1)..(1): bicyclic nucleic acid (BNA)
  modified_base (19)..(19): bicyclic nucleic acid (BNA)
  source: /note="3' tri-ethylene glycol (TEG)"
guucuguccaagcccggut

SEQ ID NO: 7181 - DNA, 18 bp, Artificial Sequence
  source: /note="Description of Artificial Sequence: Synthetic oligonucleotide"
  source: /note="Description of Combined DNA/RNA Molecule: Synthetic oligonucleotide"
  source: /note="DNA/RNA"
  modified_base (1)..(1): bicyclic nucleic acid (BNA)
  modified_base (18)..(18): bicyclic nucleic acid (BNA)
  source: /note="3' tri-ethylene glycol (TEG)"
guucuguccaagcccggt

SEQ ID NO: 7182 - RNA, 17 nt, Artificial Sequence
  source: /note="Description of Artificial Sequence: Synthetic oligonucleotide"
  source: /note="RNA"
  modified_base (1)..(1): bicyclic nucleic acid (BNA)
  modified_base (17)..(17): bicyclic nucleic acid (BNA)
  source: /note="3' tri-ethylene glycol (TEG)"
guucuguccaagcccgg

SEQ ID NO: 7183 - RNA, 16 nt, Artificial Sequence
  source: /note="Description of Artificial Sequence: Synthetic oligonucleotide"
  source: /note="RNA"
  modified_base (1)..(1): bicyclic nucleic acid (BNA)
  modified_base (16)..(16): bicyclic nucleic acid (BNA)
  source: /note="3' tri-ethylene glycol (TEG)"
guucuguccaagcccg

SEQ ID NO: 7184 - RNA, 15 nt, Artificial Sequence
  source: /note="Description of Artificial Sequence: Synthetic oligonucleotide"
  source: /note="RNA"
  modified_base (1)..(1): bicyclic nucleic acid (BNA)
  modified_base (15)..(15): bicyclic nucleic acid (BNA)
  source: /note="3' tri-ethylene glycol (TEG)"
guucuguccaagccc

SEQ ID NO: 7185 - RNA, 14 nt, Artificial Sequence
  source: /note="Description of Artificial Sequence: Synthetic oligonucleotide"
  source: /note="RNA"
  modified_base (1)..(1): bicyclic nucleic acid (BNA)
  modified_base (14)..(14): bicyclic nucleic acid (BNA)
  source: /note="3' tri-ethylene glycol (TEG)"
guucuguccaagcc

SEQ ID NO: 7186 - RNA, 13 nt, Artificial Sequence
  source: /note="Description of Artificial Sequence: Synthetic oligonucleotide"
  source: /note="RNA"
  modified_base (1)..(1): bicyclic nucleic acid (BNA)
  modified_base (13)..(13): bicyclic nucleic acid (BNA)
  source: /note="3' tri-ethylene glycol (TEG)"
guucuguccaagc

SEQ ID NO: 7187 - RNA, 12 nt, Artificial Sequence
  source: /note="Description of Artificial Sequence: Synthetic oligonucleotide"
  source: /note="RNA"
  modified_base (1)..(1): bicyclic nucleic acid (BNA)
  modified_base (12)..(12): bicyclic nucleic acid (BNA)
  source: /note="3' tri-ethylene glycol (TEG)"
guucuguccaag

SEQ ID NO: 7188 - RNA, 11 nt, Artificial Sequence
  source: /note="Description of Artificial Sequence: Synthetic oligonucleotide"
  source: /note="RNA"
  modified_base (1)..(1): bicyclic nucleic acid (BNA)
  modified_base (11)..(11): bicyclic nucleic acid (BNA)
  source: /note="3' tri-ethylene glycol (TEG)"
guucuguccaa

SEQ ID NO: 7189 - RNA, 10 nt, Artificial Sequence
  source: /note="Description of Artificial Sequence: Synthetic oligonucleotide"
  source: /note="RNA"
  modified_base (1)..(1): bicyclic nucleic acid (BNA)
  modified_base (10)..(10): bicyclic nucleic acid (BNA)
  source: /note="3' tri-ethylene glycol (TEG)"
guucugucca

SEQ ID NO: 7190 - RNA, 9 nt, Artificial Sequence
  source: /note="Description of Artificial Sequence: Synthetic oligonucleotide"
  source: /note="RNA"
  modified_base (1)..(1): bicyclic nucleic acid (BNA)
  modified_base (9)..(9): bicyclic nucleic acid (BNA)
  source: /note="3' tri-ethylene glycol (TEG)"
guucugucc

SEQ ID NO: 7191 - RNA, 8 nt, Artificial Sequence
  source: /note="Description of Artificial Sequence: Synthetic oligonucleotide"
  source: /note="RNA"
  modified_base (1)..(1): bicyclic nucleic acid (BNA)
  modified_base (8)..(8): bicyclic nucleic acid (BNA)
  source: /note="3' tri-ethylene glycol (TEG)"
guucuguc

SEQ ID NO: 7192 - DNA, 20 bp, Artificial Sequence
  source: /note="Description of Artificial Sequence: Synthetic oligonucleotide"
  source: /note="Description of Combined DNA/RNA Molecule: Synthetic oligonucleotide"
  source: /note="DNA/RNA"
  modified_base (1)..(1): bicyclic nucleic acid (BNA)
  modified_base (20)..(20): bicyclic nucleic acid (BNA)
  source: /note="3' tri-ethylene glycol (TEG)"
aguucuguccaagcccggut

SEQ ID NO: 7193 - DNA, 19 bp, Artificial Sequence
  source: /note="Description of Artificial Sequence: Synthetic oligonucleotide"
  source: /note="Description of Combined DNA/RNA Molecule: Synthetic oligonucleotide"
  source: /note="DNA/RNA"
  modified_base (1)..(1): bicyclic nucleic acid (BNA)
  modified_base (19)..(19): bicyclic nucleic acid (BNA)
  source: /note="3' tri-ethylene glycol (TEG)"
aguucuguccaagcccggt

SEQ ID NO: 7194 - RNA, 18 nt, Artificial Sequence
  source: /note="Description of Artificial Sequence: Synthetic oligonucleotide"
  source: /note="RNA"
  modified_base (1)..(1): bicyclic nucleic acid (BNA)
  modified_base (18)..(18): bicyclic nucleic acid (BNA)
  source: /note="3' tri-ethylene glycol (TEG)"
aguucuguccaagcccgg

SEQ ID NO: 7195 - RNA, 17 nt, Artificial Sequence
  source: /note="Description of Artificial Sequence: Synthetic oligonucleotide"
  source: /note="RNA"
  modified_base (1)..(1): bicyclic nucleic acid (BNA)
  modified_base (17)..(17): bicyclic nucleic acid (BNA)
  source: /note="3' tri-ethylene glycol (TEG)"
aguucuguccaagcccg

SEQ ID NO: 7196 - RNA, 16 nt, Artificial Sequence
  source: /note="Description of Artificial Sequence: Synthetic oligonucleotide"
  source: /note="RNA"
  modified_base (1)..(1): bicyclic nucleic acid (BNA)
  modified_base (16)..(16): bicyclic nucleic acid (BNA)
  source: /note="3' tri-ethylene glycol (TEG)"
aguucuguccaagccc

SEQ ID NO: 7197 - RNA, 15 nt, Artificial Sequence
  source: /note="Description of Artificial Sequence: Synthetic oligonucleotide"
  source: /note="RNA"
  modified_base (1)..(1): bicyclic nucleic acid (BNA)
  modified_base (15)..(15): bicyclic nucleic acid (BNA)
  source: /note="3' tri-ethylene glycol (TEG)"
aguucuguccaagcc

SEQ ID NO: 7198 - RNA, 14 nt, Artificial Sequence
  source: /note="Description of Artificial Sequence: Synthetic oligonucleotide"
  source: /note="RNA"
  modified_base (1)..(1): bicyclic nucleic acid (BNA)
  modified_base (14)..(14): bicyclic nucleic acid (BNA)
  source: /note="3' tri-ethylene glycol (TEG)"
aguucuguccaagc

SEQ ID NO: 7199 - RNA, 13 nt, Artificial Sequence
  source: /note="Description of Artificial Sequence: Synthetic oligonucleotide"
  source: /note="RNA"
  modified_base (1)..(1): bicyclic nucleic acid (BNA)
  modified_base (13)..(13): bicyclic nucleic acid (BNA)
  source: /note="3' tri-ethylene glycol (TEG)"
aguucuguccaag

SEQ ID NO: 7200 - RNA, 12 nt, Artificial Sequence
  source: /note="Description of Artificial Sequence: Synthetic oligonucleotide"
  source: /note="RNA"
  modified_base (1)..(1): bicyclic nucleic acid (BNA)
  modified_base (12)..(12): bicyclic nucleic acid (BNA)
  source: /note="3' tri-ethylene glycol (TEG)"
aguucuguccaa

SEQ ID NO: 7201 - RNA, 11 nt, Artificial Sequence
  source: /note="Description of Artificial Sequence: Synthetic oligonucleotide"
  source: /note="RNA"
  modified_base (1)..(1): bicyclic nucleic acid (BNA)
  modified_base (11)..(11): bicyclic nucleic acid (BNA)
  source: /note="3' tri-ethylene glycol (TEG)"
aguucugucca

SEQ ID NO: 7202 - RNA, 10 nt, Artificial Sequence
  source: /note="Description of Artificial Sequence: Synthetic oligonucleotide"
  source: /note="RNA"
  modified_base (1)..(1): bicyclic nucleic acid (BNA)
  modified_base (10)..(10): bicyclic nucleic acid (BNA)
  source: /note="3' tri-ethylene glycol (TEG)"
aguucugucc

SEQ ID NO: 7203 - RNA, 9 nt, Artificial Sequence
  source: /note="Description of Artificial Sequence: Synthetic oligonucleotide"
  source: /note="RNA"
  modified_base (1)..(1): bicyclic nucleic acid (BNA)
  modified_base (9)..(9): bicyclic nucleic acid (BNA)
  source: /note="3' tri-ethylene glycol (TEG)"
aguucuguc

SEQ ID NO: 7204 - DNA, 8 bp, Artificial Sequence
  source: /note="Description of Artificial Sequence: Synthetic oligonucleotide"
  source: /note="Description of Combined DNA/RNA Molecule: Synthetic oligonucleotide"
  source: /note="DNA/RNA"
  modified_base (1)..(1): bicyclic nucleic acid (BNA)
  modified_base (8)..(8): bicyclic nucleic acid (BNA)
  source: /note="3' tri-ethylene glycol (TEG)"
aguucugt

SEQ ID NO: 7205 - DNA, 20 bp, Artificial Sequence
  source: /note="Description of Artificial Sequence: Synthetic oligonucleotide"
  source: /note="Description of Combined DNA/RNA Molecule: Synthetic oligonucleotide"
  source: /note="DNA/RNA"
  modified_base (1)..(1): bicyclic nucleic acid (BNA)
  modified_base (20)..(20): bicyclic nucleic acid (BNA)
  source: /note="3' tri-ethylene glycol (TEG)"
aaguucuguccaagcccggt

SEQ ID NO: 7206 - RNA, 19 nt, Artificial Sequence
  source: /note="Description of Artificial Sequence: Synthetic oligonucleotide"
  source: /note="RNA"
  modified_base (1)..(1): bicyclic nucleic acid (BNA)
  modified_base (19)..(19): bicyclic nucleic acid (BNA)
  source: /note="3' tri-ethylene glycol (TEG)"
aaguucuguccaagcccgg

SEQ ID NO: 7207 - RNA, 18 nt, Artificial Sequence
  source: /note="Description of Artificial Sequence: Synthetic oligonucleotide"
  source: /note="RNA"
  modified_base (1)..(1): bicyclic nucleic acid (BNA)
  modified_base (18)..(18): bicyclic nucleic acid (BNA)
  source: /note="3' tri-ethylene glycol (TEG)"
aaguucuguccaagcccg

SEQ ID NO: 7208 - RNA, 17 nt, Artificial Sequence
  source: /note="Description of Artificial Sequence: Synthetic oligonucleotide"
  source: /note="RNA"
  modified_base (1)..(1): bicyclic nucleic acid (BNA)
  modified_base (17)..(17): bicyclic nucleic acid (BNA)
  source: /note="3' tri-ethylene glycol (TEG)"
aaguucuguccaagccc

SEQ ID NO: 7209 - RNA, 16 nt, Artificial Sequence
  source: /note="Description of Artificial Sequence: Synthetic oligonucleotide"
  source: /note="RNA"
  modified_base (1)..(1): bicyclic nucleic acid (BNA)
  modified_base (16)..(16): bicyclic nucleic acid (BNA)
  source: /note="3' tri-ethylene glycol (TEG)"
aaguucuguccaagcc

SEQ ID NO: 7210 - RNA, 15 nt, Artificial Sequence
  source: /note="Description of Artificial Sequence: Synthetic oligonucleotide"
  source: /note="RNA"
  modified_base (1)..(1): bicyclic nucleic acid (BNA)
  modified_base (15)..(15): bicyclic nucleic acid (BNA)
  source: /note="3' tri-ethylene glycol (TEG)"
aaguucuguccaagc

SEQ ID NO: 7211 - RNA, 14 nt, Artificial Sequence
  source: /note="Description of Artificial Sequence: Synthetic oligonucleotide"
  source: /note="RNA"
  modified_base (1)..(1): bicyclic nucleic acid (BNA)
  modified_base (14)..(14): bicyclic nucleic acid (BNA)
  source: /note="3' tri-ethylene glycol (TEG)"
aaguucuguccaag

SEQ ID NO: 7212 - RNA, 13 nt, Artificial Sequence
  source: /note="Description of Artificial Sequence: Synthetic oligonucleotide"
  source: /note="RNA"
  modified_base (1)..(1): bicyclic nucleic acid (BNA)
  modified_base (13)..(13): bicyclic nucleic acid (BNA)
  source: /note="3' tri-ethylene glycol (TEG)"
aaguucuguccaa

SEQ ID NO: 7213 - RNA, 12 nt, Artificial Sequence
  source: /note="Description of Artificial Sequence: Synthetic oligonucleotide"
  source: /note="RNA"
  modified_base (1)..(1): bicyclic nucleic acid (BNA)
  modified_base (12)..(12): bicyclic nucleic acid (BNA)
  source: /note="3' tri-ethylene glycol (TEG)"
aaguucugucca

SEQ ID NO: 7214 - RNA, 11 nt, Artificial Sequence
  source: /note="Description of Artificial Sequence: Synthetic oligonucleotide"
  source: /note="RNA"
  modified_base (1)..(1): bicyclic nucleic acid (BNA)
  modified_base (11)..(11): bicyclic nucleic acid (BNA)
  source: /note="3' tri-ethylene glycol (TEG)"
aaguucugucc

SEQ ID NO: 7215 - RNA, 10 nt, Artificial Sequence
  source: /note="Description of Artificial Sequence: Synthetic oligonucleotide"
  source: /note="RNA"
  modified_base (1)..(1): bicyclic nucleic acid (BNA)
  modified_base (10)..(10): bicyclic nucleic acid (BNA)
  source: /note="3' tri-ethylene glycol (TEG)"
aaguucuguc

SEQ ID NO: 7216 - DNA, 9 bp, Artificial Sequence
  source: /note="Description of Artificial Sequence: Synthetic oligonucleotide"
  source: /note="Description of Combined DNA/RNA Molecule: Synthetic oligonucleotide"
  source: /note="DNA/RNA"
  modified_base (1)..(1): bicyclic nucleic acid (BNA)
  modified_base (9)..(9): bicyclic nucleic acid (BNA)
  source: /note="3' tri-ethylene glycol (TEG)"
aaguucugt

SEQ ID NO: 7217 - RNA, 8 nt, Artificial Sequence
  source: /note="Description of Artificial Sequence: Synthetic oligonucleotide"
  source: /note="RNA"
  modified_base (1)..(1): bicyclic nucleic acid (BNA)
  modified_base (8)..(8): bicyclic nucleic acid (BNA)
  source: /note="3' tri-ethylene glycol (TEG)"
aaguucug

SEQ ID NO: 7218 - DNA, 20 bp, Artificial Sequence
  source: /note="Description of Artificial Sequence: Synthetic oligonucleotide"
  source: /note="Description of Combined DNA/RNA Molecule: Synthetic oligonucleotide"
  source: /note="DNA/RNA"
  modified_base (1)..(1): bicyclic nucleic acid (BNA)
  modified_base (20)..(20): bicyclic nucleic acid (BNA)
  source: /note="3' tri-ethylene glycol (TEG)"
taaguucuguccaagcccgg

SEQ ID NO: 7219 - DNA, 19 bp, Artificial Sequence
  source: /note="Description of Artificial Sequence: Synthetic oligonucleotide"
  source: /note="Description of Combined DNA/RNA Molecule: Synthetic oligonucleotide"
  source: /note="DNA/RNA"
  modified_base (1)..(1): bicyclic nucleic acid (BNA)
  modified_base (19)..(19): bicyclic nucleic acid (BNA)
  source: /note="3' tri-ethylene glycol (TEG)"
taaguucuguccaagcccg

SEQ ID NO: 7220 - DNA, 18 bp, Artificial Sequence
  source: /note="Description of Artificial Sequence: Synthetic oligonucleotide"
  source: /note="Description of Combined DNA/RNA Molecule: Synthetic oligonucleotide"
  source: /note="DNA/RNA"
  modified_base (1)..(1): bicyclic nucleic acid (BNA)
  modified_base (18)..(18): bicyclic nucleic acid (BNA)
  source: /note="3' tri-ethylene glycol (TEG)"
taaguucuguccaagccc

SEQ ID NO: 7221 - DNA, 17 bp, Artificial Sequence
  source: /note="Description of Artificial Sequence: Synthetic oligonucleotide"
  source: /note="Description of Combined DNA/RNA Molecule: Synthetic oligonucleotide"
  source: /note="DNA/RNA"
  modified_base (1)..(1): bicyclic nucleic acid (BNA)
  modified_base (17)..(17): bicyclic nucleic acid (BNA)
  source: /note="3' tri-ethylene glycol (TEG)"
taaguucuguccaagcc

SEQ ID NO: 7222 - DNA, 16 bp, Artificial Sequence
  source: /note="Description of Artificial Sequence: Synthetic oligonucleotide"
  source: /note="Description of Combined DNA/RNA Molecule: Synthetic oligonucleotide"
  source: /note="DNA/RNA"
  modified_base (1)..(1): bicyclic nucleic acid (BNA)
  modified_base (16)..(16): bicyclic nucleic acid (BNA)
  source: /note="3' tri-ethylene glycol (TEG)"
taaguucuguccaagc

SEQ ID NO: 7223 - DNA, 14 bp, Artificial Sequence
  source: /note="Description of Artificial Sequence: Synthetic oligonucleotide"
  source: /note="Description of Combined DNA/RNA Molecule: Synthetic oligonucleotide"
  source: /note="DNA/RNA"
  modified_base (1)..(1): bicyclic nucleic acid (BNA)
  modified_base (14)..(14): bicyclic nucleic acid (BNA)
  source: /note="3' tri-ethylene glycol (TEG)"
taaguucuguccaa

SEQ ID NO: 7224 - DNA, 13 bp, Artificial Sequence
  source: /note="Description of Artificial Sequence: Synthetic oligonucleotide"
  source: /note="Description of Combined DNA/RNA Molecule: Synthetic oligonucleotide"
  source: /note="DNA/RNA"
  modified_base (1)..(1): bicyclic nucleic acid (BNA)
  modified_base (13)..(13): bicyclic nucleic acid (BNA)
  source: /note="3' tri-ethylene glycol (TEG)"
taaguucugucca

SEQ ID NO: 7225 - DNA, 12 bp, Artificial Sequence
  source: /note="Description of Artificial Sequence: Synthetic oligonucleotide"
  source: /note="Description of Combined DNA/RNA Molecule: Synthetic oligonucleotide"
  source: /note="DNA/RNA"
  modified_base (1)..(1): bicyclic nucleic acid (BNA)
  modified_base (12)..(12): bicyclic nucleic acid (BNA)
  source: /note="3' tri-ethylene glycol (TEG)"
taaguucugucc

SEQ ID NO: 7226 - DNA, 11 bp, Artificial Sequence
  source: /note="Description of Artificial Sequence: Synthetic oligonucleotide"
  source: /note="Description of Combined DNA/RNA Molecule: Synthetic oligonucleotide"
  source: /note="DNA/RNA"
  modified_base (1)..(1): bicyclic nucleic acid (BNA)
  modified_base (11)..(11): bicyclic nucleic acid (BNA)
  source: /note="3' tri-ethylene glycol (TEG)"
taaguucuguc

SEQ ID NO: 7227 - DNA, 10 bp, Artificial Sequence
  source: /note="Description of Artificial Sequence: Synthetic oligonucleotide"
  source: /note="Description of Combined DNA/RNA Molecule: Synthetic oligonucleotide"
  source: /note="DNA/RNA"
  modified_base (1)..(1): bicyclic nucleic acid (BNA)
  modified_base (10)..(10): bicyclic nucleic acid (BNA)
  source: /note="3' tri-ethylene glycol (TEG)"
taaguucugt

SEQ ID NO: 7228 - DNA, 9 bp, Artificial Sequence
  source: /note="Description of Artificial Sequence: Synthetic oligonucleotide"
  source: /note="Description of Combined DNA/RNA Molecule: Synthetic oligonucleotide"
  source: /note="DNA/RNA"
  modified_base (1)..(1): bicyclic nucleic acid (BNA)
  modified_base (9)..(9): bicyclic nucleic acid (BNA)
  source: /note="3' tri-ethylene glycol (TEG)"
taaguucug

SEQ ID NO: 7229 - DNA, 8 bp, Artificial Sequence
  source: /note="Description of Artificial Sequence: Synthetic oligonucleotide"
  source: /note="Description of Combined DNA/RNA Molecule: Synthetic oligonucleotide"
  source: /note="DNA/RNA"
  modified_base (1)..(1): bicyclic nucleic acid (BNA)
  modified_base (8)..(8): bicyclic nucleic acid (BNA)
  source: /note="3' tri-ethylene glycol (TEG)"
taaguuct

SEQ ID NO: 7230 - RNA, 20 nt, Artificial Sequence
  source: /note="Description of Artificial Sequence: Synthetic oligonucleotide"
  source: /note="RNA"
  modified_base (1)..(1): bicyclic nucleic acid (BNA)
  modified_base (20)..(20): bicyclic nucleic acid (BNA)
  source: /note="3' tri-ethylene glycol (TEG)"
guaaguucuguccaagcccg

SEQ ID NO: 7231 - RNA, 19 nt, Artificial Sequence
  source: /note="Description of Artificial Sequence: Synthetic oligonucleotide"
  source: /note="RNA"
  modified_base (1)..(1): bicyclic nucleic acid (BNA)
  modified_base (19)..(19): bicyclic nucleic acid (BNA)
  source: /note="3' tri-ethylene glycol (TEG)"
guaaguucuguccaagccc

SEQ ID NO: 7232 - RNA, 17 nt, Artificial Sequence
  source: /note="Description of Artificial Sequence: Synthetic oligonucleotide"
  source: /note="RNA"
  modified_base (1)..(1): bicyclic nucleic acid (BNA)
  modified_base (17)..(17): bicyclic nucleic acid (BNA)
  source: /note="3' tri-ethylene glycol (TEG)"
guaaguucuguccaagc

SEQ ID NO: 7233 - RNA, 16 nt, Artificial Sequence
  source: /note="Description of Artificial Sequence: Synthetic oligonucleotide"
  source: /note="RNA"
  modified_base (1)..(1): bicyclic nucleic acid (BNA)
  modified_base (16)..(16): bicyclic nucleic acid (BNA)
  source: /note="3' tri-ethylene glycol (TEG)"
guaaguucuguccaag

SEQ ID NO: 7234 - RNA, 15 nt, Artificial Sequence
  source: /note="Description of Artificial Sequence: Synthetic oligonucleotide"
  source: /note="RNA"
  modified_base (1)..(1): bicyclic nucleic acid (BNA)
  modified_base (15)..(15): bicyclic nucleic acid (BNA)
  source: /note="3' tri-ethylene glycol (TEG)"
guaaguucuguccaa

SEQ ID NO: 7235 - RNA, 14 nt, Artificial Sequence
  source: /note="Description of Artificial Sequence: Synthetic oligonucleotide"
  source: /note="RNA"
  modified_base (1)..(1): bicyclic nucleic acid (BNA)
  modified_base (14)..(14): bicyclic nucleic acid (BNA)
  source: /note="3' tri-ethylene glycol (TEG)"
guaaguucugucca

SEQ ID NO: 7236 - RNA, 13 nt, Artificial Sequence
  source: /note="Description of Artificial Sequence: Synthetic oligonucleotide"
  source: /note="RNA"
  modified_base (1)..(1): bicyclic nucleic acid (BNA)
  modified_base (13)..(13): bicyclic nucleic acid (BNA)
  source: /note="3' tri-ethylene glycol (TEG)"
guaaguucugucc

SEQ ID NO: 7237 - RNA, 12 nt, Artificial Sequence
  source: /note="Description of Artificial Sequence: Synthetic oligonucleotide"
  source: /note="RNA"
  modified_base (1)..(1): bicyclic nucleic acid (BNA)
  modified_base (12)..(12): bicyclic nucleic acid (BNA)
  source: /note="3' tri-ethylene glycol (TEG)"
guaaguucuguc

SEQ ID NO: 7238 - DNA, 11 bp, Artificial Sequence
  source: /note="Description of Artificial Sequence: Synthetic oligonucleotide"
  source: /note="Description of Combined DNA/RNA Molecule: Synthetic oligonucleotide"
  source: /note="DNA/RNA"
  modified_base (1)..(1): bicyclic nucleic acid (BNA)
  modified_base (11)..(11): bicyclic nucleic acid (BNA)
  source: /note="3' tri-ethylene glycol (TEG)"
guaaguucugt

SEQ ID NO: 7239 - RNA, 10 nt, Artificial Sequence
  source: /note="Description of Artificial Sequence: Synthetic oligonucleotide"
  source: /note="RNA"
  modified_base (1)..(1): bicyclic nucleic acid (BNA)
  modified_base (10)..(10): bicyclic nucleic acid (BNA)
  source: /note="3' tri-ethylene glycol (TEG)"
guaaguucug

SEQ ID NO: 7240 - DNA, 9 bp, Artificial Sequence
  source: /note="Description of Artificial Sequence: Synthetic oligonucleotide"
  source: /note="Description of Combined DNA/RNA Molecule: Synthetic oligonucleotide"
  source: /note="DNA/RNA"
  modified_base (1)..(1): bicyclic nucleic acid (BNA)
  modified_base (9)..(9): bicyclic nucleic acid (BNA)
  source: /note="3' tri-ethylene glycol (TEG)"
guaaguuct

SEQ ID NO: 7241 - RNA, 8 nt, Artificial Sequence
  source: /note="Description of Artificial Sequence: Synthetic oligonucleotide"
  source: /note="RNA"
  modified_base (1)..(1): bicyclic nucleic acid (BNA)
  modified_base (8)..(8): bicyclic nucleic acid (BNA)
  source: /note="3' tri-ethylene glycol (TEG)"
guaaguuc

SEQ ID NO: 7242 - RNA, 20 nt, Artificial Sequence
  source: /note="Description of Artificial Sequence: Synthetic oligonucleotide"
  source: /note="RNA"
  modified_base (1)..(1): bicyclic nucleic acid (BNA)
  modified_base (20)..(20): bicyclic nucleic acid (BNA)
  source: /note="3' tri-ethylene glycol (TEG)"
gguaaguucuguccaagccc

SEQ ID NO: 7243 - RNA, 19 nt, Artificial Sequence
  source: /note="Description of Artificial Sequence: Synthetic oligonucleotide"
  source: /note="RNA"
  modified_base (1)..(1): bicyclic nucleic acid (BNA)
  modified_base (19)..(19): bicyclic nucleic acid (BNA)
  source: /note="3' tri-ethylene glycol (TEG)"
gguaaguucuguccaagcc

SEQ ID NO: 7244 - RNA, 17 nt, Artificial Sequence
  source: /note="Description of Artificial Sequence: Synthetic oligonucleotide"
  source: /note="RNA"
  modified_base (1)..(1): bicyclic nucleic acid (BNA)
  modified_base (17)..(17): bicyclic nucleic acid (BNA)
  source: /note="3' tri-ethylene glycol (TEG)"
gguaaguucuguccaag

SEQ ID NO: 7245 - RNA, 16 nt, Artificial Sequence
  source: /note="Description of Artificial Sequence: Synthetic oligonucleotide"
  source: /note="RNA"
  modified_base (1)..(1): bicyclic nucleic acid (BNA)
  modified_base (16)..(16): bicyclic nucleic acid (BNA)
  source: /note="3' tri-ethylene glycol (TEG)"
gguaaguucuguccaa

SEQ ID NO: 7246 - RNA, 15 nt, Artificial Sequence
  source: /note="Description of Artificial Sequence: Synthetic oligonucleotide"
  source: /note="RNA"
  modified_base (1)..(1): bicyclic nucleic acid (BNA)
  modified_base (15)..(15): bicyclic nucleic acid (BNA)
  source: /note="3' tri-ethylene glycol (TEG)"
gguaaguucugucca

SEQ ID NO: 7247 - RNA, 14 nt, Artificial Sequence
  source: /note="Description of Artificial Sequence: Synthetic oligonucleotide"
  source: /note="RNA"
  modified_base (1)..(1): bicyclic nucleic acid (BNA)
  modified_base (14)..(14): bicyclic nucleic acid (BNA)
  source: /note="3' tri-ethylene glycol (TEG)"
gguaaguucugucc

SEQ ID NO: 7248 - RNA, 13 nt, Artificial Sequence
  source: /note="Description of Artificial Sequence: Synthetic oligonucleotide"
  source: /note="RNA"
  modified_base (1)..(1): bicyclic nucleic acid (BNA)
  modified_base (13)..(13): bicyclic nucleic acid (BNA)
  source: /note="3' tri-ethylene glycol (TEG)"
gguaaguucuguc

SEQ ID NO: 7249 - DNA, 12 bp, Artificial Sequence
  source: /note="Description of Artificial Sequence: Synthetic oligonucleotide"
  source: /note="Description of Combined DNA/RNA Molecule: Synthetic oligonucleotide"
  source: /note="DNA/RNA"
  modified_base (1)..(1): bicyclic nucleic acid (BNA)
  modified_base (12)..(12): bicyclic nucleic acid (BNA)
  source: /note="3' tri-ethylene glycol (TEG)"
gguaaguucugt

SEQ ID NO: 7250 - RNA, 11 nt, Artificial Sequence
  source: /note="Description of Artificial Sequence: Synthetic oligonucleotide"
  source: /note="RNA"
  modified_base (1)..(1): bicyclic nucleic acid (BNA)
  modified_base (11)..(11): bicyclic nucleic acid (BNA)
  source: /note="3' tri-ethylene glycol (TEG)"
gguaaguucug

SEQ ID NO: 7251 - DNA, 10 bp, Artificial Sequence
  source: /note="Description of Artificial Sequence: Synthetic oligonucleotide"
  source: /note="Description of Combined DNA/RNA Molecule: Synthetic oligonucleotide"
  source: /note="DNA/RNA"
  modified_base (1)..(1): bicyclic nucleic acid (BNA)
  modified_base (10)..(10): bicyclic nucleic acid (BNA)
  source: /note="3' tri-ethylene glycol (TEG)"
gguaaguuct

SEQ ID NO: 7252 - RNA, 9 nt, Artificial Sequence
  source: /note="Description of Artificial Sequence: Synthetic oligonucleotide"
  source: /note="RNA"
  modified_base (1)..(1): bicyclic nucleic acid (BNA)
  modified_base (9)..(9): bicyclic nucleic acid (BNA)
  source: /note="3' tri-ethylene glycol (TEG)"
gguaaguuc

SEQ ID NO: 7253 - DNA, 8 bp, Artificial Sequence
  source: /note="Description of Artificial Sequence: Synthetic oligonucleotide"
  source: /note="Description of Combined DNA/RNA Molecule: Synthetic oligonucleotide"
  source: /note="DNA/RNA"
  modified_base (1)..(1): bicyclic nucleic acid (BNA)
  modified_base (8)..(8): bicyclic nucleic acid (BNA)
  source: /note="3' tri-ethylene glycol (TEG)"
gguaagut

SEQ ID NO: 7254 - RNA, 20 nt, Artificial Sequence
  source: /note="Description of Artificial Sequence: Synthetic oligonucleotide"
  source: /note="RNA"
  modified_base (1)..(1): bicyclic nucleic acid (BNA)
  modified_base (20)..(20): bicyclic nucleic acid (BNA)
  source: /note="3' tri-ethylene glycol (TEG)"
cgguaaguucuguccaagcc

SEQ ID NO: 7255 - RNA, 19 nt, Artificial Sequence
  source: /note="Description of Artificial Sequence: Synthetic oligonucleotide"
  source: /note="RNA"
  modified_base (1)..(1): bicyclic nucleic acid (BNA)
  modified_base (19)..(19): bicyclic nucleic acid (BNA)
  source: /note="3' tri-ethylene glycol (TEG)"
cgguaaguucuguccaagc

SEQ ID NO: 7256 - RNA, 18 nt, Artificial Sequence
  source: /note="Description of Artificial Sequence: Synthetic oligonucleotide"
  source: /note="RNA"
  modified_base (1)..(1): bicyclic nucleic acid (BNA)
  modified_base (18)..(18): bicyclic nucleic acid (BNA)
  source: /note="3' tri-ethylene glycol (TEG)"
cgguaaguucuguccaag

SEQ ID NO: 7257 - RNA, 17 nt, Artificial Sequence
  source: /note="Description of Artificial Sequence: Synthetic oligonucleotide"
  source: /note="RNA"
  modified_base (1)..(1): bicyclic nucleic acid (BNA)
  modified_base (17)..(17): bicyclic nucleic acid (BNA)
  source: /note="3' tri-ethylene glycol (TEG)"
cgguaaguucuguccaa

SEQ ID NO: 7258 - RNA, 16 nt, Artificial Sequence
  source: /note="Description of Artificial Sequence: Synthetic oligonucleotide"
  source: /note="RNA"
  modified_base (1)..(1): bicyclic nucleic acid (BNA)
  modified_base (16)..(16): bicyclic nucleic acid (BNA)
  source: /note="3' tri-ethylene glycol (TEG)"
cgguaaguucugucca

SEQ ID NO: 7259 - RNA, 15 nt, Artificial Sequence
  source: /note="Description of Artificial Sequence: Synthetic oligonucleotide"
  source: /note="RNA"
  modified_base (1)..(1): bicyclic nucleic acid (BNA)
  modified_base (15)..(15): bicyclic nucleic acid (BNA)
  source: /note="3' tri-ethylene glycol (TEG)"
cgguaaguucugucc

SEQ ID NO: 7260 - RNA, 14 nt, Artificial Sequence
  source: /note="Description of Artificial Sequence: Synthetic oligonucleotide"
  source: /note="RNA"
  modified_base (1)..(1): bicyclic nucleic acid (BNA)
  modified_base (14)..(14): bicyclic nucleic acid (BNA)
  source: /note="3' tri-ethylene glycol (TEG)"
cgguaaguucuguc

SEQ ID NO: 7261 - DNA, 13 bp, Artificial Sequence
  source: /note="Description of Artificial Sequence: Synthetic oligonucleotide"
  source: /note="Description of Combined DNA/RNA Molecule: Synthetic oligonucleotide"
  source: /note="DNA/RNA"
  modified_base (1)..(1): bicyclic nucleic acid (BNA)
  modified_base (13)..(13): bicyclic nucleic acid (BNA)
  source: /note="3' tri-ethylene glycol (TEG)"
cgguaaguucugt

SEQ ID NO: 7262 - RNA, 12 nt, Artificial Sequence
  source: /note="Description of Artificial Sequence: Synthetic oligonucleotide"
  source: /note="RNA"
  modified_base (1)..(1): bicyclic nucleic acid (BNA)
  modified_base (12)..(12): bicyclic nucleic acid (BNA)
  source: /note="3' tri-ethylene glycol (TEG)"
cgguaaguucug

SEQ ID NO: 7263 - DNA, 11 bp, Artificial Sequence
  source: /note="Description of Artificial Sequence: Synthetic oligonucleotide"
  source: /note="Description of Combined DNA/RNA Molecule: Synthetic oligonucleotide"
  source: /note="DNA/RNA"
  modified_base (1)..(1): bicyclic nucleic acid (BNA)
  modified_base (11)..(11): bicyclic nucleic acid (BNA)
  source: /note="3' tri-ethylene glycol (TEG)"
cgguaaguuct

SEQ ID NO: 7264 - RNA, 10 nt, Artificial Sequence
  source: /note="Description of Artificial Sequence: Synthetic oligonucleotide"
  source: /note="RNA"
  modified_base (1)..(1): bicyclic nucleic acid (BNA)
  modified_base (10)..(10): bicyclic nucleic acid (BNA)
  source: /note="3' tri-ethylene glycol (TEG)"
cgguaaguuc

SEQ ID NO: 7265 - DNA, 9 bp, Artificial Sequence
  source: /note="Description of Artificial Sequence: Synthetic oligonucleotide"
  source: /note="Description of Combined DNA/RNA Molecule: Synthetic oligonucleotide"
  source: /note="DNA/RNA"
  modified_base (1)..(1): bicyclic nucleic acid (BNA)
  modified_base (9)..(9): bicyclic nucleic acid (BNA)
  source: /note="3' tri-ethylene glycol (TEG)"
cgguaagut

SEQ ID NO: 7266 - DNA, 8 bp, Artificial Sequence
  source: /note="Description of Artificial Sequence: Synthetic oligonucleotide"
  source: /note="Description of Combined DNA/RNA Molecule: Synthetic oligonucleotide"
  source: /note="DNA/RNA"
  modified_base (1)..(1): bicyclic nucleic acid (BNA)
  modified_base (8)..(8): bicyclic nucleic acid (BNA)
  source: /note="3' tri-ethylene glycol (TEG)"
cgguaagt

SEQ ID NO: 7267 - DNA, 20 bp, Artificial Sequence
  source: /note="Description of Artificial Sequence: Synthetic oligonucleotide"
  source: /note="Description of Combined DNA/RNA Molecule: Synthetic oligonucleotide"
  source: /note="DNA/RNA"
  modified_base (1)..(1): bicyclic nucleic acid (BNA)
  modified_base (20)..(20): bicyclic nucleic acid (BNA)
  source: /note="3' tri-ethylene glycol (TEG)"
tcgguaaguucuguccaagc

SEQ ID NO: 7268 - DNA, 19 bp, Artificial Sequence
  source: /note="Description of Artificial Sequence: Synthetic oligonucleotide"
  source: /note="Description of Combined DNA/RNA Molecule: Synthetic oligonucleotide"
  source: /note="DNA/RNA"
  modified_base (1)..(1): bicyclic nucleic acid (BNA)
  modified_base (19)..(19): bicyclic nucleic acid (BNA)
  source: /note="3' tri-ethylene glycol (TEG)"
tcgguaaguucuguccaag

SEQ ID NO: 7269 - DNA, 18 bp, Artificial Sequence
  source: /note="Description of Artificial Sequence: Synthetic oligonucleotide"
  source: /note="Description of Combined DNA/RNA Molecule: Synthetic oligonucleotide"
  source: /note="DNA/RNA"
  modified_base (1)..(1): bicyclic nucleic acid (BNA)
  modified_base (18)..(18): bicyclic nucleic acid (BNA)
  source: /note="3' tri-ethylene glycol (TEG)"
tcgguaaguucuguccaa

SEQ ID NO: 7270 - DNA, 17 bp, Artificial Sequence
  source: /note="Description of Artificial Sequence: Synthetic oligonucleotide"
  source: /note="Description of Combined DNA/RNA Molecule: Synthetic oligonucleotide"
  source: /note="DNA/RNA"
  modified_base (1)..(1): bicyclic nucleic acid (BNA)
  modified_base (17)..(17): bicyclic nucleic acid (BNA)
  source: /note="3' tri-ethylene glycol (TEG)"
tcgguaaguucugucca

SEQ ID NO: 7271 - DNA, 16 bp, Artificial Sequence
  source: /note="Description of Artificial Sequence: Synthetic oligonucleotide"
  source: /note="Description of Combined DNA/RNA Molecule: Synthetic oligonucleotide"
  source: /note="DNA/RNA"
  modified_base (1)..(1): bicyclic nucleic acid (BNA)
  modified_base (16)..(16): bicyclic nucleic acid (BNA)
  source: /note="3' tri-ethylene glycol (TEG)"
tcgguaaguucugucc

SEQ ID NO: 7272 - DNA, 15 bp, Artificial Sequence
  source: /note="Description of Artificial Sequence: Synthetic oligonucleotide"
  source: /note="Description of Combined DNA/RNA Molecule: Synthetic oligonucleotide"
  source: /note="DNA/RNA"
  modified_base (1)..(1): bicyclic nucleic acid (BNA)
  modified_base (15)..(15): bicyclic nucleic acid (BNA)
  source: /note="3' tri-ethylene glycol (TEG)"
tcgguaaguucuguc

SEQ ID NO: 7273 - DNA, 14 bp, Artificial Sequence
  source: /note="Description of Artificial Sequence: Synthetic oligonucleotide"
  source: /note="Description of Combined DNA/RNA Molecule: Synthetic oligonucleotide"
  source: /note="DNA/RNA"
  modified_base (1)..(1): bicyclic nucleic acid (BNA)
  modified_base (14)..(14): bicyclic nucleic acid (BNA)
  source: /note="3' tri-ethylene glycol (TEG)"
tcgguaaguucugt

SEQ ID NO: 7274 - DNA, 13 bp, Artificial Sequence
  source: /note="Description of Artificial Sequence: Synthetic oligonucleotide"
  source: /note="Description of Combined DNA/RNA Molecule: Synthetic oligonucleotide"
  source: /note="DNA/RNA"
  modified_base (1)..(1): bicyclic nucleic acid (BNA)
  modified_base (13)..(13): bicyclic nucleic acid (BNA)
  source: /note="3' tri-ethylene glycol (TEG)"
tcgguaaguucug

SEQ ID NO: 7275 - DNA, 12 bp, Artificial Sequence
  source: /note="Description of Artificial Sequence: Synthetic oligonucleotide"
  source: /note="Description of Combined DNA/RNA Molecule: Synthetic oligonucleotide"
  source: /note="DNA/RNA"
  modified_base (1)..(1): bicyclic nucleic acid (BNA)
  modified_base (12)..(12): bicyclic nucleic acid (BNA)
  source: /note="3' tri-ethylene glycol (TEG)"
tcgguaaguuct

SEQ ID NO: 7276 - DNA, 11 bp, Artificial Sequence
  source: /note="Description of Artificial Sequence: Synthetic oligonucleotide"
  source: /note="Description of Combined DNA/RNA Molecule: Synthetic oligonucleotide"
  source: /note="DNA/RNA"
  modified_base (1)..(1): bicyclic nucleic acid (BNA)
  modified_base (11)..(11): bicyclic nucleic acid (BNA)
  source: /note="3' tri-ethylene glycol (TEG)"
tcgguaaguuc

SEQ ID NO: 7277 - DNA, 10 bp, Artificial Sequence
  source: /note="Description of Artificial Sequence: Synthetic oligonucleotide"
  source: /note="Description of Combined DNA/RNA Molecule: Synthetic oligonucleotide"
  source: /note="DNA/RNA"
  modified_base (1)..(1): bicyclic nucleic acid (BNA)
  modified_base (10)..(10): bicyclic nucleic acid (BNA)
  source: /note="3' tri-ethylene glycol (TEG)"
tcgguaagut

SEQ ID NO: 7278 - DNA, 9 bp, Artificial Sequence
  source: /note="Description of Artificial Sequence: Synthetic oligonucleotide"
  source: /note="Description of Combined DNA/RNA Molecule: Synthetic oligonucleotide"
  source: /note="DNA/RNA"
  modified_base (1)..(1): bicyclic nucleic acid (BNA)
  modified_base (9)..(9): bicyclic nucleic acid (BNA)
  source: /note="3' tri-ethylene glycol (TEG)"
tcgguaagt

SEQ ID NO: 7279 - RNA, 20 nt, Artificial Sequence
  source: /note="Description of Artificial Sequence: Synthetic oligonucleotide"
  source: /note="RNA"
  modified_base (1)..(1): bicyclic nucleic acid (BNA)
  modified_base (20)..(20): bicyclic nucleic acid (BNA)
  source: /note="3' tri-ethylene glycol (TEG)"
gucgguaaguucuguccaag

SEQ ID NO: 7280 - RNA, 19 nt, Artificial Sequence
  source: /note="Description of Artificial Sequence: Synthetic oligonucleotide"
  source: /note="RNA"
  modified_base (1)..(1): bicyclic nucleic acid (BNA)
  modified_base (19)..(19): bicyclic nucleic acid (BNA)
  source: /note="3' tri-ethylene glycol (TEG)"
gucgguaaguucuguccaa

SEQ ID NO: 7281 - RNA, 18 nt, Artificial Sequence
  source: /note="Description of Artificial Sequence: Synthetic oligonucleotide"
  source: /note="RNA"
  modified_base (1)..(1): bicyclic nucleic acid (BNA)
  modified_base (18)..(18): bicyclic nucleic acid (BNA)
  source: /note="3' tri-ethylene glycol (TEG)"
gucgguaaguucugucca

SEQ ID NO: 7282 - RNA, 17 nt, Artificial Sequence
  source: /note="Description of Artificial Sequence: Synthetic oligonucleotide"
  source: /note="RNA"
  modified_base (1)..(1): bicyclic nucleic acid (BNA)
  modified_base (17)..(17): bicyclic nucleic acid (BNA)
  source: /note="3' tri-ethylene glycol (TEG)"
gucgguaaguucugucc

SEQ ID NO: 7283 - RNA, 16 nt, Artificial Sequence
  source: /note="Description of Artificial Sequence: Synthetic oligonucleotide"
  source: /note="RNA"
  modified_base (1)..(1): bicyclic nucleic acid (BNA)
  modified_base (16)..(16): bicyclic nucleic acid (BNA)
  source: /note="3' tri-ethylene glycol (TEG)"
gucgguaaguucuguc

SEQ ID NO: 7284 - DNA, 15 bp, Artificial Sequence
  source: /note="Description of Artificial Sequence: Synthetic oligonucleotide"
  source: /note="Description of Combined DNA/RNA Molecule: Synthetic oligonucleotide"
  source: /note="DNA/RNA"
  modified_base (1)..(1): bicyclic nucleic acid (BNA)
  modified_base (15)..(15): bicyclic nucleic acid (BNA)
  source: /note="3' tri-ethylene glycol (TEG)"
gucgguaaguucugt

SEQ ID NO: 7285 - RNA, 14 nt, Artificial Sequence
  source: /note="Description of Artificial Sequence: Synthetic oligonucleotide"
  source: /note="RNA"
  modified_base (1)..(1): bicyclic nucleic acid (BNA)
  modified_base (14)..(14): bicyclic nucleic acid (BNA)
  source: /note="3' tri-ethylene glycol (TEG)"
gucgguaaguucug

SEQ ID NO: 7286 - DNA, 13 bp, Artificial Sequence
  source: /note="Description of Artificial Sequence: Synthetic oligonucleotide"
  source: /note="Description of Combined DNA/RNA Molecule: Synthetic oligonucleotide"
  source: /note="DNA/RNA"
  modified_base (1)..(1): bicyclic nucleic acid (BNA)
  modified_base (13)..(13): bicyclic nucleic acid (BNA)
  source: /note="3' tri-ethylene glycol (TEG)"
gucgguaaguuct

SEQ ID NO: 7287 - RNA, 12 nt, Artificial Sequence
  source: /note="Description of Artificial Sequence: Synthetic oligonucleotide"
  source: /note="RNA"
  modified_base (1)..(1): bicyclic nucleic acid (BNA)
  modified_base (12)..(12): bicyclic nucleic acid (BNA)
  source: /note="3' tri-ethylene glycol (TEG)"
gucgguaaguuc

SEQ ID NO: 7288 - DNA, 11 bp, Artificial Sequence
  source: /note="Description of Artificial Sequence: Synthetic oligonucleotide"
  source: /note="Description of Combined DNA/RNA Molecule: Synthetic oligonucleotide"
  source: /note="DNA/RNA"
  modified_base (1)..(1): bicyclic nucleic acid (BNA)
  modified_base (11)..(11): bicyclic nucleic acid (BNA)
  source: /note="3' tri-ethylene glycol (TEG)"
gucgguaagut

SEQ ID NO: 7289 - DNA, 10 bp, Artificial Sequence
  source: /note="Description of Artificial Sequence: Synthetic oligonucleotide"
  source: /note="Description of Combined DNA/RNA Molecule: Synthetic oligonucleotide"
  source: /note="DNA/RNA"
  modified_base (1)..(1): bicyclic nucleic acid (BNA)
  modified_base (10)..(10): bicyclic nucleic acid (BNA)
  source: /note="3' tri-ethylene glycol (TEG)"
gucgguaagt

SEQ ID NO: 7290 - RNA, 20 nt, Artificial Sequence
  source: /note="Description of Artificial Sequence: Synthetic oligonucleotide"
  source: /note="RNA"
  modified_base (1)..(1): bicyclic nucleic acid (BNA)
  modified_base (20)..(20): bicyclic nucleic acid (BNA)
  source: /note="3' tri-ethylene glycol (TEG)"
agucgguaaguucuguccaa

SEQ ID NO: 7291 - RNA, 19 nt, Artificial Sequence
  source: /note="Description of Artificial Sequence: Synthetic oligonucleotide"
  source: /note="RNA"
  modified_base (1)..(1): bicyclic nucleic acid (BNA)
  modified_base (19)..(19): bicyclic nucleic acid (BNA)
  source: /note="3' tri-ethylene glycol (TEG)"
agucgguaaguucugucca

SEQ ID NO: 7292 - RNA, 17 nt, Artificial Sequence
  source: /note="Description of Artificial Sequence: Synthetic oligonucleotide"
  source: /note="RNA"
  modified_base (1)..(1): bicyclic nucleic acid (BNA)
  modified_base (17)..(17): bicyclic nucleic acid (BNA)
  source: /note="3' tri-ethylene glycol (TEG)"
agucgguaaguucuguc

SEQ ID NO: 7293 - DNA, 16 bp, Artificial Sequence
  source: /note="Description of Artificial Sequence: Synthetic oligonucleotide"
  source: /note="Description of Combined DNA/RNA Molecule: Synthetic oligonucleotide"
  source: /note="DNA/RNA"
  modified_base (1)..(1): bicyclic nucleic acid (BNA)
  modified_base (16)..(16): bicyclic nucleic acid (BNA)
  source: /note="3' tri-ethylene glycol (TEG)"
agucgguaaguucugt

SEQ ID NO: 7294 - RNA, 15 nt, Artificial Sequence
  source: /note="Description of Artificial Sequence: Synthetic oligonucleotide"
  source: /note="RNA"
  modified_base (1)..(1): bicyclic nucleic acid (BNA)
  modified_base (15)..(15): bicyclic nucleic acid (BNA)
  source: /note="3' tri-ethylene glycol (TEG)"
agucgguaaguucug

SEQ ID NO: 7295 - DNA, 14 bp, Artificial Sequence
  source: /note="Description of Artificial Sequence: Synthetic oligonucleotide"
  source: /note="Description of Combined DNA/RNA Molecule: Synthetic oligonucleotide"
  source: /note="DNA/RNA"
  modified_base (1)..(1): bicyclic nucleic acid (BNA)
  modified_base (14)..(14): bicyclic nucleic acid (BNA)
  source: /note="3' tri-ethylene glycol (TEG)"
agucgguaaguuct

SEQ ID NO: 7296 - RNA, 13 nt, Artificial Sequence
  source: /note="Description of Artificial Sequence: Synthetic oligonucleotide"
  source: /note="RNA"
  modified_base (1)..(1): bicyclic nucleic acid (BNA)
  modified_base (13)..(13): bicyclic nucleic acid (BNA)
  source: /note="3' tri-ethylene glycol (TEG)"
agucgguaaguuc

SEQ ID NO: 7297 - DNA, 12 bp, Artificial Sequence
  source: /note="Description of Artificial Sequence: Synthetic oligonucleotide"
  source: /note="Description of Combined DNA/RNA Molecule: Synthetic oligonucleotide"
  source: /note="DNA/RNA"
  modified_base (1)..(1): bicyclic nucleic acid (BNA)
  modified_base (12)..(12): bicyclic nucleic acid (BNA)
  source: /note="3' tri-ethylene glycol (TEG)"
agucgguaagut

SEQ ID NO: 7298 - DNA, 11 bp, Artificial Sequence
  source: /note="Description of Artificial Sequence: Synthetic oligonucleotide"
  source: /note="Description of Combined DNA/RNA Molecule: Synthetic oligonucleotide"
  source: /note="DNA/RNA"
  modified_base (1)..(1): bicyclic nucleic acid (BNA)
  modified_base (11)..(11): bicyclic nucleic acid (BNA)
  source: /note="3' tri-ethylene glycol (TEG)"
agucgguaagt

SEQ ID NO: 7299 - RNA, 20 nt, Artificial Sequence
  source: /note="Description of Artificial Sequence: Synthetic oligonucleotide"
  source: /note="RNA"
  modified_base (1)..(1): bicyclic nucleic acid (BNA)
  modified_base (20)..(20): bicyclic nucleic acid (BNA)
  source: /note="3' tri-ethylene glycol (TEG)"
cagucgguaaguucugucca

SEQ ID NO: 7300 - RNA, 19 nt, Artificial Sequence
  source: /note="Description of Artificial Sequence: Synthetic oligonucleotide"
  source: /note="RNA"
  modified_base (1)..(1): bicyclic nucleic acid (BNA)
  modified_base (19)..(19): bicyclic nucleic acid (BNA)
  source: /note="3' tri-ethylene glycol (TEG)"
cagucgguaaguucugucc

SEQ ID NO: 7301 - RNA, 18 nt, Artificial Sequence
  source: /note="Description of Artificial Sequence: Synthetic oligonucleotide"
  source: /note="RNA"
  modified_base (1)..(1): bicyclic nucleic acid (BNA)
  modified_base (18)..(18): bicyclic nucleic acid (BNA)
  source: /note="3' tri-ethylene glycol (TEG)"
cagucgguaaguucuguc

SEQ ID NO: 7302 - DNA, 17 bp, Artificial Sequence
  source: /note="Description of Artificial Sequence: Synthetic oligonucleotide"
  source: /note="Description of Combined DNA/RNA Molecule: Synthetic oligonucleotide"
  source: /note="DNA/RNA"
  modified_base (1)..(1): bicyclic nucleic acid (BNA)
  modified_base (17)..(17): bicyclic nucleic acid (BNA)
  source: /note="3' tri-ethylene glycol (TEG)"
cagucgguaaguucugt

SEQ ID NO: 7303 - RNA, 16 nt, Artificial Sequence
  source: /note="Description of Artificial Sequence: Synthetic oligonucleotide"
  source: /note="RNA"
  modified_base (1)..(1): bicyclic nucleic acid (BNA)
  modified_base (16)..(16): bicyclic nucleic acid (BNA)
  source: /note="3' tri-ethylene glycol (TEG)"
cagucgguaaguucug

SEQ ID NO: 7304 - DNA, 15 bp, Artificial Sequence
  source: /note="Description of Artificial Sequence: Synthetic oligonucleotide"
  source: /note="Description of Combined DNA/RNA Molecule: Synthetic oligonucleotide"
  source: /note="DNA/RNA"
  modified_base (1)..(1): bicyclic nucleic acid (BNA)
  modified_base (15)..(15): bicyclic nucleic acid (BNA)
  source: /note="3' tri-ethylene glycol (TEG)"
cagucgguaaguuct

SEQ ID NO: 7305 - RNA, 14 nt, Artificial Sequence
  source: /note="Description of Artificial Sequence: Synthetic oligonucleotide"
  source: /note="RNA"
  modified_base (1)..(1): bicyclic nucleic acid (BNA)
  modified_base (14)..(14): bicyclic nucleic acid (BNA)
  source: /note="3' tri-ethylene glycol (TEG)"
cagucgguaaguuc

SEQ ID NO: 7306 - DNA, 13 bp, Artificial Sequence
  source: /note="Description of Artificial Sequence: Synthetic oligonucleotide"
  source: /note="Description of Combined DNA/RNA Molecule: Synthetic oligonucleotide"
  source: /note="DNA/RNA"
  modified_base (1)..(1): bicyclic nucleic acid (BNA)
  modified_base (13)..(13): bicyclic nucleic acid (BNA)
  source: /note="3' tri-ethylene glycol (TEG)"
cagucgguaagut

SEQ ID NO: 7307 - DNA, 12 bp, Artificial Sequence
  source: /note="Description of Artificial Sequence: Synthetic oligonucleotide"
  source: /note="Description of Combined DNA/RNA Molecule: Synthetic oligonucleotide"
  source: /note="DNA/RNA"
  modified_base (1)..(1): bicyclic nucleic acid (BNA)
  modified_base (12)..(12): bicyclic nucleic acid (BNA)
  source: /note="3' tri-ethylene glycol (TEG)"
cagucgguaagt

SEQ ID NO: 7308 - RNA, 20 nt, Artificial Sequence
  source: /note="Description of Artificial Sequence: Synthetic oligonucleotide"
  source: /note="RNA"
  modified_base (1)..(1): bicyclic nucleic acid (BNA)
  modified_base (20)..(20): bicyclic nucleic acid (BNA)
  source: /note="3' tri-ethylene glycol (TEG)"
ccagucgguaaguucugucc

SEQ ID NO: 7309 - RNA, 19 nt, Artificial Sequence
  source: /note="Description of Artificial Sequence: Synthetic oligonucleotide"
  source: /note="RNA"
  modified_base (1)..(1): bicyclic nucleic acid (BNA)
  modified_base (19)..(19): bicyclic nucleic acid (BNA)
  source: /note="3' tri-ethylene glycol (TEG)"
ccagucgguaaguucuguc

SEQ ID NO: 7310 - DNA, 18 bp, Artificial Sequence
  source: /note="Description of Artificial Sequence: Synthetic oligonucleotide"
  source: /note="Description of Combined DNA/RNA Molecule: Synthetic oligonucleotide"
  source: /note="DNA/RNA"
  modified_base (1)..(1): bicyclic nucleic acid (BNA)
  modified_base (18)..(18): bicyclic nucleic acid (BNA)
  source: /note="3' tri-ethylene glycol (TEG)"
ccagucgguaaguucugt

SEQ ID NO: 7311 - RNA, 17 nt, Artificial Sequence
  source: /note="Description of Artificial Sequence: Synthetic oligonucleotide"
  source: /note="RNA"
  modified_base (1)..(1): bicyclic nucleic acid (BNA)
  modified_base (17)..(17): bicyclic nucleic acid (BNA)
  source: /note="3' tri-ethylene glycol (TEG)"
ccagucgguaaguucug

SEQ ID NO: 7312 - DNA, 16 bp, Artificial Sequence
  source: /note="Description of Artificial Sequence: Synthetic oligonucleotide"
  source: /note="Description of Combined DNA/RNA Molecule: Synthetic oligonucleotide"
  source: /note="DNA/RNA"
  modified_base (1)..(1): bicyclic nucleic acid (BNA)
  modified_base (16)..(16): bicyclic nucleic acid (BNA)
  source: /note="3' tri-ethylene glycol (TEG)"
ccagucgguaaguuct

SEQ ID NO: 7313 - RNA, 15 nt, Artificial Sequence
  source: /note="Description of Artificial Sequence: Synthetic oligonucleotide"
  source: /note="RNA"
  modified_base (1)..(1): bicyclic nucleic acid (BNA)
  modified_base (15)..(15): bicyclic nucleic acid (BNA)
  source: /note="3' tri-ethylene glycol (TEG)"
ccagucgguaaguuc

SEQ ID NO: 7314 - DNA, 14 bp, Artificial Sequence
  source: /note="Description of Artificial Sequence: Synthetic oligonucleotide"
  source: /note="Description of Combined DNA/RNA Molecule: Synthetic oligonucleotide"
  source: /note="DNA/RNA"
  modified_base (1)..(1): bicyclic nucleic acid (BNA)
  modified_base (14)..(14): bicyclic nucleic acid (BNA)
  source: /note="3' tri-ethylene glycol (TEG)"
ccagucgguaagut

SEQ ID NO: 7315 - DNA, 13 bp, Artificial Sequence
  source: /note="Description of Artificial Sequence: Synthetic oligonucleotide"
  source: /note="Description of Combined DNA/RNA Molecule: Synthetic oligonucleotide"
  source: /note="DNA/RNA"
  modified_base (1)..(1): bicyclic nucleic acid (BNA)
  modified_base (13)..(13): bicyclic nucleic acid (BNA)
  source: /note="3' tri-ethylene glycol (TEG)"
ccagucgguaagt

SEQ ID NO: 7316 - RNA, 20 nt, Artificial Sequence
  source: /note="Description of Artificial Sequence: Synthetic oligonucleotide"
  source: /note="RNA"
  modified_base (1)..(1): bicyclic nucleic acid (BNA)
  modified_base (20)..(20): bicyclic nucleic acid (BNA)
  source: /note="3' tri-ethylene glycol (TEG)"
gccagucgguaaguucuguc

SEQ ID NO: 7317 - DNA, 19 bp, Artificial Sequence
  source: /note="Description of Artificial Sequence: Synthetic oligonucleotide"
  source: /note="Description of Combined DNA/RNA Molecule: Synthetic oligonucleotide"
  source: /note="DNA/RNA"
  modified_base (1)..(1): bicyclic nucleic acid (BNA)
  modified_base (19)..(19): bicyclic nucleic acid (BNA)
  source: /note="3' tri-ethylene glycol (TEG)"
gccagucgguaaguucugt

SEQ ID NO: 7318 - RNA, 18 nt, Artificial Sequence
  source: /note="Description of Artificial Sequence: Synthetic oligonucleotide"
  source: /note="RNA"
  modified_base (1)..(1): bicyclic nucleic acid (BNA)
  modified_base (18)..(18): bicyclic nucleic acid (BNA)
  source: /note="3' tri-ethylene glycol (TEG)"
gccagucgguaaguucug

SEQ ID NO: 7319 - DNA, 17 bp, Artificial Sequence
  source: /note="Description of Artificial Sequence: Synthetic oligonucleotide"
  source: /note="Description of Combined DNA/RNA Molecule: Synthetic oligonucleotide"
  source: /note="DNA/RNA"
  modified_base (1)..(1): bicyclic nucleic acid (BNA)
  modified_base (17)..(17): bicyclic nucleic acid (BNA)
  source: /note="3' tri-ethylene glycol (TEG)"
gccagucgguaaguuct

SEQ ID NO: 7320 - RNA, 16 nt, Artificial Sequence
  source: /note="Description of Artificial Sequence: Synthetic oligonucleotide"
  source: /note="RNA"
  modified_base (1)..(1): bicyclic nucleic acid (BNA)
  modified_base (16)..(16): bicyclic nucleic acid (BNA)
  source: /note="3' tri-ethylene glycol (TEG)"
gccagucgguaaguuc

SEQ ID NO: 7321 - DNA, 15 bp, Artificial Sequence
  source: /note="Description of Artificial Sequence: Synthetic oligonucleotide"
  source: /note="Description of Combined DNA/RNA Molecule: Synthetic oligonucleotide"
  source: /note="DNA/RNA"
  modified_base (1)..(1): bicyclic nucleic acid (BNA)
  modified_base (15)..(15): bicyclic nucleic acid (BNA)
  source: /note="3' tri-ethylene glycol (TEG)"
gccagucgguaagut

SEQ ID NO: 7322 - DNA, 14 bp, Artificial Sequence
  source: /note="Description of Artificial Sequence: Synthetic oligonucleotide"
  source: /note="Description of Combined DNA/RNA Molecule: Synthetic oligonucleotide"
  source: /note="DNA/RNA"
  modified_base (1)..(1): bicyclic nucleic acid (BNA)
  modified_base (14)..(14): bicyclic nucleic acid (BNA)
  source: /note="3' tri-ethylene glycol (TEG)"
gccagucgguaagt

SEQ ID NO: 7323 - DNA, 20 bp, Artificial Sequence
  source: /note="Description of Artificial Sequence: Synthetic oligonucleotide"
  source: /note="Description of Combined DNA/RNA Molecule: Synthetic oligonucleotide"
  source: /note="DNA/RNA"
  modified_base (1)..(1): bicyclic nucleic acid (BNA)
  modified_base (20)..(20): bicyclic nucleic acid (BNA)
  source: /note="3' tri-ethylene glycol (TEG)"
tcaaggaagauggcauuuct

SEQ ID NO: 7324 - DNA, 22 bp, Artificial Sequence
  source: /note="Description of Artificial Sequence: Synthetic oligonucleotide"
  source: /note="Description of Combined DNA/RNA Molecule: Synthetic oligonucleotide"
  source: /note="DNA/RNA"
  modified_base (1)..(1): bicyclic nucleic acid (BNA)
  modified_base (22)..(22): bicyclic nucleic acid (BNA)
  source: /note="3' tri-ethylene glycol (TEG)"
tcaaggaagauggcauuucuag

SEQ ID NO: 7325 - DNA, 16 bp, Artificial Sequence
  source: /note="Description of Artificial Sequence: Synthetic oligonucleotide"
  source: /note="Description of Combined DNA/RNA Molecule: Synthetic oligonucleotide"
  source: /note="DNA/RNA"
  modified_base (1)..(1): bicyclic nucleic acid (BNA)
  modified_base (16)..(16): bicyclic nucleic acid (BNA)
  source: /note="3' tri-ethylene glycol (TEG)"
tcaaggaagauggcat

SEQ ID NO: 7326 - DNA, 15 bp, Artificial Sequence
  source: /note="Description of Artificial Sequence: Synthetic oligonucleotide"
  source: /note="Description of Combined DNA/RNA Molecule: Synthetic oligonucleotide"
  source: /note="DNA/RNA"
  modified_base (1)..(1): bicyclic nucleic acid (BNA)
  modified_base (15)..(15): bicyclic nucleic acid (BNA)
  source: /note="3' tri-ethylene glycol (TEG)"
gaagauggcauuuct

SEQ ID NO: 7327 - DNA, 21 bp, Artificial Sequence
  source: /note="Description of Artificial Sequence: Synthetic oligonucleotide"
  source: /note="Description of Combined DNA/RNA Molecule: Synthetic oligonucleotide"
  source: /note="DNA/RNA"
  modified_base (1)..(1): bicyclic nucleic acid (BNA)
  modified_base (21)..(21): bicyclic nucleic acid (BNA)
  source: /note="3' tri-ethylene glycol (TEG)"
tcaaggaagauggcauuucua

SEQ ID NO: 7328 - DNA, 19 bp, Artificial Sequence
  source: /note="Description of Artificial Sequence: Synthetic oligonucleotide"
  source: /note="Description of Combined DNA/RNA Molecule: Synthetic oligonucleotide"
  source: /note="DNA/RNA"
  modified_base (1)..(1): bicyclic nucleic acid (BNA)
  modified_base (19)..(19): bicyclic nucleic acid (BNA)
  source: /note="3' tri-ethylene glycol (TEG)"
tcaaggaagauggcauuuc

SEQ ID NO: 7329 - DNA, 18 bp, Artificial Sequence
  source: /note="Description of Artificial Sequence: Synthetic oligonucleotide"
  source: /note="Description of Combined DNA/RNA Molecule: Synthetic oligonucleotide"
  source: /note="DNA/RNA"
  modified_base (1)..(1): bicyclic nucleic acid (BNA)
  modified_base (18)..(18): bicyclic nucleic acid (BNA)
  source: /note="3' tri-ethylene glycol (TEG)"
tcaaggaagauggcauut

SEQ ID NO: 7330 - DNA, 17 bp, Artificial Sequence
  source: /note="Description of Artificial Sequence: Synthetic oligonucleotide"
  source: /note="Description of Combined DNA/RNA Molecule: Synthetic oligonucleotide"
  source: /note="DNA/RNA"
  modified_base (1)..(1): bicyclic nucleic acid (BNA)
  modified_base (17)..(17): bicyclic nucleic acid (BNA)
  source: /note="3' tri-ethylene glycol (TEG)"
tcaaggaagauggcaut

SEQ ID NO: 7331 - DNA, 15 bp, Artificial Sequence
  source: /note="Description of Artificial Sequence: Synthetic oligonucleotide"
  source: /note="Description of Combined DNA/RNA Molecule: Synthetic oligonucleotide"
  source: /note="DNA/RNA"
  modified_base (1)..(1): bicyclic nucleic acid (BNA)
  modified_base (15)..(15): bicyclic nucleic acid (BNA)
  source: /note="3' tri-ethylene glycol (TEG)"
tcaaggaagauggca

SEQ ID NO: 7332 - DNA, 14 bp, Artificial Sequence
  source: /note="Description of Artificial Sequence: Synthetic oligonucleotide"
  source: /note="Description of Combined DNA/RNA Molecule: Synthetic oligonucleotide"
  source: /note="DNA/RNA"
  modified_base (1)..(1): bicyclic nucleic acid (BNA)
  modified_base (14)..(14): bicyclic nucleic acid (BNA)
  source: /note="3' tri-ethylene glycol (TEG)"
tcaaggaagauggc

SEQ ID NO: 7333 - DNA, 13 bp, Artificial Sequence
  source: /note="Description of Artificial Sequence: Synthetic oligonucleotide"
  source: /note="Description of Combined DNA/RNA Molecule: Synthetic oligonucleotide"
  source: /note="DNA/RNA"
  modified_base (1)..(1): bicyclic nucleic acid (BNA)
  modified_base (13)..(13): bicyclic nucleic acid (BNA)
  source: /note="3' tri-ethylene glycol (TEG)"
tcaaggaagaugg

SEQ ID NO: 7334 - DNA, 12 bp, Artificial Sequence
  source: /note="Description of Artificial Sequence: Synthetic oligonucleotide"
  source: /note="Description of Combined DNA/RNA Molecule: Synthetic oligonucleotide"
  source: /note="DNA/RNA"
  modified_base (1)..(1): bicyclic nucleic acid (BNA)
  modified_base (12)..(12): bicyclic nucleic acid (BNA)
  source: /note="3' tri-ethylene glycol (TEG)"
tcaaggaagaug

SEQ ID NO: 7335 - DNA, 11 bp, Artificial Sequence
  source: /note="Description of Artificial Sequence: Synthetic oligonucleotide"
  source: /note="DNA/RNA"
  modified_base (1)..(1): bicyclic nucleic acid (BNA)
  modified_base (11)..(11): bicyclic nucleic acid (BNA)
  source: /note="3' tri-ethylene glycol (TEG)"
tcaaggaagat

SEQ ID NO: 7336 - DNA, 10 bp, Artificial Sequence
  source: /note="Description of Artificial Sequence: Synthetic oligonucleotide"
  source: /note="DNA/RNA"
  modified_base (1)..(1): bicyclic nucleic acid (BNA)
  modified_base (10)..(10): bicyclic nucleic acid (BNA)
  source: /note="3' tri-ethylene glycol (TEG)"
tcaaggaaga

SEQ ID NO: 7337 - DNA, 9 bp, Artificial Sequence
  source: /note="Description of Artificial Sequence: Synthetic oligonucleotide"
  source: /note="DNA/RNA"
  modified_base (1)..(1): bicyclic nucleic acid (BNA)
  modified_base (9)..(9): bicyclic nucleic acid (BNA)
  source: /note="3' tri-ethylene glycol (TEG)"
tcaaggaag

SEQ ID NO: 7338 - RNA, 21 nt, Artificial Sequence
  source: /note="Description of Artificial Sequence: Synthetic oligonucleotide"
  source: /note="RNA"
  modified_base (1)..(1): bicyclic nucleic acid (BNA)
  modified_base (21)..(21): bicyclic nucleic acid (BNA)
  source: /note="3' tri-ethylene glycol (TEG)"
caaggaagauggcauuucuag

SEQ ID NO: 7339 - RNA, 20 nt, Artificial Sequence
  source: /note="Description of Artificial Sequence: Synthetic oligonucleotide"
  source: /note="RNA"
  modified_base (1)..(1): bicyclic nucleic acid (BNA)
  modified_base (20)..(20): bicyclic nucleic acid (BNA)
  source: /note="3' tri-ethylene glycol (TEG)"
caaggaagauggcauuucua

SEQ ID NO: 7340 - DNA, 19 bp, Artificial Sequence
  source: /note="Description of Artificial Sequence: Synthetic oligonucleotide"
  source: /note="Description of Combined DNA/RNA Molecule: Synthetic oligonucleotide"
  source: /note="DNA/RNA"
  modified_base (1)..(1): bicyclic nucleic acid (BNA)
  modified_base (19)..(19): bicyclic nucleic acid (BNA)
  source: /note="3' tri-ethylene glycol (TEG)"
caaggaagauggcauuuct

SEQ ID NO: 7341 - RNA, 18 nt, Artificial Sequence
  source: /note="Description of Artificial Sequence: Synthetic oligonucleotide"
  source: /note="RNA"
  modified_base (1)..(1): bicyclic nucleic acid (BNA)
  modified_base (18)..(18): bicyclic nucleic acid (BNA)
  source: /note="3' tri-ethylene glycol (TEG)"
caaggaagauggcauuuc

SEQ ID NO: 7342 - DNA, 17 bp, Artificial Sequence
  source: /note="Description of Artificial Sequence: Synthetic oligonucleotide"
  source: /note="Description of Combined DNA/RNA Molecule: Synthetic oligonucleotide"
  source: /note="DNA/RNA"
  modified_base (1)..(1): bicyclic nucleic acid (BNA)
  modified_base (17)..(17): bicyclic nucleic acid (BNA)
  source: /note="3' tri-ethylene glycol (TEG)"
caaggaagauggcauut

SEQ ID NO: 7343 - DNA, 16 bp, Artificial Sequence
  source: /note="Description of Artificial Sequence: Synthetic oligonucleotide"
  source: /note="Description of Combined DNA/RNA Molecule: Synthetic oligonucleotide"
  source: /note="DNA/RNA"
  modified_base (1)..(1): bicyclic nucleic acid (BNA)
  modified_base (16)..(16): bicyclic nucleic acid (BNA)
  source: /note="3' tri-ethylene glycol (TEG)"
caaggaagauggcaut

SEQ ID NO: 7344 - DNA, 15 bp, Artificial Sequence
  source: /note="Description of Artificial Sequence: Synthetic oligonucleotide"
  source: /note="Description of Combined DNA/RNA Molecule: Synthetic oligonucleotide"
  source: /note="DNA/RNA"
  modified_base (1)..(1): bicyclic nucleic acid (BNA)
  modified_base (15)..(15): bicyclic nucleic acid (BNA)
  source: /note="3' tri-ethylene glycol (TEG)"
caaggaagauggcat

SEQ ID NO: 7345 - RNA, 14 nt, Artificial Sequence
  source: /note="Description of Artificial Sequence: Synthetic oligonucleotide"
  source: /note="RNA"
  modified_base (1)..(1): bicyclic nucleic acid (BNA)
  modified_base (14)..(14): bicyclic nucleic acid (BNA)
  source: /note="3' tri-ethylene glycol (TEG)"
caaggaagauggca

SEQ ID NO: 7346 - RNA, 13 nt, Artificial Sequence
  source: /note="Description of Artificial Sequence: Synthetic oligonucleotide"
  source: /note="RNA"
  modified_base (1)..(1): bicyclic nucleic acid (BNA)
  modified_base (13)..(13): bicyclic nucleic acid (BNA)
  source: /note="3' tri-ethylene glycol (TEG)"
caaggaagauggc

SEQ ID NO: 7347 - RNA, 12 nt, Artificial Sequence
  source: /note="Description of Artificial Sequence: Synthetic oligonucleotide"
  source: /note="RNA"
  modified_base (1)..(1): bicyclic nucleic acid (BNA)
  modified_base (12)..(12): bicyclic nucleic acid (BNA)
  source: /note="3' tri-ethylene glycol (TEG)"
caaggaagaugg

SEQ ID NO: 7348 - RNA, 11 nt, Artificial Sequence
  source: /note="Description of Artificial Sequence: Synthetic oligonucleotide"
  source: /note="RNA"
  modified_base (1)..(1): bicyclic nucleic acid (BNA)
  modified_base (11)..(11): bicyclic nucleic acid (BNA)
  source: /note="3' tri-ethylene glycol (TEG)"
caaggaagaug

SEQ ID NO: 7349 - DNA, 10 bp, Artificial Sequence
  source: /note="Description of Artificial Sequence: Synthetic oligonucleotide"
  source: /note="DNA/RNA"
  modified_base (1)..(1): bicyclic nucleic acid (BNA)
  modified_base (10)..(10): bicyclic nucleic acid (BNA)
  source: /note="3' tri-ethylene glycol (TEG)"
caaggaagat

SEQ ID NO: 7350 - RNA, 9 nt, Artificial Sequence
  source: /note="Description of Artificial Sequence: Synthetic oligonucleotide"
  source: /note="RNA/Antisense Oligonucleotide"
  modified_base (1)..(1): bicyclic nucleic acid (BNA)
  modified_base (9)..(9): bicyclic nucleic acid (BNA)
  source: /note="3' tri-ethylene glycol (TEG)"
caaggaaga

SEQ ID NO: 7351 - RNA, 8 nt, Artificial Sequence
  source: /note="Description of Artificial Sequence: Synthetic oligonucleotide"
  source: /note="RNA/Antisense Oligonucleotide"
  modified_base (1)..(1): bicyclic nucleic acid (BNA)
  modified_base (8)..(8): bicyclic nucleic acid (BNA)
  source: /note="3' tri-ethylene glycol (TEG)"
caaggaag

SEQ ID NO: 7352 - RNA, 20 nt, Artificial Sequence
  source: /note="Description of Artificial Sequence: Synthetic oligonucleotide"
  source: /note="RNA"
  modified_base (1)..(1): bicyclic nucleic acid (BNA)
  modified_base (20)..(20): bicyclic nucleic acid (BNA)
  source: /note="3' tri-ethylene glycol (TEG)"
aaggaagauggcauuucuag

SEQ ID NO: 7353 - RNA, 19 nt, Artificial Sequence
  source: /note="Description of Artificial Sequence: Synthetic oligonucleotide"
  source: /note="RNA"
  modified_base (1)..(1): bicyclic nucleic acid (BNA)
  modified_base (19)..(19): bicyclic nucleic acid (BNA)
  source: /note="3' tri-ethylene glycol (TEG)"
aaggaagauggcauuucua

SEQ ID NO: 7354 - DNA, 18 bp, Artificial Sequence
  source: /note="Description of Artificial Sequence: Synthetic oligonucleotide"
  source: /note="Description of Combined DNA/RNA Molecule: Synthetic oligonucleotide"
  source: /note="DNA/RNA"
  modified_base (1)..(1): bicyclic nucleic acid (BNA)
  modified_base (18)..(18): bicyclic nucleic acid (BNA)
  source: /note="3' tri-ethylene glycol (TEG)"
aaggaagauggcauuuct

SEQ ID NO: 7355 - RNA, 17 nt, Artificial Sequence
  source: /note="Description of Artificial Sequence: Synthetic oligonucleotide"
  source: /note="RNA"
  modified_base (1)..(1): bicyclic nucleic acid (BNA)
  modified_base (17)..(17): bicyclic nucleic acid (BNA)
  source: /note="3' tri-ethylene glycol (TEG)"
aaggaagauggcauuuc

SEQ ID NO: 7356 - DNA, 16 bp, Artificial Sequence
  source: /note="Description of Artificial Sequence: Synthetic oligonucleotide"
  source: /note="Description of Combined DNA/RNA Molecule: Synthetic oligonucleotide"
  source: /note="DNA/RNA"
  modified_base (1)..(1): bicyclic nucleic acid (BNA)
  modified_base (16)..(16): bicyclic nucleic acid (BNA)
  source: /note="3' tri-ethylene glycol (TEG)"
aaggaagauggcauut

SEQ ID NO: 7357 - DNA, 15 bp, Artificial Sequence
  source: /note="Description of Artificial Sequence: Synthetic oligonucleotide"
  source: /note="Description of Combined DNA/RNA Molecule: Synthetic oligonucleotide"
  source: /note="DNA/RNA"
  modified_base (1)..(1): bicyclic nucleic acid (BNA)
  modified_base (15)..(15): bicyclic nucleic acid (BNA)
  source: /note="3' tri-ethylene glycol (TEG)"
aaggaagauggcaut

SEQ ID NO: 7358 - DNA, 14 bp, Artificial Sequence
  source: /note="Description of Artificial Sequence: Synthetic oligonucleotide"
  source: /note="Description of Combined DNA/RNA Molecule: Synthetic oligonucleotide"
  source: /note="DNA/RNA"
  modified_base (1)..(1): bicyclic nucleic acid (BNA)
  modified_base (14)..(14): bicyclic nucleic acid (BNA)
  source: /note="3' tri-ethylene glycol (TEG)"
aaggaagauggcat

SEQ ID NO: 7359 - RNA, 13 nt, Artificial Sequence
  source: /note="Description of Artificial Sequence: Synthetic oligonucleotide"
  source: /note="RNA"
  modified_base (1)..(1): bicyclic nucleic acid (BNA)
  modified_base (13)..(13): bicyclic nucleic acid (BNA)
  source: /note="3' tri-ethylene glycol (TEG)"
aaggaagauggca

SEQ ID NO: 7360 - RNA, 12 nt, Artificial Sequence
  source: /note="Description of Artificial Sequence: Synthetic oligonucleotide"
  source: /note="RNA"
  modified_base (1)..(1): bicyclic nucleic acid (BNA)
  modified_base (12)..(12): bicyclic nucleic acid (BNA)
  source: /note="3' tri-ethylene glycol (TEG)"
aaggaagauggc

SEQ ID NO: 7361 - RNA, 11 nt, Artificial Sequence
  source: /note="Description of Artificial Sequence: Synthetic oligonucleotide"
  source: /note="RNA"
  modified_base (1)..(1): bicyclic nucleic acid (BNA)
  modified_base (11)..(11): bicyclic nucleic acid (BNA)
  source: /note="3' tri-ethylene glycol (TEG)"
aaggaagaugg

SEQ ID NO: 7362 - RNA, 10 nt, Artificial Sequence
  source: /note="Description of Artificial Sequence: Synthetic oligonucleotide"
  source: /note="RNA"
  modified_base (1)..(1): bicyclic nucleic acid (BNA)
  modified_base (10)..(10): bicyclic nucleic acid (BNA)
  source: /note="3' tri-ethylene glycol (TEG)"
aaggaagaug

SEQ ID NO: 7363 - DNA, 9 bp, Artificial Sequence
  source: /note="Description of Artificial Sequence: Synthetic oligonucleotide"
  source: /note="DNA/RNA"
  modified_base (1)..(1): bicyclic nucleic acid (BNA)
  modified_base (9)..(9): bicyclic nucleic acid (BNA)
  source: /note="3' tri-ethylene glycol (TEG)"
aaggaagat

SEQ ID NO: 7364 - RNA, 8 nt, Artificial Sequence
  source: /note="Description of Artificial Sequence: Synthetic oligonucleotide"
  source: /note="RNA/Antisense Oligonucleotide"
  modified_base (1)..(1): bicyclic nucleic acid (BNA)
  modified_base (8)..(8): bicyclic nucleic acid (BNA)
  source: /note="3' tri-ethylene glycol (TEG)"
aaggaaga

SEQ ID NO: 7365 - RNA, 19 nt, Artificial Sequence
  source: /note="Description of Artificial Sequence: Synthetic oligonucleotide"
  source: /note="RNA"
  modified_base (1)..(1): bicyclic nucleic acid (BNA)
  modified_base (19)..(19): bicyclic nucleic acid (BNA)
  source: /note="3' tri-ethylene glycol (TEG)"
aggaagauggcauuucuag

SEQ ID NO: 7366 - RNA, 18 nt, Artificial Sequence
  source: /note="Description of Artificial Sequence: Synthetic oligonucleotide"
  source: /note="RNA"
  modified_base (1)..(1): bicyclic nucleic acid (BNA)
  modified_base (18)..(18): bicyclic nucleic acid (BNA)
  source: /note="3' tri-ethylene glycol (TEG)"
aggaagauggcauuucua

SEQ ID NO: 7367 - DNA, 17 bp, Artificial Sequence
  source: /note="Description of Artificial Sequence: Synthetic oligonucleotide"
  source: /note="Description of Combined DNA/RNA Molecule: Synthetic oligonucleotide"
  source: /note="DNA/RNA"
  modified_base (1)..(1): bicyclic nucleic acid (BNA)
  modified_base (17)..(17): bicyclic nucleic acid (BNA)
  source: /note="3' tri-ethylene glycol (TEG)"
aggaagauggcauuuct

SEQ ID NO: 7368 - RNA, 16 nt, Artificial Sequence
  source: /note="Description of Artificial Sequence: Synthetic oligonucleotide"
  source: /note="RNA"
  modified_base (1)..(1): bicyclic nucleic acid (BNA)
  modified_base (16)..(16): bicyclic nucleic acid (BNA)
  source: /note="3' tri-ethylene glycol (TEG)"
aggaagauggcauuuc

SEQ ID NO: 7369 - DNA, 15 bp, Artificial Sequence
  source: /note="Description of Artificial Sequence: Synthetic oligonucleotide"
  source: /note="Description of Combined DNA/RNA Molecule: Synthetic oligonucleotide"
  source: /note="DNA/RNA"
  modified_base (1)..(1): bicyclic nucleic acid (BNA)
  modified_base (15)..(15): bicyclic nucleic acid (BNA)
  source: /note="3' tri-ethylene glycol (TEG)"
aggaagauggcauut

SEQ ID NO: 7370 - DNA, 14 bp, Artificial Sequence
  source: /note="Description of Artificial Sequence: Synthetic oligonucleotide"
  source: /note="Description of Combined DNA/RNA Molecule: Synthetic oligonucleotide"
  source: /note="DNA/RNA"
  modified_base (1)..(1): bicyclic nucleic acid (BNA)
  modified_base (14)..(14): bicyclic nucleic acid (BNA)
  source: /note="3' tri-ethylene glycol (TEG)"
aggaagauggcaut

SEQ ID NO: 7371 - DNA, 13 bp, Artificial Sequence
  source: /note="Description of Artificial Sequence: Synthetic oligonucleotide"
  source: /note="Description of Combined DNA/RNA Molecule: Synthetic oligonucleotide"
  source: /note="DNA/RNA"
  modified_base (1)..(1): bicyclic nucleic acid (BNA)
  modified_base (13)..(13): bicyclic nucleic acid (BNA)
  source: /note="3' tri-ethylene glycol (TEG)"
aggaagauggcat

SEQ ID NO: 7372 - RNA, 12 nt, Artificial Sequence
  source: /note="Description of Artificial Sequence: Synthetic oligonucleotide"
  source: /note="RNA"
  modified_base (1)..(1): bicyclic nucleic acid (BNA)
  modified_base (12)..(12): bicyclic nucleic acid (BNA)
  source: /note="3' tri-ethylene glycol (TEG)"
aggaagauggca

SEQ ID NO: 7373 - RNA, 10 nt, Artificial Sequence
  source: /note="Description of Artificial Sequence: Synthetic oligonucleotide"
  source: /note="RNA"
  modified_base (1)..(1): bicyclic nucleic acid (BNA)
  modified_base (10)..(10): bicyclic nucleic acid (BNA)
  source: /note="3' tri-ethylene glycol (TEG)"
aggaagaugg

SEQ ID NO: 7374 - RNA, 9 nt, Artificial Sequence
  source: /note="Description of Artificial Sequence: Synthetic oligonucleotide"
  source: /note="RNA"
  modified_base (1)..(1): bicyclic nucleic acid (BNA)
  modified_base (9)..(9): bicyclic nucleic acid (BNA)
  source: /note="3' tri-ethylene glycol (TEG)"
aggaagaug

SEQ ID NO: 7375 - DNA, 8 bp, Artificial Sequence
  source: /note="Description of Artificial Sequence: Synthetic oligonucleotide"
  source: /note="DNA/RNA"
  modified_base (1)..(1): bicyclic nucleic acid (BNA)
  modified_base (8)..(8): bicyclic nucleic acid (BNA)
  source: /note="3' tri-ethylene glycol (TEG)"
aggaagat

SEQ ID NO: 7376 - RNA, 18 nt, Artificial Sequence
  source: /note="Description of Artificial Sequence: Synthetic oligonucleotide"
  source: /note="RNA"
  modified_base (1)..(1): bicyclic nucleic acid (BNA)
  modified_base (18)..(18): bicyclic nucleic acid (BNA)
  source: /note="3' tri-ethylene glycol (TEG)"
ggaagauggcauuucuag

SEQ ID NO: 7377 - RNA, 17 nt, Artificial Sequence
  source: /note="Description of Artificial Sequence: Synthetic oligonucleotide"
  source: /note="RNA"
  modified_base (1)..(1): bicyclic nucleic acid (BNA)
  modified_base (17)..(17): bicyclic nucleic acid (BNA)
  source: /note="3' tri-ethylene glycol (TEG)"
ggaagauggcauuucua

SEQ ID NO: 7378 - DNA, 16 bp, Artificial Sequence
  source: /note="Description of Artificial Sequence: Synthetic oligonucleotide"
  source: /note="Description of Combined DNA/RNA Molecule: Synthetic oligonucleotide"
  source: /note="DNA/RNA"
  modified_base (1)..(1): bicyclic nucleic acid (BNA)
  modified_base (16)..(16): bicyclic nucleic acid (BNA)
  source: /note="3' tri-ethylene glycol (TEG)"
ggaagauggcauuuct

SEQ ID NO: 7379 - RNA, 15 nt, Artificial Sequence
  source: /note="Description of Artificial Sequence: Synthetic oligonucleotide"
  source: /note="RNA"
  modified_base (1)..(1): bicyclic nucleic acid (BNA)
  modified_base (15)..(15): bicyclic nucleic acid (BNA)
  source: /note="3' tri-ethylene glycol (TEG)"
ggaagauggcauuuc

SEQ ID NO: 7380 - DNA, 14 bp, Artificial Sequence
  source: /note="Description of Artificial Sequence: Synthetic oligonucleotide"
  source: /note="Description of Combined DNA/RNA Molecule: Synthetic oligonucleotide"
  source: /note="DNA/RNA"
  modified_base (1)..(1): bicyclic nucleic acid (BNA)
  modified_base (14)..(14): bicyclic nucleic acid (BNA)
  source: /note="3' tri-ethylene glycol (TEG)"
ggaagauggcauut

SEQ ID NO: 7381 - DNA, 13 bp, Artificial Sequence
  source: /note="Description of Artificial Sequence: Synthetic oligonucleotide"
  source: /note="Description of Combined DNA/RNA Molecule: Synthetic oligonucleotide"
  source: /note="DNA/RNA"
  modified_base (1)..(1): bicyclic nucleic acid (BNA)
  modified_base (13)..(13): bicyclic nucleic acid (BNA)
  source: /note="3' tri-ethylene glycol (TEG)"
ggaagauggcaut

SEQ ID NO: 7382 - DNA, 12 bp, Artificial Sequence
  source: /note="Description of Artificial Sequence: Synthetic oligonucleotide"
  source: /note="Description of Combined DNA/RNA Molecule: Synthetic oligonucleotide"
  source: /note="DNA/RNA"
  modified_base (1)..(1): bicyclic nucleic acid (BNA)
  modified_base (12)..(12): bicyclic nucleic acid (BNA)
  source: /note="3' tri-ethylene glycol (TEG)"
ggaagauggcat

SEQ ID NO: 7383 - RNA, 11 nt, Artificial Sequence
  source: /note="Description of Artificial Sequence: Synthetic oligonucleotide"
  source: /note="RNA"
  modified_base (1)..(1): bicyclic nucleic acid (BNA)
  modified_base (11)..(11): bicyclic nucleic acid (BNA)
  source: /note="3' tri-ethylene glycol (TEG)"
ggaagauggca

SEQ ID NO: 7384 - RNA, 10 nt, Artificial Sequence
  source: /note="Description of Artificial Sequence: Synthetic oligonucleotide"
  source: /note="RNA"
  modified_base (1)..(1): bicyclic nucleic acid (BNA)
  modified_base (10)..(10): bicyclic nucleic acid (BNA)
  source: /note="3' tri-ethylene glycol (TEG)"
ggaagauggc

SEQ ID NO: 7385 - RNA, 8 nt, Artificial Sequence
  source: /note="Description of Artificial Sequence: Synthetic oligonucleotide"
  source: /note="RNA"
  modified_base (1)..(1): bicyclic nucleic acid (BNA)
  modified_base (8)..(8): bicyclic nucleic acid (BNA)
  source: /note="3' tri-ethylene glycol (TEG)"
ggaagaug

SEQ ID NO: 7386 - RNA, 17 nt, Artificial Sequence
  source: /note="Description of Artificial Sequence: Synthetic oligonucleotide"
  source: /note="RNA"
  modified_base (1)..(1): bicyclic nucleic acid (BNA)
  modified_base (17)..(17): bicyclic nucleic acid (BNA)
  source: /note="3' tri-ethylene glycol (TEG)"
gaagauggcauuucuag

SEQ ID NO: 7387 - RNA, 16 nt, Artificial Sequence
  source: /note="Description of Artificial Sequence: Synthetic oligonucleotide"
  source: /note="RNA"
  modified_base (1)..(1): bicyclic nucleic acid (BNA)
  modified_base (16)..(16): bicyclic nucleic acid (BNA)
  source: /note="3' tri-ethylene glycol (TEG)"
gaagauggcauuucua

SEQ ID NO: 7388 - RNA, 14 nt, Artificial Sequence
  source: /note="Description of Artificial Sequence: Synthetic oligonucleotide"
  source: /note="RNA"
  modified_base (1)..(1): bicyclic nucleic acid (BNA)
  modified_base (14)..(14): bicyclic nucleic acid (BNA)
  source: /note="3' tri-ethylene glycol (TEG)"
gaagauggcauuuc

SEQ ID NO: 7389 - DNA, 13 bp, Artificial Sequence
  source: /note="Description of Artificial Sequence: Synthetic oligonucleotide"
  source: /note="Description of Combined DNA/RNA Molecule: Synthetic oligonucleotide"
  source: /note="DNA/RNA"
  modified_base (1)..(1): bicyclic nucleic acid (BNA)
  modified_base (13)..(13): bicyclic nucleic acid (BNA)
  source: /note="3' tri-ethylene glycol (TEG)"
gaagauggcauut

SEQ ID NO: 7390 - DNA, 12 bp, Artificial Sequence
  source: /note="Description of Artificial Sequence: Synthetic oligonucleotide"
  source: /note="Description of Combined DNA/RNA Molecule: Synthetic oligonucleotide"
  source: /note="DNA/RNA"
  modified_base (1)..(1): bicyclic nucleic acid (BNA)
  modified_base (12)..(12): bicyclic nucleic acid (BNA)
  source: /note="3' tri-ethylene glycol (TEG)"
gaagauggcaut

SEQ ID NO: 7391 - DNA, 11 bp, Artificial Sequence
  source: /note="Description of Artificial Sequence: Synthetic oligonucleotide"
  source: /note="Description of Combined DNA/RNA Molecule: Synthetic oligonucleotide"
  source: /note="DNA/RNA"
  modified_base (1)..(1): bicyclic nucleic acid (BNA)
  modified_base (11)..(11): bicyclic nucleic acid (BNA)
  source: /note="3' tri-ethylene glycol (TEG)"
gaagauggcat

SEQ ID NO: 7392 - RNA, 10 nt, Artificial Sequence
  source: /note="Description of Artificial Sequence: Synthetic oligonucleotide"
  source: /note="RNA"
  modified_base (1)..(1): bicyclic nucleic acid (BNA)
  modified_base (10)..(10): bicyclic nucleic acid (BNA)
  source: /note="3' tri-ethylene glycol (TEG)"
gaagauggca

SEQ ID NO: 7393 - RNA, 9 nt, Artificial Sequence
  source: /note="Description of Artificial Sequence: Synthetic oligonucleotide"
  source: /note="RNA"
  modified_base (1)..(1): bicyclic nucleic acid (BNA)
  modified_base (9)..(9): bicyclic nucleic acid (BNA)
  source: /note="3' tri-ethylene glycol (TEG)"
gaagauggc

SEQ ID NO: 7394 - RNA, 8 nt, Artificial Sequence
  source: /note="Description of Artificial Sequence: Synthetic oligonucleotide"
  source: /note="RNA"
  modified_base (1)..(1): bicyclic nucleic acid (BNA)
  modified_base (8)..(8): bicyclic nucleic acid (BNA)
  source: /note="3' tri-ethylene glycol (TEG)"
gaagaugg

SEQ ID NO: 7395 - RNA, 16 nt, Artificial Sequence
  source: /note="Description of Artificial Sequence: Synthetic oligonucleotide"
  source: /note="RNA"
  modified_base (1)..(1): bicyclic nucleic acid (BNA)
  modified_base (16)..(16): bicyclic nucleic acid (BNA)
  source: /note="3' tri-ethylene glycol (TEG)"
aagauggcauuucuag

SEQ ID NO: 7396 - RNA, 15 nt, Artificial Sequence
  source: /note="Description of Artificial Sequence: Synthetic oligonucleotide"
  source: /note="RNA"
  modified_base (1)..(1): bicyclic nucleic acid (BNA)
  modified_base (15)..(15): bicyclic nucleic acid (BNA)
  source: /note="3' tri-ethylene glycol (TEG)"
aagauggcauuucua

SEQ ID NO: 7397 - DNA, 14 bp, Artificial Sequence
  source: /note="Description of Artificial Sequence: Synthetic oligonucleotide"
  source: /note="Description of Combined DNA/RNA Molecule: Synthetic oligonucleotide"
  source: /note="DNA/RNA"
  modified_base (1)..(1): bicyclic nucleic acid (BNA)
  modified_base (14)..(14): bicyclic nucleic acid (BNA)
  source: /note="3' tri-ethylene glycol (TEG)"
aagauggcauuuct

SEQ ID NO: 7398 - RNA, 13 nt, Artificial Sequence
  source: /note="Description of Artificial Sequence: Synthetic oligonucleotide"
  source: /note="RNA"
  modified_base (1)..(1): bicyclic nucleic acid (BNA)
  modified_base (13)..(13): bicyclic nucleic acid (BNA)
  source: /note="3' tri-ethylene glycol (TEG)"
aagauggcauuuc

SEQ ID NO: 7399 - DNA, 12 bp, Artificial Sequence
  source: /note="Description of Artificial Sequence: Synthetic oligonucleotide"
  source: /note="Description of Combined DNA/RNA Molecule: Synthetic oligonucleotide"
  source: /note="DNA/RNA"
  modified_base (1)..(1): bicyclic nucleic acid (BNA)
  modified_base (12)..(12): bicyclic nucleic acid (BNA)
  source: /note="3' tri-ethylene glycol (TEG)"
aagauggcauut

SEQ ID NO: 7400 - DNA, 11 bp, Artificial Sequence
  source: /note="Description of Artificial Sequence: Synthetic oligonucleotide"
  source: /note="Description of Combined DNA/RNA Molecule: Synthetic oligonucleotide"
  source: /note="DNA/RNA"
  modified_base (1)..(1): bicyclic nucleic acid (BNA)
  modified_base (11)..(11): bicyclic nucleic acid (BNA)
  source: /note="3' tri-ethylene glycol (TEG)"
aagauggcaut

SEQ ID NO: 7401 - DNA, 10 bp, Artificial Sequence
  source: /note="Description of Artificial Sequence: Synthetic oligonucleotide"
  source: /note="Description of Combined DNA/RNA Molecule: Synthetic oligonucleotide"
  source: /note="DNA/RNA"
  modified_base (1)..(1): bicyclic nucleic acid (BNA)
  modified_base (10)..(10): bicyclic nucleic acid (BNA)
  source: /note="3' tri-ethylene glycol (TEG)"
aagauggcat

SEQ ID NO: 7402 - RNA, 9 nt, Artificial Sequence
  source: /note="Description of Artificial Sequence: Synthetic oligonucleotide"
  source: /note="RNA"
  modified_base (1)..(1): bicyclic nucleic acid (BNA)
  modified_base (9)..(9): bicyclic nucleic acid (BNA)
  source: /note="3' tri-ethylene glycol (TEG)"
aagauggca

SEQ ID NO: 7403 - RNA, 8 nt, Artificial Sequence
  source: /note="Description of Artificial Sequence: Synthetic oligonucleotide"
  source: /note="RNA"
  modified_base (1)..(1): bicyclic nucleic acid (BNA)
  modified_base (8)..(8): bicyclic nucleic acid (BNA)
  source: /note="3' tri-ethylene glycol (TEG)"
aagauggc

SEQ ID NO: 7404 - RNA, 15 nt, Artificial Sequence
  source: /note="Description of Artificial Sequence: Synthetic oligonucleotide"
  source: /note="RNA"
  modified_base (1)..(1): bicyclic nucleic acid (BNA)
  modified_base (15)..(15): bicyclic nucleic acid (BNA)
  source: /note="3' tri-ethylene glycol (TEG)"
agauggcauuucuag

SEQ ID NO: 7405 - RNA, 14 nt, Artificial Sequence
  source: /note="Description of Artificial Sequence: Synthetic oligonucleotide"
  source: /note="RNA"
  modified_base (1)..(1): bicyclic nucleic acid (BNA)
  modified_base (14)..(14): bicyclic nucleic acid (BNA)
  source: /note="3' tri-ethylene glycol (TEG)"
agauggcauuucua

SEQ ID NO: 7406 - DNA, 13 bp, Artificial Sequence
  source: /note="Description of Artificial Sequence: Synthetic oligonucleotide"
  source: /note="Description of Combined DNA/RNA Molecule: Synthetic oligonucleotide"
  source: /note="DNA/RNA"
  modified_base (1)..(1): bicyclic nucleic acid (BNA)
  modified_base (13)..(13): bicyclic nucleic acid (BNA)
  source: /note="3' tri-ethylene glycol (TEG)"
agauggcauuuct

SEQ ID NO: 7407 - RNA, 12 nt, Artificial Sequence
  source: /note="Description of Artificial Sequence: Synthetic oligonucleotide"
  source: /note="RNA"
  modified_base (1)..(1): bicyclic nucleic acid (BNA)
  modified_base (12)..(12): bicyclic nucleic acid (BNA)
  source: /note="3' tri-ethylene glycol (TEG)"
agauggcauuuc

SEQ ID NO: 7408 - DNA, 11 bp, Artificial Sequence
  source: /note="Description of Artificial Sequence: Synthetic oligonucleotide"
  source: /note="Description of Combined DNA/RNA Molecule: Synthetic oligonucleotide"
  source: /note="DNA/RNA"
  modified_base (1)..(1): bicyclic nucleic acid (BNA)
  modified_base (11)..(11): bicyclic nucleic acid (BNA)
  source: /note="3' tri-ethylene glycol (TEG)"
agauggcauut

SEQ ID NO: 7409 - DNA, 10 bp, Artificial Sequence
  source: /note="Description of Artificial Sequence: Synthetic oligonucleotide"
  source: /note="Description of Combined DNA/RNA Molecule: Synthetic oligonucleotide"
  source: /note="DNA/RNA"
  modified_base (1)..(1): bicyclic nucleic acid (BNA)
  modified_base (10)..(10): bicyclic nucleic acid (BNA)
  source: /note="3' tri-ethylene glycol (TEG)"
agauggcaut

SEQ ID NO: 7410 - DNA, 9 bp, Artificial Sequence
  source: /note="Description of Artificial Sequence: Synthetic oligonucleotide"
  source: /note="Description of Combined DNA/RNA Molecule: Synthetic oligonucleotide"
  source: /note="DNA/RNA"
  modified_base (1)..(1): bicyclic nucleic acid (BNA)
  modified_base (9)..(9): bicyclic nucleic acid (BNA)
  source: /note="3' tri-ethylene glycol (TEG)"
agauggcat

SEQ ID NO: 7411 - RNA, 8 nt, Artificial Sequence
  source: /note="Description of Artificial Sequence: Synthetic oligonucleotide"
  source: /note="RNA"
  modified_base (1)..(1): bicyclic nucleic acid (BNA)
  modified_base (8)..(8): bicyclic nucleic acid (BNA)
  source: /note="3' tri-ethylene glycol (TEG)"
agauggca

SEQ ID NO: 7412 - RNA, 30 nt, Artificial Sequence; identical to SEQ ID NO: 284
  source: /note="Description of Artificial Sequence: Synthetic oligonucleotide"
  source: /note="RNA"
  modified_base (1)..(1): bicyclic nucleic acid (BNA)
  modified_base (30)..(30): bicyclic nucleic acid (BNA)
  source: /note="3' tri-ethylene glycol (TEG)"

SEQ ID NO: 7413 - RNA, 29 nt, Artificial Sequence
  source: /note="Description of Artificial Sequence: Synthetic oligonucleotide"
  source: /note="RNA"
  modified_base (1)..(1): bicyclic nucleic acid (BNA)
  modified_base (29)..(29): bicyclic nucleic acid (BNA)
  source: /note="3' tri-ethylene glycol (TEG)"
cuccaacaucaaggaagauggcauuucua

SEQ ID NO: 7414 - DNA, 28 bp, Artificial Sequence
  source: /note="Description of Artificial Sequence: Synthetic oligonucleotide"
  source: /note="Description of Combined DNA/RNA Molecule: Synthetic oligonucleotide"
  source: /note="DNA/RNA"
  modified_base (1)..(1): bicyclic nucleic acid (BNA)
  modified_base (28)..(28): bicyclic nucleic acid (BNA)
  source: /note="3' tri-ethylene glycol (TEG)"
cuccaacaucaaggaagauggcauuuct

SEQ ID NO: 7415 - RNA, 27 nt, Artificial Sequence
  source: /note="Description of Artificial Sequence: Synthetic oligonucleotide"
  source: /note="RNA"
  modified_base (1)..(1): bicyclic nucleic acid (BNA)
  modified_base (27)..(27): bicyclic nucleic acid (BNA)
  source: /note="3' tri-ethylene glycol (TEG)"
cuccaacaucaaggaagauggcauuuc

SEQ ID NO: 7416 - DNA, 26 bp, Artificial Sequence
  source: /note="Description of Artificial Sequence: Synthetic oligonucleotide"
  source: /note="Description of Combined DNA/RNA Molecule: Synthetic oligonucleotide"
  source: /note="DNA/RNA"
  modified_base (1)..(1): bicyclic nucleic acid (BNA)
  modified_base (26)..(26): bicyclic nucleic acid (BNA)
  source: /note="3' tri-ethylene glycol (TEG)"
cuccaacaucaaggaagauggcauut

SEQ ID NO: 7417 - DNA, 25 bp, Artificial Sequence
  source: /note="Description of Artificial Sequence: Synthetic oligonucleotide"
  source: /note="Description of Combined DNA/RNA Molecule: Synthetic oligonucleotide"
  source: /note="DNA/RNA"
  modified_base (1)..(1): bicyclic nucleic acid (BNA)
  modified_base (25)..(25): bicyclic nucleic acid (BNA)
  source: /note="3' tri-ethylene glycol (TEG)"
cuccaacaucaaggaagauggcaut

SEQ ID NO: 7418 - DNA, 24 bp, Artificial Sequence
  source: /note="Description of Artificial Sequence: Synthetic oligonucleotide"
  source: /note="Description of Combined DNA/RNA Molecule: Synthetic oligonucleotide"
  source: /note="DNA/RNA"
  modified_base (1)..(1): bicyclic nucleic acid (BNA)
  modified_base (24)..(24): bicyclic nucleic acid (BNA)
  source: /note="3' tri-ethylene glycol (TEG)"
cuccaacaucaaggaagauggcat

SEQ ID NO: 7419 - RNA, 23 nt, Artificial Sequence
  source: /note="Description of Artificial Sequence: Synthetic oligonucleotide"
  source: /note="RNA"
  modified_base (1)..(1): bicyclic nucleic acid (BNA)
  modified_base (23)..(23): bicyclic nucleic acid (BNA)
  source: /note="3' tri-ethylene glycol (TEG)"
cuccaacaucaaggaagauggca

SEQ ID NO: 7420 - RNA, 22 nt, Artificial Sequence
  source: /note="Description of Artificial Sequence: Synthetic oligonucleotide"
  source: /note="RNA"
  modified_base (1)..(1): bicyclic nucleic acid (BNA)
  modified_base (22)..(22): bicyclic nucleic acid (BNA)
  source: /note="3' tri-ethylene glycol (TEG)"
cuccaacaucaaggaagauggc

SEQ ID NO: 7421 - RNA, 21 nt, Artificial Sequence
  source: /note="Description of Artificial Sequence: Synthetic oligonucleotide"
  source: /note="RNA"
  modified_base (1)..(1): bicyclic nucleic acid (BNA)
  modified_base (21)..(21): bicyclic nucleic acid (BNA)
  source: /note="3' tri-ethylene glycol (TEG)"
cuccaacaucaaggaagaugg

SEQ ID NO: 7422 - RNA, 20 nt, Artificial Sequence
  source: /note="Description of Artificial Sequence: Synthetic oligonucleotide"
  source: /note="RNA"
  modified_base (1)..(1): bicyclic nucleic acid (BNA)
  modified_base (20)..(20): bicyclic nucleic acid (BNA)
  source: /note="3' tri-ethylene glycol (TEG)"
cuccaacaucaaggaagaug

SEQ ID NO: 7423 - DNA, 19 bp, Artificial Sequence
  source: /note="Description of Artificial Sequence: Synthetic oligonucleotide"
  source: /note="Description of Combined DNA/RNA Molecule: Synthetic oligonucleotide"
  source: /note="DNA/RNA"
  modified_base (1)..(1): bicyclic nucleic acid (BNA)
  modified_base (19)..(19): bicyclic nucleic acid (BNA)
  source: /note="3' tri-ethylene glycol (TEG)"
cuccaacaucaaggaagat

SEQ ID NO: 7424 - RNA, 18 nt, Artificial Sequence
  source: /note="Description of Artificial Sequence: Synthetic oligonucleotide"
  source: /note="RNA"
  modified_base (1)..(1): bicyclic nucleic acid (BNA)
  modified_base (18)..(18): bicyclic nucleic acid (BNA)
  source: /note="3' tri-ethylene glycol (TEG)"
cuccaacaucaaggaaga

SEQ ID NO: 7425 - RNA, 17 nt, Artificial Sequence
  source: /note="Description of Artificial Sequence: Synthetic oligonucleotide"
  source: /note="RNA"
  modified_base (1)..(1): bicyclic nucleic acid (BNA)
  modified_base (17)..(17): bicyclic nucleic acid (BNA)
  source: /note="3' tri-ethylene glycol (TEG)"
cuccaacaucaaggaag

SEQ ID NO: 7426 - DNA, 29 bp, Artificial Sequence
  source: /note="Description of Artificial Sequence: Synthetic oligonucleotide"
  source: /note="Description of Combined DNA/RNA Molecule: Synthetic oligonucleotide"
  source: /note="DNA/RNA"
  modified_base (1)..(1): bicyclic nucleic acid (BNA)
  modified_base (29)..(29): bicyclic nucleic acid (BNA)
  source: /note="3' tri-ethylene glycol (TEG)"
tccaacaucaaggaagauggcauuucuag

SEQ ID NO: 7427 - DNA, 28 bp, Artificial Sequence
  source: /note="Description of Artificial Sequence: Synthetic oligonucleotide"
  source: /note="Description of Combined DNA/RNA Molecule: Synthetic oligonucleotide"
  source: /note="DNA/RNA"
  modified_base (1)..(1): bicyclic nucleic acid (BNA)
  modified_base (28)..(28): bicyclic nucleic acid (BNA)
  source: /note="3' tri-ethylene glycol (TEG)"
tccaacaucaaggaagauggcauuucua

SEQ ID NO: 7428 - DNA, 27 bp, Artificial Sequence
  source: /note="Description of Artificial Sequence: Synthetic oligonucleotide"
  source: /note="Description of Combined DNA/RNA Molecule: Synthetic oligonucleotide"
  source: /note="DNA/RNA"
  modified_base (1)..(1): bicyclic nucleic acid (BNA)
  modified_base (27)..(27): bicyclic nucleic acid (BNA)
  source: /note="3' tri-ethylene glycol (TEG)"
tccaacaucaaggaagauggcauuuct

SEQ ID NO: 7429 - DNA, 26 bp, Artificial Sequence
  source: /note="Description of Artificial Sequence: Synthetic oligonucleotide"
  source: /note="Description of Combined DNA/RNA Molecule: Synthetic oligonucleotide"
  source: /note="DNA/RNA"
  modified_base (1)..(1): bicyclic nucleic acid (BNA)
  modified_base (26)..(26): bicyclic nucleic acid (BNA)
  source: /note="3' tri-ethylene glycol (TEG)"
tccaacaucaaggaagauggcauuuc

SEQ ID NO: 7430 - DNA, 25 bp, Artificial Sequence
  source: /note="Description of Artificial Sequence: Synthetic oligonucleotide"
  source: /note="Description of Combined DNA/RNA Molecule: Synthetic oligonucleotide"
  source: /note="DNA/RNA"
  modified_base (1)..(1): bicyclic nucleic acid (BNA)
  modified_base (25)..(25): bicyclic nucleic acid (BNA)
  source: /note="3' tri-ethylene glycol (TEG)"
tccaacaucaaggaagauggcauut

SEQ ID NO: 7431 - DNA, 24 bp, Artificial Sequence
  source: /note="Description of Artificial Sequence: Synthetic oligonucleotide"
  source: /note="Description of Combined DNA/RNA Molecule: Synthetic oligonucleotide"
  source: /note="DNA/RNA"
  modified_base (1)..(1): bicyclic nucleic acid (BNA)
  modified_base (24)..(24): bicyclic nucleic acid (BNA)
  source: /note="3' tri-ethylene glycol (TEG)"
tccaacaucaaggaagauggcaut

SEQ ID NO: 7432 - DNA, 23 bp, Artificial Sequence
  source: /note="Description of Artificial Sequence: Synthetic oligonucleotide"
  source: /note="Description of Combined DNA/RNA Molecule: Synthetic oligonucleotide"
  source: /note="DNA/RNA"
  modified_base (1)..(1): bicyclic nucleic acid (BNA)
  modified_base (23)..(23): bicyclic nucleic acid (BNA)
  source: /note="3' tri-ethylene glycol (TEG)"
tccaacaucaaggaagauggcat

SEQ ID NO: 7433 - DNA, 22 bp, Artificial Sequence
  source: /note="Description of Artificial Sequence: Synthetic oligonucleotide"
  source: /note="Description of Combined DNA/RNA Molecule: Synthetic oligonucleotide"
  source: /note="DNA/RNA"
  modified_base (1)..(1): bicyclic nucleic acid (BNA)
  modified_base (22)..(22): bicyclic nucleic acid (BNA)
  source: /note="3' tri-ethylene glycol (TEG)"
tccaacaucaaggaagauggca

SEQ ID NO: 7434 - DNA, 21 bp, Artificial Sequence
  source: /note="Description of Artificial Sequence: Synthetic oligonucleotide"
  source: /note="Description of Combined DNA/RNA Molecule: Synthetic oligonucleotide"
  source: /note="DNA/RNA"
  modified_base (1)..(1): bicyclic nucleic acid (BNA)
  modified_base (21)..(21): bicyclic nucleic acid (BNA)
  source: /note="3' tri-ethylene glycol (TEG)"
tccaacaucaaggaagauggc

SEQ ID NO: 7435 - DNA, 20 bp, Artificial Sequence
  source: /note="Description of Artificial Sequence: Synthetic oligonucleotide"
  source: /note="Description of Combined DNA/RNA Molecule: Synthetic oligonucleotide"
  source: /note="DNA/RNA"
  modified_base (1)..(1): bicyclic nucleic acid (BNA)
  modified_base (20)..(20): bicyclic nucleic acid (BNA)
  source: /note="3' tri-ethylene glycol (TEG)"
tccaacaucaaggaagaugg

SEQ ID NO: 7436 - DNA, 19 bp, Artificial Sequence
  source: /note="Description of Artificial Sequence: Synthetic oligonucleotide"
  source: /note="Description of Combined DNA/RNA Molecule: Synthetic oligonucleotide"
  source: /note="DNA/RNA"
  modified_base (1)..(1): bicyclic nucleic acid (BNA)
  modified_base (19)..(19): bicyclic nucleic acid (BNA)
  source: /note="3' tri-ethylene glycol (TEG)"
tccaacaucaaggaagaug

SEQ ID NO: 7437 - DNA, 18 bp, Artificial Sequence
  source: /note="Description of Artificial Sequence: Synthetic oligonucleotide"
  source: /note="Description of Combined DNA/RNA Molecule: Synthetic oligonucleotide"
  source: /note="DNA/RNA"
  modified_base (1)..(1): bicyclic nucleic acid (BNA)
  modified_base (18)..(18): bicyclic nucleic acid (BNA)
  source: /note="3' tri-ethylene glycol (TEG)"
tccaacaucaaggaagat

SEQ ID NO: 7438 - DNA, 17 bp, Artificial Sequence
  source: /note="Description of Artificial Sequence: Synthetic oligonucleotide"
  source: /note="Description of Combined DNA/RNA Molecule: Synthetic oligonucleotide"
  source: /note="DNA/RNA"
  modified_base (1)..(1): bicyclic nucleic acid (BNA)
  modified_base (17)..(17): bicyclic nucleic acid (BNA)
  source: /note="3' tri-ethylene glycol (TEG)"
tccaacaucaaggaaga

SEQ ID NO: 7439 - DNA, 16 bp, Artificial Sequence
  source: /note="Description of Artificial Sequence: Synthetic oligonucleotide"
  source: /note="Description of Combined DNA/RNA Molecule: Synthetic oligonucleotide"
  source: /note="DNA/RNA"
  modified_base (1)..(1): bicyclic nucleic acid (BNA)
  modified_base (16)..(16): bicyclic nucleic acid (BNA)
  source: /note="3' tri-ethylene glycol (TEG)"
tccaacaucaaggaag

SEQ ID NO: 7440 - RNA, 28 nt, Artificial Sequence
  source: /note="Description of Artificial Sequence: Synthetic oligonucleotide"
  source: /note="RNA"
  modified_base (1)..(1): bicyclic nucleic acid (BNA)
  modified_base (28)..(28): bicyclic nucleic acid (BNA)
  source: /note="3' tri-ethylene glycol (TEG)"
ccaacaucaaggaagauggcauuucuag

SEQ ID NO: 7441 - RNA, 27 nt, Artificial Sequence
  source: /note="Description of Artificial Sequence: Synthetic oligonucleotide"
  source: /note="RNA"
  modified_base (1)..(1): bicyclic nucleic acid (BNA)
  modified_base (27)..(27): bicyclic nucleic acid (BNA)
  source: /note="3' tri-ethylene glycol (TEG)"
ccaacaucaaggaagauggcauuucua

SEQ ID NO: 7442 - DNA, 26 bp, Artificial Sequence
  source: /note="Description of Artificial Sequence: Synthetic oligonucleotide"
  source: /note="Description of Combined DNA/RNA Molecule: Synthetic oligonucleotide"
  source: /note="DNA/RNA"
  modified_base (1)..(1): bicyclic nucleic acid (BNA)
  modified_base (26)..(26): bicyclic nucleic acid (BNA)
  source: /note="3' tri-ethylene glycol (TEG)"
ccaacaucaaggaagauggcauuuct

SEQ ID NO: 7443 - RNA, 25 nt, Artificial Sequence
  source: /note="Description of Artificial Sequence: Synthetic oligonucleotide"
  source: /note="RNA"
  modified_base (1)..(1): bicyclic nucleic acid (BNA)
  modified_base (25)..(25): bicyclic nucleic acid (BNA)
  source: /note="3' tri-ethylene glycol (TEG)"
ccaacaucaaggaagauggcauuuc

SEQ ID NO: 7444 - DNA, 24 bp, Artificial Sequence
  source: /note="Description of Artificial Sequence: Synthetic oligonucleotide"
  source: /note="Description of Combined DNA/RNA Molecule: Synthetic oligonucleotide"
  source: /note="DNA/RNA"
  modified_base (1)..(1): bicyclic nucleic acid (BNA)
  modified_base (24)..(24): bicyclic nucleic acid (BNA)
  source: /note="3' tri-ethylene glycol (TEG)"
ccaacaucaaggaagauggcauut

SEQ ID NO: 7445 - DNA, 23 bp, Artificial Sequence
  source: /note="Description of Artificial Sequence: Synthetic oligonucleotide"
  source: /note="Description of Combined DNA/RNA Molecule: Synthetic oligonucleotide"
  source: /note="DNA/RNA"
  modified_base (1)..(1): bicyclic nucleic acid (BNA)
  modified_base (23)..(23): bicyclic nucleic acid (BNA)
  source: /note="3' tri-ethylene glycol (TEG)"
ccaacaucaaggaagauggcaut

SEQ ID NO: 7446 - DNA, 22 bp, Artificial Sequence
  source: /note="Description of Artificial Sequence: Synthetic oligonucleotide"
  source: /note="Description of Combined DNA/RNA Molecule: Synthetic oligonucleotide"
  source: /note="DNA/RNA"
  modified_base (1)..(1): bicyclic nucleic acid (BNA)
  modified_base (22)..(22): bicyclic nucleic acid (BNA)
  source: /note="3' tri-ethylene glycol (TEG)"
ccaacaucaaggaagauggcat

SEQ ID NO: 7447 - RNA, 21 nt, Artificial Sequence
  source: /note="Description of Artificial Sequence: Synthetic oligonucleotide"
  source: /note="RNA"
  modified_base (1)..(1): bicyclic nucleic acid (BNA)
  modified_base (21)..(21): bicyclic nucleic acid (BNA)
  source: /note="3' tri-ethylene glycol (TEG)"
ccaacaucaaggaagauggca

SEQ ID NO: 7448 - RNA, 20 nt, Artificial Sequence
  source: /note="Description of Artificial Sequence: Synthetic oligonucleotide"
  source: /note="RNA"
  modified_base (1)..(1): bicyclic nucleic acid (BNA)
  modified_base (20)..(20): bicyclic nucleic acid (BNA)
  source: /note="3' tri-ethylene glycol (TEG)"
ccaacaucaaggaagauggc

SEQ ID NO: 7449 - RNA, 19 nt, Artificial Sequence
  source: /note="Description of Artificial Sequence: Synthetic oligonucleotide"
  source: /note="RNA"
  modified_base (1)..(1): bicyclic nucleic acid (BNA)
  modified_base (19)..(19): bicyclic nucleic acid (BNA)
  source: /note="3' tri-ethylene glycol (TEG)"
ccaacaucaaggaagaugg

SEQ ID NO: 7450 - RNA, 18 nt, Artificial Sequence
  source: /note="Description of Artificial Sequence: Synthetic oligonucleotide"
  source: /note="RNA"
  modified_base (1)..(1): bicyclic nucleic acid (BNA)
  modified_base (18)..(18): bicyclic nucleic acid (BNA)
  source: /note="3' tri-ethylene glycol (TEG)"
ccaacaucaaggaagaug

SEQ ID NO: 7451 - DNA, 17 bp, Artificial Sequence
  source: /note="Description of Artificial Sequence: Synthetic oligonucleotide"
  source: /note="Description of Combined DNA/RNA Molecule: Synthetic oligonucleotide"
  source: /note="DNA/RNA"
  modified_base (1)..(1): bicyclic nucleic acid (BNA)
  modified_base (17)..(17): bicyclic nucleic acid (BNA)
  source: /note="3' tri-ethylene glycol (TEG)"
ccaacaucaaggaagat

SEQ ID NO: 7452 - RNA, 16 nt, Artificial Sequence
  source: /note="Description of Artificial Sequence: Synthetic oligonucleotide"
  source: /note="RNA"
  modified_base (1)..(1): bicyclic nucleic acid (BNA)
  modified_base (16)..(16): bicyclic nucleic acid (BNA)
  source: /note="3' tri-ethylene glycol (TEG)"
ccaacaucaaggaaga

SEQ ID NO: 7453 - RNA, 15 nt, Artificial Sequence
  source: /note="Description of Artificial Sequence: Synthetic oligonucleotide"
  source: /note="RNA"
  modified_base (1)..(1): bicyclic nucleic acid (BNA)
  modified_base (15)..(15): bicyclic nucleic acid (BNA)
  source: /note="3' tri-ethylene glycol (TEG)"
ccaacaucaaggaag

SEQ ID NO: 7454 - RNA, 27 nt, Artificial Sequence
  source: /note="Description of Artificial Sequence: Synthetic oligonucleotide"
  source: /note="RNA"
  modified_base (1)..(1): bicyclic nucleic acid (BNA)
  modified_base (27)..(27): bicyclic nucleic acid (BNA)
  source: /note="3' tri-ethylene glycol (TEG)"
caacaucaaggaagauggcauuucuag

SEQ ID NO: 7455 - RNA, 26 nt, Artificial Sequence
  source: /note="Description of Artificial Sequence: Synthetic oligonucleotide"
  source: /note="RNA"
  modified_base (1)..(1): bicyclic nucleic acid (BNA)
  modified_base (26)..(26): bicyclic nucleic acid (BNA)
  source: /note="3' tri-ethylene glycol (TEG)"
caacaucaaggaagauggcauuucua

SEQ ID NO: 7456 - DNA, 25 bp, Artificial Sequence
  source: /note="Description of Artificial Sequence: Synthetic oligonucleotide"
  source: /note="Description of Combined DNA/RNA Molecule: Synthetic oligonucleotide"
  source: /note="DNA/RNA"
  modified_base (1)..(1): bicyclic nucleic acid (BNA)
  modified_base (25)..(25): bicyclic nucleic acid (BNA)
  source: /note="3' tri-ethylene glycol (TEG)"
caacaucaaggaagauggcauuuct

SEQ ID NO: 7457 - RNA, 24 nt, Artificial Sequence
  source: /note="Description of Artificial Sequence: Synthetic oligonucleotide"
  source: /note="RNA"
  modified_base (1)..(1): bicyclic nucleic acid (BNA)
  modified_base (24)..(24): bicyclic nucleic acid (BNA)
  source: /note="3' tri-ethylene glycol (TEG)"
caacaucaaggaagauggcauuuc

SEQ ID NO: 7458 - DNA, 23 bp, Artificial Sequence
  source: /note="Description of Artificial Sequence: Synthetic oligonucleotide"
  source: /note="Description of Combined DNA/RNA Molecule: Synthetic oligonucleotide"
  source: /note="DNA/RNA"
  modified_base (1)..(1): bicyclic nucleic acid (BNA)
  modified_base (23)..(23): bicyclic nucleic acid (BNA)
  source: /note="3' tri-ethylene glycol (TEG)"
caacaucaaggaagauggcauut

SEQ ID NO: 7459 - DNA, 22 bp, Artificial Sequence
  source: /note="Description of Artificial Sequence: Synthetic oligonucleotide"
  source: /note="Description of Combined DNA/RNA Molecule: Synthetic oligonucleotide"
  source: /note="DNA/RNA"
  modified_base (1)..(1): bicyclic nucleic acid (BNA)
  modified_base (22)..(22): bicyclic nucleic acid (BNA)
  source: /note="3' tri-ethylene glycol (TEG)"
caacaucaaggaagauggcaut

SEQ ID NO: 7460 - DNA, 21 bp, Artificial Sequence
  source: /note="Description of Artificial Sequence: Synthetic oligonucleotide"
  source: /note="Description of Combined DNA/RNA Molecule: Synthetic oligonucleotide"
  source: /note="DNA/RNA"
  modified_base (1)..(1): bicyclic nucleic acid (BNA)
  modified_base (21)..(21): bicyclic nucleic acid (BNA)
  source: /note="3' tri-ethylene glycol (TEG)"
caacaucaaggaagauggcat

SEQ ID NO: 7461 - RNA, 20 nt, Artificial Sequence
  source: /note="Description of Artificial Sequence: Synthetic oligonucleotide"
  source: /note="RNA"
  modified_base (1)..(1): bicyclic nucleic acid (BNA)
  modified_base (20)..(20): bicyclic nucleic acid (BNA)
  source: /note="3' tri-ethylene glycol (TEG)"
caacaucaaggaagauggca

SEQ ID NO: 7462 - RNA, 19 nt, Artificial Sequence
  source: /note="Description of Artificial Sequence: Synthetic oligonucleotide"
  source: /note="RNA"
  modified_base (1)..(1): bicyclic nucleic acid (BNA)
  modified_base (19)..(19): bicyclic nucleic acid (BNA)
  source: /note="3' tri-ethylene glycol (TEG)"
caacaucaaggaagauggc

SEQ ID NO: 7463 - RNA, 18 nt, Artificial Sequence
  source: /note="Description of Artificial Sequence: Synthetic oligonucleotide"
  source: /note="RNA"
  modified_base (1)..(1): bicyclic nucleic acid (BNA)
  modified_base (18)..(18): bicyclic nucleic acid (BNA)
  source: /note="3' tri-ethylene glycol (TEG)"
caacaucaaggaagaugg

SEQ ID NO: 7464 - RNA, 17 nt, Artificial Sequence
  source: /note="Description of Artificial Sequence: Synthetic oligonucleotide"
  source: /note="RNA"
  modified_base (1)..(1): bicyclic nucleic acid (BNA)
  modified_base (17)..(17): bicyclic nucleic acid (BNA)
  source: /note="3' tri-ethylene glycol (TEG)"
caacaucaaggaagaug

SEQ ID NO: 7465 - DNA, 16 bp, Artificial Sequence
  source: /note="Description of Artificial Sequence: Synthetic oligonucleotide"
  source: /note="Description of Combined DNA/RNA Molecule: Synthetic oligonucleotide"
  source: /note="DNA/RNA"
  modified_base (1)..(1): bicyclic nucleic acid (BNA)
  modified_base (16)..(16): bicyclic nucleic acid (BNA)
  source: /note="3' tri-ethylene glycol (TEG)"
caacaucaaggaagat

SEQ ID NO: 7466 - RNA, 15 nt, Artificial Sequence
  source: /note="Description of Artificial Sequence: Synthetic oligonucleotide"
  source: /note="RNA"
  modified_base (1)..(1): bicyclic nucleic acid (BNA)
  modified_base (15)..(15): bicyclic nucleic acid (BNA)
  source: /note="3' tri-ethylene glycol (TEG)"
caacaucaaggaaga

SEQ ID NO: 7467 - RNA, 14 nt, Artificial Sequence
  source: /note="Description of Artificial Sequence: Synthetic oligonucleotide"
  source: /note="RNA"
  modified_base (1)..(1): bicyclic nucleic acid (BNA)
  modified_base (14)..(14): bicyclic nucleic acid (BNA)
  source: /note="3' tri-ethylene glycol (TEG)"
caacaucaaggaag

SEQ ID NO: 7468 - RNA, 26 nt, Artificial Sequence
  source: /note="Description of Artificial Sequence: Synthetic oligonucleotide"
  source: /note="RNA"
  modified_base (1)..(1): bicyclic nucleic acid (BNA)
  modified_base (26)..(26): bicyclic nucleic acid (BNA)
  source: /note="3' tri-ethylene glycol (TEG)"
aacaucaaggaagauggcauuucuag

SEQ ID NO: 7469 - RNA, 25 nt, Artificial Sequence
  source: /note="Description of Artificial Sequence: Synthetic oligonucleotide"
  source: /note="RNA"
  modified_base (1)..(1): bicyclic nucleic acid (BNA)
  modified_base (25)..(25): bicyclic nucleic acid (BNA)
  source: /note="3' tri-ethylene glycol (TEG)"
aacaucaaggaagauggcauuucua

SEQ ID NO: 7470 - DNA, 24 bp, Artificial Sequence
  source: /note="Description of Artificial Sequence: Synthetic oligonucleotide"
  source: /note="Description of Combined DNA/RNA Molecule: Synthetic oligonucleotide"
  source: /note="DNA/RNA"
  modified_base (1)..(1): bicyclic nucleic acid (BNA)
  modified_base (24)..(24): bicyclic nucleic acid (BNA)
  source: /note="3' tri-ethylene glycol (TEG)"
aacaucaaggaagauggcauuuct

SEQ ID NO: 7471 - RNA, 23 nt, Artificial Sequence
  source: /note="Description of Artificial Sequence: Synthetic oligonucleotide"
  source: /note="RNA"
  modified_base (1)..(1): bicyclic nucleic acid (BNA)
  modified_base (23)..(23): bicyclic nucleic acid (BNA)
  source: /note="3' tri-ethylene glycol (TEG)"
aacaucaaggaagauggcauuuc

SEQ ID NO: 7472 - DNA, 22 bp, Artificial Sequence
  source: /note="Description of Artificial Sequence: Synthetic oligonucleotide"
  source: /note="Description of Combined DNA/RNA Molecule: Synthetic oligonucleotide"
  source: /note="DNA/RNA"
  modified_base (1)..(1): bicyclic nucleic acid (BNA)
  modified_base (22)..(22): bicyclic nucleic acid (BNA)
  source: /note="3' tri-ethylene glycol (TEG)"
aacaucaaggaagauggcauut

SEQ ID NO: 7473 - DNA, 21 bp, Artificial Sequence
  source: /note="Description of Artificial Sequence: Synthetic oligonucleotide"
  source: /note="Description of Combined DNA/RNA Molecule: Synthetic oligonucleotide"
  source: /note="DNA/RNA"
  modified_base (1)..(1): bicyclic nucleic acid (BNA)
  modified_base (21)..(21): bicyclic nucleic acid (BNA)
  source: /note="3' tri-ethylene glycol (TEG)"
aacaucaaggaagauggcaut

SEQ ID NO: 7474 - DNA, 20 bp, Artificial Sequence
  source: /note="Description of Artificial Sequence: Synthetic oligonucleotide"
  source: /note="Description of Combined DNA/RNA Molecule: Synthetic oligonucleotide"
  source: /note="DNA/RNA"
  modified_base (1)..(1): bicyclic nucleic acid (BNA)
  modified_base (20)..(20): bicyclic nucleic acid (BNA)
  source: /note="3' tri-ethylene glycol (TEG)"
aacaucaaggaagauggcat

SEQ ID NO: 7475 - RNA, 19 nt, Artificial Sequence
  source: /note="Description of Artificial Sequence: Synthetic oligonucleotide"
  source: /note="RNA"
  modified_base (1)..(1): bicyclic nucleic acid (BNA)
  modified_base (19)..(19): bicyclic nucleic acid (BNA)
  source: /note="3' tri-ethylene glycol (TEG)"
aacaucaaggaagauggca

SEQ ID NO: 7476 - RNA, 18 nt, Artificial Sequence
  source: /note="Description of Artificial Sequence: Synthetic oligonucleotide"
  source: /note="RNA"
  modified_base (1)..(1): bicyclic nucleic acid (BNA)
  modified_base (18)..(18): bicyclic nucleic acid (BNA)
  source: /note="3' tri-ethylene glycol (TEG)"
aacaucaaggaagauggc

SEQ ID NO: 7477 - RNA, 17 nt, Artificial Sequence
  source: /note="Description of Artificial Sequence: Synthetic oligonucleotide"
  source: /note="RNA"
  modified_base (1)..(1): bicyclic nucleic acid (BNA)
  modified_base (17)..(17): bicyclic nucleic acid (BNA)
  source: /note="3' tri-ethylene glycol (TEG)"
aacaucaaggaagaugg

SEQ ID NO: 7478 - RNA, 16 nt, Artificial Sequence
  source: /note="Description of Artificial Sequence: Synthetic oligonucleotide"
  source: /note="RNA"
  modified_base (1)..(1): bicyclic nucleic acid (BNA)
  modified_base (16)..(16): bicyclic nucleic acid (BNA)
  source: /note="3' tri-ethylene glycol (TEG)"
aacaucaaggaagaug

SEQ ID NO: 7479 - DNA, 15 bp, Artificial Sequence
  source: /note="Description of Artificial Sequence: Synthetic oligonucleotide"
  source: /note="Description of Combined DNA/RNA Molecule: Synthetic oligonucleotide"
  source: /note="DNA/RNA"
  modified_base (1)..(1): bicyclic nucleic acid (BNA)
  modified_base (15)..(15): bicyclic nucleic acid (BNA)
  source: /note="3' tri-ethylene glycol (TEG)"
aacaucaaggaagat

SEQ ID NO: 7480 - RNA, 14 nt, Artificial Sequence
  source: /note="Description of Artificial Sequence: Synthetic oligonucleotide"
  source: /note="RNA"
  modified_base (1)..(1): bicyclic nucleic acid (BNA)
  modified_base (14)..(14): bicyclic nucleic acid (BNA)
  source: /note="3' tri-ethylene glycol (TEG)"
aacaucaaggaaga

SEQ ID NO: 7481 - RNA, 13 nt, Artificial Sequence
  source: /note="Description of Artificial Sequence: Synthetic oligonucleotide"
  source: /note="RNA"
  modified_base (1)..(1): bicyclic nucleic acid (BNA)
  modified_base (13)..(13): bicyclic nucleic acid (BNA)
  source: /note="3' tri-ethylene glycol (TEG)"
aacaucaaggaag

SEQ ID NO: 7482 - RNA, 25 nt, Artificial Sequence
  source: /note="Description of Artificial Sequence: Synthetic oligonucleotide"
  source: /note="RNA"
  modified_base (1)..(1): bicyclic nucleic acid (BNA)
  modified_base (25)..(25): bicyclic nucleic acid (BNA)
  source: /note="3' tri-ethylene glycol (TEG)"
acaucaaggaagauggcauuucuag

SEQ ID NO: 7483 - RNA, 24 nt, Artificial Sequence
  source: /note="Description of Artificial Sequence: Synthetic oligonucleotide"
  source: /note="RNA"
  modified_base (1)..(1): bicyclic nucleic acid (BNA)
  modified_base (24)..(24): bicyclic nucleic acid (BNA)
  source: /note="3' tri-ethylene glycol (TEG)"
acaucaaggaagauggcauuucua

SEQ ID NO: 7484 - DNA, 23 bp, Artificial Sequence
  source: /note="Description of Artificial Sequence: Synthetic oligonucleotide"
  source: /note="Description of Combined DNA/RNA Molecule: Synthetic oligonucleotide"
  source: /note="DNA/RNA"
  modified_base (1)..(1): bicyclic nucleic acid (BNA)
  modified_base (23)..(23): bicyclic nucleic acid (BNA)
  source: /note="3' tri-ethylene glycol (TEG)"
acaucaaggaagauggcauuuct

SEQ ID NO: 7485 - RNA, 22 nt, Artificial Sequence
  source: /note="Description of Artificial Sequence: Synthetic oligonucleotide"
  source: /note="RNA"
  modified_base (1)..(1): bicyclic nucleic acid (BNA)
  modified_base (22)..(22): bicyclic nucleic acid (BNA)
  source: /note="3' tri-ethylene glycol (TEG)"
acaucaaggaagauggcauuuc

SEQ ID NO: 7486 - DNA, 21 bp, Artificial Sequence
  source: /note="Description of Artificial Sequence: Synthetic oligonucleotide"
  source: /note="Description of Combined DNA/RNA Molecule: Synthetic oligonucleotide"
  source: /note="DNA/RNA"
  modified_base (1)..(1): bicyclic nucleic acid (BNA)
  modified_base (21)..(21): bicyclic nucleic acid (BNA)
  source: /note="3' tri-ethylene glycol (TEG)"
acaucaaggaagauggcauut

SEQ ID NO: 7487 - DNA, 20 bp, Artificial Sequence
  source: /note="Description of Artificial Sequence: Synthetic oligonucleotide"
  source: /note="Description of Combined DNA/RNA Molecule: Synthetic oligonucleotide"
  source: /note="DNA/RNA"
  modified_base (1)..(1): bicyclic nucleic acid (BNA)
  modified_base (20)..(20): bicyclic nucleic acid (BNA)
  source: /note="3' tri-ethylene glycol (TEG)"
acaucaaggaagauggcaut

SEQ ID NO: 7488 - DNA, 19 bp, Artificial Sequence
  source: /note="Description of Artificial Sequence: Synthetic oligonucleotide"
  source: /note="Description of Combined DNA/RNA Molecule: Synthetic oligonucleotide"
  source: /note="DNA/RNA"
  modified_base (1)..(1): bicyclic nucleic acid (BNA)
  modified_base (19)..(19): bicyclic nucleic acid (BNA)
  source: /note="3' tri-ethylene glycol (TEG)"
acaucaaggaagauggcat

SEQ ID NO: 7489 - RNA, 18 nt, Artificial Sequence
  source: /note="Description of Artificial Sequence: Synthetic oligonucleotide"
  source: /note="RNA"
  modified_base (1)..(1): bicyclic nucleic acid (BNA)
  modified_base (18)..(18): bicyclic nucleic acid (BNA)
  source: /note="3' tri-ethylene glycol (TEG)"
acaucaaggaagauggca

SEQ ID NO: 7490 - RNA, 17 nt, Artificial Sequence
  source: /note="Description of Artificial Sequence: Synthetic oligonucleotide"
  source: /note="RNA"
  modified_base (1)..(1): bicyclic nucleic acid (BNA)
  modified_base (17)..(17): bicyclic nucleic acid (BNA)
  source: /note="3' tri-ethylene glycol (TEG)"
acaucaaggaagauggc

SEQ ID NO: 7491 - RNA, 16 nt, Artificial Sequence
  source: /note="Description of Artificial Sequence: Synthetic oligonucleotide"
  source: /note="RNA"
  modified_base (1)..(1): bicyclic nucleic acid (BNA)
  modified_base (16)..(16): bicyclic nucleic acid (BNA)
  source: /note="3' tri-ethylene glycol (TEG)"
acaucaaggaagaugg

SEQ ID NO: 7492 - RNA, 15 nt, Artificial Sequence
  source: /note="Description of Artificial Sequence: Synthetic oligonucleotide"
  source: /note="RNA"
  modified_base (1)..(1): bicyclic nucleic acid (BNA)
  modified_base (15)..(15): bicyclic nucleic acid (BNA)
  source: /note="3' tri-ethylene glycol (TEG)"
acaucaaggaagaug

SEQ ID NO: 7493 - DNA, 14 bp, Artificial Sequence
  source: /note="Description of Artificial Sequence: Synthetic oligonucleotide"
  source: /note="Description of Combined DNA/RNA Molecule: Synthetic oligonucleotide"
  source: /note="DNA/RNA"
  modified_base (1)..(1): bicyclic nucleic acid (BNA)
  modified_base (14)..(14): bicyclic nucleic acid (BNA)
  source: /note="3' tri-ethylene glycol (TEG)"
acaucaaggaagat

SEQ ID NO: 7494 - RNA, 13 nt, Artificial Sequence
  source: /note="Description of Artificial Sequence: Synthetic oligonucleotide"
  source: /note="RNA"
  modified_base (1)..(1): bicyclic nucleic acid (BNA)
  modified_base (13)..(13): bicyclic nucleic acid (BNA)
  source: /note="3' tri-ethylene glycol (TEG)"
acaucaaggaaga

SEQ ID NO: 7495 - RNA, 12 nt, Artificial Sequence
  source: /note="Description of Artificial Sequence: Synthetic oligonucleotide"
  source: /note="RNA"
  modified_base (1)..(1): bicyclic nucleic acid (BNA)
  modified_base (12)..(12): bicyclic nucleic acid (BNA)
  source: /note="3' tri-ethylene glycol (TEG)"
acaucaaggaag

SEQ ID NO: 7496 - RNA, 24 nt, Artificial Sequence
  source: /note="Description of Artificial Sequence: Synthetic oligonucleotide"
  source: /note="RNA"
  modified_base (1)..(1): bicyclic nucleic acid (BNA)
  modified_base (24)..(24): bicyclic nucleic acid (BNA)
  source: /note="3' tri-ethylene glycol (TEG)"
caucaaggaagauggcauuucuag

SEQ ID NO: 7497 - RNA, 23 nt, Artificial Sequence
  source: /note="Description of Artificial Sequence: Synthetic oligonucleotide"
  source: /note="RNA"
  modified_base (1)..(1): bicyclic nucleic acid (BNA)
  modified_base (23)..(23): bicyclic nucleic acid (BNA)
  source: /note="3' tri-ethylene glycol (TEG)"
caucaaggaagauggcauuucua

SEQ ID NO: 7498 - DNA, 22 bp, Artificial Sequence
  source: /note="Description of Artificial Sequence: Synthetic oligonucleotide"
  source: /note="Description of Combined DNA/RNA Molecule: Synthetic oligonucleotide"
  source: /note="DNA/RNA"
  modified_base (1)..(1): bicyclic nucleic acid (BNA)
  modified_base (22)..(22): bicyclic nucleic acid (BNA)
  source: /note="3' tri-ethylene glycol (TEG)"
caucaaggaagauggcauuuct

SEQ ID NO: 7499 - RNA, 21 nt, Artificial Sequence
  source: /note="Description of Artificial Sequence: Synthetic oligonucleotide"
  source: /note="RNA"
  modified_base (1)..(1): bicyclic nucleic acid (BNA)
  modified_base (21)..(21): bicyclic nucleic acid (BNA)
  source: /note="3' tri-ethylene glycol (TEG)"
caucaaggaagauggcauuuc

SEQ ID NO: 7500 - DNA, 20 bp, Artificial Sequence
  source: /note="Description of Artificial Sequence: Synthetic oligonucleotide"
  source: /note="Description of Combined DNA/RNA Molecule: Synthetic oligonucleotide"
  source: /note="DNA/RNA"
  modified_base (1)..(1): bicyclic nucleic acid (BNA)
  modified_base (20)..(20): bicyclic nucleic acid (BNA)
  source: /note="3' tri-ethylene glycol (TEG)"
caucaaggaagauggcauut

SEQ ID NO: 7501 - DNA, 19 bp, Artificial Sequence
  source: /note="Description of Artificial Sequence: Synthetic oligonucleotide"
  source: /note="Description of Combined DNA/RNA Molecule: Synthetic oligonucleotide"
  source: /note="DNA/RNA"
  modified_base (1)..(1): bicyclic nucleic acid (BNA)
  modified_base (19)..(19): bicyclic nucleic acid (BNA)
  source: /note="3' tri-ethylene glycol (TEG)"
caucaaggaagauggcaut

SEQ ID NO: 7502 - DNA, 18 bp, Artificial Sequence
  source: /note="Description of Artificial Sequence: Synthetic oligonucleotide"
  source: /note="Description of Combined DNA/RNA Molecule: Synthetic oligonucleotide"
  source: /note="DNA/RNA"
  modified_base (1)..(1): bicyclic nucleic acid (BNA)
  modified_base (18)..(18): bicyclic nucleic acid (BNA)
  source: /note="3' tri-ethylene glycol (TEG)"
caucaaggaagauggcat

SEQ ID NO: 7503 - RNA, 17 nt, Artificial Sequence
  source: /note="Description of Artificial Sequence: Synthetic oligonucleotide"
  source: /note="RNA"
  modified_base (1)..(1): bicyclic nucleic acid (BNA)
  modified_base (17)..(17): bicyclic nucleic acid (BNA)
  source: /note="3' tri-ethylene glycol (TEG)"
caucaaggaagauggca

SEQ ID NO: 7504 - RNA, 16 nt, Artificial Sequence
  source: /note="Description of Artificial Sequence: Synthetic oligonucleotide"
  source: /note="RNA"
  modified_base (1)..(1): bicyclic nucleic acid (BNA)
  modified_base (16)..(16): bicyclic nucleic acid (BNA)
  source: /note="3' tri-ethylene glycol (TEG)"
caucaaggaagauggc

SEQ ID NO: 7505 - RNA, 15 nt, Artificial Sequence
  source: /note="Description of Artificial Sequence: Synthetic oligonucleotide"
  source: /note="RNA"
  modified_base (1)..(1): bicyclic nucleic acid (BNA)
  modified_base (15)..(15): bicyclic nucleic acid (BNA)
  source: /note="3' tri-ethylene glycol (TEG)"
caucaaggaagaugg

SEQ ID NO: 7506 - RNA, 14 nt, Artificial Sequence
  source: /note="Description of Artificial Sequence: Synthetic oligonucleotide"
  source: /note="RNA"
  modified_base (1)..(1): bicyclic nucleic acid (BNA)
  modified_base (14)..(14): bicyclic nucleic acid (BNA)
  source: /note="3' tri-ethylene glycol (TEG)"
caucaaggaagaug

SEQ ID NO: 7507 - DNA, 13 bp, Artificial Sequence
  source: /note="Description of Artificial Sequence: Synthetic oligonucleotide"
  source: /note="Description of Combined DNA/RNA Molecule: Synthetic oligonucleotide"
  source: /note="DNA/RNA"
  modified_base (1)..(1): bicyclic nucleic acid (BNA)
  modified_base (13)..(13): bicyclic nucleic acid (BNA)
  source: /note="3' tri-ethylene glycol (TEG)"
caucaaggaagat

SEQ ID NO: 7508 - RNA, 12 nt, Artificial Sequence
  source: /note="Description of Artificial Sequence: Synthetic oligonucleotide"
  source: /note="RNA"
  modified_base (1)..(1): bicyclic nucleic acid (BNA)
  modified_base (12)..(12): bicyclic nucleic acid (BNA)
  source: /note="3' tri-ethylene glycol (TEG)"
caucaaggaaga

SEQ ID NO: 7509 - RNA, 11 nt, Artificial Sequence
  source: /note="Description of Artificial Sequence: Synthetic oligonucleotide"
  source: /note="RNA"
  modified_base (1)..(1): bicyclic nucleic acid (BNA)
  modified_base (11)..(11): bicyclic nucleic acid (BNA)
  source: /note="3' tri-ethylene glycol (TEG)"
caucaaggaag

SEQ ID NO: 7510 - RNA, 23 nt, Artificial Sequence
  source: /note="Description of Artificial Sequence: Synthetic oligonucleotide"
  source: /note="RNA"
  modified_base (1)..(1): bicyclic nucleic acid (BNA)
  modified_base (23)..(23): bicyclic nucleic acid (BNA)
  source: /note="3' tri-ethylene glycol (TEG)"
aucaaggaagauggcauuucuag

SEQ ID NO: 7511 - RNA, 22 nt, Artificial Sequence
  source: /note="Description of Artificial Sequence: Synthetic oligonucleotide"
  source: /note="RNA"
  modified_base (1)..(1): bicyclic nucleic acid (BNA)
  modified_base (22)..(22): bicyclic nucleic acid (BNA)
  source: /note="3' tri-ethylene glycol (TEG)"
aucaaggaagauggcauuucua

SEQ ID NO: 7512 - DNA, 21 bp, Artificial Sequence
  source: /note="Description of Artificial Sequence: Synthetic oligonucleotide"
  source: /note="Description of Combined DNA/RNA Molecule: Synthetic oligonucleotide"
  source: /note="DNA/RNA"
  modified_base (1)..(1): bicyclic nucleic acid (BNA)
  modified_base (21)..(21): bicyclic nucleic acid (BNA)
  source: /note="3' tri-ethylene glycol (TEG)"
aucaaggaagauggcauuuct

SEQ ID NO: 7513 - RNA, 20 nt, Artificial Sequence
  source: /note="Description of Artificial Sequence: Synthetic oligonucleotide"
  source: /note="RNA"
  modified_base (1)..(1): bicyclic nucleic acid (BNA)
  modified_base (20)..(20): bicyclic nucleic acid (BNA)
  source: /note="3' tri-ethylene glycol (TEG)"
aucaaggaagauggcauuuc

SEQ ID NO: 7514 - DNA, 19 bp, Artificial Sequence
  source: /note="Description of Artificial Sequence: Synthetic oligonucleotide"
  source: /note="Description of Combined DNA/RNA Molecule: Synthetic oligonucleotide"
  source: /note="DNA/RNA"
  modified_base (1)..(1): bicyclic nucleic acid (BNA)
  modified_base (19)..(19): bicyclic nucleic acid (BNA)
  source: /note="3' tri-ethylene glycol (TEG)"
aucaaggaagauggcauut

SEQ ID NO: 7515 - DNA, 18 bp, Artificial Sequence
  source: /note="Description of Artificial Sequence: Synthetic oligonucleotide"
  source: /note="Description of Combined DNA/RNA Molecule: Synthetic oligonucleotide"
  source: /note="DNA/RNA"
  modified_base (1)..(1): bicyclic nucleic acid (BNA)
  modified_base (18)..(18): bicyclic nucleic acid (BNA)
  source: /note="3' tri-ethylene glycol (TEG)"
aucaaggaagauggcaut

SEQ ID NO: 7516 - DNA, 17 bp, Artificial Sequence
  source: /note="Description of Artificial Sequence: Synthetic oligonucleotide"
  source: /note="Description of Combined DNA/RNA Molecule: Synthetic oligonucleotide"
  source: /note="DNA/RNA"
  modified_base (1)..(1): bicyclic nucleic acid (BNA)
  modified_base (17)..(17): bicyclic nucleic acid (BNA)
  source: /note="3' tri-ethylene glycol (TEG)"
aucaaggaagauggcat

SEQ ID NO: 7517 - RNA, 16 nt, Artificial Sequence
  source: /note="Description of Artificial Sequence: Synthetic oligonucleotide"
  source: /note="RNA"
  modified_base (1)..(1): bicyclic nucleic acid (BNA)
  modified_base (16)..(16): bicyclic nucleic acid (BNA)
  source: /note="3' tri-ethylene glycol (TEG)"
aucaaggaagauggca

SEQ ID NO: 7518 - RNA, 15 nt, Artificial Sequence
  source: /note="Description of Artificial Sequence: Synthetic oligonucleotide"
  source: /note="RNA"
  modified_base (1)..(1): bicyclic nucleic acid (BNA)
  modified_base (15)..(15): bicyclic nucleic acid (BNA)
  source: /note="3' tri-ethylene glycol (TEG)"
aucaaggaagauggc

SEQ ID NO: 7519 - RNA, 14 nt, Artificial Sequence
  source: /note="Description of Artificial Sequence: Synthetic oligonucleotide"
  source: /note="RNA"
  modified_base (1)..(1): bicyclic nucleic acid (BNA)
  modified_base (14)..(14): bicyclic nucleic acid (BNA)
  source: /note="3' tri-ethylene glycol (TEG)"
aucaaggaagaugg

SEQ ID NO: 7520 - RNA, 13 nt, Artificial Sequence
  source: /note="Description of Artificial Sequence: Synthetic oligonucleotide"
  source: /note="RNA"
  modified_base (1)..(1): bicyclic nucleic acid (BNA)
  modified_base (13)..(13): bicyclic nucleic acid (BNA)
  source: /note="3' tri-ethylene glycol (TEG)"
aucaaggaagaug

SEQ ID NO: 7521 - DNA, 12 bp, Artificial Sequence
  source: /note="Description of Artificial Sequence: Synthetic oligonucleotide"
  source: /note="Description of Combined DNA/RNA Molecule: Synthetic oligonucleotide"
  source: /note="DNA/RNA"
  modified_base (1)..(1): bicyclic nucleic acid (BNA)
  modified_base (12)..(12): bicyclic nucleic acid (BNA)
  source: /note="3' tri-ethylene glycol (TEG)"
aucaaggaagat

SEQ ID NO: 7522 - RNA, 11 nt, Artificial Sequence
  source: /note="Description of Artificial Sequence: Synthetic oligonucleotide"
  source: /note="RNA"
  modified_base (1)..(1): bicyclic nucleic acid (BNA)
  modified_base (11)..(11): bicyclic nucleic acid (BNA)
  source: /note="3' tri-ethylene glycol (TEG)"
aucaaggaaga

SEQ ID NO: 7523 - RNA, 10 nt, Artificial Sequence
  source: /note="Description of Artificial Sequence: Synthetic oligonucleotide"
  source: /note="RNA"
  modified_base (1)..(1): bicyclic nucleic acid (BNA)
  modified_base (10)..(10): bicyclic nucleic acid (BNA)
  source: /note="3' tri-ethylene glycol (TEG)"
aucaaggaag

SEQ ID NO: 7524 - RNA, 23 nt, Artificial Sequence
  source: /note="Description of Artificial Sequence: Synthetic oligonucleotide"
  source: /note="RNA"
  modified_base (1)..(1): bicyclic nucleic acid (BNA)
  modified_base (23)..(23): bicyclic nucleic acid (BNA)
  source: /note="3' tri-ethylene glycol (TEG)"
ccagagcagguaccuccaacauc

SEQ ID NO: 7525 - RNA, 18 nt, Artificial Sequence
  source: /note="Description of Artificial Sequence: Synthetic oligonucleotide"
  source: /note="RNA"
  modified_base (1)..(1): bicyclic nucleic acid (BNA)
  modified_base (18)..(18): bicyclic nucleic acid (BNA)
  source: /note="3' tri-ethylene glycol (TEG)"
ccagagcagguaccucca

SEQ ID NO: 7526 - DNA, 23 bp, Artificial Sequence
  source: /note="Description of Artificial Sequence: Synthetic oligonucleotide"
  source: /note="Description of Combined DNA/RNA Molecule: Synthetic oligonucleotide"
  source: /note="DNA/RNA"
  modified_base (1)..(1): bicyclic nucleic acid (BNA)
  modified_base (23)..(23): bicyclic nucleic acid (BNA)
  source: /note="3' tri-ethylene glycol (TEG)"
ccucugugauuuuauaacuugat

SEQ ID NO: 7527 - DNA, 17 bp, Artificial Sequence
  source: /note="Description of Artificial Sequence: Synthetic oligonucleotide"
  source: /note="Description of Combined DNA/RNA Molecule: Synthetic oligonucleotide"
  source: /note="DNA/RNA"
  modified_base (1)..(1): bicyclic nucleic acid (BNA)
  modified_base (17)..(17): bicyclic nucleic acid (BNA)
  source: /note="3' tri-ethylene glycol (TEG)"
tcacccaccaucaccct

SEQ ID NO: 7528 - DNA, 20 bp, Artificial Sequence
  source: /note="Description of Artificial Sequence: Synthetic oligonucleotide"
  source: /note="Description of Combined DNA/RNA Molecule: Synthetic oligonucleotide"
  source: /note="DNA/RNA"
  modified_base (1)..(1): bicyclic nucleic acid (BNA)
  modified_base (20)..(20): bicyclic nucleic acid (BNA)
  source: /note="3' tri-ethylene glycol (TEG)"
tgauauccucaaggucaccc

SEQ ID NO: 7529 - RNA, 22 nt, Artificial Sequence
  source: /note="Description of Artificial Sequence: Synthetic oligonucleotide"
  source: /note="RNA"
  modified_base (1)..(1): bicyclic nucleic acid (BNA)
  modified_base (22)..(22): bicyclic nucleic acid (BNA)
  source: /note="3' tri-ethylene glycol (TEG)"
cugcuugaugaucaucucguug

SEQ ID NO: 7530 - RNA, 18 nt, Artificial Sequence
  source: /note="Description of Artificial Sequence: Synthetic oligonucleotide"
  source: /note="RNA"
  modified_base (1)..(1): bicyclic nucleic acid (BNA)
  modified_base (18)..(18): bicyclic nucleic acid (BNA)
  source: /note="3' tri-ethylene glycol (TEG)"
cugcuugaugaucaucuc

SEQ ID NO: 7531 - RNA, 19 nt, Artificial Sequence
  source: /note="Description of Artificial Sequence: Synthetic oligonucleotide"
  source: /note="RNA"
  modified_base (1)..(1): bicyclic nucleic acid (BNA)
  modified_base (19)..(19): bicyclic nucleic acid (BNA)
  source: /note="3' tri-ethylene glycol (TEG)"
guuuccuuaguaaccacag

SEQ ID NO: 7532 - RNA, 17 nt, Artificial Sequence
  source: /note="Description of Artificial Sequence: Synthetic oligonucleotide"
  source: /note="RNA"
  modified_base (1)..(1): bicyclic nucleic acid (BNA)
  modified_base (17)..(17): bicyclic nucleic acid (BNA)
  source: /note="3' tri-ethylene glycol (TEG)"
guuuccuuaguaaccac

SEQ ID NO: 7533 - DNA, 20 bp, Artificial Sequence
  source: /note="Description of Artificial Sequence: Synthetic oligonucleotide"
  source: /note="Description of Combined DNA/RNA Molecule: Synthetic oligonucleotide"
  source: /note="DNA/RNA"
  source: /note="5' tri-ethylene glycol (TEG)"
  modified_base (1)..(1): bicyclic nucleic acid (BNA)
  modified_base (20)..(20): bicyclic nucleic acid (BNA)
  source: /note="3' tri-ethylene glycol (TEG)"
tcaaggaagauggcauuuct

SEQ ID NO: 7534 - DNA, 22 bp, Artificial Sequence
  source: /note="Description of Artificial Sequence: Synthetic oligonucleotide"
  source: /note="Description of Combined DNA/RNA Molecule: Synthetic oligonucleotide"
  source: /note="DNA/RNA"
  source: /note="5' tri-ethylene glycol (TEG)"
  modified_base (1)..(1): bicyclic nucleic acid (BNA)
  modified_base (22)..(22): bicyclic nucleic acid (BNA)
  source: /note="3' tri-ethylene glycol (TEG)"
tcaaggaagauggcauuucuag

SEQ ID NO: 7535 - RNA, 18 nt, Artificial Sequence
  source: /note="Description of Artificial Sequence: Synthetic oligonucleotide"
  source: /note="RNA"
  source: /note="5' tri-ethylene glycol (TEG)"
  modified_base (1)..(1): bicyclic nucleic acid (BNA)
  modified_base (18)..(18): bicyclic nucleic acid (BNA)
  source: /note="3' tri-ethylene glycol (TEG)"
gguaaguucuguccaagc

SEQ ID NO: 7536 - RNA, 18 nt, Artificial Sequence
  source: /note="Description of Artificial Sequence: Synthetic oligonucleotide"
  source: /note="RNA"
  source: /note="5' tri-ethylene glycol (TEG)"
  modified_base (1)..(1): bicyclic nucleic acid (BNA)
  modified_base (18)..(18): bicyclic nucleic acid (BNA)
  source: /note="3' tri-ethylene glycol (TEG)"
guaaguucuguccaagcc

SEQ ID NO: 7537 - RNA, 18 nt, Artificial Sequence
  source: /note="Description of Artificial Sequence: Synthetic oligonucleotide"
  source: /note="RNA"
  source: /note="5' tri-ethylene glycol (TEG)"
  modified_base (1)..(1): bicyclic nucleic acid (BNA)
  modified_base (18)..(18): bicyclic nucleic acid (BNA)
  source: /note="3' tri-ethylene glycol (TEG)"
agucgguaaguucugucc

SEQ ID NO: 7538 - RNA, 18 nt, Artificial Sequence
  source: /note="Description of Artificial Sequence: Synthetic oligonucleotide"
  source: /note="RNA"
  source: /note="5' tri-ethylene glycol (TEG)"
  modified_base (1)..(1): bicyclic nucleic acid (BNA)
  modified_base (18)..(18): bicyclic nucleic acid (BNA)
  source: /note="3' tri-ethylene glycol (TEG)"
cuguccaagcccgguuga

SEQ ID NO: 7539 - DNA, 15 bp, Artificial Sequence
  source: /note="Description of Artificial Sequence: Synthetic oligonucleotide"
  source: /note="Description of Combined DNA/RNA Molecule: Synthetic oligonucleotide"
  source: /note="DNA/RNA"
  source: /note="5' tri-ethylene glycol (TEG)"
  modified_base (1)..(1): bicyclic nucleic acid (BNA)
  modified_base (15)..(15): bicyclic nucleic acid (BNA)
  source: /note="3' tri-ethylene glycol (TEG)"
taaguucuguccaag

SEQ ID NO: 7540 - DNA, 20 bp, Artificial Sequence
  source: /note="Description of Artificial Sequence: Synthetic oligonucleotide"
  source: /note="Description of Combined DNA/RNA Molecule: Synthetic oligonucleotide"
  source: /note="DNA/RNA"
  source: /note="5' tri-ethylene glycol (TEG)"
  modified_base (1)..(1): bicyclic nucleic acid (BNA)
  modified_base (20)..(20): bicyclic nucleic acid (BNA)
  source: /note="3' tri-ethylene glycol (TEG)"
tucuguccaagcccgguuga

SEQ ID NO: 7541 - DNA, 19 bp, Artificial Sequence
  source: /note="Description of Artificial Sequence: Synthetic oligonucleotide"
  source: /note="Description of Combined DNA/RNA Molecule: Synthetic oligonucleotide"
  source: /note="DNA/RNA"
  source: /note="5' tri-ethylene glycol (TEG)"
  modified_base (1)..(1): bicyclic nucleic acid (BNA)
  modified_base (19)..(19): bicyclic nucleic acid (BNA)
  source: /note="3' tri-ethylene glycol (TEG)"
tucuguccaagcccgguug

SEQ ID NO: 7542 - DNA, 18 bp, Artificial Sequence
  source: /note="Description of Artificial Sequence: Synthetic oligonucleotide"
  source: /note="Description of Combined DNA/RNA Molecule: Synthetic oligonucleotide"
  source: /note="DNA/RNA"
  source: /note="5' tri-ethylene glycol (TEG)"
  modified_base (1)..(1): bicyclic nucleic acid (BNA)
  modified_base (18)..(18): bicyclic nucleic acid (BNA)
  source: /note="3' tri-ethylene glycol (TEG)"
tucuguccaagcccggut

SEQ ID NO: 7543 - DNA, 17 bp, Artificial Sequence
  source: /note="Description of Artificial Sequence: Synthetic oligonucleotide"
  source: /note="Description of Combined DNA/RNA Molecule: Synthetic oligonucleotide"
  source: /note="DNA/RNA"
  source: /note="5' tri-ethylene glycol (TEG)"
  modified_base (1)..(1): bicyclic nucleic acid (BNA)
  modified_base (17)..(17): bicyclic nucleic acid (BNA)
  source: /note="3' tri-ethylene glycol (TEG)"
tucuguccaagcccggt

SEQ ID NO: 7544 - DNA, 16 bp, Artificial Sequence
  source: /note="Description of Artificial Sequence: Synthetic oligonucleotide"
  source: /note="Description of Combined DNA/RNA Molecule: Synthetic oligonucleotide"
  source: /note="DNA/RNA"
  source: /note="5' tri-ethylene glycol (TEG)"
  modified_base (1)..(1): bicyclic nucleic acid (BNA)
  modified_base (16)..(16): bicyclic nucleic acid (BNA)
  source: /note="3' tri-ethylene glycol (TEG)"
tucuguccaagcccgg

SEQ ID NO: 7545 - DNA, 15 bp, Artificial Sequence
  source: /note="Description of Artificial Sequence: Synthetic oligonucleotide"
  source: /note="Description of Combined DNA/RNA Molecule: Synthetic oligonucleotide"
  source: /note="DNA/RNA"
  source: /note="5' tri-ethylene glycol (TEG)"
  modified_base (1)..(1): bicyclic nucleic acid (BNA)
  modified_base (15)..(15): bicyclic nucleic acid (BNA)
  source: /note="3' tri-ethylene glycol (TEG)"
tucuguccaagcccg

SEQ ID NO: 7546 - DNA, 14 bp, Artificial Sequence
  source: /note="Description of Artificial Sequence: Synthetic oligonucleotide"
  source: /note="Description of Combined DNA/RNA Molecule: Synthetic oligonucleotide"
  source: /note="DNA/RNA"
  source: /note="5' tri-ethylene glycol (TEG)"
  modified_base (1)..(1): bicyclic nucleic acid (BNA)
  modified_base (14)..(14): bicyclic nucleic acid (BNA)
  source: /note="3' tri-ethylene glycol (TEG)"
tucuguccaagccc

SEQ ID NO: 7547 - DNA, 13 bp, Artificial Sequence
  source: /note="Description of Artificial Sequence: Synthetic oligonucleotide"
  source: /note="Description of Combined DNA/RNA Molecule: Synthetic oligonucleotide"
  source: /note="DNA/RNA"
  source: /note="5' tri-ethylene glycol (TEG)"
  modified_base (1)..(1): bicyclic nucleic acid (BNA)
  modified_base (13)..(13): bicyclic nucleic acid (BNA)
  source: /note="3' tri-ethylene glycol (TEG)"
tucuguccaagcc

SEQ ID NO: 7548 - DNA, 12 bp, Artificial Sequence
  source: /note="Description of Artificial Sequence: Synthetic oligonucleotide"
  source: /note="Description of Combined DNA/RNA Molecule: Synthetic oligonucleotide"
  source: /note="DNA/RNA"
  source: /note="5' tri-ethylene glycol (TEG)"
  modified_base (1)..(1): bicyclic nucleic acid (BNA)
  modified_base (12)..(12): bicyclic nucleic acid (BNA)
  source: /note="3' tri-ethylene glycol (TEG)"
tucuguccaagc

SEQ ID NO: 7549 - DNA, 11 bp, Artificial Sequence
  source: /note="Description of Artificial Sequence: Synthetic oligonucleotide"
  source: /note="Description of Combined DNA/RNA Molecule: Synthetic oligonucleotide"
  source: /note="DNA/RNA"
  source: /note="5' tri-ethylene glycol (TEG)"
  modified_base (1)..(1): bicyclic nucleic acid (BNA)
  modified_base (11)..(11): bicyclic nucleic acid (BNA)
  source: /note="3' tri-ethylene glycol (TEG)"
tucuguccaag

SEQ ID NO: 7550 - DNA, 10 bp, Artificial Sequence
  source: /note="Description of Artificial Sequence: Synthetic oligonucleotide"
  source: /note="Description of Combined DNA/RNA Molecule: Synthetic oligonucleotide"
  source: /note="DNA/RNA"
  source: /note="5' tri-ethylene glycol (TEG)"
  modified_base (1)..(1): bicyclic nucleic acid (BNA)
  modified_base (10)..(10): bicyclic nucleic acid (BNA)
  source: /note="3' tri-ethylene glycol (TEG)"
tucuguccaa

SEQ ID NO: 7551 - DNA, 9 bp, Artificial Sequence
  source: /note="Description of Artificial Sequence: Synthetic oligonucleotide"
  source: /note="Description of Combined DNA/RNA Molecule: Synthetic oligonucleotide"
  source: /note="DNA/RNA"
  source: /note="5' tri-ethylene glycol (TEG)"
  modified_base (1)..(1): bicyclic nucleic acid (BNA)
  modified_base (9)..(9): bicyclic nucleic acid (BNA)
  source: /note="3' tri-ethylene glycol (TEG)"
tucugucca

SEQ ID NO: 7552 - DNA, 8 bp, Artificial Sequence
  source: /note="Description of Artificial Sequence: Synthetic oligonucleotide"
  source: /note="Description of Combined DNA/RNA Molecule: Synthetic oligonucleotide"
  source: /note="DNA/RNA"
  source: /note="5' tri-ethylene glycol (TEG)"
  modified_base (1)..(1): bicyclic nucleic acid (BNA)
  modified_base (8)..(8): bicyclic nucleic acid (BNA)
  source: /note="3' tri-ethylene glycol (TEG)"
tucugucc

SEQ ID NO: 7553 - DNA, 19 bp, Artificial Sequence
  source: /note="Description of Artificial Sequence: Synthetic oligonucleotide"
  source: /note="Description of Combined DNA/RNA Molecule: Synthetic oligonucleotide"
  source: /note="DNA/RNA"
  source: /note="5' tri-ethylene glycol (TEG)"
  modified_base (1)..(1): bicyclic nucleic acid (BNA)
  modified_base (19)..(19): bicyclic nucleic acid (BNA)
  source: /note="3' tri-ethylene glycol (TEG)"
tcuguccaagcccgguuga

SEQ ID NO: 7554 - DNA, 18 bp, Artificial Sequence
  source: /note="Description of Artificial Sequence: Synthetic oligonucleotide"
  source: /note="Description of Combined DNA/RNA Molecule: Synthetic oligonucleotide"
  source: /note="DNA/RNA"
  source: /note="5' tri-ethylene glycol (TEG)"
  modified_base (1)..(1): bicyclic nucleic acid (BNA)
  modified_base (18)..(18): bicyclic nucleic acid (BNA)
  source: /note="3' tri-ethylene glycol (TEG)"
tcuguccaagcccgguug

SEQ ID NO: 7555 - DNA, 17 bp, Artificial Sequence
  source: /note="Description of Artificial Sequence: Synthetic oligonucleotide"
  source: /note="Description of Combined DNA/RNA Molecule: Synthetic oligonucleotide"
  source: /note="DNA/RNA"
  source: /note="5' tri-ethylene glycol (TEG)"
  modified_base (1)..(1): bicyclic nucleic acid (BNA)
  modified_base (17)..(17): bicyclic nucleic acid (BNA)
  source: /note="3' tri-ethylene glycol (TEG)"
tcuguccaagcccggut

SEQ ID NO: 7556 - DNA, 16 bp, Artificial Sequence
  source: /note="Description of Artificial Sequence: Synthetic oligonucleotide"
  source: /note="Description of Combined DNA/RNA Molecule: Synthetic oligonucleotide"
  source: /note="DNA/RNA"
  source: /note="5' tri-ethylene glycol (TEG)"
  modified_base (1)..(1): bicyclic nucleic acid (BNA)
  modified_base (16)..(16): bicyclic nucleic acid (BNA)
  source: /note="3' tri-ethylene glycol (TEG)"
tcuguccaagcccggt

SEQ ID NO: 7557 - DNA, 15 bp, Artificial Sequence
  source: /note="Description of Artificial Sequence: Synthetic oligonucleotide"
  source: /note="Description of Combined DNA/RNA Molecule: Synthetic oligonucleotide"
  source: /note="DNA/RNA"
  source: /note="5' tri-ethylene glycol (TEG)"
  modified_base (1)..(1): bicyclic nucleic acid (BNA)
  modified_base (15)..(15): bicyclic nucleic acid (BNA)
  source: /note="3' tri-ethylene glycol (TEG)"
tcuguccaagcccgg

SEQ ID NO: 7558 - DNA, 14 bp, Artificial Sequence
  source: /note="Description of Artificial Sequence: Synthetic oligonucleotide"
  source: /note="Description of Combined DNA/RNA Molecule: Synthetic oligonucleotide"
  source: /note="DNA/RNA"
  source: /note="5' tri-ethylene glycol (TEG)"
  modified_base (1)..(1): bicyclic nucleic acid (BNA)
  modified_base (14)..(14): bicyclic nucleic acid (BNA)
  source: /note="3' tri-ethylene glycol (TEG)"
tcuguccaagcccg

SEQ ID NO: 7559 - DNA, 13 bp, Artificial Sequence
  source: /note="Description of Artificial Sequence: Synthetic oligonucleotide"
  source: /note="Description of Combined DNA/RNA Molecule: Synthetic oligonucleotide"
  source: /note="DNA/RNA"
  source: /note="5' tri-ethylene glycol (TEG)"
  modified_base (1)..(1): bicyclic nucleic acid (BNA)
  modified_base (13)..(13): bicyclic nucleic acid (BNA)
  source: /note="3' tri-ethylene glycol (TEG)"
tcuguccaagccc

SEQ ID NO: 7560 - DNA, 12 bp, Artificial Sequence
  source: /note="Description of Artificial Sequence: Synthetic oligonucleotide"
  source: /note="Description of Combined DNA/RNA Molecule: Synthetic oligonucleotide"
  source: /note="DNA/RNA"
  source: /note="5' tri-ethylene glycol (TEG)"
  modified_base (1)..(1): bicyclic nucleic acid (BNA)
  modified_base (12)..(12): bicyclic nucleic acid (BNA)
  source: /note="3' tri-ethylene glycol (TEG)"
tcuguccaagcc

SEQ ID NO: 7561 - DNA, 11 bp, Artificial Sequence
  source: /note="Description of Artificial Sequence: Synthetic oligonucleotide"
  source: /note="Description of Combined DNA/RNA Molecule: Synthetic oligonucleotide"
  source: /note="DNA/RNA"
  source: /note="5' tri-ethylene glycol (TEG)"
  modified_base (1)..(1): bicyclic nucleic acid (BNA)
  modified_base (11)..(11): bicyclic nucleic acid (BNA)
  source: /note="3' tri-ethylene glycol (TEG)"
tcuguccaagc

SEQ ID NO: 7562 - DNA, 10 bp, Artificial Sequence
  source: /note="Description of Artificial Sequence: Synthetic oligonucleotide"
  source: /note="Description of Combined DNA/RNA Molecule: Synthetic oligonucleotide"
  source: /note="DNA/RNA"
  source: /note="5' tri-ethylene glycol (TEG)"
  modified_base (1)..(1): bicyclic nucleic acid (BNA)
  modified_base (10)..(10): bicyclic nucleic acid (BNA)
  source: /note="3' tri-ethylene glycol (TEG)"
tcuguccaag

SEQ ID NO: 7563 - DNA, 9 bp, Artificial Sequence
  source: /note="Description of Artificial Sequence: Synthetic oligonucleotide"
  source: /note="Description of Combined DNA/RNA Molecule: Synthetic oligonucleotide"
  source: /note="DNA/RNA"
  source: /note="5' tri-ethylene glycol (TEG)"
  modified_base (1)..(1): bicyclic nucleic acid (BNA)
  modified_base (9)..(9): bicyclic nucleic acid (BNA)
  source: /note="3' tri-ethylene glycol (TEG)"
tcuguccaa

SEQ ID NO: 7564 - DNA, 8 bp, Artificial Sequence
  source: /note="Description of Artificial Sequence: Synthetic oligonucleotide"
  source: /note="Description of Combined DNA/RNA Molecule: Synthetic oligonucleotide"
  source: /note="DNA/RNA"
  source: /note="5' tri-ethylene glycol (TEG)"
  modified_base (1)..(1): bicyclic nucleic acid (BNA)
  modified_base (8)..(8): bicyclic nucleic acid (BNA)
  source: /note="3' tri-ethylene glycol (TEG)"
tcugucca

SEQ ID NO: 7565 - RNA, 17 nt, Artificial Sequence
  source: /note="Description of Artificial Sequence: Synthetic oligonucleotide"
  source: /note="RNA"
  source: /note="5' tri-ethylene glycol (TEG)"
  modified_base (1)..(1): bicyclic nucleic acid (BNA)
  modified_base (17)..(17): bicyclic nucleic acid (BNA)
  source: /note="3' tri-ethylene glycol (TEG)"
cuguccaagcccgguug

SEQ ID NO: 7566 - DNA, 16 bp, Artificial Sequence
  source: /note="Description of Artificial Sequence: Synthetic oligonucleotide"
  source: /note="Description of Combined DNA/RNA Molecule: Synthetic oligonucleotide"
  source: /note="DNA/RNA"
  source: /note="5' tri-ethylene glycol (TEG)"
  modified_base (1)..(1): bicyclic nucleic acid (BNA)
  modified_base (16)..(16): bicyclic nucleic acid (BNA)
  source: /note="3' tri-ethylene glycol (TEG)"
cuguccaagcccggut

SEQ ID NO: 7567 - DNA, 15 bp, Artificial Sequence
  source: /note="Description of Artificial Sequence: Synthetic oligonucleotide"
  source: /note="Description of Combined DNA/RNA Molecule: Synthetic oligonucleotide"
  source: /note="DNA/RNA"
  source: /note="5' tri-ethylene glycol (TEG)"
  modified_base (1)..(1): bicyclic nucleic acid (BNA)
  modified_base (15)..(15): bicyclic nucleic acid (BNA)
  source: /note="3' tri-ethylene glycol (TEG)"
cuguccaagcccggt

SEQ ID NO: 7568 - RNA, 14 nt, Artificial Sequence
  source: /note="Description of Artificial Sequence: Synthetic oligonucleotide"
  source: /note="RNA"
  source: /note="5' tri-ethylene glycol (TEG)"
  modified_base (1)..(1): bicyclic nucleic acid (BNA)
  modified_base (14)..(14): bicyclic nucleic acid (BNA)
  source: /note="3' tri-ethylene glycol (TEG)"
cuguccaagcccgg

SEQ ID NO: 7569 - RNA, 13 nt, Artificial Sequence
  source: /note="Description of Artificial Sequence: Synthetic oligonucleotide"
  source: /note="RNA"
  source: /note="5' tri-ethylene glycol (TEG)"
  modified_base (1)..(1): bicyclic nucleic acid (BNA)
  modified_base (13)..(13): bicyclic nucleic acid (BNA)
  source: /note="3' tri-ethylene glycol (TEG)"
cuguccaagcccg

SEQ ID NO: 7570 - RNA, 12 nt, Artificial Sequence
  source: /note="Description of Artificial Sequence: Synthetic oligonucleotide"
  source: /note="RNA"
  source: /note="5' tri-ethylene glycol (TEG)"
  modified_base (1)..(1): bicyclic nucleic acid (BNA)
  modified_base (12)..(12): bicyclic nucleic acid (BNA)
  source: /note="3' tri-ethylene glycol (TEG)"
cuguccaagccc

SEQ ID NO: 7571 - RNA, 11 nt, Artificial Sequence
  source: /note="Description of Artificial Sequence: Synthetic oligonucleotide"
  source: /note="RNA"
  source: /note="5' tri-ethylene glycol (TEG)"
  modified_base (1)..(1): bicyclic nucleic acid (BNA)
  modified_base (11)..(11): bicyclic nucleic acid (BNA)
  source: /note="3' tri-ethylene glycol (TEG)"
cuguccaagcc

SEQ ID NO: 7572 - RNA, 10 nt, Artificial Sequence
  source: /note="Description of Artificial Sequence: Synthetic oligonucleotide"
  source: /note="RNA"
  source: /note="5' tri-ethylene glycol (TEG)"
  modified_base (1)..(1): bicyclic nucleic acid (BNA)
  modified_base (10)..(10): bicyclic nucleic acid (BNA)
  source: /note="3' tri-ethylene glycol (TEG)"
cuguccaagc

SEQ ID NO: 7573 - RNA, 9 nt, Artificial Sequence
  source: /note="Description of Artificial Sequence: Synthetic oligonucleotide"
  source: /note="RNA"
  source: /note="5' tri-ethylene glycol (TEG)"
  modified_base (1)..(1): bicyclic nucleic acid (BNA)
  modified_base (9)..(9): bicyclic nucleic acid (BNA)
  source: /note="3' tri-ethylene glycol (TEG)"
cuguccaag

SEQ ID NO: 7574 - RNA, 8 nt, Artificial Sequence
  source: /note="Description of Artificial Sequence: Synthetic oligonucleotide"
  source: /note="RNA"
  source: /note="5' tri-ethylene glycol (TEG)"
  modified_base (1)..(1): bicyclic nucleic acid (BNA)
  modified_base (8)..(8): bicyclic nucleic acid (BNA)
  source: /note="3' tri-ethylene glycol (TEG)"
cuguccaa

SEQ ID NO: 7575 - RNA, 20 nt, Artificial Sequence
  source: /note="Description of Artificial Sequence: Synthetic oligonucleotide"
  source: /note="RNA"
  source: /note="5' tri-ethylene glycol (TEG)"
  modified_base (1)..(1): bicyclic nucleic acid (BNA)
  modified_base (20)..(20): bicyclic nucleic acid (BNA)
  source: /note="3' tri-ethylene glycol (TEG)"
guucuguccaagcccgguug

SEQ ID NO: 7576 - DNA, 19 bp, Artificial Sequence
  source: /note="Description of Artificial Sequence: Synthetic oligonucleotide"
  source: /note="Description of Combined DNA/RNA Molecule: Synthetic oligonucleotide"
  source: /note="DNA/RNA"
  source: /note="5' tri-ethylene glycol (TEG)"
  modified_base (1)..(1): bicyclic nucleic acid (BNA)
  modified_base (19)..(19): bicyclic nucleic acid (BNA)
  source: /note="3' tri-ethylene glycol (TEG)"
guucuguccaagcccggut

SEQ ID NO: 7577 - DNA, 18 bp, Artificial Sequence
  source: /note="Description of Artificial Sequence: Synthetic oligonucleotide"
  source: /note="Description of Combined DNA/RNA Molecule: Synthetic oligonucleotide"
  source: /note="DNA/RNA"
  source: /note="5' tri-ethylene glycol (TEG)"
  modified_base (1)..(1): bicyclic nucleic acid (BNA)
  modified_base (18)..(18): bicyclic nucleic acid (BNA)
  source: /note="3' tri-ethylene glycol (TEG)"
guucuguccaagcccggt

SEQ ID NO: 7578 - RNA, 17 nt, Artificial Sequence
  source: /note="Description of Artificial Sequence: Synthetic oligonucleotide"
  source: /note="RNA"
  source: /note="5' tri-ethylene glycol (TEG)"
  modified_base (1)..(1): bicyclic nucleic acid (BNA)
  modified_base (17)..(17): bicyclic nucleic acid (BNA)
  source: /note="3' tri-ethylene glycol (TEG)"
guucuguccaagcccgg

SEQ ID NO: 7579 - RNA, 16 nt, Artificial Sequence
  source: /note="Description of Artificial Sequence: Synthetic oligonucleotide"
  source: /note="RNA"
  source: /note="5' tri-ethylene glycol (TEG)"
  modified_base (1)..(1): bicyclic nucleic acid (BNA)
  modified_base (16)..(16): bicyclic nucleic acid (BNA)
  source: /note="3' tri-ethylene glycol (TEG)"
guucuguccaagcccg

SEQ ID NO: 7580 - RNA, 15 nt, Artificial Sequence
  source: /note="Description of Artificial Sequence: Synthetic oligonucleotide"
  source: /note="RNA"
  source: /note="5' tri-ethylene glycol (TEG)"
  modified_base (1)..(1): bicyclic nucleic acid (BNA)
  modified_base (15)..(15): bicyclic nucleic acid (BNA)
  source: /note="3' tri-ethylene glycol (TEG)"
guucuguccaagccc

SEQ ID NO: 7581 - RNA, 14 nt, Artificial Sequence
  source: /note="Description of Artificial Sequence: Synthetic oligonucleotide"
  source: /note="RNA"
  source: /note="5' tri-ethylene glycol (TEG)"
  modified_base (1)..(1): bicyclic nucleic acid (BNA)
  modified_base (14)..(14): bicyclic nucleic acid (BNA)
  source: /note="3' tri-ethylene glycol (TEG)"
guucuguccaagcc

SEQ ID NO: 7582 - RNA, 13 nt, Artificial Sequence
  source: /note="Description of Artificial Sequence: Synthetic oligonucleotide"
  source: /note="RNA"
  source: /note="5' tri-ethylene glycol (TEG)"
  modified_base (1)..(1): bicyclic nucleic acid (BNA)
  modified_base (13)..(13): bicyclic nucleic acid (BNA)
  source: /note="3' tri-ethylene glycol (TEG)"
guucuguccaagc

SEQ ID NO: 7583 - RNA, 12 nt, Artificial Sequence
  source: /note="Description of Artificial Sequence: Synthetic oligonucleotide"
  source: /note="RNA"
  source: /note="5' tri-ethylene glycol (TEG)"
  modified_base (1)..(1): bicyclic nucleic acid (BNA)
  modified_base (12)..(12): bicyclic nucleic acid (BNA)
  source: /note="3' tri-ethylene glycol (TEG)"
guucuguccaag

SEQ ID NO: 7584 - RNA, 11 nt, Artificial Sequence
  source: /note="Description of Artificial Sequence: Synthetic oligonucleotide"
  source: /note="RNA"
  source: /note="5' tri-ethylene glycol (TEG)"
  modified_base (1)..(1): bicyclic nucleic acid (BNA)
  modified_base (11)..(11): bicyclic nucleic acid (BNA)
  source: /note="3' tri-ethylene glycol (TEG)"
guucuguccaa

SEQ ID NO: 7585 - RNA, 10 nt, Artificial Sequence
  source: /note="Description of Artificial Sequence: Synthetic oligonucleotide"
  source: /note="RNA"
  source: /note="5' tri-ethylene glycol (TEG)"
  modified_base (1)..(1): bicyclic nucleic acid (BNA)
  modified_base (10)..(10): bicyclic nucleic acid (BNA)
  source: /note="3' tri-ethylene glycol (TEG)"
guucugucca

SEQ ID NO: 7586 - RNA, 9 nt, Artificial Sequence
  source: /note="Description of Artificial Sequence: Synthetic oligonucleotide"
  source: /note="RNA"
  source: /note="5' tri-ethylene glycol (TEG)"
  modified_base (1)..(1): bicyclic nucleic acid (BNA)
  modified_base (9)..(9): bicyclic nucleic acid (BNA)
  source: /note="3' tri-ethylene glycol (TEG)"
guucugucc

SEQ ID NO: 7587 - RNA, 8 nt, Artificial Sequence
  source: /note="Description of Artificial Sequence: Synthetic oligonucleotide"
  source: /note="RNA"
  source: /note="5' tri-ethylene glycol (TEG)"
  modified_base (1)..(1): bicyclic nucleic acid (BNA)
  modified_base (8)..(8): bicyclic nucleic acid (BNA)
  source: /note="3' tri-ethylene glycol (TEG)"
guucuguc

SEQ ID NO: 7588 - DNA, 20 bp, Artificial Sequence
  source: /note="Description of Artificial Sequence: Synthetic oligonucleotide"
  source: /note="Description of Combined DNA/RNA Molecule: Synthetic oligonucleotide"
  source: /note="DNA/RNA"
  source: /note="5' tri-ethylene glycol (TEG)"
  modified_base (1)..(1): bicyclic nucleic acid (BNA)
  modified_base (20)..(20): bicyclic nucleic acid (BNA)
  source: /note="3' tri-ethylene glycol (TEG)"
aguucuguccaagcccggut

SEQ ID NO: 7589 - DNA, 19 bp, Artificial Sequence
  source: /note="Description of Artificial Sequence: Synthetic oligonucleotide"
  source: /note="Description of Combined DNA/RNA Molecule: Synthetic oligonucleotide"
  source: /note="DNA/RNA"
  source: /note="5' tri-ethylene glycol (TEG)"
  modified_base (1)..(1): bicyclic nucleic acid (BNA)
  modified_base (19)..(19): bicyclic nucleic acid (BNA)
  source: /note="3' tri-ethylene glycol (TEG)"
aguucuguccaagcccggt

SEQ ID NO: 7590 - RNA, 18 nt, Artificial Sequence
  source: /note="Description of Artificial Sequence: Synthetic oligonucleotide"
  source: /note="RNA"
  source: /note="5' tri-ethylene glycol (TEG)"
  modified_base (1)..(1): bicyclic nucleic acid (BNA)
  modified_base (18)..(18): bicyclic nucleic acid (BNA)
  source: /note="3' tri-ethylene glycol (TEG)"
aguucuguccaagcccgg

SEQ ID NO: 7591 - RNA, 17 nt, Artificial Sequence
  source: /note="Description of Artificial Sequence: Synthetic oligonucleotide"
  source: /note="RNA"
  source: /note="5' tri-ethylene glycol (TEG)"
  modified_base (1)..(1): bicyclic nucleic acid (BNA)
  modified_base (17)..(17): bicyclic nucleic acid (BNA)
  source: /note="3' tri-ethylene glycol (TEG)"
aguucuguccaagcccg

SEQ ID NO: 7592 - RNA, 16 nt, Artificial Sequence
  source: /note="Description of Artificial Sequence: Synthetic oligonucleotide"
  source: /note="RNA"
  source: /note="5' tri-ethylene glycol (TEG)"
  modified_base (1)..(1): bicyclic nucleic acid (BNA)
  modified_base (16)..(16): bicyclic nucleic acid (BNA)
  source: /note="3' tri-ethylene glycol (TEG)"
aguucuguccaagccc

SEQ ID NO: 7593 - RNA, 15 nt, Artificial Sequence
  source: /note="Description of Artificial Sequence: Synthetic oligonucleotide"
  source: /note="RNA"
  source: /note="5' tri-ethylene glycol (TEG)"
  modified_base (1)..(1): bicyclic nucleic acid (BNA)
  modified_base (15)..(15): bicyclic nucleic acid (BNA)
  source: /note="3' tri-ethylene glycol (TEG)"
aguucuguccaagcc

SEQ ID NO: 7594 - RNA, 14 nt, Artificial Sequence
  source: /note="Description of Artificial Sequence: Synthetic oligonucleotide"
  source: /note="RNA"
  source: /note="5' tri-ethylene glycol (TEG)"
  modified_base (1)..(1): bicyclic nucleic acid (BNA)
  modified_base (14)..(14): bicyclic nucleic acid (BNA)
  source: /note="3' tri-ethylene glycol (TEG)"
aguucuguccaagc

SEQ ID NO: 7595 - RNA, 13 nt, Artificial Sequence
  source: /note="Description of Artificial Sequence: Synthetic oligonucleotide"
  source: /note="RNA"
  source: /note="5' tri-ethylene glycol (TEG)"
  modified_base (1)..(1): bicyclic nucleic acid (BNA)
  modified_base (13)..(13): bicyclic nucleic acid (BNA)
  source: /note="3' tri-ethylene glycol (TEG)"
aguucuguccaag

SEQ ID NO: 7596 - RNA, 12 nt, Artificial Sequence
  source: /note="Description of Artificial Sequence: Synthetic oligonucleotide"
  source: /note="RNA"
  source: /note="5' tri-ethylene glycol (TEG)"
  modified_base (1)..(1): bicyclic nucleic acid (BNA)
  modified_base (12)..(12): bicyclic nucleic acid (BNA)
  source: /note="3' tri-ethylene glycol (TEG)"
aguucuguccaa

SEQ ID NO: 7597 - RNA, 11 nt, Artificial Sequence
  source: /note="Description of Artificial Sequence: Synthetic oligonucleotide"
  source: /note="RNA"
  source: /note="5' tri-ethylene glycol (TEG)"
  modified_base (1)..(1): bicyclic nucleic acid (BNA)
  modified_base (11)..(11): bicyclic nucleic acid (BNA)
  source: /note="3' tri-ethylene glycol (TEG)"
aguucugucca

SEQ ID NO: 7598 - RNA, 10 nt, Artificial Sequence
  source: /note="Description of Artificial Sequence: Synthetic oligonucleotide"
  source: /note="RNA"
  source: /note="5' tri-ethylene glycol (TEG)"
  modified_base (1)..(1): bicyclic nucleic acid (BNA)
  modified_base (10)..(10): bicyclic nucleic acid (BNA)
  source: /note="3' tri-ethylene glycol (TEG)"
aguucugucc

SEQ ID NO: 7599 - RNA, 9 nt, Artificial Sequence
  source: /note="Description of Artificial Sequence: Synthetic oligonucleotide"
  source: /note="RNA"
  source: /note="5' tri-ethylene glycol (TEG)"
  modified_base (1)..(1): bicyclic nucleic acid (BNA)
  modified_base (9)..(9): bicyclic nucleic acid (BNA)
  source: /note="3' tri-ethylene glycol (TEG)"
aguucuguc

SEQ ID NO: 7600 - DNA, 8 bp, Artificial Sequence
  source: /note="Description of Artificial Sequence: Synthetic oligonucleotide"
  source: /note="Description of Combined DNA/RNA Molecule: Synthetic oligonucleotide"
  source: /note="DNA/RNA"
  source: /note="5' tri-ethylene glycol (TEG)"
  modified_base (1)..(1): bicyclic nucleic acid (BNA)
  modified_base (8)..(8): bicyclic nucleic acid (BNA)
  source: /note="3' tri-ethylene glycol (TEG)"
aguucugt

SEQ ID NO: 7601 - DNA, 20 bp, Artificial Sequence
  source: /note="Description of Artificial Sequence: Synthetic oligonucleotide"
  source: /note="Description of Combined DNA/RNA Molecule: Synthetic oligonucleotide"
  source: /note="DNA/RNA"
  source: /note="5' tri-ethylene glycol (TEG)"
  modified_base (1)..(1): bicyclic nucleic acid (BNA)
  modified_base (20)..(20): bicyclic nucleic acid (BNA)
  source: /note="3' tri-ethylene glycol (TEG)"
aaguucuguccaagcccggt

SEQ ID NO: 7602 - RNA, 19 nt, Artificial Sequence
  source: /note="Description of Artificial Sequence: Synthetic oligonucleotide"
  source: /note="RNA"
  source: /note="5' tri-ethylene glycol (TEG)"
  modified_base (1)..(1): bicyclic nucleic acid (BNA)
  modified_base (19)..(19): bicyclic nucleic acid (BNA)
  source: /note="3' tri-ethylene glycol (TEG)"
aaguucuguccaagcccgg

SEQ ID NO: 7603 - RNA, 18 nt, Artificial Sequence
  source: /note="Description of Artificial Sequence: Synthetic oligonucleotide"
  source: /note="RNA"
  source: /note="5' tri-ethylene glycol (TEG)"
  modified_base (1)..(1): bicyclic nucleic acid (BNA)
  modified_base (18)..(18): bicyclic nucleic acid (BNA)
  source: /note="3' tri-ethylene glycol (TEG)"
aaguucuguccaagcccg

SEQ ID NO: 7604 - RNA, 17 nt, Artificial Sequence
  source: /note="Description of Artificial Sequence: Synthetic oligonucleotide"
  source: /note="RNA"
  source: /note="5' tri-ethylene glycol (TEG)"
  modified_base (1)..(1): bicyclic nucleic acid (BNA)
  modified_base (17)..(17): bicyclic nucleic acid (BNA)
  source: /note="3' tri-ethylene glycol (TEG)"
aaguucuguccaagccc

SEQ ID NO: 7605 - RNA, 16 nt, Artificial Sequence
  source: /note="Description of Artificial Sequence: Synthetic oligonucleotide"
  source: /note="RNA"
  source: /note="5' tri-ethylene glycol (TEG)"
  modified_base (1)..(1): bicyclic nucleic acid (BNA)
  modified_base (16)..(16): bicyclic nucleic acid (BNA)
  source: /note="3' tri-ethylene glycol (TEG)"
aaguucuguccaagcc

SEQ ID NO: 7606 - RNA, 15 nt, Artificial Sequence
  source: /note="Description of Artificial Sequence: Synthetic oligonucleotide"
  source: /note="RNA"
  source: /note="5' tri-ethylene glycol (TEG)"
  modified_base (1)..(1): bicyclic nucleic acid (BNA)
  modified_base (15)..(15): bicyclic nucleic acid (BNA)
  source: /note="3' tri-ethylene glycol (TEG)"
aaguucuguccaagc

SEQ ID NO: 7607 - RNA, 14 nt, Artificial Sequence
  source: /note="Description of Artificial Sequence: Synthetic oligonucleotide"
  source: /note="RNA"
  source: /note="5' tri-ethylene glycol (TEG)"
  modified_base (1)..(1): bicyclic nucleic acid (BNA)
  modified_base (14)..(14): bicyclic nucleic acid (BNA)
  source: /note="3' tri-ethylene glycol (TEG)"
aaguucuguccaag

SEQ ID NO: 7608 - RNA, 13 nt, Artificial Sequence
  source: /note="Description of Artificial Sequence: Synthetic oligonucleotide"
  source: /note="RNA"
  source: /note="5' tri-ethylene glycol (TEG)"
  modified_base (1)..(1): bicyclic nucleic acid (BNA)
  modified_base (13)..(13): bicyclic nucleic acid (BNA)
  source: /note="3' tri-ethylene glycol (TEG)"
aaguucuguccaa

SEQ ID NO: 7609 - RNA, 12 nt, Artificial Sequence
  source: /note="Description of Artificial Sequence: Synthetic oligonucleotide"
  source: /note="RNA"
  source: /note="5' tri-ethylene glycol (TEG)"
  modified_base (1)..(1): bicyclic nucleic acid (BNA)
  modified_base (12)..(12): bicyclic nucleic acid (BNA)
  source: /note="3' tri-ethylene glycol (TEG)"
aaguucugucca

SEQ ID NO: 7610 - RNA, 11 nt, Artificial Sequence
  source: /note="Description of Artificial Sequence: Synthetic oligonucleotide"
  source: /note="RNA"
  source: /note="5' tri-ethylene glycol (TEG)"
  modified_base (1)..(1): bicyclic nucleic acid (BNA)
  modified_base (11)..(11): bicyclic nucleic acid (BNA)
  source: /note="3' tri-ethylene glycol (TEG)"
aaguucugucc

SEQ ID NO: 7611 - RNA, 10 nt, Artificial Sequence
  source: /note="Description of Artificial Sequence: Synthetic oligonucleotide"
  source: /note="RNA"
  source: /note="5' tri-ethylene glycol (TEG)"
  modified_base (1)..(1): bicyclic nucleic acid (BNA)
  modified_base (10)..(10): bicyclic nucleic acid (BNA)
  source: /note="3' tri-ethylene glycol (TEG)"
aaguucuguc

SEQ ID NO: 7612 - DNA, 9 bp, Artificial Sequence
  source: /note="Description of Artificial Sequence: Synthetic oligonucleotide"
  source: /note="Description of Combined DNA/RNA Molecule: Synthetic oligonucleotide"
  source: /note="DNA/RNA"
  source: /note="5' tri-ethylene glycol (TEG)"
  modified_base (1)..(1): bicyclic nucleic acid (BNA)
  modified_base (9)..(9): bicyclic nucleic acid (BNA)
  source: /note="3' tri-ethylene glycol (TEG)"
aaguucugt

SEQ ID NO: 7613 - RNA, 8 nt, Artificial Sequence
  source: /note="Description of Artificial Sequence: Synthetic oligonucleotide"
  source: /note="RNA"
  source: /note="5' tri-ethylene glycol (TEG)"
  modified_base (1)..(1): bicyclic nucleic acid (BNA)
  modified_base (8)..(8): bicyclic nucleic acid (BNA)
  source: /note="3' tri-ethylene glycol (TEG)"
aaguucug

SEQ ID NO: 7614 - DNA, 20 bp, Artificial Sequence
  source: /note="Description of Artificial Sequence: Synthetic oligonucleotide"
  source: /note="Description of Combined DNA/RNA Molecule: Synthetic oligonucleotide"
  source: /note="DNA/RNA"
  source: /note="5' tri-ethylene glycol (TEG)"
  modified_base (1)..(1): bicyclic nucleic acid (BNA)
  modified_base (20)..(20): bicyclic nucleic acid (BNA)
  source: /note="3' tri-ethylene glycol (TEG)"
taaguucuguccaagcccgg

SEQ ID NO: 7615 - DNA, 19 bp, Artificial Sequence
  source: /note="Description of Artificial Sequence: Synthetic oligonucleotide"
  source: /note="Description of Combined DNA/RNA Molecule: Synthetic oligonucleotide"
  source: /note="DNA/RNA"
  source: /note="5' tri-ethylene glycol (TEG)"
  modified_base (1)..(1): bicyclic nucleic acid (BNA)
  modified_base (19)..(19): bicyclic nucleic acid (BNA)
  source: /note="3' tri-ethylene glycol (TEG)"
taaguucuguccaagcccg

SEQ ID NO: 7616 - DNA, 18 bp, Artificial Sequence
  source: /note="Description of Artificial Sequence: Synthetic oligonucleotide"
  source: /note="Description of Combined DNA/RNA Molecule: Synthetic oligonucleotide"
  source: /note="DNA/RNA"
  source: /note="5' tri-ethylene glycol (TEG)"
  modified_base (1)..(1): bicyclic nucleic acid (BNA)
  modified_base (18)..(18): bicyclic nucleic acid (BNA)
  source: /note="3' tri-ethylene glycol (TEG)"
taaguucuguccaagccc

SEQ ID NO: 7617 - DNA, 17 bp, Artificial Sequence
  source: /note="Description of Artificial Sequence: Synthetic oligonucleotide"
  source: /note="Description of Combined DNA/RNA Molecule: Synthetic oligonucleotide"
  source: /note="DNA/RNA"
  source: /note="5' tri-ethylene glycol (TEG)"
  modified_base (1)..(1): bicyclic nucleic acid (BNA)
  modified_base (17)..(17): bicyclic nucleic acid (BNA)
  source: /note="3' tri-ethylene glycol (TEG)"
taaguucuguccaagcc

SEQ ID NO: 7618 - DNA, 16 bp, Artificial Sequence
  source: /note="Description of Artificial Sequence: Synthetic oligonucleotide"
  source: /note="Description of Combined DNA/RNA Molecule: Synthetic oligonucleotide"
  source: /note="DNA/RNA"
  source: /note="5' tri-ethylene glycol (TEG)"
  modified_base (1)..(1): bicyclic nucleic acid (BNA)
  modified_base (16)..(16): bicyclic nucleic acid (BNA)
  source: /note="3' tri-ethylene glycol (TEG)"
taaguucuguccaagc

SEQ ID NO: 7619 - DNA, 14 bp, Artificial Sequence
  source: /note="Description of Artificial Sequence: Synthetic oligonucleotide"
  source: /note="Description of Combined DNA/RNA Molecule: Synthetic oligonucleotide"
  source: /note="DNA/RNA"
  source: /note="5' tri-ethylene glycol (TEG)"
  modified_base (1)..(1): bicyclic nucleic acid (BNA)
  modified_base (14)..(14): bicyclic nucleic acid (BNA)
  source: /note="3' tri-ethylene glycol (TEG)"
taaguucuguccaa

SEQ ID NO: 7620 - DNA, 13 bp, Artificial Sequence
  source: /note="Description of Artificial Sequence: Synthetic oligonucleotide"
  source: /note="Description of Combined DNA/RNA Molecule: Synthetic oligonucleotide"
  source: /note="DNA/RNA"
  source: /note="5' tri-ethylene glycol (TEG)"
  modified_base (1)..(1): bicyclic nucleic acid (BNA)
  modified_base (13)..(13): bicyclic nucleic acid (BNA)
  source: /note="3' tri-ethylene glycol (TEG)"
taaguucugucca

SEQ ID NO: 7621 - DNA, 12 bp, Artificial Sequence
  source: /note="Description of Artificial Sequence: Synthetic oligonucleotide"
  source: /note="Description of Combined DNA/RNA Molecule: Synthetic oligonucleotide"
  source: /note="DNA/RNA"
  source: /note="5' tri-ethylene glycol (TEG)"
  modified_base (1)..(1): bicyclic nucleic acid (BNA)
  modified_base (12)..(12): bicyclic nucleic acid (BNA)
  source: /note="3' tri-ethylene glycol (TEG)"
taaguucugucc

SEQ ID NO: 7622 - DNA, 11 bp, Artificial Sequence
  source: /note="Description of Artificial Sequence: Synthetic oligonucleotide"
  source: /note="Description of Combined DNA/RNA Molecule: Synthetic oligonucleotide"
  source: /note="DNA/RNA"
  source: /note="5' tri-ethylene glycol (TEG)"
  modified_base (1)..(1): bicyclic nucleic acid (BNA)
  modified_base (11)..(11): bicyclic nucleic acid (BNA)
  source: /note="3' tri-ethylene glycol (TEG)"
taaguucuguc

SEQ ID NO: 7623 - DNA, 10 bp, Artificial Sequence
  source: /note="Description of Artificial Sequence: Synthetic oligonucleotide"
  source: /note="Description of Combined DNA/RNA Molecule: Synthetic oligonucleotide"
  source: /note="DNA/RNA"
  source: /note="5' tri-ethylene glycol (TEG)"
  modified_base (1)..(1): bicyclic nucleic acid (BNA)
  modified_base (10)..(10): bicyclic nucleic acid (BNA)
  source: /note="3' tri-ethylene glycol (TEG)"
taaguucugt

SEQ ID NO: 7624 - DNA, 9 bp, Artificial Sequence
  source: /note="Description of Artificial Sequence: Synthetic oligonucleotide"
  source: /note="Description of Combined DNA/RNA Molecule: Synthetic oligonucleotide"
  source: /note="DNA/RNA"
  source: /note="5' tri-ethylene glycol (TEG)"
  modified_base (1)..(1): bicyclic nucleic acid (BNA)
  modified_base (9)..(9): bicyclic nucleic acid (BNA)
  source: /note="3' tri-ethylene glycol (TEG)"
taaguucug

SEQ ID NO: 7625 - DNA, 8 bp, Artificial Sequence
  source: /note="Description of Artificial Sequence: Synthetic oligonucleotide"
  source: /note="Description of Combined DNA/RNA Molecule: Synthetic oligonucleotide"
  source: /note="DNA/RNA"
  source: /note="5' tri-ethylene glycol (TEG)"
  modified_base (1)..(1): bicyclic nucleic acid (BNA)
  modified_base (8)..(8): bicyclic nucleic acid (BNA)
  source: /note="3' tri-ethylene glycol (TEG)"
taaguuct

SEQ ID NO: 7626 - RNA, 20 nt, Artificial Sequence
  source: /note="Description of Artificial Sequence: Synthetic oligonucleotide"
  source: /note="RNA"
  source: /note="5' tri-ethylene glycol (TEG)"
  modified_base (1)..(1): bicyclic nucleic acid (BNA)
  modified_base (20)..(20): bicyclic nucleic acid (BNA)
  source: /note="3' tri-ethylene glycol (TEG)"
guaaguucuguccaagcccg

SEQ ID NO: 7627 - RNA, 19 nt, Artificial Sequence
  source: /note="Description of Artificial Sequence: Synthetic oligonucleotide"
  source: /note="RNA"
  source: /note="5' tri-ethylene glycol (TEG)"
  modified_base (1)..(1): bicyclic nucleic acid (BNA)
  modified_base (19)..(19): bicyclic nucleic acid (BNA)
  source: /note="3' tri-ethylene glycol (TEG)"
guaaguucuguccaagccc

SEQ ID NO: 7628 - RNA, 17 nt, Artificial Sequence
  source: /note="Description of Artificial Sequence: Synthetic oligonucleotide"
  source: /note="RNA"
  source: /note="5' tri-ethylene glycol (TEG)"
  modified_base (1)..(1): bicyclic nucleic acid (BNA)
  modified_base (17)..(17): bicyclic nucleic acid (BNA)
  source: /note="3' tri-ethylene glycol (TEG)"
guaaguucuguccaagc

SEQ ID NO: 7629 - RNA, 16 nt, Artificial Sequence
  source: /note="Description of Artificial Sequence: Synthetic oligonucleotide"
  source: /note="RNA"
  source: /note="5' tri-ethylene glycol (TEG)"
  modified_base (1)..(1): bicyclic nucleic acid (BNA)
  modified_base (16)..(16): bicyclic nucleic acid (BNA)
  source: /note="3' tri-ethylene glycol (TEG)"
guaaguucuguccaag

SEQ ID NO: 7630 - RNA, 15 nt, Artificial Sequence
  source: /note="Description of Artificial Sequence: Synthetic oligonucleotide"
  source: /note="RNA"
  source: /note="5' tri-ethylene glycol (TEG)"
  modified_base (1)..(1): bicyclic nucleic acid (BNA)
  modified_base (15)..(15): bicyclic nucleic acid (BNA)
  source: /note="3' tri-ethylene glycol (TEG)"
guaaguucuguccaa

SEQ ID NO: 7631 - RNA, 14 nt, Artificial Sequence
  source: /note="Description of Artificial Sequence: Synthetic oligonucleotide"
  source: /note="RNA"
  source: /note="5' tri-ethylene glycol (TEG)"
  modified_base (1)..(1): bicyclic nucleic acid (BNA)
  modified_base (14)..(14): bicyclic nucleic acid (BNA)
  source: /note="3' tri-ethylene glycol (TEG)"
guaaguucugucca

SEQ ID NO: 7632 - RNA, 13 nt, Artificial Sequence
  source: /note="Description of Artificial Sequence: Synthetic oligonucleotide"
  source: /note="RNA"
  source: /note="5' tri-ethylene glycol (TEG)"
  modified_base (1)..(1): bicyclic nucleic acid (BNA)
  modified_base (13)..(13): bicyclic nucleic acid (BNA)
  source: /note="3' tri-ethylene glycol (TEG)"
guaaguucugucc

SEQ ID NO: 7633 - RNA, 12 nt, Artificial Sequence
  source: /note="Description of Artificial Sequence: Synthetic oligonucleotide"
  source: /note="RNA"
  source: /note="5' tri-ethylene glycol (TEG)"
  modified_base (1)..(1): bicyclic nucleic acid (BNA)
  modified_base (12)..(12): bicyclic nucleic acid (BNA)
  source: /note="3' tri-ethylene glycol (TEG)"
guaaguucuguc

SEQ ID NO: 7634 - DNA, 11 bp, Artificial Sequence
  source: /note="Description of Artificial Sequence: Synthetic oligonucleotide"
  source: /note="Description of Combined DNA/RNA Molecule: Synthetic oligonucleotide"
  source: /note="DNA/RNA"
  source: /note="5' tri-ethylene glycol (TEG)"
  modified_base (1)..(1): bicyclic nucleic acid (BNA)
  modified_base (11)..(11): bicyclic nucleic acid (BNA)
  source: /note="3' tri-ethylene glycol (TEG)"
guaaguucugt

SEQ ID NO: 7635 - RNA, 10 nt, Artificial Sequence
  source: /note="Description of Artificial Sequence: Synthetic oligonucleotide"
  source: /note="RNA"
  source: /note="5' tri-ethylene glycol (TEG)"
  modified_base (1)..(1): bicyclic nucleic acid (BNA)
  modified_base (10)..(10): bicyclic nucleic acid (BNA)
  source: /note="3' tri-ethylene glycol (TEG)"
guaaguucug

SEQ ID NO: 7636 - DNA, 9 bp, Artificial Sequence
  source: /note="Description of Artificial Sequence: Synthetic oligonucleotide"
  source: /note="Description of Combined DNA/RNA Molecule: Synthetic oligonucleotide"
  source: /note="DNA/RNA"
  source: /note="5' tri-ethylene glycol (TEG)"
  modified_base (1)..(1): bicyclic nucleic acid (BNA)
  modified_base (9)..(9): bicyclic nucleic acid (BNA)
  source: /note="3' tri-ethylene glycol (TEG)"
guaaguuct

SEQ ID NO: 7637 - RNA, 8 nt, Artificial Sequence
  source: /note="Description of Artificial Sequence: Synthetic oligonucleotide"
  source: /note="RNA"
  source: /note="5' tri-ethylene glycol (TEG)"
  modified_base (1)..(1): bicyclic nucleic acid (BNA)
  modified_base (8)..(8): bicyclic nucleic acid (BNA)
  source: /note="3' tri-ethylene glycol (TEG)"
guaaguuc

SEQ ID NO: 7638 - RNA, 20 nt, Artificial Sequence
  source: /note="Description of Artificial Sequence: Synthetic oligonucleotide"
  source: /note="RNA"
  source: /note="5' tri-ethylene glycol (TEG)"
  modified_base (1)..(1): bicyclic nucleic acid (BNA)
  modified_base (20)..(20): bicyclic nucleic acid (BNA)
  source: /note="3' tri-ethylene glycol (TEG)"
gguaaguucuguccaagccc

SEQ ID NO: 7639 - RNA, 19 nt, Artificial Sequence
  source: /note="Description of Artificial Sequence: Synthetic oligonucleotide"
  source: /note="RNA"
  source: /note="5' tri-ethylene glycol (TEG)"
  modified_base (1)..(1): bicyclic nucleic acid (BNA)
  modified_base (19)..(19): bicyclic nucleic acid (BNA)
  source: /note="3' tri-ethylene glycol (TEG)"
gguaaguucuguccaagcc

SEQ ID NO: 7640 - RNA, 17 nt, Artificial Sequence
  source: /note="Description of Artificial Sequence: Synthetic oligonucleotide"
  source: /note="RNA"
  source: /note="5' tri-ethylene glycol (TEG)"
  modified_base (1)..(1): bicyclic nucleic acid (BNA)
  modified_base (17)..(17): bicyclic nucleic acid (BNA)
  source: /note="3' tri-ethylene glycol (TEG)"
gguaaguucuguccaag

SEQ ID NO: 7641 - RNA, 16 nt, Artificial Sequence
  source: /note="Description of Artificial Sequence: Synthetic oligonucleotide"
  source: /note="RNA"
  source: /note="5' tri-ethylene glycol (TEG)"
  modified_base (1)..(1): bicyclic nucleic acid (BNA)
  modified_base (16)..(16): bicyclic nucleic acid (BNA)
  source: /note="3' tri-ethylene glycol (TEG)"
gguaaguucuguccaa

SEQ ID NO: 7642 - RNA, 15 nt, Artificial Sequence
  source: /note="Description of Artificial Sequence: Synthetic oligonucleotide"
  source: /note="RNA"
  source: /note="5' tri-ethylene glycol (TEG)"
  modified_base (1)..(1): bicyclic nucleic acid (BNA)
  modified_base (15)..(15): bicyclic nucleic acid (BNA)
  source: /note="3' tri-ethylene glycol (TEG)"
gguaaguucugucca

SEQ ID NO: 7643 - RNA, 14 nt, Artificial Sequence
  source: /note="Description of Artificial Sequence: Synthetic oligonucleotide"
  source: /note="RNA"
  source: /note="5' tri-ethylene glycol (TEG)"
  modified_base (1)..(1): bicyclic nucleic acid (BNA)
  modified_base (14)..(14): bicyclic nucleic acid (BNA)
  source: /note="3' tri-ethylene glycol (TEG)"
gguaaguucugucc

SEQ ID NO: 7644 - RNA, 13 nt, Artificial Sequence
  source: /note="Description of Artificial Sequence: Synthetic oligonucleotide"
  source: /note="RNA"
  source: /note="5' tri-ethylene glycol (TEG)"
  modified_base (1)..(1): bicyclic nucleic acid (BNA)
  modified_base (13)..(13): bicyclic nucleic acid (BNA)
  source: /note="3' tri-ethylene glycol (TEG)"
gguaaguucuguc

SEQ ID NO: 7645 - DNA, 12 bp, Artificial Sequence
  source: /note="Description of Artificial Sequence: Synthetic oligonucleotide"
  source: /note="Description of Combined DNA/RNA Molecule: Synthetic oligonucleotide"
  source: /note="DNA/RNA"
  source: /note="5' tri-ethylene glycol (TEG)"
  modified_base (1)..(1): bicyclic nucleic acid (BNA)
  modified_base (12)..(12): bicyclic nucleic acid (BNA)
  source: /note="3' tri-ethylene glycol (TEG)"
gguaaguucugt

SEQ ID NO: 7646 - RNA, 11 nt, Artificial Sequence
  source: /note="Description of Artificial Sequence: Synthetic oligonucleotide"
  source: /note="RNA"
  source: /note="5' tri-ethylene glycol (TEG)"
  modified_base (1)..(1): bicyclic nucleic acid (BNA)
  modified_base (11)..(11): bicyclic nucleic acid (BNA)
  source: /note="3' tri-ethylene glycol (TEG)"
gguaaguucug

SEQ ID NO: 7647 - DNA, 10 bp, Artificial Sequence
  source: /note="Description of Artificial Sequence: Synthetic oligonucleotide"
  source: /note="Description of Combined DNA/RNA Molecule: Synthetic oligonucleotide"
  source: /note="DNA/RNA"
  source: /note="5' tri-ethylene glycol (TEG)"
  modified_base (1)..(1): bicyclic nucleic acid (BNA)
  modified_base (10)..(10): bicyclic nucleic acid (BNA)
  source: /note="3' tri-ethylene glycol (TEG)"
gguaaguuct

SEQ ID NO: 7648 - RNA, 9 nt, Artificial Sequence
  source: /note="Description of Artificial Sequence: Synthetic oligonucleotide"
  source: /note="RNA"
  source: /note="5' tri-ethylene glycol (TEG)"
  modified_base (1)..(1): bicyclic nucleic acid (BNA)
  modified_base (9)..(9): bicyclic nucleic acid (BNA)
  source: /note="3' tri-ethylene glycol (TEG)"
gguaaguuc

SEQ ID NO: 7649 - DNA, 8 bp, Artificial Sequence
  source: /note="Description of Artificial Sequence: Synthetic oligonucleotide"
  source: /note="Description of Combined DNA/RNA Molecule: Synthetic oligonucleotide"
  source: /note="DNA/RNA"
  source: /note="5' tri-ethylene glycol (TEG)"
  modified_base (1)..(1): bicyclic nucleic acid (BNA)
  modified_base (8)..(8): bicyclic nucleic acid (BNA)
  source: /note="3' tri-ethylene glycol (TEG)"
gguaagut

SEQ ID NO: 7650 - RNA, 20 nt, Artificial Sequence
  source: /note="Description of Artificial Sequence: Synthetic oligonucleotide"
  source: /note="RNA"
  source: /note="5' tri-ethylene glycol (TEG)"
  modified_base (1)..(1): bicyclic nucleic acid (BNA)
  modified_base (20)..(20): bicyclic nucleic acid (BNA)
  source: /note="3' tri-ethylene glycol (TEG)"
cgguaaguucuguccaagcc

SEQ ID NO: 7651 - RNA, 19 nt, Artificial Sequence
  source: /note="Description of Artificial Sequence: Synthetic oligonucleotide"
  source: /note="RNA"
  source: /note="5' tri-ethylene glycol (TEG)"
  modified_base (1)..(1): bicyclic nucleic acid (BNA)
  modified_base (19)..(19): bicyclic nucleic acid (BNA)
  source: /note="3' tri-ethylene glycol (TEG)"
cgguaaguucuguccaagc

SEQ ID NO: 7652 - RNA, 18 nt, Artificial Sequence
  source: /note="Description of Artificial Sequence: Synthetic oligonucleotide"
  source: /note="RNA"
  source: /note="5' tri-ethylene glycol (TEG)"
  modified_base (1)..(1): bicyclic nucleic acid (BNA)
  modified_base (18)..(18): bicyclic nucleic acid (BNA)
  source: /note="3' tri-ethylene glycol (TEG)"
cgguaaguucuguccaag

SEQ ID NO: 7653 - RNA, 17 nt, Artificial Sequence
  source: /note="Description of Artificial Sequence: Synthetic oligonucleotide"
  source: /note="RNA"
  source: /note="5' tri-ethylene glycol (TEG)"
  modified_base (1)..(1): bicyclic nucleic acid (BNA)
  modified_base (17)..(17): bicyclic nucleic acid (BNA)
  source: /note="3' tri-ethylene glycol (TEG)"
cgguaaguucuguccaa

SEQ ID NO: 7654 - RNA, 16 nt, Artificial Sequence
  source: /note="Description of Artificial Sequence: Synthetic oligonucleotide"
  source: /note="RNA"
  source: /note="5' tri-ethylene glycol (TEG)"
  modified_base (1)..(1): bicyclic nucleic acid (BNA)
  modified_base (16)..(16): bicyclic nucleic acid (BNA)
  source: /note="3' tri-ethylene glycol (TEG)"
cgguaaguucugucca

SEQ ID NO: 7655 - RNA, 15 nt, Artificial Sequence
  source: /note="Description of Artificial Sequence: Synthetic oligonucleotide"
  source: /note="RNA"
  source: /note="5' tri-ethylene glycol (TEG)"
  modified_base (1)..(1): bicyclic nucleic acid (BNA)
  modified_base (15)..(15): bicyclic nucleic acid (BNA)
  source: /note="3' tri-ethylene glycol (TEG)"
cgguaaguucugucc

SEQ ID NO: 7656 - RNA, 14 nt, Artificial Sequence
  source: /note="Description of Artificial Sequence: Synthetic oligonucleotide"
  source: /note="RNA"
  source: /note="5' tri-ethylene glycol (TEG)"
  modified_base (1)..(1): bicyclic nucleic acid (BNA)
  modified_base (14)..(14): bicyclic nucleic acid (BNA)
  source: /note="3' tri-ethylene glycol (TEG)"
cgguaaguucuguc

SEQ ID NO: 7657 - DNA, 13 bp, Artificial Sequence
  source: /note="Description of Artificial Sequence: Synthetic oligonucleotide"
  source: /note="Description of Combined DNA/RNA Molecule: Synthetic oligonucleotide"
  source: /note="DNA/RNA"
  source: /note="5' tri-ethylene glycol (TEG)"
  modified_base (1)..(1): bicyclic nucleic acid (BNA)
  modified_base (13)..(13): bicyclic nucleic acid (BNA)
  source: /note="3' tri-ethylene glycol (TEG)"
cgguaaguucugt

SEQ ID NO: 7658 - RNA, 12 nt, Artificial Sequence
  source: /note="Description of Artificial Sequence: Synthetic oligonucleotide"
  source: /note="RNA"
  source: /note="5' tri-ethylene glycol (TEG)"
  modified_base (1)..(1): bicyclic nucleic acid (BNA)
  modified_base (12)..(12): bicyclic nucleic acid (BNA)
  source: /note="3' tri-ethylene glycol (TEG)"
cgguaaguucug

SEQ ID NO: 7659 - DNA, 11 bp, Artificial Sequence
  source: /note="Description of Artificial Sequence: Synthetic oligonucleotide"
  source: /note="Description of Combined DNA/RNA Molecule: Synthetic oligonucleotide"
  source: /note="DNA/RNA"
  source: /note="5' tri-ethylene glycol (TEG)"
  modified_base (1)..(1): bicyclic nucleic acid (BNA)
  modified_base (11)..(11): bicyclic nucleic acid (BNA)
  source: /note="3' tri-ethylene glycol (TEG)"
cgguaaguuct

SEQ ID NO: 7660 - RNA, 10 nt, Artificial Sequence
  source: /note="Description of Artificial Sequence: Synthetic oligonucleotide"
  source: /note="RNA"
  source: /note="5' tri-ethylene glycol (TEG)"
  modified_base (1)..(1): bicyclic nucleic acid (BNA)
  modified_base (10)..(10): bicyclic nucleic acid (BNA)
  source: /note="3' tri-ethylene glycol (TEG)"
cgguaaguuc

SEQ ID NO: 7661 - DNA, 9 bp, Artificial Sequence
  source: /note="Description of Artificial Sequence: Synthetic oligonucleotide"
  source: /note="Description of Combined DNA/RNA Molecule: Synthetic oligonucleotide"
  source: /note="DNA/RNA"
  source: /note="5' tri-ethylene glycol (TEG)"
  modified_base (1)..(1): bicyclic nucleic acid (BNA)
  modified_base (9)..(9): bicyclic nucleic acid (BNA)
  source: /note="3' tri-ethylene glycol (TEG)"
cgguaagut

SEQ ID NO: 7662 - DNA, 8 bp, Artificial Sequence
  source: /note="Description of Artificial Sequence: Synthetic oligonucleotide"
  source: /note="Description of Combined DNA/RNA Molecule: Synthetic oligonucleotide"
  source: /note="DNA/RNA"
  source: /note="5' tri-ethylene glycol (TEG)"
  modified_base (1)..(1): bicyclic nucleic acid (BNA)
  modified_base (8)..(8): bicyclic nucleic acid (BNA)
  source: /note="3' tri-ethylene glycol (TEG)"
cgguaagt

SEQ ID NO: 7663 - DNA, 20 bp, Artificial Sequence
  source: /note="Description of Artificial Sequence: Synthetic oligonucleotide"
  source: /note="Description of Combined DNA/RNA Molecule: Synthetic oligonucleotide"
  source: /note="DNA/RNA"
  source: /note="5' tri-ethylene glycol (TEG)"
  modified_base (1)..(1): bicyclic nucleic acid (BNA)
  modified_base (20)..(20): bicyclic nucleic acid (BNA)
  source: /note="3' tri-ethylene glycol (TEG)"
tcgguaaguucuguccaagc

SEQ ID NO: 7664 - DNA, 19 bp, Artificial Sequence
  source: /note="Description of Artificial Sequence: Synthetic oligonucleotide"
  source: /note="Description of Combined DNA/RNA Molecule: Synthetic oligonucleotide"
  source: /note="DNA/RNA"
  source: /note="5' tri-ethylene glycol (TEG)"
  modified_base (1)..(1): bicyclic nucleic acid (BNA)
  modified_base (19)..(19): bicyclic nucleic acid (BNA)
  source: /note="3' tri-ethylene glycol (TEG)"
tcgguaaguucuguccaag

SEQ ID NO: 7665 - DNA, 18 bp, Artificial Sequence
  source: /note="Description of Artificial Sequence: Synthetic oligonucleotide"
  source: /note="Description of Combined DNA/RNA Molecule: Synthetic oligonucleotide"
  source: /note="DNA/RNA"
  source: /note="5' tri-ethylene glycol (TEG)"
  modified_base (1)..(1): bicyclic nucleic acid (BNA)
  modified_base (18)..(18): bicyclic nucleic acid (BNA)
  source: /note="3' tri-ethylene glycol (TEG)"
tcgguaaguucuguccaa

SEQ ID NO: 7666 - DNA, 17 bp, Artificial Sequence
  source: /note="Description of Artificial Sequence: Synthetic oligonucleotide"
  source: /note="Description of Combined DNA/RNA Molecule: Synthetic oligonucleotide"
  source: /note="DNA/RNA"
  source: /note="5' tri-ethylene glycol (TEG)"
  modified_base (1)..(1): bicyclic nucleic acid (BNA)
  modified_base (17)..(17): bicyclic nucleic acid (BNA)
  source: /note="3' tri-ethylene glycol (TEG)"
tcgguaaguucugucca

SEQ ID NO: 7667 - DNA, 16 bp, Artificial Sequence
  source: /note="Description of Artificial Sequence: Synthetic oligonucleotide"
  source: /note="Description of Combined DNA/RNA Molecule: Synthetic oligonucleotide"
  source: /note="DNA/RNA"
  source: /note="5' tri-ethylene glycol (TEG)"
  modified_base (1)..(1): bicyclic nucleic acid (BNA)
  modified_base (16)..(16): bicyclic nucleic acid (BNA)
  source: /note="3' tri-ethylene glycol (TEG)"
tcgguaaguucugucc

SEQ ID NO: 7668 - DNA, 15 bp, Artificial Sequence
  source: /note="Description of Artificial Sequence: Synthetic oligonucleotide"
  source: /note="Description of Combined DNA/RNA Molecule: Synthetic oligonucleotide"
  source: /note="DNA/RNA"
  source: /note="5' tri-ethylene glycol (TEG)"
  modified_base (1)..(1): bicyclic nucleic acid (BNA)
  modified_base (15)..(15): bicyclic nucleic acid (BNA)
  source: /note="3' tri-ethylene glycol (TEG)"
tcgguaaguucuguc

SEQ ID NO: 7669 - DNA, 14 bp, Artificial Sequence
  source: /note="Description of Artificial Sequence: Synthetic oligonucleotide"
  source: /note="Description of Combined DNA/RNA Molecule: Synthetic oligonucleotide"
  source: /note="DNA/RNA"
  source: /note="5' tri-ethylene glycol (TEG)"
  modified_base (1)..(1): bicyclic nucleic acid (BNA)
  modified_base (14)..(14): bicyclic nucleic acid (BNA)
  source: /note="3' tri-ethylene glycol (TEG)"
tcgguaaguucugt

SEQ ID NO: 7670 - DNA, 13 bp, Artificial Sequence
  source: /note="Description of Artificial Sequence: Synthetic oligonucleotide"
  source: /note="Description of Combined DNA/RNA Molecule: Synthetic oligonucleotide"
  source: /note="DNA/RNA"
  source: /note="5' tri-ethylene glycol (TEG)"
  modified_base (1)..(1): bicyclic nucleic acid (BNA)
  modified_base (13)..(13): bicyclic nucleic acid (BNA)
  source: /note="3' tri-ethylene glycol (TEG)"
tcgguaaguucug

SEQ ID NO: 7671 - DNA, 12 bp, Artificial Sequence
  source: /note="Description of Artificial Sequence: Synthetic oligonucleotide"
  source: /note="Description of Combined DNA/RNA Molecule: Synthetic oligonucleotide"
  source: /note="DNA/RNA"
  source: /note="5' tri-ethylene glycol (TEG)"
  modified_base (1)..(1): bicyclic nucleic acid (BNA)
  modified_base (12)..(12): bicyclic nucleic acid (BNA)
  source: /note="3' tri-ethylene glycol (TEG)"
tcgguaaguuct

SEQ ID NO: 7672 - DNA, 11 bp, Artificial Sequence
  source: /note="Description of Artificial Sequence: Synthetic oligonucleotide"
  source: /note="Description of Combined DNA/RNA Molecule: Synthetic oligonucleotide"
  source: /note="DNA/RNA"
  source: /note="5' tri-ethylene glycol (TEG)"
  modified_base (1)..(1): bicyclic nucleic acid (BNA)
  modified_base (11)..(11): bicyclic nucleic acid (BNA)
  source: /note="3' tri-ethylene glycol (TEG)"
tcgguaaguuc

SEQ ID NO: 7673 - DNA, 10 bp, Artificial Sequence
  source: /note="Description of Artificial Sequence: Synthetic oligonucleotide"
  source: /note="Description of Combined DNA/RNA Molecule: Synthetic oligonucleotide"
  source: /note="DNA/RNA"
  source: /note="5' tri-ethylene glycol (TEG)"
  modified_base (1)..(1): bicyclic nucleic acid (BNA)
  modified_base (10)..(10): bicyclic nucleic acid (BNA)
  source: /note="3' tri-ethylene glycol (TEG)"
tcgguaagut

SEQ ID NO: 7674 - DNA, 9 bp, Artificial Sequence
  source: /note="Description of Artificial Sequence: Synthetic oligonucleotide"
  source: /note="Description of Combined DNA/RNA Molecule: Synthetic oligonucleotide"
  source: /note="DNA/RNA"
  source: /note="5' tri-ethylene glycol (TEG)"
  modified_base (1)..(1): bicyclic nucleic acid (BNA)
  modified_base (9)..(9): bicyclic nucleic acid (BNA)
  source: /note="3' tri-ethylene glycol (TEG)"
tcgguaagt

SEQ ID NO: 7675 - RNA, 20 nt, Artificial Sequence
  source: /note="Description of Artificial Sequence: Synthetic oligonucleotide"
  source: /note="RNA"
  source: /note="5' tri-ethylene glycol (TEG)"
  modified_base (1)..(1): bicyclic nucleic acid (BNA)
  modified_base (20)..(20): bicyclic nucleic acid (BNA)
  source: /note="3' tri-ethylene glycol (TEG)"
gucgguaaguucuguccaag

SEQ ID NO: 7676 - RNA, 19 nt, Artificial Sequence
  source: /note="Description of Artificial Sequence: Synthetic oligonucleotide"
  source: /note="RNA"
  source: /note="5' tri-ethylene glycol (TEG)"
  modified_base (1)..(1): bicyclic nucleic acid (BNA)
  modified_base (19)..(19): bicyclic nucleic acid (BNA)
  source: /note="3' tri-ethylene glycol (TEG)"
gucgguaaguucuguccaa

SEQ ID NO: 7677 - RNA, 18 nt, Artificial Sequence
  source: /note="Description of Artificial Sequence: Synthetic oligonucleotide"
  source: /note="RNA"
  source: /note="5' tri-ethylene glycol (TEG)"
  modified_base (1)..(1): bicyclic nucleic acid (BNA)
  modified_base (18)..(18): bicyclic nucleic acid (BNA)
  source: /note="3' tri-ethylene glycol (TEG)"
gucgguaaguucugucca

SEQ ID NO: 7678 - RNA, 17 nt, Artificial Sequence
  source: /note="Description of Artificial Sequence: Synthetic oligonucleotide"
  source: /note="RNA"
  source: /note="5' tri-ethylene glycol (TEG)"
  modified_base (1)..(1): bicyclic nucleic acid (BNA)
  modified_base (17)..(17): bicyclic nucleic acid (BNA)
  source: /note="3' tri-ethylene glycol (TEG)"
gucgguaaguucugucc

SEQ ID NO: 7679 - RNA, 16 nt, Artificial Sequence
  source: /note="Description of Artificial Sequence: Synthetic oligonucleotide"
  source: /note="RNA"
  source: /note="5' tri-ethylene glycol (TEG)"
  modified_base (1)..(1): bicyclic nucleic acid (BNA)
  modified_base (16)..(16): bicyclic nucleic acid (BNA)
  source: /note="3' tri-ethylene glycol (TEG)"
gucgguaaguucuguc

SEQ ID NO: 7680 - DNA, 15 bp, Artificial Sequence
  source: /note="Description of Artificial Sequence: Synthetic oligonucleotide"
  source: /note="Description of Combined DNA/RNA Molecule: Synthetic oligonucleotide"
  source: /note="DNA/RNA"
  source: /note="5' tri-ethylene glycol (TEG)"
  modified_base (1)..(1): bicyclic nucleic acid (BNA)
  modified_base (15)..(15): bicyclic nucleic acid (BNA)
  source: /note="3' tri-ethylene glycol (TEG)"
gucgguaaguucugt

SEQ ID NO: 7681 - RNA, 14 nt, Artificial Sequence
  source: /note="Description of Artificial Sequence: Synthetic oligonucleotide"
  source: /note="RNA"
  source: /note="5' tri-ethylene glycol (TEG)"
  modified_base (1)..(1): bicyclic nucleic acid (BNA)
  modified_base (14)..(14): bicyclic nucleic acid (BNA)
  source: /note="3' tri-ethylene glycol (TEG)"
gucgguaaguucug

SEQ ID NO: 7682 - DNA, 13 bp, Artificial Sequence
  source: /note="Description of Artificial Sequence: Synthetic oligonucleotide"
  source: /note="Description of Combined DNA/RNA Molecule: Synthetic oligonucleotide"
  source: /note="DNA/RNA"
  source: /note="5' tri-ethylene glycol (TEG)"
  modified_base (1)..(1): bicyclic nucleic acid (BNA)
  modified_base (13)..(13): bicyclic nucleic acid (BNA)
  source: /note="3' tri-ethylene glycol (TEG)"
gucgguaaguuct

SEQ ID NO: 7683 - RNA, 12 nt, Artificial Sequence
  source: /note="Description of Artificial Sequence: Synthetic oligonucleotide"
  source: /note="RNA"
  source: /note="5' tri-ethylene glycol (TEG)"
  modified_base (1)..(1): bicyclic nucleic acid (BNA)
  modified_base (12)..(12): bicyclic nucleic acid (BNA)
  source: /note="3' tri-ethylene glycol (TEG)"
gucgguaaguuc

SEQ ID NO: 7684 - DNA, 11 bp, Artificial Sequence
  source: /note="Description of Artificial Sequence: Synthetic oligonucleotide"
  source: /note="Description of Combined DNA/RNA Molecule: Synthetic oligonucleotide"
  source: /note="DNA/RNA"
  source: /note="5' tri-ethylene glycol (TEG)"
  modified_base (1)..(1): bicyclic nucleic acid (BNA)
  modified_base (11)..(11): bicyclic nucleic acid (BNA)
  source: /note="3' tri-ethylene glycol (TEG)"
gucgguaagut

SEQ ID NO: 7685 - DNA, 10 bp, Artificial Sequence
  source: /note="Description of Artificial Sequence: Synthetic oligonucleotide"
  source: /note="Description of Combined DNA/RNA Molecule: Synthetic oligonucleotide"
  source: /note="DNA/RNA"
  source: /note="5' tri-ethylene glycol (TEG)"
  modified_base (1)..(1): bicyclic nucleic acid (BNA)
  modified_base (10)..(10): bicyclic nucleic acid (BNA)
  source: /note="3' tri-ethylene glycol (TEG)"
gucgguaagt

SEQ ID NO: 7686 - RNA, 20 nt, Artificial Sequence
  source: /note="Description of Artificial Sequence: Synthetic oligonucleotide"
  source: /note="RNA"
  source: /note="5' tri-ethylene glycol (TEG)"
  modified_base (1)..(1): bicyclic nucleic acid (BNA)
  modified_base (20)..(20): bicyclic nucleic acid (BNA)
  source: /note="3' tri-ethylene glycol (TEG)"
agucgguaaguucuguccaa

SEQ ID NO: 7687 - RNA, 19 nt, Artificial Sequence
  source: /note="Description of Artificial Sequence: Synthetic oligonucleotide"
  source: /note="RNA"
  source: /note="5' tri-ethylene glycol (TEG)"
  modified_base (1)..(1): bicyclic nucleic acid (BNA)
  modified_base (19)..(19): bicyclic nucleic acid (BNA)
  source: /note="3' tri-ethylene glycol (TEG)"
agucgguaaguucugucca

SEQ ID NO: 7688 - RNA, 17 nt, Artificial Sequence
  source: /note="Description of Artificial Sequence: Synthetic oligonucleotide"
  source: /note="RNA"
  source: /note="5' tri-ethylene glycol (TEG)"
  modified_base (1)..(1): bicyclic nucleic acid (BNA)
  modified_base (17)..(17): bicyclic nucleic acid (BNA)
  source: /note="3' tri-ethylene glycol (TEG)"
agucgguaaguucuguc

SEQ ID NO: 7689 - DNA, 16 bp, Artificial Sequence
  source: /note="Description of Artificial Sequence: Synthetic oligonucleotide"
  source: /note="Description of Combined DNA/RNA Molecule: Synthetic oligonucleotide"
  source: /note="DNA/RNA"
  source: /note="5' tri-ethylene glycol (TEG)"
  modified_base (1)..(1): bicyclic nucleic acid (BNA)
  modified_base (16)..(16): bicyclic nucleic acid (BNA)
  source: /note="3' tri-ethylene glycol (TEG)"
agucgguaaguucugt

SEQ ID NO: 7690 - RNA, 15 nt, Artificial Sequence
  source: /note="Description of Artificial Sequence: Synthetic oligonucleotide"
  source: /note="RNA"
  source: /note="5' tri-ethylene glycol (TEG)"
  modified_base (1)..(1): bicyclic nucleic acid (BNA)
  modified_base (15)..(15): bicyclic nucleic acid (BNA)
  source: /note="3' tri-ethylene glycol (TEG)"
agucgguaaguucug

SEQ ID NO: 7691 - DNA, 14 bp, Artificial Sequence
  source: /note="Description of Artificial Sequence: Synthetic oligonucleotide"
  source: /note="Description of Combined DNA/RNA Molecule: Synthetic oligonucleotide"
  source: /note="DNA/RNA"
  source: /note="5' tri-ethylene glycol (TEG)"
  modified_base (1)..(1): bicyclic nucleic acid (BNA)
  modified_base (14)..(14): bicyclic nucleic acid (BNA)
  source: /note="3' tri-ethylene glycol (TEG)"
agucgguaaguuct

SEQ ID NO: 7692 - RNA, 13 nt, Artificial Sequence
  source: /note="Description of Artificial Sequence: Synthetic oligonucleotide"
  source: /note="RNA"
  source: /note="5' tri-ethylene glycol (TEG)"
  modified_base (1)..(1): bicyclic nucleic acid (BNA)
  modified_base (13)..(13): bicyclic nucleic acid (BNA)
  source: /note="3' tri-ethylene glycol (TEG)"
agucgguaaguuc

SEQ ID NO: 7693 - DNA, 12 bp, Artificial Sequence
  source: /note="Description of Artificial Sequence: Synthetic oligonucleotide"
  source: /note="Description of Combined DNA/RNA Molecule: Synthetic oligonucleotide"
  source: /note="DNA/RNA"
  source: /note="5' tri-ethylene glycol (TEG)"
  modified_base (1)..(1): bicyclic nucleic acid (BNA)
  modified_base (12)..(12): bicyclic nucleic acid (BNA)
  source: /note="3' tri-ethylene glycol (TEG)"
agucgguaagut

SEQ ID NO: 7694 - DNA, 11 bp, Artificial Sequence
  source: /note="Description of Artificial Sequence: Synthetic oligonucleotide"
  source: /note="Description of Combined DNA/RNA Molecule: Synthetic oligonucleotide"
  source: /note="DNA/RNA"
  source: /note="5' tri-ethylene glycol (TEG)"
  modified_base (1)..(1): bicyclic nucleic acid (BNA)
  modified_base (11)..(11): bicyclic nucleic acid (BNA)
  source: /note="3' tri-ethylene glycol (TEG)"
agucgguaagt

SEQ ID NO: 7695 - RNA, 20 nt, Artificial Sequence
  source: /note="Description of Artificial Sequence: Synthetic oligonucleotide"
  source: /note="RNA"
  source: /note="5' tri-ethylene glycol (TEG)"
  modified_base (1)..(1): bicyclic nucleic acid (BNA)
  modified_base (20)..(20): bicyclic nucleic acid (BNA)
  source: /note="3' tri-ethylene glycol (TEG)"
cagucgguaaguucugucca

SEQ ID NO: 7696 - RNA, 19 nt, Artificial Sequence
  source: /note="Description of Artificial Sequence: Synthetic oligonucleotide"
  source: /note="RNA"
  source: /note="5' tri-ethylene glycol (TEG)"
  modified_base (1)..(1): bicyclic nucleic acid (BNA)
  modified_base (19)..(19): bicyclic nucleic acid (BNA)
  source: /note="3' tri-ethylene glycol (TEG)"
cagucgguaaguucugucc

SEQ ID NO: 7697 - RNA, 18 nt, Artificial Sequence
  source: /note="Description of Artificial Sequence: Synthetic oligonucleotide"
  source: /note="RNA"
  source: /note="5' tri-ethylene glycol (TEG)"
  modified_base (1)..(1): bicyclic nucleic acid (BNA)
  modified_base (18)..(18): bicyclic nucleic acid (BNA)
  source: /note="3' tri-ethylene glycol (TEG)"
cagucgguaaguucuguc

SEQ ID NO: 7698 - DNA, 17 bp, Artificial Sequence
  source: /note="Description of Artificial Sequence: Synthetic oligonucleotide"
  source: /note="Description of Combined DNA/RNA Molecule: Synthetic oligonucleotide"
  source: /note="DNA/RNA"
  source: /note="5' tri-ethylene glycol (TEG)"
  modified_base (1)..(1): bicyclic nucleic acid (BNA)
  modified_base (17)..(17): bicyclic nucleic acid (BNA)
  source: /note="3' tri-ethylene glycol (TEG)"
cagucgguaaguucugt

SEQ ID NO: 7699 - RNA, 16 nt, Artificial Sequence
  source: /note="Description of Artificial Sequence: Synthetic oligonucleotide"
  source: /note="RNA"
  source: /note="5' tri-ethylene glycol (TEG)"
  modified_base (1)..(1): bicyclic nucleic acid (BNA)
  modified_base (16)..(16): bicyclic nucleic acid (BNA)
  source: /note="3' tri-ethylene glycol (TEG)"
cagucgguaaguucug

SEQ ID NO: 7700 - DNA, 15 bp, Artificial Sequence
  source: /note="Description of Artificial Sequence: Synthetic oligonucleotide"
  source: /note="Description of Combined DNA/RNA Molecule: Synthetic oligonucleotide"
  source: /note="DNA/RNA"
  source: /note="5' tri-ethylene glycol (TEG)"
  modified_base (1)..(1): bicyclic nucleic acid (BNA)
  modified_base (15)..(15): bicyclic nucleic acid (BNA)
  source: /note="3' tri-ethylene glycol (TEG)"
cagucgguaaguuct

SEQ ID NO: 7701 - RNA, 14 nt, Artificial Sequence
  source: /note="Description of Artificial Sequence: Synthetic oligonucleotide"
  source: /note="RNA"
  source: /note="5' tri-ethylene glycol (TEG)"
  modified_base (1)..(1): bicyclic nucleic acid (BNA)
  modified_base (14)..(14): bicyclic nucleic acid (BNA)
  source: /note="3' tri-ethylene glycol (TEG)"
cagucgguaaguuc

SEQ ID NO: 7702 - DNA, 13 bp, Artificial Sequence
  source: /note="Description of Artificial Sequence: Synthetic oligonucleotide"
  source: /note="Description of Combined DNA/RNA Molecule: Synthetic oligonucleotide"
  source: /note="DNA/RNA"
  source: /note="5' tri-ethylene glycol (TEG)"
  modified_base (1)..(1): bicyclic nucleic acid (BNA)
  modified_base (13)..(13): bicyclic nucleic acid (BNA)
  source: /note="3' tri-ethylene glycol (TEG)"
cagucgguaagut

SEQ ID NO: 7703 - DNA, 12 bp, Artificial Sequence
  source: /note="Description of Artificial Sequence: Synthetic oligonucleotide"
  source: /note="Description of Combined DNA/RNA Molecule: Synthetic oligonucleotide"
  source: /note="DNA/RNA"
  source: /note="5' tri-ethylene glycol (TEG)"
  modified_base (1)..(1): bicyclic nucleic acid (BNA)
  modified_base (12)..(12): bicyclic nucleic acid (BNA)
  source: /note="3' tri-ethylene glycol (TEG)"
cagucgguaagt

SEQ ID NO: 7704 - RNA, 20 nt, Artificial Sequence
  source: /note="Description of Artificial Sequence: Synthetic oligonucleotide"
  source: /note="RNA"
  source: /note="5' tri-ethylene glycol (TEG)"
  modified_base (1)..(1): bicyclic nucleic acid (BNA)
  modified_base (20)..(20): bicyclic nucleic acid (BNA)
  source: /note="3' tri-ethylene glycol (TEG)"
ccagucgguaaguucugucc

SEQ ID NO: 7705 - RNA, 19 nt, Artificial Sequence
  source: /note="Description of Artificial Sequence: Synthetic oligonucleotide"
  source: /note="RNA"
  source: /note="5' tri-ethylene glycol (TEG)"
  modified_base (1)..(1): bicyclic nucleic acid (BNA)
  modified_base (19)..(19): bicyclic nucleic acid (BNA)
  source: /note="3' tri-ethylene glycol (TEG)"
ccagucgguaaguucuguc

SEQ ID NO: 7706 - DNA, 18 bp, Artificial Sequence
  source: /note="Description of Artificial Sequence: Synthetic oligonucleotide"
  source: /note="Description of Combined DNA/RNA Molecule: Synthetic oligonucleotide"
  source: /note="DNA/RNA"
  source: /note="5' tri-ethylene glycol (TEG)"
  modified_base (1)..(1): bicyclic nucleic acid (BNA)
  modified_base (18)..(18): bicyclic nucleic acid (BNA)
  source: /note="3' tri-ethylene glycol (TEG)"
ccagucgguaaguucugt

SEQ ID NO: 7707 - RNA, 17 nt, Artificial Sequence
  source: /note="Description of Artificial Sequence: Synthetic oligonucleotide"
  source: /note="RNA"
  source: /note="5' tri-ethylene glycol (TEG)"
  modified_base (1)..(1): bicyclic nucleic acid (BNA)
  modified_base (17)..(17): bicyclic nucleic acid (BNA)
  source: /note="3' tri-ethylene glycol (TEG)"
ccagucgguaaguucug

SEQ ID NO: 7708 - DNA, 16 bp, Artificial Sequence
  source: /note="Description of Artificial Sequence: Synthetic oligonucleotide"
  source: /note="Description of Combined DNA/RNA Molecule: Synthetic oligonucleotide"
  source: /note="DNA/RNA"
  source: /note="5' tri-ethylene glycol (TEG)"
  modified_base (1)..(1): bicyclic nucleic acid (BNA)
  modified_base (16)..(16): bicyclic nucleic acid (BNA)
  source: /note="3' tri-ethylene glycol (TEG)"
ccagucgguaaguuct

SEQ ID NO: 7709 - RNA, 15 nt, Artificial Sequence
  source: /note="Description of Artificial Sequence: Synthetic oligonucleotide"
  source: /note="RNA"
  source: /note="5' tri-ethylene glycol (TEG)"
  modified_base (1)..(1): bicyclic nucleic acid (BNA)
  modified_base (15)..(15): bicyclic nucleic acid (BNA)
  source: /note="3' tri-ethylene glycol (TEG)"
ccagucgguaaguuc

SEQ ID NO: 7710 - DNA, 14 bp, Artificial Sequence
  source: /note="Description of Artificial Sequence: Synthetic oligonucleotide"
  source: /note="Description of Combined DNA/RNA Molecule: Synthetic oligonucleotide"
  source: /note="DNA/RNA"
  source: /note="5' tri-ethylene glycol (TEG)"
  modified_base (1)..(1): bicyclic nucleic acid (BNA)
  modified_base (14)..(14): bicyclic nucleic acid (BNA)
  source: /note="3' tri-ethylene glycol (TEG)"
ccagucgguaagut

SEQ ID NO: 7711 - DNA, 13 bp, Artificial Sequence
  source: /note="Description of Artificial Sequence: Synthetic oligonucleotide"
  source: /note="Description of Combined DNA/RNA Molecule: Synthetic oligonucleotide"
  source: /note="DNA/RNA"
  source: /note="5' tri-ethylene glycol (TEG)"
  modified_base (1)..(1): bicyclic nucleic acid (BNA)
  modified_base (13)..(13): bicyclic nucleic acid (BNA)
  source: /note="3' tri-ethylene glycol (TEG)"
ccagucgguaagt

SEQ ID NO: 7712 - RNA, 20 nt, Artificial Sequence
  source: /note="Description of Artificial Sequence: Synthetic oligonucleotide"
  source: /note="RNA"
  source: /note="5' tri-ethylene glycol (TEG)"
  modified_base (1)..(1): bicyclic nucleic acid (BNA)
  modified_base (20)..(20): bicyclic nucleic acid (BNA)
  source: /note="3' tri-ethylene glycol (TEG)"
gccagucgguaaguucuguc

SEQ ID NO: 7713 - DNA, 19 bp, Artificial Sequence
  source: /note="Description of Artificial Sequence: Synthetic oligonucleotide"
  source: /note="Description of Combined DNA/RNA Molecule: Synthetic oligonucleotide"
  source: /note="DNA/RNA"
  source: /note="5' tri-ethylene glycol (TEG)"
  modified_base (1)..(1): bicyclic nucleic acid (BNA)
  modified_base (19)..(19): bicyclic nucleic acid (BNA)
  source: /note="3' tri-ethylene glycol (TEG)"
gccagucgguaaguucugt

SEQ ID NO: 7714 - RNA, 18 nt, Artificial Sequence
  source: /note="Description of Artificial Sequence: Synthetic oligonucleotide"
  source: /note="RNA"
  source: /note="5' tri-ethylene glycol (TEG)"
  modified_base (1)..(1): bicyclic nucleic acid (BNA)
  modified_base (18)..(18): bicyclic nucleic acid (BNA)
  source: /note="3' tri-ethylene glycol (TEG)"
gccagucgguaaguucug

SEQ ID NO: 7715 - DNA, 17 bp, Artificial Sequence
  source: /note="Description of Artificial Sequence: Synthetic oligonucleotide"
  source: /note="Description of Combined DNA/RNA Molecule: Synthetic oligonucleotide"
  source: /note="DNA/RNA"
  source: /note="5' tri-ethylene glycol (TEG)"
  modified_base (1)..(1): bicyclic nucleic acid (BNA)
  modified_base (17)..(17): bicyclic nucleic acid (BNA)
  source: /note="3' tri-ethylene glycol (TEG)"
gccagucgguaaguuct

SEQ ID NO: 7716 - RNA, 16 nt, Artificial Sequence
  source: /note="Description of Artificial Sequence: Synthetic oligonucleotide"
  source: /note="RNA"
  source: /note="5' tri-ethylene glycol (TEG)"
  modified_base (1)..(1): bicyclic nucleic acid (BNA)
  modified_base (16)..(16): bicyclic nucleic acid (BNA)
  source: /note="3' tri-ethylene glycol (TEG)"
gccagucgguaaguuc

SEQ ID NO: 7717 - DNA, 15 bp, Artificial Sequence
  source: /note="Description of Artificial Sequence: Synthetic oligonucleotide"
  source: /note="Description of Combined DNA/RNA Molecule: Synthetic oligonucleotide"
  source: /note="DNA/RNA"
  source: /note="5' tri-ethylene glycol (TEG)"
  modified_base (1)..(1): bicyclic nucleic acid (BNA)
  modified_base (15)..(15): bicyclic nucleic acid (BNA)
  source: /note="3' tri-ethylene glycol (TEG)"
gccagucgguaagut

SEQ ID NO: 7718 - DNA, 14 bp, Artificial Sequence
  source: /note="Description of Artificial Sequence: Synthetic oligonucleotide"
  source: /note="Description of Combined DNA/RNA Molecule: Synthetic oligonucleotide"
  source: /note="DNA/RNA"
  source: /note="5' tri-ethylene glycol (TEG)"
  modified_base (1)..(1): bicyclic nucleic acid (BNA)
  modified_base (14)..(14): bicyclic nucleic acid (BNA)
  source: /note="3' tri-ethylene glycol (TEG)"
gccagucgguaagt

SEQ ID NO: 7719 - DNA, 20 bp, Artificial Sequence
  source: /note="Description of Artificial Sequence: Synthetic oligonucleotide"
  source: /note="Description of Combined DNA/RNA Molecule: Synthetic oligonucleotide"
  source: /note="DNA/RNA"
  source: /note="5' tri-ethylene glycol (TEG)"
  modified_base (1)..(1): bicyclic nucleic acid (BNA)
  modified_base (20)..(20): bicyclic nucleic acid (BNA)
  source: /note="3' tri-ethylene glycol (TEG)"
tcaaggaagauggcauuuct

SEQ ID NO: 7720 - DNA, 22 bp, Artificial Sequence
  source: /note="Description of Artificial Sequence: Synthetic oligonucleotide"
  source: /note="Description of Combined DNA/RNA Molecule: Synthetic oligonucleotide"
  source: /note="DNA/RNA"
  source: /note="5' tri-ethylene glycol (TEG)"
  modified_base (1)..(1): bicyclic nucleic acid (BNA)
  modified_base (22)..(22): bicyclic nucleic acid (BNA)
  source: /note="3' tri-ethylene glycol (TEG)"
tcaaggaagauggcauuucuag

SEQ ID NO: 7721 - DNA, 16 bp, Artificial Sequence
  source: /note="Description of Artificial Sequence: Synthetic oligonucleotide"
  source: /note="Description of Combined DNA/RNA Molecule: Synthetic oligonucleotide"
  source: /note="DNA/RNA"
  source: /note="5' tri-ethylene glycol (TEG)"
  modified_base (1)..(1): bicyclic nucleic acid (BNA)
  modified_base (16)..(16): bicyclic nucleic acid (BNA)
  source: /note="3' tri-ethylene glycol (TEG)"
tcaaggaagauggcat

SEQ ID NO: 7722 - DNA, 15 bp, Artificial Sequence
  source: /note="Description of Artificial Sequence: Synthetic oligonucleotide"
  source: /note="Description of Combined DNA/RNA Molecule: Synthetic oligonucleotide"
  source: /note="DNA/RNA"
  source: /note="5' tri-ethylene glycol (TEG)"
  modified_base (1)..(1): bicyclic nucleic acid (BNA)
  modified_base (15)..(15): bicyclic nucleic acid (BNA)
  source: /note="3' tri-ethylene glycol (TEG)"
gaagauggcauuuct

SEQ ID NO: 7723 - DNA, 21 bp, Artificial Sequence
  source: /note="Description of Artificial Sequence: Synthetic oligonucleotide"
  source: /note="Description of Combined DNA/RNA Molecule: Synthetic oligonucleotide"
  source: /note="DNA/RNA"
  source: /note="5' tri-ethylene glycol (TEG)"
  modified_base (1)..(1): bicyclic nucleic acid (BNA)
  modified_base (21)..(21): bicyclic nucleic acid (BNA)
  source: /note="3' tri-ethylene glycol (TEG)"
tcaaggaagauggcauuucua

SEQ ID NO: 7724 - DNA, 19 bp, Artificial Sequence
  source: /note="Description of Artificial Sequence: Synthetic oligonucleotide"
  source: /note="Description of Combined DNA/RNA Molecule: Synthetic oligonucleotide"
  source: /note="DNA/RNA"
  source: /note="5' tri-ethylene glycol (TEG)"
  modified_base (1)..(1): bicyclic nucleic acid (BNA)
  modified_base (19)..(19): bicyclic nucleic acid (BNA)
  source: /note="3' tri-ethylene glycol (TEG)"
tcaaggaagauggcauuuc

SEQ ID NO: 7725 - DNA, 18 bp, Artificial Sequence
  source: /note="Description of Artificial Sequence: Synthetic oligonucleotide"
  source: /note="Description of Combined DNA/RNA Molecule: Synthetic oligonucleotide"
  source: /note="DNA/RNA"
  source: /note="5' tri-ethylene glycol (TEG)"
  modified_base (1)..(1): bicyclic nucleic acid (BNA)
  modified_base (18)..(18): bicyclic nucleic acid (BNA)
  source: /note="3' tri-ethylene glycol (TEG)"
tcaaggaagauggcauut

SEQ ID NO: 7726 - DNA, 17 bp, Artificial Sequence
  source: /note="Description of Artificial Sequence: Synthetic oligonucleotide"
  source: /note="Description of Combined DNA/RNA Molecule: Synthetic oligonucleotide"
  source: /note="DNA/RNA"
  source: /note="5' tri-ethylene glycol (TEG)"
  modified_base (1)..(1): bicyclic nucleic acid (BNA)
  modified_base (17)..(17): bicyclic nucleic acid (BNA)
  source: /note="3' tri-ethylene glycol (TEG)"
tcaaggaagauggcaut

SEQ ID NO: 7727 - DNA, 15 bp, Artificial Sequence
  source: /note="Description of Artificial Sequence: Synthetic oligonucleotide"
  source: /note="Description of Combined DNA/RNA Molecule: Synthetic oligonucleotide"
  source: /note="DNA/RNA"
  source: /note="5' tri-ethylene glycol (TEG)"
  modified_base (1)..(1): bicyclic nucleic acid (BNA)
  modified_base (15)..(15): bicyclic nucleic acid (BNA)
  source: /note="3' tri-ethylene glycol (TEG)"
tcaaggaagauggca

SEQ ID NO: 7728 - DNA, 14 bp, Artificial Sequence
  source: /note="Description of Artificial Sequence: Synthetic oligonucleotide"
  source: /note="Description of Combined DNA/RNA Molecule: Synthetic oligonucleotide"
  source: /note="DNA/RNA"
  source: /note="5' tri-ethylene glycol (TEG)"
  modified_base (1)..(1): bicyclic nucleic acid (BNA)
  modified_base (14)..(14): bicyclic nucleic acid (BNA)
  source: /note="3' tri-ethylene glycol (TEG)"
tcaaggaagauggc

SEQ ID NO: 7729 - DNA, 13 bp, Artificial Sequence
  source: /note="Description of Artificial Sequence: Synthetic oligonucleotide"
  source: /note="Description of Combined DNA/RNA Molecule: Synthetic oligonucleotide"
  source: /note="DNA/RNA"
  source: /note="5' tri-ethylene glycol (TEG)"
  modified_base (1)..(1): bicyclic nucleic acid (BNA)
  modified_base (13)..(13): bicyclic nucleic acid (BNA)
  source: /note="3' tri-ethylene glycol (TEG)"
tcaaggaagaugg

SEQ ID NO: 7730 - DNA, 12 bp, Artificial Sequence
  source: /note="Description of Artificial Sequence: Synthetic oligonucleotide"
  source: /note="Description of Combined DNA/RNA Molecule: Synthetic oligonucleotide"
  source: /note="DNA/RNA"
  source: /note="5' tri-ethylene glycol (TEG)"
  modified_base (1)..(1): bicyclic nucleic acid (BNA)
  modified_base (12)..(12): bicyclic nucleic acid (BNA)
  source: /note="3' tri-ethylene glycol (TEG)"
tcaaggaagaug

SEQ ID NO: 7731 - DNA, 11 bp, Artificial Sequence
  source: /note="Description of Artificial Sequence: Synthetic oligonucleotide"
  source: /note="DNA/RNA"
  source: /note="5' tri-ethylene glycol (TEG)"
  modified_base (1)..(1): bicyclic nucleic acid (BNA)
  modified_base (11)..(11): bicyclic nucleic acid (BNA)
  source: /note="3' tri-ethylene glycol (TEG)"
tcaaggaagat

SEQ ID NO: 7732 - DNA, 10 bp, Artificial Sequence
  source: /note="Description of Artificial Sequence: Synthetic oligonucleotide"
  source: /note="DNA/RNA"
  source: /note="5' tri-ethylene glycol (TEG)"
  modified_base (1)..(1): bicyclic nucleic acid (BNA)
  modified_base (10)..(10): bicyclic nucleic acid (BNA)
  source: /note="3' tri-ethylene glycol (TEG)"
tcaaggaaga

SEQ ID NO: 7733 - DNA, 9 bp, Artificial Sequence
  source: /note="Description of Artificial Sequence: Synthetic oligonucleotide"
  source: /note="DNA/RNA"
  source: /note="5' tri-ethylene glycol (TEG)"
  modified_base (1)..(1): bicyclic nucleic acid (BNA)
  modified_base (9)..(9): bicyclic nucleic acid (BNA)
  source: /note="3' tri-ethylene glycol (TEG)"
tcaaggaag

SEQ ID NO: 7734 - RNA, 21 nt, Artificial Sequence
  source: /note="Description of Artificial Sequence: Synthetic oligonucleotide"
  source: /note="RNA"
  source: /note="5' tri-ethylene glycol (TEG)"
  modified_base (1)..(1): bicyclic nucleic acid (BNA)
  modified_base (21)..(21): bicyclic nucleic acid (BNA)
  source: /note="3' tri-ethylene glycol (TEG)"
caaggaagauggcauuucuag

SEQ ID NO: 7735 - RNA, 20 nt, Artificial Sequence
  source: /note="Description of Artificial Sequence: Synthetic oligonucleotide"
  source: /note="RNA"
  source: /note="5' tri-ethylene glycol (TEG)"
  modified_base (1)..(1): bicyclic nucleic acid (BNA)
  modified_base (20)..(20): bicyclic nucleic acid (BNA)
  source: /note="3' tri-ethylene glycol (TEG)"
caaggaagauggcauuucua

SEQ ID NO: 7736 - DNA, 19 bp, Artificial Sequence
  source: /note="Description of Artificial Sequence: Synthetic oligonucleotide"
  source: /note="Description of Combined DNA/RNA Molecule: Synthetic oligonucleotide"
  source: /note="DNA/RNA"
  source: /note="5' tri-ethylene glycol (TEG)"
  modified_base (1)..(1): bicyclic nucleic acid (BNA)
  modified_base (19)..(19): bicyclic nucleic acid (BNA)
  source: /note="3' tri-ethylene glycol (TEG)"
caaggaagauggcauuuct

SEQ ID NO: 7737 - RNA, 18 nt, Artificial Sequence
  source: /note="Description of Artificial Sequence: Synthetic oligonucleotide"
  source: /note="RNA"
  source: /note="5' tri-ethylene glycol (TEG)"
  modified_base (1)..(1): bicyclic nucleic acid (BNA)
  modified_base (18)..(18): bicyclic nucleic acid (BNA)
  source: /note="3' tri-ethylene glycol (TEG)"
caaggaagauggcauuuc

SEQ ID NO: 7738 - DNA, 17 bp, Artificial Sequence
  source: /note="Description of Artificial Sequence: Synthetic oligonucleotide"
  source: /note="Description of Combined DNA/RNA Molecule: Synthetic oligonucleotide"
  source: /note="DNA/RNA"
  source: /note="5' tri-ethylene glycol (TEG)"
  modified_base (1)..(1): bicyclic nucleic acid (BNA)
  modified_base (17)..(17): bicyclic nucleic acid (BNA)
  source: /note="3' tri-ethylene glycol (TEG)"
caaggaagauggcauut

SEQ ID NO: 7739 - DNA, 16 bp, Artificial Sequence
  source: /note="Description of Artificial Sequence: Synthetic oligonucleotide"
  source: /note="Description of Combined DNA/RNA Molecule: Synthetic oligonucleotide"
  source: /note="DNA/RNA"
  source: /note="5' tri-ethylene glycol (TEG)"
  modified_base (1)..(1): bicyclic nucleic acid (BNA)
  modified_base (16)..(16): bicyclic nucleic acid (BNA)
  source: /note="3' tri-ethylene glycol (TEG)"
caaggaagauggcaut

SEQ ID NO: 7740 - DNA, 15 bp, Artificial Sequence
  source: /note="Description of Artificial Sequence: Synthetic oligonucleotide"
  source: /note="Description of Combined DNA/RNA Molecule: Synthetic oligonucleotide"
  source: /note="DNA/RNA"
  source: /note="5' tri-ethylene glycol (TEG)"
  modified_base (1)..(1): bicyclic nucleic acid (BNA)
  modified_base (15)..(15): bicyclic nucleic acid (BNA)
  source: /note="3' tri-ethylene glycol (TEG)"
caaggaagauggcat

SEQ ID NO: 7741 - RNA, 14 nt, Artificial Sequence
  source: /note="Description of Artificial Sequence: Synthetic oligonucleotide"
  source: /note="RNA"
  source: /note="5' tri-ethylene glycol (TEG)"
  modified_base (1)..(1): bicyclic nucleic acid (BNA)
  modified_base (14)..(14): bicyclic nucleic acid (BNA)
  source: /note="3' tri-ethylene glycol (TEG)"
caaggaagauggca

SEQ ID NO: 7742 - RNA, 13 nt, Artificial Sequence
  source: /note="Description of Artificial Sequence: Synthetic oligonucleotide"
  source: /note="RNA"
  source: /note="5' tri-ethylene glycol (TEG)"
  modified_base (1)..(1): bicyclic nucleic acid (BNA)
  modified_base (13)..(13): bicyclic nucleic acid (BNA)
  source: /note="3' tri-ethylene glycol (TEG)"
caaggaagauggc

SEQ ID NO: 7743 - RNA, 12 nt, Artificial Sequence
  source: /note="Description of Artificial Sequence: Synthetic oligonucleotide"
  source: /note="RNA"
  source: /note="5' tri-ethylene glycol (TEG)"
  modified_base (1)..(1): bicyclic nucleic acid (BNA)
  modified_base (12)..(12): bicyclic nucleic acid (BNA)
  source: /note="3' tri-ethylene glycol (TEG)"
caaggaagaugg

SEQ ID NO: 7744 - RNA, 11 nt, Artificial Sequence
  source: /note="Description of Artificial Sequence: Synthetic oligonucleotide"
  source: /note="RNA"
  source: /note="5' tri-ethylene glycol (TEG)"
  modified_base (1)..(1): bicyclic nucleic acid (BNA)
  modified_base (11)..(11): bicyclic nucleic acid (BNA)
  source: /note="3' tri-ethylene glycol (TEG)"
caaggaagaug

SEQ ID NO: 7745 - DNA, 10 bp, Artificial Sequence
  source: /note="Description of Artificial Sequence: Synthetic oligonucleotide"
  source: /note="DNA/RNA"
  source: /note="5' tri-ethylene glycol (TEG)"
  modified_base (1)..(1): bicyclic nucleic acid (BNA)
  modified_base (10)..(10): bicyclic nucleic acid (BNA)
  source: /note="3' tri-ethylene glycol (TEG)"
caaggaagat

SEQ ID NO: 7746 - RNA, 9 nt, Artificial Sequence
  source: /note="Description of Artificial Sequence: Synthetic oligonucleotide"
  source: /note="RNA/Antisense Oligonucleotide"
  source: /note="5' tri-ethylene glycol (TEG)"
  modified_base (1)..(1): bicyclic nucleic acid (BNA)
  modified_base (9)..(9): bicyclic nucleic acid (BNA)
  source: /note="3' tri-ethylene glycol (TEG)"
caaggaaga

SEQ ID NO: 7747 - RNA, 8 nt, Artificial Sequence
  source: /note="Description of Artificial Sequence: Synthetic oligonucleotide"
  source: /note="RNA/Antisense Oligonucleotide"
  source: /note="5' tri-ethylene glycol (TEG)"
  modified_base (1)..(1): bicyclic nucleic acid (BNA)
  modified_base (8)..(8): bicyclic nucleic acid (BNA)
  source: /note="3' tri-ethylene glycol (TEG)"
caaggaag

SEQ ID NO: 7748 - RNA, 20 nt, Artificial Sequence
  source: /note="Description of Artificial Sequence: Synthetic oligonucleotide"
  source: /note="RNA"
  source: /note="5' tri-ethylene glycol (TEG)"
  modified_base (1)..(1): bicyclic nucleic acid (BNA)
  modified_base (20)..(20): bicyclic nucleic acid (BNA)
  source: /note="3' tri-ethylene glycol (TEG)"
aaggaagauggcauuucuag

SEQ ID NO: 7749 - RNA, 19 nt, Artificial Sequence
  source: /note="Description of Artificial Sequence: Synthetic oligonucleotide"
  source: /note="RNA"
  source: /note="5' tri-ethylene glycol (TEG)"
  modified_base (1)..(1): bicyclic nucleic acid (BNA)
  modified_base (19)..(19): bicyclic nucleic acid (BNA)
  source: /note="3' tri-ethylene glycol (TEG)"
aaggaagauggcauuucua

SEQ ID NO: 7750 - DNA, 18 bp, Artificial Sequence
  source: /note="Description of Artificial Sequence: Synthetic oligonucleotide"
  source: /note="Description of Combined DNA/RNA Molecule: Synthetic oligonucleotide"
  source: /note="DNA/RNA"
  source: /note="5' tri-ethylene glycol (TEG)"
  modified_base (1)..(1): bicyclic nucleic acid (BNA)
  modified_base (18)..(18): bicyclic nucleic acid (BNA)
  source: /note="3' tri-ethylene glycol (TEG)"
aaggaagauggcauuuct

SEQ ID NO: 7751 - RNA, 17 nt, Artificial Sequence
  source: /note="Description of Artificial Sequence: Synthetic oligonucleotide"
  source: /note="RNA"
  source: /note="5' tri-ethylene glycol (TEG)"
  modified_base (1)..(1): bicyclic nucleic acid (BNA)
  modified_base (17)..(17): bicyclic nucleic acid (BNA)
  source: /note="3' tri-ethylene glycol (TEG)"
aaggaagauggcauuuc

SEQ ID NO: 7752 - DNA, 16 bp, Artificial Sequence
  source: /note="Description of Artificial Sequence: Synthetic oligonucleotide"
  source: /note="Description of Combined DNA/RNA Molecule: Synthetic oligonucleotide"
  source: /note="DNA/RNA"
  source: /note="5' tri-ethylene glycol (TEG)"
  modified_base (1)..(1): bicyclic nucleic acid (BNA)
  modified_base (16)..(16): bicyclic nucleic acid (BNA)
  source: /note="3' tri-ethylene glycol (TEG)"
aaggaagauggcauut

SEQ ID NO: 7753 - DNA, 15 bp, Artificial Sequence
  source: /note="Description of Artificial Sequence: Synthetic oligonucleotide"
  source: /note="Description of Combined DNA/RNA Molecule: Synthetic oligonucleotide"
  source: /note="DNA/RNA"
  source: /note="5' tri-ethylene glycol (TEG)"
  modified_base (1)..(1): bicyclic nucleic acid (BNA)
  modified_base (15)..(15): bicyclic nucleic acid (BNA)
  source: /note="3' tri-ethylene glycol (TEG)"
aaggaagauggcaut

SEQ ID NO: 7754 - DNA, 14 bp, Artificial Sequence
  source: /note="Description of Artificial Sequence: Synthetic oligonucleotide"
  source: /note="Description of Combined DNA/RNA Molecule: Synthetic oligonucleotide"
  source: /note="DNA/RNA"
  source: /note="5' tri-ethylene glycol (TEG)"
  modified_base (1)..(1): bicyclic nucleic acid (BNA)
  modified_base (14)..(14): bicyclic nucleic acid (BNA)
  source: /note="3' tri-ethylene glycol (TEG)"
aaggaagauggcat

SEQ ID NO: 7755 - RNA, 13 nt, Artificial Sequence
  source: /note="Description of Artificial Sequence: Synthetic oligonucleotide"
  source: /note="RNA"
  source: /note="5' tri-ethylene glycol (TEG)"
  modified_base (1)..(1): bicyclic nucleic acid (BNA)
  modified_base (13)..(13): bicyclic nucleic acid (BNA)
  source: /note="3' tri-ethylene glycol (TEG)"
aaggaagauggca

SEQ ID NO: 7756 - RNA, 12 nt, Artificial Sequence
  source: /note="Description of Artificial Sequence: Synthetic oligonucleotide"
  source: /note="RNA"
  source: /note="5' tri-ethylene glycol (TEG)"
  modified_base (1)..(1): bicyclic nucleic acid (BNA)
  modified_base (12)..(12): bicyclic nucleic acid (BNA)
  source: /note="3' tri-ethylene glycol (TEG)"
aaggaagauggc

SEQ ID NO: 7757 - RNA, 11 nt, Artificial Sequence
  source: /note="Description of Artificial Sequence: Synthetic oligonucleotide"
  source: /note="RNA"
  source: /note="5' tri-ethylene glycol (TEG)"
  modified_base (1)..(1): bicyclic nucleic acid (BNA)
  modified_base (11)..(11): bicyclic nucleic acid (BNA)
  source: /note="3' tri-ethylene glycol (TEG)"
aaggaagaugg

SEQ ID NO: 7758 - RNA, 10 nt, Artificial Sequence
  source: /note="Description of Artificial Sequence: Synthetic oligonucleotide"
  source: /note="RNA"
  source: /note="5' tri-ethylene glycol (TEG)"
  modified_base (1)..(1): bicyclic nucleic acid (BNA)
  modified_base (10)..(10): bicyclic nucleic acid (BNA)
  source: /note="3' tri-ethylene glycol (TEG)"
aaggaagaug

SEQ ID NO: 7759 - DNA, 9 bp, Artificial Sequence
  source: /note="Description of Artificial Sequence: Synthetic oligonucleotide"
  source: /note="DNA/RNA"
  source: /note="5' tri-ethylene glycol (TEG)"
  modified_base (1)..(1): bicyclic nucleic acid (BNA)
  modified_base (9)..(9): bicyclic nucleic acid (BNA)
  source: /note="3' tri-ethylene glycol (TEG)"
aaggaagat

SEQ ID NO: 7760 - RNA, 8 nt, Artificial Sequence
  source: /note="Description of Artificial Sequence: Synthetic oligonucleotide"
  source: /note="RNA/Antisense Oligonucleotide"
  source: /note="5' tri-ethylene glycol (TEG)"
  modified_base (1)..(1): bicyclic nucleic acid (BNA)
  modified_base (8)..(8): bicyclic nucleic acid (BNA)
  source: /note="3' tri-ethylene glycol (TEG)"
aaggaaga

SEQ ID NO: 7761 - RNA, 19 nt, Artificial Sequence
  source: /note="Description of Artificial Sequence: Synthetic oligonucleotide"
  source: /note="RNA"
  source: /note="5' tri-ethylene glycol (TEG)"
  modified_base (1)..(1): bicyclic nucleic acid (BNA)
  modified_base (19)..(19): bicyclic nucleic acid (BNA)
  source: /note="3' tri-ethylene glycol (TEG)"
aggaagauggcauuucuag

SEQ ID NO: 7762 - RNA, 18 nt, Artificial Sequence
  source: /note="Description of Artificial Sequence: Synthetic oligonucleotide"
  source: /note="RNA"
  source: /note="5' tri-ethylene glycol (TEG)"
  modified_base (1)..(1): bicyclic nucleic acid (BNA)
  modified_base (18)..(18): bicyclic nucleic acid (BNA)
  source: /note="3' tri-ethylene glycol (TEG)"
aggaagauggcauuucua

SEQ ID NO: 7763 - DNA, 17 bp, Artificial Sequence
  source: /note="Description of Artificial Sequence: Synthetic oligonucleotide"
  source: /note="Description of Combined DNA/RNA Molecule: Synthetic oligonucleotide"
  source: /note="DNA/RNA"
  source: /note="5' tri-ethylene glycol (TEG)"
  modified_base (1)..(1): bicyclic nucleic acid (BNA)
  modified_base (17)..(17): bicyclic nucleic acid (BNA)
  source: /note="3' tri-ethylene glycol (TEG)"
aggaagauggcauuuct

SEQ ID NO: 7764 - RNA, 16 nt, Artificial Sequence
  source: /note="Description of Artificial Sequence: Synthetic oligonucleotide"
  source: /note="RNA"
  source: /note="5' tri-ethylene glycol (TEG)"
  modified_base (1)..(1): bicyclic nucleic acid (BNA)
  modified_base (16)..(16): bicyclic nucleic acid (BNA)
  source: /note="3' tri-ethylene glycol (TEG)"
aggaagauggcauuuc

SEQ ID NO: 7765 - DNA, 15 bp, Artificial Sequence
  source: /note="Description of Artificial Sequence: Synthetic oligonucleotide"
  source: /note="Description of Combined DNA/RNA Molecule: Synthetic oligonucleotide"
  source: /note="DNA/RNA"
  source: /note="5' tri-ethylene glycol (TEG)"
  modified_base (1)..(1): bicyclic nucleic acid (BNA)
  modified_base (15)..(15): bicyclic nucleic acid (BNA)
  source: /note="3' tri-ethylene glycol (TEG)"
aggaagauggcauut

SEQ ID NO: 7766 - DNA, 14 bp, Artificial Sequence
  source: /note="Description of Artificial Sequence: Synthetic oligonucleotide"
  source: /note="Description of Combined DNA/RNA Molecule: Synthetic oligonucleotide"
  source: /note="DNA/RNA"
  source: /note="5' tri-ethylene glycol (TEG)"
  modified_base (1)..(1): bicyclic nucleic acid (BNA)
  modified_base (14)..(14): bicyclic nucleic acid (BNA)
  source: /note="3' tri-ethylene glycol (TEG)"
aggaagauggcaut

SEQ ID NO: 7767 - DNA, 13 bp, Artificial Sequence
  source: /note="Description of Artificial Sequence: Synthetic oligonucleotide"
  source: /note="Description of Combined DNA/RNA Molecule: Synthetic oligonucleotide"
  source: /note="DNA/RNA"
  source: /note="5' tri-ethylene glycol (TEG)"
  modified_base (1)..(1): bicyclic nucleic acid (BNA)
  modified_base (13)..(13): bicyclic nucleic acid (BNA)
  source: /note="3' tri-ethylene glycol (TEG)"
aggaagauggcat

SEQ ID NO: 7768 - RNA, 12 nt, Artificial Sequence
  source: /note="Description of Artificial Sequence: Synthetic oligonucleotide"
  source: /note="RNA"
  source: /note="5' tri-ethylene glycol (TEG)"
  modified_base (1)..(1): bicyclic nucleic acid (BNA)
  modified_base (12)..(12): bicyclic nucleic acid (BNA)
  source: /note="3' tri-ethylene glycol (TEG)"
aggaagauggca

SEQ ID NO: 7769 - RNA, 10 nt, Artificial Sequence
  source: /note="Description of Artificial Sequence: Synthetic oligonucleotide"
  source: /note="RNA"
  source: /note="5' tri-ethylene glycol (TEG)"
  modified_base (1)..(1): bicyclic nucleic acid (BNA)
  modified_base (10)..(10): bicyclic nucleic acid (BNA)
  source: /note="3' tri-ethylene glycol (TEG)"
aggaagaugg

SEQ ID NO: 7770 - RNA, 9 nt, Artificial Sequence
  source: /note="Description of Artificial Sequence: Synthetic oligonucleotide"
  source: /note="RNA"
  source: /note="5' tri-ethylene glycol (TEG)"
  modified_base (1)..(1): bicyclic nucleic acid (BNA)
  modified_base (9)..(9): bicyclic nucleic acid (BNA)
  source: /note="3' tri-ethylene glycol (TEG)"
aggaagaug

SEQ ID NO: 7771 - DNA, 8 bp, Artificial Sequence
  source: /note="Description of Artificial Sequence: Synthetic oligonucleotide"
  source: /note="DNA/RNA"
  source: /note="5' tri-ethylene glycol (TEG)"
  modified_base (1)..(1): bicyclic nucleic acid (BNA)
  modified_base (8)..(8): bicyclic nucleic acid (BNA)
  source: /note="3' tri-ethylene glycol (TEG)"
aggaagat

SEQ ID NO: 7772 - RNA, 18 nt, Artificial Sequence
  source: /note="Description of Artificial Sequence: Synthetic oligonucleotide"
  source: /note="RNA"
  source: /note="5' tri-ethylene glycol (TEG)"
  modified_base (1)..(1): bicyclic nucleic acid (BNA)
  modified_base (18)..(18): bicyclic nucleic acid (BNA)
  source: /note="3' tri-ethylene glycol (TEG)"
ggaagauggcauuucuag

SEQ ID NO: 7773 - RNA, 17 nt, Artificial Sequence
  source: /note="Description of Artificial Sequence: Synthetic oligonucleotide"
  source: /note="RNA"
  source: /note="5' tri-ethylene glycol (TEG)"
  modified_base (1)..(1): bicyclic nucleic acid (BNA)
  modified_base (17)..(17): bicyclic nucleic acid (BNA)
  source: /note="3' tri-ethylene glycol (TEG)"
ggaagauggcauuucua

SEQ ID NO: 7774 - DNA, 16 bp, Artificial Sequence
  source: /note="Description of Artificial Sequence: Synthetic oligonucleotide"
  source: /note="Description of Combined DNA/RNA Molecule: Synthetic oligonucleotide"
  source: /note="DNA/RNA"
  source: /note="5' tri-ethylene glycol (TEG)"
  modified_base (1)..(1): bicyclic nucleic acid (BNA)
  modified_base (16)..(16): bicyclic nucleic acid (BNA)
  source: /note="3' tri-ethylene glycol (TEG)"
ggaagauggcauuuct

SEQ ID NO: 7775 - RNA, 15 nt, Artificial Sequence
  source: /note="Description of Artificial Sequence: Synthetic oligonucleotide"
  source: /note="RNA"
  source: /note="5' tri-ethylene glycol (TEG)"
  modified_base (1)..(1): bicyclic nucleic acid (BNA)
  modified_base (15)..(15): bicyclic nucleic acid (BNA)
  source: /note="3' tri-ethylene glycol (TEG)"
ggaagauggcauuuc

SEQ ID NO: 7776 - DNA, 14 bp, Artificial Sequence
  source: /note="Description of Artificial Sequence: Synthetic oligonucleotide"
  source: /note="Description of Combined DNA/RNA Molecule: Synthetic oligonucleotide"
  source: /note="DNA/RNA"
  source: /note="5' tri-ethylene glycol (TEG)"
  modified_base (1)..(1): bicyclic nucleic acid (BNA)
  modified_base (14)..(14): bicyclic nucleic acid (BNA)
  source: /note="3' tri-ethylene glycol (TEG)"
ggaagauggcauut

SEQ ID NO: 7777 - DNA, 13 bp, Artificial Sequence
  source: /note="Description of Artificial Sequence: Synthetic oligonucleotide"
  source: /note="Description of Combined DNA/RNA Molecule: Synthetic oligonucleotide"
  source: /note="DNA/RNA"
  source: /note="5' tri-ethylene glycol (TEG)"
  modified_base (1)..(1): bicyclic nucleic acid (BNA)
  modified_base (13)..(13): bicyclic nucleic acid (BNA)
  source: /note="3' tri-ethylene glycol (TEG)"
ggaagauggcaut

SEQ ID NO: 7778 - DNA, 12 bp, Artificial Sequence
  source: /note="Description of Artificial Sequence: Synthetic oligonucleotide"
  source: /note="Description of Combined DNA/RNA Molecule: Synthetic oligonucleotide"
  source: /note="DNA/RNA"
  source: /note="5' tri-ethylene glycol (TEG)"
  modified_base (1)..(1): bicyclic nucleic acid (BNA)
  modified_base (12)..(12): bicyclic nucleic acid (BNA)
  source: /note="3' tri-ethylene glycol (TEG)"
ggaagauggcat

SEQ ID NO: 7779 - RNA, 11 nt, Artificial Sequence
  source: /note="Description of Artificial Sequence: Synthetic oligonucleotide"
  source: /note="RNA"
  source: /note="5' tri-ethylene glycol (TEG)"
  modified_base (1)..(1): bicyclic nucleic acid (BNA)
  modified_base (11)..(11): bicyclic nucleic acid (BNA)
  source: /note="3' tri-ethylene glycol (TEG)"
ggaagauggca

SEQ ID NO: 7780 - RNA, 10 nt, Artificial Sequence
  source: /note="Description of Artificial Sequence: Synthetic oligonucleotide"
  source: /note="RNA"
  source: /note="5' tri-ethylene glycol (TEG)"
  modified_base (1)..(1): bicyclic nucleic acid (BNA)
  modified_base (10)..(10): bicyclic nucleic acid (BNA)
  source: /note="3' tri-ethylene glycol (TEG)"
ggaagauggc

SEQ ID NO: 7781 - RNA, 8 nt, Artificial Sequence
  source: /note="Description of Artificial Sequence: Synthetic oligonucleotide"
  source: /note="RNA"
  source: /note="5' tri-ethylene glycol (TEG)"
  modified_base (1)..(1): bicyclic nucleic acid (BNA)
  modified_base (8)..(8): bicyclic nucleic acid (BNA)
  source: /note="3' tri-ethylene glycol (TEG)"
ggaagaug

SEQ ID NO: 7782 - RNA, 17 nt, Artificial Sequence
  source: /note="Description of Artificial Sequence: Synthetic oligonucleotide"
  source: /note="RNA"
  source: /note="5' tri-ethylene glycol (TEG)"
  modified_base (1)..(1): bicyclic nucleic acid (BNA)
  modified_base (17)..(17): bicyclic nucleic acid (BNA)
  source: /note="3' tri-ethylene glycol (TEG)"
gaagauggcauuucuag

SEQ ID NO: 7783 - RNA, 16 nt, Artificial Sequence
  source: /note="Description of Artificial Sequence: Synthetic oligonucleotide"
  source: /note="RNA"
  source: /note="5' tri-ethylene glycol (TEG)"
  modified_base (1)..(1): bicyclic nucleic acid (BNA)
  modified_base (16)..(16): bicyclic nucleic acid (BNA)
  source: /note="3' tri-ethylene glycol (TEG)"
gaagauggcauuucua

SEQ ID NO: 7784 - RNA, 14 nt, Artificial Sequence
  source: /note="Description of Artificial Sequence: Synthetic oligonucleotide"
  source: /note="RNA"
  source: /note="5' tri-ethylene glycol (TEG)"
  modified_base (1)..(1): bicyclic nucleic acid (BNA)
  modified_base (14)..(14): bicyclic nucleic acid (BNA)
  source: /note="3' tri-ethylene glycol (TEG)"
gaagauggcauuuc

SEQ ID NO: 7785 - DNA, 13 bp, Artificial Sequence
  source: /note="Description of Artificial Sequence: Synthetic oligonucleotide"
  source: /note="Description of Combined DNA/RNA Molecule: Synthetic oligonucleotide"
  source: /note="DNA/RNA"
  source: /note="5' tri-ethylene glycol (TEG)"
  modified_base (1)..(1): bicyclic nucleic acid (BNA)
  modified_base (13)..(13): bicyclic nucleic acid (BNA)
  source: /note="3' tri-ethylene glycol (TEG)"
gaagauggcauut

SEQ ID NO: 7786 - DNA, 12 bp, Artificial Sequence
  source: /note="Description of Artificial Sequence: Synthetic oligonucleotide"
  source: /note="Description of Combined DNA/RNA Molecule: Synthetic oligonucleotide"
  source: /note="DNA/RNA"
  source: /note="5' tri-ethylene glycol (TEG)"
  modified_base (1)..(1): bicyclic nucleic acid (BNA)
  modified_base (12)..(12): bicyclic nucleic acid (BNA)
  source: /note="3' tri-ethylene glycol (TEG)"
gaagauggcaut

SEQ ID NO: 7787 - DNA, 11 bp, Artificial Sequence
  source: /note="Description of Artificial Sequence: Synthetic oligonucleotide"
  source: /note="Description of Combined DNA/RNA Molecule: Synthetic oligonucleotide"
  source: /note="DNA/RNA"
  source: /note="5' tri-ethylene glycol (TEG)"
  modified_base (1)..(1): bicyclic nucleic acid (BNA)
  modified_base (11)..(11): bicyclic nucleic acid (BNA)
  source: /note="3' tri-ethylene glycol (TEG)"
gaagauggcat

SEQ ID NO: 7788 - RNA, 10 nt, Artificial Sequence
  source: /note="Description of Artificial Sequence: Synthetic oligonucleotide"
  source: /note="RNA"
  source: /note="5' tri-ethylene glycol (TEG)"
  modified_base (1)..(1): bicyclic nucleic acid (BNA)
  modified_base (10)..(10): bicyclic nucleic acid (BNA)
  source: /note="3' tri-ethylene glycol (TEG)"
gaagauggca

SEQ ID NO: 7789 - RNA, 9 nt, Artificial Sequence
  source: /note="Description of Artificial Sequence: Synthetic oligonucleotide"
  source: /note="RNA"
  source: /note="5' tri-ethylene glycol (TEG)"
  modified_base (1)..(1): bicyclic nucleic acid (BNA)
  modified_base (9)..(9): bicyclic nucleic acid (BNA)
  source: /note="3' tri-ethylene glycol (TEG)"
gaagauggc

SEQ ID NO: 7790 - RNA, 8 nt, Artificial Sequence
  source: /note="Description of Artificial Sequence: Synthetic oligonucleotide"
  source: /note="RNA"
  source: /note="5' tri-ethylene glycol (TEG)"
  modified_base (1)..(1): bicyclic nucleic acid (BNA)
  modified_base (8)..(8): bicyclic nucleic acid (BNA)
  source: /note="3' tri-ethylene glycol (TEG)"
gaagaugg

SEQ ID NO: 7791 - RNA, 16 nt, Artificial Sequence
  source: /note="Description of Artificial Sequence: Synthetic oligonucleotide"
  source: /note="RNA"
  source: /note="5' tri-ethylene glycol (TEG)"
  modified_base (1)..(1): bicyclic nucleic acid (BNA)
  modified_base (16)..(16): bicyclic nucleic acid (BNA)
  source: /note="3' tri-ethylene glycol (TEG)"
aagauggcauuucuag

SEQ ID NO: 7792 - RNA, 15 nt, Artificial Sequence
  source: /note="Description of Artificial Sequence: Synthetic oligonucleotide"
  source: /note="RNA"
  source: /note="5' tri-ethylene glycol (TEG)"
  modified_base (1)..(1): bicyclic nucleic acid (BNA)
  modified_base (15)..(15): bicyclic nucleic acid (BNA)
  source: /note="3' tri-ethylene glycol (TEG)"
aagauggcauuucua

SEQ ID NO: 7793 - DNA, 14 bp, Artificial Sequence
  source: /note="Description of Artificial Sequence: Synthetic oligonucleotide"
  source: /note="Description of Combined DNA/RNA Molecule: Synthetic oligonucleotide"
  source: /note="DNA/RNA"
  source: /note="5' tri-ethylene glycol (TEG)"
  modified_base (1)..(1): bicyclic nucleic acid (BNA)
  modified_base (14)..(14): bicyclic nucleic acid (BNA)
  source: /note="3' tri-ethylene glycol (TEG)"
aagauggcauuuct

SEQ ID NO: 7794 - RNA, 13 nt, Artificial Sequence
  source: /note="Description of Artificial Sequence: Synthetic oligonucleotide"
  source: /note="RNA"
  source: /note="5' tri-ethylene glycol (TEG)"
  modified_base (1)..(1): bicyclic nucleic acid (BNA)
  modified_base (13)..(13): bicyclic nucleic acid (BNA)
  source: /note="3' tri-ethylene glycol (TEG)"
aagauggcauuuc

SEQ ID NO: 7795 - DNA, 12 bp, Artificial Sequence
  source: /note="Description of Artificial Sequence: Synthetic oligonucleotide"
  source: /note="Description of Combined DNA/RNA Molecule: Synthetic oligonucleotide"
  source: /note="DNA/RNA"
  source: /note="5' tri-ethylene glycol (TEG)"
  modified_base (1)..(1): bicyclic nucleic acid (BNA)
  modified_base (12)..(12): bicyclic nucleic acid (BNA)
  source: /note="3' tri-ethylene glycol (TEG)"
aagauggcauut

SEQ ID NO: 7796 - DNA, 11 bp, Artificial Sequence
  source: /note="Description of Artificial Sequence: Synthetic oligonucleotide"
  source: /note="Description of Combined DNA/RNA Molecule: Synthetic oligonucleotide"
  source: /note="DNA/RNA"
  source: /note="5' tri-ethylene glycol (TEG)"
  modified_base (1)..(1): bicyclic nucleic acid (BNA)
  modified_base (11)..(11): bicyclic nucleic acid (BNA)
  source: /note="3' tri-ethylene glycol (TEG)"
aagauggcaut

SEQ ID NO: 7797 - DNA, 10 bp, Artificial Sequence
  source: /note="Description of Artificial Sequence: Synthetic oligonucleotide"
  source: /note="Description of Combined DNA/RNA Molecule: Synthetic oligonucleotide"
  source: /note="DNA/RNA"
  source: /note="5' tri-ethylene glycol (TEG)"
  modified_base (1)..(1): bicyclic nucleic acid (BNA)
  modified_base (10)..(10): bicyclic nucleic acid (BNA)
  source: /note="3' tri-ethylene glycol (TEG)"
aagauggcat

SEQ ID NO: 7798 - RNA, 9 nt, Artificial Sequence
  source: /note="Description of Artificial Sequence: Synthetic oligonucleotide"
  source: /note="RNA"
  source: /note="5' tri-ethylene glycol (TEG)"
  modified_base (1)..(1): bicyclic nucleic acid (BNA)
  modified_base (9)..(9): bicyclic nucleic acid (BNA)
  source: /note="3' tri-ethylene glycol (TEG)"
aagauggca

SEQ ID NO: 7799 - RNA, 8 nt, Artificial Sequence
  source: /note="Description of Artificial Sequence: Synthetic oligonucleotide"
  source: /note="RNA"
  source: /note="5' tri-ethylene glycol (TEG)"
  modified_base (1)..(1): bicyclic nucleic acid (BNA)
  modified_base (8)..(8): bicyclic nucleic acid (BNA)
  source: /note="3' tri-ethylene glycol (TEG)"
aagauggc

SEQ ID NO: 7800 - RNA, 15 nt, Artificial Sequence
  source: /note="Description of Artificial Sequence: Synthetic oligonucleotide"
  source: /note="RNA"
  source: /note="5' tri-ethylene glycol (TEG)"
  modified_base (1)..(1): bicyclic nucleic acid (BNA)
  modified_base (15)..(15): bicyclic nucleic acid (BNA)
  source: /note="3' tri-ethylene glycol (TEG)"
agauggcauuucuag

SEQ ID NO: 7801 - RNA, 14 nt, Artificial Sequence
  source: /note="Description of Artificial Sequence: Synthetic oligonucleotide"
  source: /note="RNA"
  source: /note="5' tri-ethylene glycol (TEG)"
  modified_base (1)..(1): bicyclic nucleic acid (BNA)
  modified_base (14)..(14): bicyclic nucleic acid (BNA)
  source: /note="3' tri-ethylene glycol (TEG)"
agauggcauuucua

SEQ ID NO: 7802 - DNA, 13 bp, Artificial Sequence
  source: /note="Description of Artificial Sequence: Synthetic oligonucleotide"
  source: /note="Description of Combined DNA/RNA Molecule: Synthetic oligonucleotide"
  source: /note="DNA/RNA"
  source: /note="5' tri-ethylene glycol (TEG)"
  modified_base (1)..(1): bicyclic nucleic acid (BNA)
  modified_base (13)..(13): bicyclic nucleic acid (BNA)
  source: /note="3' tri-ethylene glycol (TEG)"
agauggcauuuct

SEQ ID NO: 7803 - RNA, 12 nt, Artificial Sequence
  source: /note="Description of Artificial Sequence: Synthetic oligonucleotide"
  source: /note="RNA"
  source: /note="5' tri-ethylene glycol (TEG)"
  modified_base (1)..(1): bicyclic nucleic acid (BNA)
  modified_base (12)..(12): bicyclic nucleic acid (BNA)
  source: /note="3' tri-ethylene glycol (TEG)"
agauggcauuuc

SEQ ID NO: 7804 - DNA, 11 bp, Artificial Sequence
  source: /note="Description of Artificial Sequence: Synthetic oligonucleotide"
  source: /note="Description of Combined DNA/RNA Molecule: Synthetic oligonucleotide"
  source: /note="DNA/RNA"
  source: /note="5' tri-ethylene glycol (TEG)"
  modified_base (1)..(1): bicyclic nucleic acid (BNA)
  modified_base (11)..(11): bicyclic nucleic acid (BNA)
  source: /note="3' tri-ethylene glycol (TEG)"
agauggcauut

SEQ ID NO: 7805 - DNA, 10 bp, Artificial Sequence
  source: /note="Description of Artificial Sequence: Synthetic oligonucleotide"
  source: /note="Description of Combined DNA/RNA Molecule: Synthetic oligonucleotide"
  source: /note="DNA/RNA"
  source: /note="5' tri-ethylene glycol (TEG)"
  modified_base (1)..(1): bicyclic nucleic acid (BNA)
  modified_base (10)..(10): bicyclic nucleic acid (BNA)
  source: /note="3' tri-ethylene glycol (TEG)"
agauggcaut

SEQ ID NO: 7806 - DNA, 9 bp, Artificial Sequence
  source: /note="Description of Artificial Sequence: Synthetic oligonucleotide"
  source: /note="Description of Combined DNA/RNA Molecule: Synthetic oligonucleotide"
  source: /note="DNA/RNA"
  source: /note="5' tri-ethylene glycol (TEG)"
  modified_base (1)..(1): bicyclic nucleic acid (BNA)
  modified_base (9)..(9): bicyclic nucleic acid (BNA)
  source: /note="3' tri-ethylene glycol (TEG)"
agauggcat

SEQ ID NO: 7807 - RNA, 8 nt, Artificial Sequence
  source: /note="Description of Artificial Sequence: Synthetic oligonucleotide"
  source: /note="RNA"
  source: /note="5' tri-ethylene glycol (TEG)"
  modified_base (1)..(1): bicyclic nucleic acid (BNA)
  modified_base (8)..(8): bicyclic nucleic acid (BNA)
  source: /note="3' tri-ethylene glycol (TEG)"
agauggca

SEQ ID NO: 7808 - RNA, 30 nt, Artificial Sequence; identical to SEQ ID NO: 284
  source: /note="Description of Artificial Sequence: Synthetic oligonucleotide"
  source: /note="RNA"
  source: /note="5' tri-ethylene glycol (TEG)"
  modified_base (1)..(1): bicyclic nucleic acid (BNA)
  modified_base (30)..(30): bicyclic nucleic acid (BNA)
  source: /note="3' tri-ethylene glycol (TEG)"

SEQ ID NO: 7809 - RNA, 29 nt, Artificial Sequence
  source: /note="Description of Artificial Sequence: Synthetic oligonucleotide"
  source: /note="RNA"
  source: /note="5' tri-ethylene glycol (TEG)"
  modified_base (1)..(1): bicyclic nucleic acid (BNA)
  modified_base (29)..(29): bicyclic nucleic acid (BNA)
  source: /note="3' tri-ethylene glycol (TEG)"
cuccaacaucaaggaagauggcauuucua

SEQ ID NO: 7810 - DNA, 28 bp, Artificial Sequence
  source: /note="Description of Artificial Sequence: Synthetic oligonucleotide"
  source: /note="Description of Combined DNA/RNA Molecule: Synthetic oligonucleotide"
  source: /note="DNA/RNA"
  source: /note="5' tri-ethylene glycol (TEG)"
  modified_base (1)..(1): bicyclic nucleic acid (BNA)
  modified_base (28)..(28): bicyclic nucleic acid (BNA)
  source: /note="3' tri-ethylene glycol (TEG)"
cuccaacaucaaggaagauggcauuuct

SEQ ID NO: 7811 - RNA, 27 nt, Artificial Sequence
  source: /note="Description of Artificial Sequence: Synthetic oligonucleotide"
  source: /note="RNA"
  source: /note="5' tri-ethylene glycol (TEG)"
  modified_base (1)..(1): bicyclic nucleic acid (BNA)
  modified_base (27)..(27): bicyclic nucleic acid (BNA)
  source: /note="3' tri-ethylene glycol (TEG)"
cuccaacaucaaggaagauggcauuuc

SEQ ID NO: 7812 - DNA, 26 bp, Artificial Sequence
  source: /note="Description of Artificial Sequence: Synthetic oligonucleotide"
  source: /note="Description of Combined DNA/RNA Molecule: Synthetic oligonucleotide"
  source: /note="DNA/RNA"
  source: /note="5' tri-ethylene glycol (TEG)"
  modified_base (1)..(1): bicyclic nucleic acid (BNA)
  modified_base (26)..(26): bicyclic nucleic acid (BNA)
  source: /note="3' tri-ethylene glycol (TEG)"
cuccaacaucaaggaagauggcauut

SEQ ID NO: 7813 - DNA, 25 bp, Artificial Sequence
  source: /note="Description of Artificial Sequence: Synthetic oligonucleotide"
  source: /note="Description of Combined DNA/RNA Molecule: Synthetic oligonucleotide"
  source: /note="DNA/RNA"
  source: /note="5' tri-ethylene glycol (TEG)"
  modified_base (1)..(1): bicyclic nucleic acid (BNA)
  modified_base (25)..(25): bicyclic nucleic acid (BNA)
  source: /note="3' tri-ethylene glycol (TEG)"
cuccaacaucaaggaagauggcaut

SEQ ID NO: 7814 - DNA, 24 bp, Artificial Sequence
  source: /note="Description of Artificial Sequence: Synthetic oligonucleotide"
  source: /note="Description of Combined DNA/RNA Molecule: Synthetic oligonucleotide"
  source: /note="DNA/RNA"
  source: /note="5' tri-ethylene glycol (TEG)"
  modified_base (1)..(1): bicyclic nucleic acid (BNA)
  modified_base (24)..(24): bicyclic nucleic acid (BNA)
  source: /note="3' tri-ethylene glycol (TEG)"
cuccaacaucaaggaagauggcat

SEQ ID NO: 7815 - RNA, 23 nt, Artificial Sequence
  source: /note="Description of Artificial Sequence: Synthetic oligonucleotide"
  source: /note="RNA"
  source: /note="5' tri-ethylene glycol (TEG)"
  modified_base (1)..(1): bicyclic nucleic acid (BNA)
  modified_base (23)..(23): bicyclic nucleic acid (BNA)
  source: /note="3' tri-ethylene glycol (TEG)"
cuccaacaucaaggaagauggca

SEQ ID NO: 7816 - RNA, 22 nt, Artificial Sequence
  source: /note="Description of Artificial Sequence: Synthetic oligonucleotide"
  source: /note="RNA"
  source: /note="5' tri-ethylene glycol (TEG)"
  modified_base (1)..(1): bicyclic nucleic acid (BNA)
  modified_base (22)..(22): bicyclic nucleic acid (BNA)
  source: /note="3' tri-ethylene glycol (TEG)"
cuccaacaucaaggaagauggc

SEQ ID NO: 7817 - RNA, 21 nt, Artificial Sequence
  source: /note="Description of Artificial Sequence: Synthetic oligonucleotide"
  source: /note="RNA"
  source: /note="5' tri-ethylene glycol (TEG)"
  modified_base (1)..(1): bicyclic nucleic acid (BNA)
  modified_base (21)..(21): bicyclic nucleic acid (BNA)
  source: /note="3' tri-ethylene glycol (TEG)"
cuccaacaucaaggaagaugg

SEQ ID NO: 7818 - RNA, 20 nt, Artificial Sequence
  source: /note="Description of Artificial Sequence: Synthetic oligonucleotide"
  source: /note="RNA"
  source: /note="5' tri-ethylene glycol (TEG)"
  modified_base (1)..(1): bicyclic nucleic acid (BNA)
  modified_base (20)..(20): bicyclic nucleic acid (BNA)
  source: /note="3' tri-ethylene glycol (TEG)"
cuccaacaucaaggaagaug

SEQ ID NO: 7819 - DNA, 19 bp, Artificial Sequence
  source: /note="Description of Artificial Sequence: Synthetic oligonucleotide"
  source: /note="Description of Combined DNA/RNA Molecule: Synthetic oligonucleotide"
  source: /note="DNA/RNA"
  source: /note="5' tri-ethylene glycol (TEG)"
  modified_base (1)..(1): bicyclic nucleic acid (BNA)
  modified_base (19)..(19): bicyclic nucleic acid (BNA)
  source: /note="3' tri-ethylene glycol (TEG)"
cuccaacaucaaggaagat

SEQ ID NO: 7820 - RNA, 18 nt, Artificial Sequence
  source: /note="Description of Artificial Sequence: Synthetic oligonucleotide"
  source: /note="RNA"
  source: /note="5' tri-ethylene glycol (TEG)"
  modified_base (1)..(1): bicyclic nucleic acid (BNA)
  modified_base (18)..(18): bicyclic nucleic acid (BNA)
  source: /note="3' tri-ethylene glycol (TEG)"
cuccaacaucaaggaaga

SEQ ID NO: 7821 - RNA, 17 nt, Artificial Sequence
  source: /note="Description of Artificial Sequence: Synthetic oligonucleotide"
  source: /note="RNA"
  source: /note="5' tri-ethylene glycol (TEG)"
  modified_base (1)..(1): bicyclic nucleic acid (BNA)
  modified_base (17)..(17): bicyclic nucleic acid (BNA)
  source: /note="3' tri-ethylene glycol (TEG)"
cuccaacaucaaggaag

SEQ ID NO: 7822 - DNA, 29 bp, Artificial Sequence
  source: /note="Description of Artificial Sequence: Synthetic oligonucleotide"
  source: /note="Description of Combined DNA/RNA Molecule: Synthetic oligonucleotide"
  source: /note="DNA/RNA"
  source: /note="5' tri-ethylene glycol (TEG)"
  modified_base (1)..(1): bicyclic nucleic acid (BNA)
  modified_base (29)..(29): bicyclic nucleic acid (BNA)
  source: /note="3' tri-ethylene glycol (TEG)"
tccaacaucaaggaagauggcauuucuag

SEQ ID NO: 7823 - DNA, 28 bp, Artificial Sequence
  source: /note="Description of Artificial Sequence: Synthetic oligonucleotide"
  source: /note="Description of Combined DNA/RNA Molecule: Synthetic oligonucleotide"
  source: /note="DNA/RNA"
  source: /note="5' tri-ethylene glycol (TEG)"
  modified_base (1)..(1): bicyclic nucleic acid (BNA)
  modified_base (28)..(28): bicyclic nucleic acid (BNA)
  source: /note="3' tri-ethylene glycol (TEG)"
tccaacaucaaggaagauggcauuucua

SEQ ID NO: 7824 - DNA, 27 bp, Artificial Sequence
  source: /note="Description of Artificial Sequence: Synthetic oligonucleotide"
  source: /note="Description of Combined DNA/RNA Molecule: Synthetic oligonucleotide"
  source: /note="DNA/RNA"
  source: /note="5' tri-ethylene glycol (TEG)"
  modified_base (1)..(1): bicyclic nucleic acid (BNA)
  modified_base (27)..(27): bicyclic nucleic acid (BNA)
  source: /note="3' tri-ethylene glycol (TEG)"
tccaacaucaaggaagauggcauuuct

SEQ ID NO: 7825 - DNA, 26 bp, Artificial Sequence
  source: /note="Description of Artificial Sequence: Synthetic oligonucleotide"
  source: /note="Description of Combined DNA/RNA Molecule: Synthetic oligonucleotide"
  source: /note="DNA/RNA"
  source: /note="5' tri-ethylene glycol (TEG)"
  modified_base (1)..(1): bicyclic nucleic acid (BNA)
  modified_base (26)..(26): bicyclic nucleic acid (BNA)
  source: /note="3' tri-ethylene glycol (TEG)"
tccaacaucaaggaagauggcauuuc

SEQ ID NO: 7826 - DNA, 25 bp, Artificial Sequence
  source: /note="Description of Artificial Sequence: Synthetic oligonucleotide"
  source: /note="Description of Combined DNA/RNA Molecule: Synthetic oligonucleotide"
  source: /note="DNA/RNA"
  source: /note="5' tri-ethylene glycol (TEG)"
  modified_base (1)..(1): bicyclic nucleic acid (BNA)
  modified_base (25)..(25): bicyclic nucleic acid (BNA)
  source: /note="3' tri-ethylene glycol (TEG)"
tccaacaucaaggaagauggcauut

SEQ ID NO: 7827 - DNA, 24 bp, Artificial Sequence
  source: /note="Description of Artificial Sequence: Synthetic oligonucleotide"
  source: /note="Description of Combined DNA/RNA Molecule: Synthetic oligonucleotide"
  source: /note="DNA/RNA"
  source: /note="5' tri-ethylene glycol (TEG)"
  modified_base (1)..(1): bicyclic nucleic acid (BNA)
  modified_base (24)..(24): bicyclic nucleic acid (BNA)
  source: /note="3' tri-ethylene glycol (TEG)"
tccaacaucaaggaagauggcaut

SEQ ID NO: 7828 - DNA, 23 bp, Artificial Sequence
  source: /note="Description of Artificial Sequence: Synthetic oligonucleotide"
  source: /note="Description of Combined DNA/RNA Molecule: Synthetic oligonucleotide"
  source: /note="DNA/RNA"
  source: /note="5' tri-ethylene glycol (TEG)"
  modified_base (1)..(1): bicyclic nucleic acid (BNA)
  modified_base (23)..(23): bicyclic nucleic acid (BNA)
  source: /note="3' tri-ethylene glycol (TEG)"
tccaacaucaaggaagauggcat

SEQ ID NO: 7829 - DNA, 22 bp, Artificial Sequence
  source: /note="Description of Artificial Sequence: Synthetic oligonucleotide"
  source: /note="Description of Combined DNA/RNA Molecule: Synthetic oligonucleotide"
  source: /note="DNA/RNA"
  source: /note="5' tri-ethylene glycol (TEG)"
  modified_base (1)..(1): bicyclic nucleic acid (BNA)
  modified_base (22)..(22): bicyclic nucleic acid (BNA)
  source: /note="3' tri-ethylene glycol (TEG)"
tccaacaucaaggaagauggca

SEQ ID NO: 7830 - DNA, 21 bp, Artificial Sequence
  source: /note="Description of Artificial Sequence: Synthetic oligonucleotide"
  source: /note="Description of Combined DNA/RNA Molecule: Synthetic oligonucleotide"
  source: /note="DNA/RNA"
  source: /note="5' tri-ethylene glycol (TEG)"
  modified_base (1)..(1): bicyclic nucleic acid (BNA)
  modified_base (21)..(21): bicyclic nucleic acid (BNA)
  source: /note="3' tri-ethylene glycol (TEG)"
tccaacaucaaggaagauggc

SEQ ID NO: 7831 - DNA, 20 bp, Artificial Sequence
  source: /note="Description of Artificial Sequence: Synthetic oligonucleotide"
  source: /note="Description of Combined DNA/RNA Molecule: Synthetic oligonucleotide"
  source: /note="DNA/RNA"
  source: /note="5' tri-ethylene glycol (TEG)"
  modified_base (1)..(1): bicyclic nucleic acid (BNA)
  modified_base (20)..(20): bicyclic nucleic acid (BNA)
  source: /note="3' tri-ethylene glycol (TEG)"
tccaacaucaaggaagaugg

SEQ ID NO: 7832 - DNA, 19 bp, Artificial Sequence
  source: /note="Description of Artificial Sequence: Synthetic oligonucleotide"
  source: /note="Description of Combined DNA/RNA Molecule: Synthetic oligonucleotide"
  source: /note="DNA/RNA"
  source: /note="5' tri-ethylene glycol (TEG)"
  modified_base (1)..(1): bicyclic nucleic acid (BNA)
  modified_base (19)..(19): bicyclic nucleic acid (BNA)
  source: /note="3' tri-ethylene glycol (TEG)"
tccaacaucaaggaagaug

SEQ ID NO: 7833 - DNA, 18 bp, Artificial Sequence
  source: /note="Description of Artificial Sequence: Synthetic oligonucleotide"
  source: /note="Description of Combined DNA/RNA Molecule: Synthetic oligonucleotide"
  source: /note="DNA/RNA"
  source: /note="5' tri-ethylene glycol (TEG)"
  modified_base (1)..(1): bicyclic nucleic acid (BNA)
  modified_base (18)..(18): bicyclic nucleic acid (BNA)
  source: /note="3' tri-ethylene glycol (TEG)"
tccaacaucaaggaagat

SEQ ID NO: 7834 - DNA, 17 bp, Artificial Sequence
  source: /note="Description of Artificial Sequence: Synthetic oligonucleotide"
  source: /note="Description of Combined DNA/RNA Molecule: Synthetic oligonucleotide"
  source: /note="DNA/RNA"
  source: /note="5' tri-ethylene glycol (TEG)"
  modified_base (1)..(1): bicyclic nucleic acid (BNA)
  modified_base (17)..(17): bicyclic nucleic acid (BNA)
  source: /note="3' tri-ethylene glycol (TEG)"
tccaacaucaaggaaga

SEQ ID NO: 7835 - DNA, 16 bp, Artificial Sequence
  source: /note="Description of Artificial Sequence: Synthetic oligonucleotide"
  source: /note="Description of Combined DNA/RNA Molecule: Synthetic oligonucleotide"
  source: /note="DNA/RNA"
  source: /note="5' tri-ethylene glycol (TEG)"
  modified_base (1)..(1): bicyclic nucleic acid (BNA)
  modified_base (16)..(16): bicyclic nucleic acid (BNA)
  source: /note="3' tri-ethylene glycol (TEG)"
tccaacaucaaggaag

SEQ ID NO: 7836 - RNA, 28 nt, Artificial Sequence
  source: /note="Description of Artificial Sequence: Synthetic oligonucleotide"
  source: /note="RNA"
  source: /note="5' tri-ethylene glycol (TEG)"
  modified_base (1)..(1): bicyclic nucleic acid (BNA)
  modified_base (28)..(28): bicyclic nucleic acid (BNA)
  source: /note="3' tri-ethylene glycol (TEG)"
ccaacaucaaggaagauggcauuucuag

SEQ ID NO: 7837 - RNA, 27 nt, Artificial Sequence
  source: /note="Description of Artificial Sequence: Synthetic oligonucleotide"
  source: /note="RNA"
  source: /note="5' tri-ethylene glycol (TEG)"
  modified_base (1)..(1): bicyclic nucleic acid (BNA)
  modified_base (27)..(27): bicyclic nucleic acid (BNA)
  source: /note="3' tri-ethylene glycol (TEG)"
ccaacaucaaggaagauggcauuucua

SEQ ID NO: 7838 - DNA, 26 bp, Artificial Sequence
  source: /note="Description of Artificial Sequence: Synthetic oligonucleotide"
  source: /note="Description of Combined DNA/RNA Molecule: Synthetic oligonucleotide"
  source: /note="DNA/RNA"
  source: /note="5' tri-ethylene glycol (TEG)"
  modified_base (1)..(1): bicyclic nucleic acid (BNA)
  modified_base (26)..(26): bicyclic nucleic acid (BNA)
  source: /note="3' tri-ethylene glycol (TEG)"
ccaacaucaaggaagauggcauuuct

SEQ ID NO: 7839 - RNA, 25 nt, Artificial Sequence
  source: /note="Description of Artificial Sequence: Synthetic oligonucleotide"
  source: /note="RNA"
  source: /note="5' tri-ethylene glycol (TEG)"
  modified_base (1)..(1): bicyclic nucleic acid (BNA)
  modified_base (25)..(25): bicyclic nucleic acid (BNA)
  source: /note="3' tri-ethylene glycol (TEG)"
ccaacaucaaggaagauggcauuuc

SEQ ID NO: 7840 - DNA, 24 bp, Artificial Sequence
  source: /note="Description of Artificial Sequence: Synthetic oligonucleotide"
  source: /note="Description of Combined DNA/RNA Molecule: Synthetic oligonucleotide"
  source: /note="DNA/RNA"
  source: /note="5' tri-ethylene glycol (TEG)"
  modified_base (1)..(1): bicyclic nucleic acid (BNA)
  modified_base (24)..(24): bicyclic nucleic acid (BNA)
  source: /note="3' tri-ethylene glycol (TEG)"
ccaacaucaaggaagauggcauut

SEQ ID NO: 7841 - DNA, 23 bp, Artificial Sequence
  source: /note="Description of Artificial Sequence: Synthetic oligonucleotide"
  source: /note="Description of Combined DNA/RNA Molecule: Synthetic oligonucleotide"
  source: /note="DNA/RNA"
  source: /note="5' tri-ethylene glycol (TEG)"
  modified_base (1)..(1): bicyclic nucleic acid (BNA)
  modified_base (23)..(23): bicyclic nucleic acid (BNA)
  source: /note="3' tri-ethylene glycol (TEG)"
ccaacaucaaggaagauggcaut

SEQ ID NO: 7842 - DNA, 22 bp, Artificial Sequence
  source: /note="Description of Artificial Sequence: Synthetic oligonucleotide"
  source: /note="Description of Combined DNA/RNA Molecule: Synthetic oligonucleotide"
  source: /note="DNA/RNA"
  source: /note="5' tri-ethylene glycol (TEG)"
  modified_base (1)..(1): bicyclic nucleic acid (BNA)
  modified_base (22)..(22): bicyclic nucleic acid (BNA)
  source: /note="3' tri-ethylene glycol (TEG)"
ccaacaucaaggaagauggcat

SEQ ID NO: 7843 - RNA, 21 nt, Artificial Sequence
  source: /note="Description of Artificial Sequence: Synthetic oligonucleotide"
  source: /note="RNA"
  source: /note="5' tri-ethylene glycol (TEG)"
  modified_base (1)..(1): bicyclic nucleic acid (BNA)
  modified_base (21)..(21): bicyclic nucleic acid (BNA)
  source: /note="3' tri-ethylene glycol (TEG)"
ccaacaucaaggaagauggca

SEQ ID NO: 7844 - RNA, 20 nt, Artificial Sequence
  source: /note="Description of Artificial Sequence: Synthetic oligonucleotide"
  source: /note="RNA"
  source: /note="5' tri-ethylene glycol (TEG)"
  modified_base (1)..(1): bicyclic nucleic acid (BNA)
  modified_base (20)..(20): bicyclic nucleic acid (BNA)
  source: /note="3' tri-ethylene glycol (TEG)"
ccaacaucaaggaagauggc

SEQ ID NO: 7845 - RNA, 19 nt, Artificial Sequence
  source: /note="Description of Artificial Sequence: Synthetic oligonucleotide"
  source: /note="RNA"
  source: /note="5' tri-ethylene glycol (TEG)"
  modified_base (1)..(1): bicyclic nucleic acid (BNA)
  modified_base (19)..(19): bicyclic nucleic acid (BNA)
  source: /note="3' tri-ethylene glycol (TEG)"
ccaacaucaaggaagaugg

SEQ ID NO: 7846 - RNA, 18 nt, Artificial Sequence
  source: /note="Description of Artificial Sequence: Synthetic oligonucleotide"
  source: /note="RNA"
  source: /note="5' tri-ethylene glycol (TEG)"
  modified_base (1)..(1): bicyclic nucleic acid (BNA)
  modified_base (18)..(18): bicyclic nucleic acid (BNA)
  source: /note="3' tri-ethylene glycol (TEG)"
ccaacaucaaggaagaug

SEQ ID NO: 7847 - DNA, 17 bp, Artificial Sequence
  source: /note="Description of Artificial Sequence: Synthetic oligonucleotide"
  source: /note="Description of Combined DNA/RNA Molecule: Synthetic oligonucleotide"
  source: /note="DNA/RNA"
  source: /note="5' tri-ethylene glycol (TEG)"
  modified_base (1)..(1): bicyclic nucleic acid (BNA)
  modified_base (17)..(17): bicyclic nucleic acid (BNA)
  source: /note="3' tri-ethylene glycol (TEG)"
ccaacaucaaggaagat

SEQ ID NO: 7848 - RNA, 16 nt, Artificial Sequence
  source: /note="Description of Artificial Sequence: Synthetic oligonucleotide"
  source: /note="RNA"
  source: /note="5' tri-ethylene glycol (TEG)"
  modified_base (1)..(1): bicyclic nucleic acid (BNA)
  modified_base (16)..(16): bicyclic nucleic acid (BNA)
  source: /note="3' tri-ethylene glycol (TEG)"
ccaacaucaaggaaga

SEQ ID NO: 7849 - RNA, 15 nt, Artificial Sequence
  source: /note="Description of Artificial Sequence: Synthetic oligonucleotide"
  source: /note="RNA"
  source: /note="5' tri-ethylene glycol (TEG)"
  modified_base (1)..(1): bicyclic nucleic acid (BNA)
  modified_base (15)..(15): bicyclic nucleic acid (BNA)
  source: /note="3' tri-ethylene glycol (TEG)"
ccaacaucaaggaag

SEQ ID NO: 7850 - RNA, 27 nt, Artificial Sequence
  source: /note="Description of Artificial Sequence: Synthetic oligonucleotide"
  source: /note="RNA"
  source: /note="5' tri-ethylene glycol (TEG)"
  modified_base (1)..(1): bicyclic nucleic acid (BNA)
  modified_base (27)..(27): bicyclic nucleic acid (BNA)
  source: /note="3' tri-ethylene glycol (TEG)"
caacaucaaggaagauggcauuucuag

SEQ ID NO: 7851 - RNA, 26 nt, Artificial Sequence
  source: /note="Description of Artificial Sequence: Synthetic oligonucleotide"
  source: /note="RNA"
  source: /note="5' tri-ethylene glycol (TEG)"
  modified_base (1)..(1): bicyclic nucleic acid (BNA)
  modified_base (26)..(26): bicyclic nucleic acid (BNA)
  source: /note="3' tri-ethylene glycol (TEG)"
caacaucaaggaagauggcauuucua

SEQ ID NO: 7852 - DNA, 25 bp, Artificial Sequence
  source: /note="Description of Artificial Sequence: Synthetic oligonucleotide"
  source: /note="Description of Combined DNA/RNA Molecule: Synthetic oligonucleotide"
  source: /note="DNA/RNA"
  source: /note="5' tri-ethylene glycol (TEG)"
  modified_base (1)..(1): bicyclic nucleic acid (BNA)
  modified_base (25)..(25): bicyclic nucleic acid (BNA)
  source: /note="3' tri-ethylene glycol (TEG)"
caacaucaaggaagauggcauuuct

SEQ ID NO: 7853 - RNA, 24 nt, Artificial Sequence
  source: /note="Description of Artificial Sequence: Synthetic oligonucleotide"
  source: /note="RNA"
  source: /note="5' tri-ethylene glycol (TEG)"
  modified_base (1)..(1): bicyclic nucleic acid (BNA)
  modified_base (24)..(24): bicyclic nucleic acid (BNA)
  source: /note="3' tri-ethylene glycol (TEG)"
caacaucaaggaagauggcauuuc

SEQ ID NO: 7854 - DNA, 23 bp, Artificial Sequence
  source: /note="Description of Artificial Sequence: Synthetic oligonucleotide"
  source: /note="Description of Combined DNA/RNA Molecule: Synthetic oligonucleotide"
  source: /note="DNA/RNA"
  source: /note="5' tri-ethylene glycol (TEG)"
  modified_base (1)..(1): bicyclic nucleic acid (BNA)
  modified_base (23)..(23): bicyclic nucleic acid (BNA)
  source: /note="3' tri-ethylene glycol (TEG)"
caacaucaaggaagauggcauut

SEQ ID NO: 7855 - DNA, 22 bp, Artificial Sequence
  source: /note="Description of Artificial Sequence: Synthetic oligonucleotide"
  source: /note="Description of Combined DNA/RNA Molecule: Synthetic oligonucleotide"
  source: /note="DNA/RNA"
  source: /note="5' tri-ethylene glycol (TEG)"
  modified_base (1)..(1): bicyclic nucleic acid (BNA)
  modified_base (22)..(22): bicyclic nucleic acid (BNA)
  source: /note="3' tri-ethylene glycol (TEG)"
caacaucaaggaagauggcaut

SEQ ID NO: 7856 - DNA, 21 bp, Artificial Sequence
  source: /note="Description of Artificial Sequence: Synthetic oligonucleotide"
  source: /note="Description of Combined DNA/RNA Molecule: Synthetic oligonucleotide"
  source: /note="DNA/RNA"
  source: /note="5' tri-ethylene glycol (TEG)"
  modified_base (1)..(1): bicyclic nucleic acid (BNA)
  modified_base (21)..(21): bicyclic nucleic acid (BNA)
  source: /note="3' tri-ethylene glycol (TEG)"
caacaucaaggaagauggcat

SEQ ID NO: 7857 - RNA, 20 nt, Artificial Sequence
  source: /note="Description of Artificial Sequence: Synthetic oligonucleotide"
  source: /note="RNA"
  source: /note="5' tri-ethylene glycol (TEG)"
  modified_base (1)..(1): bicyclic nucleic acid (BNA)
  modified_base (20)..(20): bicyclic nucleic acid (BNA)
  source: /note="3' tri-ethylene glycol (TEG)"
caacaucaaggaagauggca

SEQ ID NO: 7858 - RNA, 19 nt, Artificial Sequence
  source: /note="Description of Artificial Sequence: Synthetic oligonucleotide"
  source: /note="RNA"
  source: /note="5' tri-ethylene glycol (TEG)"
  modified_base (1)..(1): bicyclic nucleic acid (BNA)
  modified_base (19)..(19): bicyclic nucleic acid (BNA)
  source: /note="3' tri-ethylene glycol (TEG)"
caacaucaaggaagauggc

SEQ ID NO: 7859 - RNA, 18 nt, Artificial Sequence
  source: /note="Description of Artificial Sequence: Synthetic oligonucleotide"
  source: /note="RNA"
  source: /note="5' tri-ethylene glycol (TEG)"
  modified_base (1)..(1): bicyclic nucleic acid (BNA)
  modified_base (18)..(18): bicyclic nucleic acid (BNA)
  source: /note="3' tri-ethylene glycol (TEG)"
caacaucaaggaagaugg

SEQ ID NO: 7860 - RNA, 17 nt, Artificial Sequence
  source: /note="Description of Artificial Sequence: Synthetic oligonucleotide"
  source: /note="RNA"
  source: /note="5' tri-ethylene glycol (TEG)"
  modified_base (1)..(1): bicyclic nucleic acid (BNA)
  modified_base (17)..(17): bicyclic nucleic acid (BNA)
  source: /note="3' tri-ethylene glycol (TEG)"
caacaucaaggaagaug

SEQ ID NO: 7861 - DNA, 16 bp, Artificial Sequence
  source: /note="Description of Artificial Sequence: Synthetic oligonucleotide"
  source: /note="Description of Combined DNA/RNA Molecule: Synthetic oligonucleotide"
  source: /note="DNA/RNA"
  source: /note="5' tri-ethylene glycol (TEG)"
  modified_base (1)..(1): bicyclic nucleic acid (BNA)
  modified_base (16)..(16): bicyclic nucleic acid (BNA)
  source: /note="3' tri-ethylene glycol (TEG)"
caacaucaaggaagat

SEQ ID NO: 7862 - RNA, 15 nt, Artificial Sequence
  source: /note="Description of Artificial Sequence: Synthetic oligonucleotide"
  source: /note="RNA"
  source: /note="5' tri-ethylene glycol (TEG)"
  modified_base (1)..(1): bicyclic nucleic acid (BNA)
  modified_base (15)..(15): bicyclic nucleic acid (BNA)
  source: /note="3' tri-ethylene glycol (TEG)"
caacaucaaggaaga

SEQ ID NO: 7863 - RNA, 14 nt, Artificial Sequence
  source: /note="Description of Artificial Sequence: Synthetic oligonucleotide"
  source: /note="RNA"
  source: /note="5' tri-ethylene glycol (TEG)"
  modified_base (1)..(1): bicyclic nucleic acid (BNA)
  modified_base (14)..(14): bicyclic nucleic acid (BNA)
  source: /note="3' tri-ethylene glycol (TEG)"
caacaucaaggaag

SEQ ID NO: 7864 - RNA, 26 nt, Artificial Sequence
  source: /note="Description of Artificial Sequence: Synthetic oligonucleotide"
  source: /note="RNA"
  source: /note="5' tri-ethylene glycol (TEG)"
  modified_base (1)..(1): bicyclic nucleic acid (BNA)
  modified_base (26)..(26): bicyclic nucleic acid (BNA)
  source: /note="3' tri-ethylene glycol (TEG)"
aacaucaaggaagauggcauuucuag

SEQ ID NO: 7865 - RNA, 25 nt, Artificial Sequence
  source: /note="Description of Artificial Sequence: Synthetic oligonucleotide"
  source: /note="RNA"
  source: /note="5' tri-ethylene glycol (TEG)"
  modified_base (1)..(1): bicyclic nucleic acid (BNA)
  modified_base (25)..(25): bicyclic nucleic acid (BNA)
  source: /note="3' tri-ethylene glycol (TEG)"
aacaucaaggaagauggcauuucua

SEQ ID NO: 7866 - DNA, 24 bp, Artificial Sequence
  source: /note="Description of Artificial Sequence: Synthetic oligonucleotide"
  source: /note="Description of Combined DNA/RNA Molecule: Synthetic oligonucleotide"
  source: /note="DNA/RNA"
  source: /note="5' tri-ethylene glycol (TEG)"
  modified_base (1)..(1): bicyclic nucleic acid (BNA)
  modified_base (24)..(24): bicyclic nucleic acid (BNA)
  source: /note="3' tri-ethylene glycol (TEG)"
aacaucaaggaagauggcauuuct

SEQ ID NO: 7867 - RNA, 23 nt, Artificial Sequence
  source: /note="Description of Artificial Sequence: Synthetic oligonucleotide"
  source: /note="RNA"
  source: /note="5' tri-ethylene glycol (TEG)"
  modified_base (1)..(1): bicyclic nucleic acid (BNA)
  modified_base (23)..(23): bicyclic nucleic acid (BNA)
  source: /note="3' tri-ethylene glycol (TEG)"
aacaucaaggaagauggcauuuc

SEQ ID NO: 7868 - DNA, 22 bp, Artificial Sequence
  source: /note="Description of Artificial Sequence: Synthetic oligonucleotide"
  source: /note="Description of Combined DNA/RNA Molecule: Synthetic oligonucleotide"
  source: /note="DNA/RNA"
  source: /note="5' tri-ethylene glycol (TEG)"
  modified_base (1)..(1): bicyclic nucleic acid (BNA)
  modified_base (22)..(22): bicyclic nucleic acid (BNA)
  source: /note="3' tri-ethylene glycol (TEG)"
aacaucaaggaagauggcauut

SEQ ID NO: 7869 - DNA, 21 bp, Artificial Sequence
  source: /note="Description of Artificial Sequence: Synthetic oligonucleotide"
  source: /note="Description of Combined DNA/RNA Molecule: Synthetic oligonucleotide"
  source: /note="DNA/RNA"
  source: /note="5' tri-ethylene glycol (TEG)"
  modified_base (1)..(1): bicyclic nucleic acid (BNA)
  modified_base (21)..(21): bicyclic nucleic acid (BNA)
  source: /note="3' tri-ethylene glycol (TEG)"
aacaucaaggaagauggcaut

SEQ ID NO: 7870 - DNA, 20 bp, Artificial Sequence
  source: /note="Description of Artificial Sequence: Synthetic oligonucleotide"
  source: /note="Description of Combined DNA/RNA Molecule: Synthetic oligonucleotide"
  source: /note="DNA/RNA"
  source: /note="5' tri-ethylene glycol (TEG)"
  modified_base (1)..(1): bicyclic nucleic acid (BNA)
  modified_base (20)..(20): bicyclic nucleic acid (BNA)
  source: /note="3' tri-ethylene glycol (TEG)"
aacaucaaggaagauggcat

SEQ ID NO: 7871 - RNA, 19 nt, Artificial Sequence
  source: /note="Description of Artificial Sequence: Synthetic oligonucleotide"
  source: /note="RNA"
  source: /note="5' tri-ethylene glycol (TEG)"
  modified_base (1)..(1): bicyclic nucleic acid (BNA)
  modified_base (19)..(19): bicyclic nucleic acid (BNA)
  source: /note="3' tri-ethylene glycol (TEG)"
aacaucaaggaagauggca

SEQ ID NO: 7872 - RNA, 18 nt, Artificial Sequence
  source: /note="Description of Artificial Sequence: Synthetic oligonucleotide"
  source: /note="RNA"
  source: /note="5' tri-ethylene glycol (TEG)"
  modified_base (1)..(1): bicyclic nucleic acid (BNA)
  modified_base (18)..(18): bicyclic nucleic acid (BNA)
  source: /note="3' tri-ethylene glycol (TEG)"
aacaucaaggaagauggc

SEQ ID NO: 7873 - RNA, 17 nt, Artificial Sequence
  source: /note="Description of Artificial Sequence: Synthetic oligonucleotide"
  source: /note="RNA"
  source: /note="5' tri-ethylene glycol (TEG)"
  modified_base (1)..(1): bicyclic nucleic acid (BNA)
  modified_base (17)..(17): bicyclic nucleic acid (BNA)
  source: /note="3' tri-ethylene glycol (TEG)"
aacaucaaggaagaugg

SEQ ID NO: 7874 - RNA, 16 nt, Artificial Sequence
  source: /note="Description of Artificial Sequence: Synthetic oligonucleotide"
  source: /note="RNA"
  source: /note="5' tri-ethylene glycol (TEG)"
  modified_base (1)..(1): bicyclic nucleic acid (BNA)
  modified_base (16)..(16): bicyclic nucleic acid (BNA)
  source: /note="3' tri-ethylene glycol (TEG)"
aacaucaaggaagaug

SEQ ID NO: 7875 - DNA, 15 bp, Artificial Sequence
  source: /note="Description of Artificial Sequence: Synthetic oligonucleotide"
  source: /note="Description of Combined DNA/RNA Molecule: Synthetic oligonucleotide"
  source: /note="DNA/RNA"
  source: /note="5' tri-ethylene glycol (TEG)"
  modified_base (1)..(1): bicyclic nucleic acid (BNA)
  modified_base (15)..(15): bicyclic nucleic acid (BNA)
  source: /note="3' tri-ethylene glycol (TEG)"
aacaucaaggaagat

SEQ ID NO: 7876 - RNA, 14 nt, Artificial Sequence
  source: /note="Description of Artificial Sequence: Synthetic oligonucleotide"
  source: /note="RNA"
  source: /note="5' tri-ethylene glycol (TEG)"
  modified_base (1)..(1): bicyclic nucleic acid (BNA)
  modified_base (14)..(14): bicyclic nucleic acid (BNA)
  source: /note="3' tri-ethylene glycol (TEG)"
aacaucaaggaaga

SEQ ID NO: 7877 - RNA, 13 nt, Artificial Sequence
  source: /note="Description of Artificial Sequence: Synthetic oligonucleotide"
  source: /note="RNA"
  source: /note="5' tri-ethylene glycol (TEG)"
  modified_base (1)..(1): bicyclic nucleic acid (BNA)
  modified_base (13)..(13): bicyclic nucleic acid (BNA)
  source: /note="3' tri-ethylene glycol (TEG)"
aacaucaaggaag

SEQ ID NO: 7878 - RNA, 25 nt, Artificial Sequence
  source: /note="Description of Artificial Sequence: Synthetic oligonucleotide"
  source: /note="RNA"
  source: /note="5' tri-ethylene glycol (TEG)"
  modified_base (1)..(1): bicyclic nucleic acid (BNA)
  modified_base (25)..(25): bicyclic nucleic acid (BNA)
  source: /note="3' tri-ethylene glycol (TEG)"
acaucaaggaagauggcauuucuag

SEQ ID NO: 7879 - RNA, 24 nt, Artificial Sequence
  source: /note="Description of Artificial Sequence: Synthetic oligonucleotide"
  source: /note="RNA"
  source: /note="5' tri-ethylene glycol (TEG)"
  modified_base (1)..(1): bicyclic nucleic acid (BNA)
  modified_base (24)..(24): bicyclic nucleic acid (BNA)
  source: /note="3' tri-ethylene glycol (TEG)"
acaucaaggaagauggcauuucua

SEQ ID NO: 7880 - DNA, 23 bp, Artificial Sequence
  source: /note="Description of Artificial Sequence: Synthetic oligonucleotide"
  source: /note="Description of Combined DNA/RNA Molecule: Synthetic oligonucleotide"
  source: /note="DNA/RNA"
  source: /note="5' tri-ethylene glycol (TEG)"
  modified_base (1)..(1): bicyclic nucleic acid (BNA)
  modified_base (23)..(23): bicyclic nucleic acid (BNA)
  source: /note="3' tri-ethylene glycol (TEG)"
acaucaaggaagauggcauuuct

SEQ ID NO: 7881 - RNA, 22 nt, Artificial Sequence
  source: /note="Description of Artificial Sequence: Synthetic oligonucleotide"
  source: /note="RNA"
  source: /note="5' tri-ethylene glycol (TEG)"
  modified_base (1)..(1): bicyclic nucleic acid (BNA)
  modified_base (22)..(22): bicyclic nucleic acid (BNA)
  source: /note="3' tri-ethylene glycol (TEG)"
acaucaaggaagauggcauuuc

SEQ ID NO: 7882 - DNA, 21 bp, Artificial Sequence
  source: /note="Description of Artificial Sequence: Synthetic oligonucleotide"
  source: /note="Description of Combined DNA/RNA Molecule: Synthetic oligonucleotide"
  source: /note="DNA/RNA"
  source: /note="5' tri-ethylene glycol (TEG)"
  modified_base (1)..(1): bicyclic nucleic acid (BNA)
  modified_base (21)..(21): bicyclic nucleic acid (BNA)
  source: /note="3' tri-ethylene glycol (TEG)"
acaucaaggaagauggcauut

SEQ ID NO: 7883 - DNA, 20 bp, Artificial Sequence
  source: /note="Description of Artificial Sequence: Synthetic oligonucleotide"
  source: /note="Description of Combined DNA/RNA Molecule: Synthetic oligonucleotide"
  source: /note="DNA/RNA"
  source: /note="5' tri-ethylene glycol (TEG)"
  modified_base (1)..(1): bicyclic nucleic acid (BNA)
  modified_base (20)..(20): bicyclic nucleic acid (BNA)
  source: /note="3' tri-ethylene glycol (TEG)"
acaucaaggaagauggcaut

SEQ ID NO: 7884 - DNA, 19 bp, Artificial Sequence
  source: /note="Description of Artificial Sequence: Synthetic oligonucleotide"
  source: /note="Description of Combined DNA/RNA Molecule: Synthetic oligonucleotide"
  source: /note="DNA/RNA"
  source: /note="5' tri-ethylene glycol (TEG)"
  modified_base (1)..(1): bicyclic nucleic acid (BNA)
  modified_base (19)..(19): bicyclic nucleic acid (BNA)
  source: /note="3' tri-ethylene glycol (TEG)"
acaucaaggaagauggcat

SEQ ID NO: 7885 - RNA, 18 nt, Artificial Sequence
  source: /note="Description of Artificial Sequence: Synthetic oligonucleotide"
  source: /note="RNA"
  source: /note="5' tri-ethylene glycol (TEG)"
  modified_base (1)..(1): bicyclic nucleic acid (BNA)
  modified_base (18)..(18): bicyclic nucleic acid (BNA)
  source: /note="3' tri-ethylene glycol (TEG)"
acaucaaggaagauggca

SEQ ID NO: 7886 - RNA, 17 nt, Artificial Sequence
  source: /note="Description of Artificial Sequence: Synthetic oligonucleotide"
  source: /note="RNA"
  source: /note="5' tri-ethylene glycol (TEG)"
  modified_base (1)..(1): bicyclic nucleic acid (BNA)
  modified_base (17)..(17): bicyclic nucleic acid (BNA)
  source: /note="3' tri-ethylene glycol (TEG)"
acaucaaggaagauggc

SEQ ID NO: 7887 - RNA, 16 nt, Artificial Sequence
  source: /note="Description of Artificial Sequence: Synthetic oligonucleotide"
  source: /note="RNA"
  source: /note="5' tri-ethylene glycol (TEG)"
  modified_base (1)..(1): bicyclic nucleic acid (BNA)
  modified_base (16)..(16): bicyclic nucleic acid (BNA)
  source: /note="3' tri-ethylene glycol (TEG)"
acaucaaggaagaugg

SEQ ID NO: 7888 - RNA, 15 nt, Artificial Sequence
  source: /note="Description of Artificial Sequence: Synthetic oligonucleotide"
  source: /note="RNA"
  source: /note="5' tri-ethylene glycol (TEG)"
  modified_base (1)..(1): bicyclic nucleic acid (BNA)
  modified_base (15)..(15): bicyclic nucleic acid (BNA)
  source: /note="3' tri-ethylene glycol (TEG)"
acaucaaggaagaug

SEQ ID NO: 7889 - DNA, 14 bp, Artificial Sequence
  source: /note="Description of Artificial Sequence: Synthetic oligonucleotide"
  source: /note="Description of Combined DNA/RNA Molecule: Synthetic oligonucleotide"
  source: /note="DNA/RNA"
  source: /note="5' tri-ethylene glycol (TEG)"
  modified_base (1)..(1): bicyclic nucleic acid (BNA)
  modified_base (14)..(14): bicyclic nucleic acid (BNA)
  source: /note="3' tri-ethylene glycol (TEG)"
acaucaaggaagat

SEQ ID NO: 7890 - RNA, 13 nt, Artificial Sequence
  source: /note="Description of Artificial Sequence: Synthetic oligonucleotide"
  source: /note="RNA"
  source: /note="5' tri-ethylene glycol (TEG)"
  modified_base (1)..(1): bicyclic nucleic acid (BNA)
  modified_base (13)..(13): bicyclic nucleic acid (BNA)
  source: /note="3' tri-ethylene glycol (TEG)"
acaucaaggaaga

SEQ ID NO: 7891 - RNA, 12 nt, Artificial Sequence
  source: /note="Description of Artificial Sequence: Synthetic oligonucleotide"
  source: /note="RNA"
  source: /note="5' tri-ethylene glycol (TEG)"
  modified_base (1)..(1): bicyclic nucleic acid (BNA)
  modified_base (12)..(12): bicyclic nucleic acid (BNA)
  source: /note="3' tri-ethylene glycol (TEG)"
acaucaaggaag

SEQ ID NO: 7892 - RNA, 24 nt, Artificial Sequence
  source: /note="Description of Artificial Sequence: Synthetic oligonucleotide"
  source: /note="RNA"
  source: /note="5' tri-ethylene glycol (TEG)"
  modified_base (1)..(1): bicyclic nucleic acid (BNA)
  modified_base (24)..(24): bicyclic nucleic acid (BNA)
  source: /note="3' tri-ethylene glycol (TEG)"
caucaaggaagauggcauuucuag

SEQ ID NO: 7893 - RNA, 23 nt, Artificial Sequence
  source: /note="Description of Artificial Sequence: Synthetic oligonucleotide"
  source: /note="RNA"
  source: /note="5' tri-ethylene glycol (TEG)"
  modified_base (1)..(1): bicyclic nucleic acid (BNA)
  modified_base (23)..(23): bicyclic nucleic acid (BNA)
  source: /note="3' tri-ethylene glycol (TEG)"
caucaaggaagauggcauuucua

SEQ ID NO: 7894 - DNA, 22 bp, Artificial Sequence
  source: /note="Description of Artificial Sequence: Synthetic oligonucleotide"
  source: /note="Description of Combined DNA/RNA Molecule: Synthetic oligonucleotide"
  source: /note="DNA/RNA"
  source: /note="5' tri-ethylene glycol (TEG)"
  modified_base (1)..(1): bicyclic nucleic acid (BNA)
  modified_base (22)..(22): bicyclic nucleic acid (BNA)
  source: /note="3' tri-ethylene glycol (TEG)"
caucaaggaagauggcauuuct

SEQ ID NO: 7895 - RNA, 21 nt, Artificial Sequence
  source: /note="Description of Artificial Sequence: Synthetic oligonucleotide"
  source: /note="RNA"
  source: /note="5' tri-ethylene glycol (TEG)"
  modified_base (1)..(1): bicyclic nucleic acid (BNA)
  modified_base (21)..(21): bicyclic nucleic acid (BNA)
  source: /note="3' tri-ethylene glycol (TEG)"
caucaaggaagauggcauuuc

SEQ ID NO: 7896 - DNA, 20 bp, Artificial Sequence
  source: /note="Description of Artificial Sequence: Synthetic oligonucleotide"
  source: /note="Description of Combined DNA/RNA Molecule: Synthetic oligonucleotide"
  source: /note="DNA/RNA"
  source: /note="5' tri-ethylene glycol (TEG)"
  modified_base (1)..(1): bicyclic nucleic acid (BNA)
  modified_base (20)..(20): bicyclic nucleic acid (BNA)
  source: /note="3' tri-ethylene glycol (TEG)"
caucaaggaagauggcauut

SEQ ID NO: 7897 - DNA, 19 bp, Artificial Sequence
  source: /note="Description of Artificial Sequence: Synthetic oligonucleotide"
  source: /note="Description of Combined DNA/RNA Molecule: Synthetic oligonucleotide"
  source: /note="DNA/RNA"
  source: /note="5' tri-ethylene glycol (TEG)"
  modified_base (1)..(1): bicyclic nucleic acid (BNA)
  modified_base (19)..(19): bicyclic nucleic acid (BNA)
  source: /note="3' tri-ethylene glycol (TEG)"
caucaaggaagauggcaut

SEQ ID NO: 7898 - DNA, 18 bp, Artificial Sequence
  source: /note="Description of Artificial Sequence: Synthetic oligonucleotide"
  source: /note="Description of Combined DNA/RNA Molecule: Synthetic oligonucleotide"
  source: /note="DNA/RNA"
  source: /note="5' tri-ethylene glycol (TEG)"
  modified_base (1)..(1): bicyclic nucleic acid (BNA)
  modified_base (18)..(18): bicyclic nucleic acid (BNA)
  source: /note="3' tri-ethylene glycol (TEG)"
caucaaggaagauggcat

SEQ ID NO: 7899 - RNA, 17 nt, Artificial Sequence
  source: /note="Description of Artificial Sequence: Synthetic oligonucleotide"
  source: /note="RNA"
  source: /note="5' tri-ethylene glycol (TEG)"
  modified_base (1)..(1): bicyclic nucleic acid (BNA)
  modified_base (17)..(17): bicyclic nucleic acid (BNA)
  source: /note="3' tri-ethylene glycol (TEG)"
caucaaggaagauggca

SEQ ID NO: 7900 - RNA, 16 nt, Artificial Sequence
  source: /note="Description of Artificial Sequence: Synthetic oligonucleotide"
  source: /note="RNA"
  source: /note="5' tri-ethylene glycol (TEG)"
  modified_base (1)..(1): bicyclic nucleic acid (BNA)
  modified_base (16)..(16): bicyclic nucleic acid (BNA)
  source: /note="3' tri-ethylene glycol (TEG)"
caucaaggaagauggc

SEQ ID NO: 7901 - RNA, 15 nt, Artificial Sequence
  source: /note="Description of Artificial Sequence: Synthetic oligonucleotide"
  source: /note="RNA"
  source: /note="5' tri-ethylene glycol (TEG)"
  modified_base (1)..(1): bicyclic nucleic acid (BNA)
  modified_base (15)..(15): bicyclic nucleic acid (BNA)
  source: /note="3' tri-ethylene glycol (TEG)"
caucaaggaagaugg

SEQ ID NO: 7902 - RNA, 14 nt, Artificial Sequence
  source: /note="Description of Artificial Sequence: Synthetic oligonucleotide"
  source: /note="RNA"
  source: /note="5' tri-ethylene glycol (TEG)"
  modified_base (1)..(1): bicyclic nucleic acid (BNA)
  modified_base (14)..(14): bicyclic nucleic acid (BNA)
  source: /note="3' tri-ethylene glycol (TEG)"
caucaaggaagaug

SEQ ID NO: 7903 - DNA, 13 bp, Artificial Sequence
  source: /note="Description of Artificial Sequence: Synthetic oligonucleotide"
  source: /note="Description of Combined DNA/RNA Molecule: Synthetic oligonucleotide"
  source: /note="DNA/RNA"
  source: /note="5' tri-ethylene glycol (TEG)"
  modified_base (1)..(1): bicyclic nucleic acid (BNA)
  modified_base (13)..(13): bicyclic nucleic acid (BNA)
  source: /note="3' tri-ethylene glycol (TEG)"
caucaaggaagat

SEQ ID NO: 7904 - RNA, 12 nt, Artificial Sequence
  source: /note="Description of Artificial Sequence: Synthetic oligonucleotide"
  source: /note="RNA"
  source: /note="5' tri-ethylene glycol (TEG)"
  modified_base (1)..(1): bicyclic nucleic acid (BNA)
  modified_base (12)..(12): bicyclic nucleic acid (BNA)
  source: /note="3' tri-ethylene glycol (TEG)"
caucaaggaaga

SEQ ID NO: 7905 - RNA, 11 nt, Artificial Sequence
  source: /note="Description of Artificial Sequence: Synthetic oligonucleotide"
  source: /note="RNA"
  source: /note="5' tri-ethylene glycol (TEG)"
  modified_base (1)..(1): bicyclic nucleic acid (BNA)
  modified_base (11)..(11): bicyclic nucleic acid (BNA)
  source: /note="3' tri-ethylene glycol (TEG)"
caucaaggaag

SEQ ID NO: 7906 - RNA, 23 nt, Artificial Sequence
  source: /note="Description of Artificial Sequence: Synthetic oligonucleotide"
  source: /note="RNA"
  source: /note="5' tri-ethylene glycol (TEG)"
  modified_base (1)..(1): bicyclic nucleic acid (BNA)
  modified_base (23)..(23): bicyclic nucleic acid (BNA)
  source: /note="3' tri-ethylene glycol (TEG)"
aucaaggaagauggcauuucuag

SEQ ID NO: 7907 - RNA, 22 nt, Artificial Sequence
  source: /note="Description of Artificial Sequence: Synthetic oligonucleotide"
  source: /note="RNA"
  source: /note="5' tri-ethylene glycol (TEG)"
  modified_base (1)..(1): bicyclic nucleic acid (BNA)
  modified_base (22)..(22): bicyclic nucleic acid (BNA)
  source: /note="3' tri-ethylene glycol (TEG)"
aucaaggaagauggcauuucua

SEQ ID NO: 7908 - DNA, 21 bp, Artificial Sequence
  source: /note="Description of Artificial Sequence: Synthetic oligonucleotide"
  source: /note="Description of Combined DNA/RNA Molecule: Synthetic oligonucleotide"
  source: /note="DNA/RNA"
  source: /note="5' tri-ethylene glycol (TEG)"
  modified_base (1)..(1): bicyclic nucleic acid (BNA)
  modified_base (21)..(21): bicyclic nucleic acid (BNA)
  source: /note="3' tri-ethylene glycol (TEG)"
aucaaggaagauggcauuuct

SEQ ID NO: 7909 - RNA, 20 nt, Artificial Sequence
  source: /note="Description of Artificial Sequence: Synthetic oligonucleotide"
  source: /note="RNA"
  source: /note="5' tri-ethylene glycol (TEG)"
  modified_base (1)..(1): bicyclic nucleic acid (BNA)
  modified_base (20)..(20): bicyclic nucleic acid (BNA)
  source: /note="3' tri-ethylene glycol (TEG)"
aucaaggaagauggcauuuc

SEQ ID NO: 7910 - DNA, 19 bp, Artificial Sequence
  source: /note="Description of Artificial Sequence: Synthetic oligonucleotide"
  source: /note="Description of Combined DNA/RNA Molecule: Synthetic oligonucleotide"
  source: /note="DNA/RNA"
  source: /note="5' tri-ethylene glycol (TEG)"
  modified_base (1)..(1): bicyclic nucleic acid (BNA)
  modified_base (19)..(19): bicyclic nucleic acid (BNA)
  source: /note="3' tri-ethylene glycol (TEG)"
aucaaggaagauggcauut

SEQ ID NO: 7911 - DNA, 18 bp, Artificial Sequence
  source: /note="Description of Artificial Sequence: Synthetic oligonucleotide"
  source: /note="Description of Combined DNA/RNA Molecule: Synthetic oligonucleotide"
  source: /note="DNA/RNA"
  source: /note="5' tri-ethylene glycol (TEG)"
  modified_base (1)..(1): bicyclic nucleic acid (BNA)
  modified_base (18)..(18): bicyclic nucleic acid (BNA)
  source: /note="3' tri-ethylene glycol (TEG)"
aucaaggaagauggcaut

SEQ ID NO: 7912 - DNA, 17 bp, Artificial Sequence
  source: /note="Description of Artificial Sequence: Synthetic oligonucleotide"
  source: /note="Description of Combined DNA/RNA Molecule: Synthetic oligonucleotide"
  source: /note="DNA/RNA"
  source: /note="5' tri-ethylene glycol (TEG)"
  modified_base (1)..(1): bicyclic nucleic acid (BNA)
  modified_base (17)..(17): bicyclic nucleic acid (BNA)
  source: /note="3' tri-ethylene glycol (TEG)"
aucaaggaagauggcat

SEQ ID NO: 7913 - RNA, 16 nt, Artificial Sequence
  source: /note="Description of Artificial Sequence: Synthetic oligonucleotide"
  source: /note="RNA"
  source: /note="5' tri-ethylene glycol (TEG)"
  modified_base (1)..(1): bicyclic nucleic acid (BNA)
  modified_base (16)..(16): bicyclic nucleic acid (BNA)
  source: /note="3' tri-ethylene glycol (TEG)"
aucaaggaagauggca

SEQ ID NO: 7914 - RNA, 15 nt, Artificial Sequence
  source: /note="Description of Artificial Sequence: Synthetic oligonucleotide"
  source: /note="RNA"
  source: /note="5' tri-ethylene glycol (TEG)"
  modified_base (1)..(1): bicyclic nucleic acid (BNA)
  modified_base (15)..(15): bicyclic nucleic acid (BNA)
  source: /note="3' tri-ethylene glycol (TEG)"
aucaaggaagauggc

SEQ ID NO: 7915 - RNA, 14 nt, Artificial Sequence
  source: /note="Description of Artificial Sequence: Synthetic oligonucleotide"
  source: /note="RNA"
  source: /note="5' tri-ethylene glycol (TEG)"
  modified_base (1)..(1): bicyclic nucleic acid (BNA)
  modified_base (14)..(14): bicyclic nucleic acid (BNA)
  source: /note="3' tri-ethylene glycol (TEG)"
aucaaggaagaugg

SEQ ID NO: 7916 - RNA, 13 nt, Artificial Sequence
  source: /note="Description of Artificial Sequence: Synthetic oligonucleotide"
  source: /note="RNA"
  source: /note="5' tri-ethylene glycol (TEG)"
  modified_base (1)..(1): bicyclic nucleic acid (BNA)
  modified_base (13)..(13): bicyclic nucleic acid (BNA)
  source: /note="3' tri-ethylene glycol (TEG)"
aucaaggaagaug

SEQ ID NO: 7917 - DNA, 12 bp, Artificial Sequence
  source: /note="Description of Artificial Sequence: Synthetic oligonucleotide"
  source: /note="Description of Combined DNA/RNA Molecule: Synthetic oligonucleotide"
  source: /note="DNA/RNA"
  source: /note="5' tri-ethylene glycol (TEG)"
  modified_base (1)..(1): bicyclic nucleic acid (BNA)
  modified_base (12)..(12): bicyclic nucleic acid (BNA)
  source: /note="3' tri-ethylene glycol (TEG)"
aucaaggaagat

SEQ ID NO: 7918 - RNA, 11 nt, Artificial Sequence
  source: /note="Description of Artificial Sequence: Synthetic oligonucleotide"
  source: /note="RNA"
  source: /note="5' tri-ethylene glycol (TEG)"
  modified_base (1)..(1): bicyclic nucleic acid (BNA)
  modified_base (11)..(11): bicyclic nucleic acid (BNA)
  source: /note="3' tri-ethylene glycol (TEG)"
aucaaggaaga

SEQ ID NO: 7919 - RNA, 10 nt, Artificial Sequence
  source: /note="Description of Artificial Sequence: Synthetic oligonucleotide"
  source: /note="RNA"
  source: /note="5' tri-ethylene glycol (TEG)"
  modified_base (1)..(1): bicyclic nucleic acid (BNA)
  modified_base (10)..(10): bicyclic nucleic acid (BNA)
  source: /note="3' tri-ethylene glycol (TEG)"
aucaaggaag

SEQ ID NO: 7920 - RNA, 23 nt, Artificial Sequence
  source: /note="Description of Artificial Sequence: Synthetic oligonucleotide"
  source: /note="RNA"
  source: /note="5' tri-ethylene glycol (TEG)"
  modified_base (1)..(1): bicyclic nucleic acid (BNA)
  modified_base (23)..(23): bicyclic nucleic acid (BNA)
  source: /note="3' tri-ethylene glycol (TEG)"
ccagagcagguaccuccaacauc

SEQ ID NO: 7921 - RNA, 18 nt, Artificial Sequence
  source: /note="Description of Artificial Sequence: Synthetic oligonucleotide"
  source: /note="RNA"
  source: /note="5' tri-ethylene glycol (TEG)"
  modified_base (1)..(1): bicyclic nucleic acid (BNA)
  modified_base (18)..(18): bicyclic nucleic acid (BNA)
  source: /note="3' tri-ethylene glycol (TEG)"
ccagagcagguaccucca

SEQ ID NO: 7922 - DNA, 23 bp, Artificial Sequence
  source: /note="Description of Artificial Sequence: Synthetic oligonucleotide"
  source: /note="Description of Combined DNA/RNA Molecule: Synthetic oligonucleotide"
  source: /note="DNA/RNA"
  source: /note="5' tri-ethylene glycol (TEG)"
  modified_base (1)..(1): bicyclic nucleic acid (BNA)
  modified_base (23)..(23): bicyclic nucleic acid (BNA)
  source: /note="3' tri-ethylene glycol (TEG)"
ccucugugauuuuauaacuugat

SEQ ID NO: 7923 - DNA, 17 bp, Artificial Sequence
  source: /note="Description of Artificial Sequence: Synthetic oligonucleotide"
  source: /note="Description of Combined DNA/RNA Molecule: Synthetic oligonucleotide"
  source: /note="DNA/RNA"
  source: /note="5' tri-ethylene glycol (TEG)"
  modified_base (1)..(1): bicyclic nucleic acid (BNA)
  modified_base (17)..(17): bicyclic nucleic acid (BNA)
  source: /note="3' tri-ethylene glycol (TEG)"
tcacccaccaucaccct

SEQ ID NO: 7924 - DNA, 20 bp, Artificial Sequence
  source: /note="Description of Artificial Sequence: Synthetic oligonucleotide"
  source: /note="Description of Combined DNA/RNA Molecule: Synthetic oligonucleotide"
  source: /note="DNA/RNA"
  source: /note="5' tri-ethylene glycol (TEG)"
  modified_base (1)..(1): bicyclic nucleic acid (BNA)
  modified_base (20)..(20): bicyclic nucleic acid (BNA)
  source: /note="3' tri-ethylene glycol (TEG)"
tgauauccucaaggucaccc

SEQ ID NO: 7925 - RNA, 22 nt, Artificial Sequence
  source: /note="Description of Artificial Sequence: Synthetic oligonucleotide"
  source: /note="RNA"
  source: /note="5' tri-ethylene glycol (TEG)"
  modified_base (1)..(1): bicyclic nucleic acid (BNA)
  modified_base (22)..(22): bicyclic nucleic acid (BNA)
  source: /note="3' tri-ethylene glycol (TEG)"
cugcuugaugaucaucucguug

SEQ ID NO: 7926 - RNA, 18 nt, Artificial Sequence
  source: /note="Description of Artificial Sequence: Synthetic oligonucleotide"
  source: /note="RNA"
  source: /note="5' tri-ethylene glycol (TEG)"
  modified_base (1)..(1): bicyclic nucleic acid (BNA)
  modified_base (18)..(18): bicyclic nucleic acid (BNA)
  source: /note="3' tri-ethylene glycol (TEG)"
cugcuugaugaucaucuc

SEQ ID NO: 7927 - RNA, 19 nt, Artificial Sequence
  source: /note="Description of Artificial Sequence: Synthetic oligonucleotide"
  source: /note="RNA"
  source: /note="5' tri-ethylene glycol (TEG)"
  modified_base (1)..(1): bicyclic nucleic acid (BNA)
  modified_base (19)..(19): bicyclic nucleic acid (BNA)
  source: /note="3' tri-ethylene glycol (TEG)"
guuuccuuaguaaccacag

SEQ ID NO: 7928 - RNA, 17 nt, Artificial Sequence
  source: /note="Description of Artificial Sequence: Synthetic oligonucleotide"
  source: /note="RNA"
  source: /note="5' tri-ethylene glycol (TEG)"
  modified_base (1)..(1): bicyclic nucleic acid (BNA)
  modified_base (17)..(17): bicyclic nucleic acid (BNA)
  source: /note="3' tri-ethylene glycol (TEG)"
guuuccuuaguaaccac

SEQ ID NO: 7929 - DNA, 20 bp, Artificial Sequence
  source: /note="Description of Artificial Sequence: Synthetic oligonucleotide"
  source: /note="Description of Combined DNA/RNA Molecule: Synthetic oligonucleotide"
  source: /note="DNA/RNA"
  modified_base (1)..(1): bicyclic nucleic acid (BNA)
  modified_base (2)..(2): bicyclic nucleic acid (BNA)
tcaaggaagauggcauuucu

SEQ ID NO: 7930 - DNA, 22 bp, Artificial Sequence
  source: /note="Description of Artificial Sequence: Synthetic oligonucleotide"
  source: /note="Description of Combined DNA/RNA Molecule: Synthetic oligonucleotide"
  source: /note="DNA/RNA"
  modified_base (1)..(1): bicyclic nucleic acid (BNA)
  modified_base (2)..(2): bicyclic nucleic acid (BNA)
tcaaggaagauggcauuucuag

SEQ ID NO: 7931 - RNA, 18 nt, Artificial Sequence
  source: /note="Description of Artificial Sequence: Synthetic oligonucleotide"
  source: /note="RNA"
  modified_base (1)..(1): bicyclic nucleic acid (BNA)
  modified_base (2)..(2): bicyclic nucleic acid (BNA)
gguaaguucuguccaagc

SEQ ID NO: 7932 - DNA, 18 bp, Artificial Sequence
  source: /note="Description of Artificial Sequence: Synthetic oligonucleotide"
  source: /note="Description of Combined DNA/RNA Molecule: Synthetic oligonucleotide"
  source: /note="DNA/RNA"
  modified_base (1)..(1): bicyclic nucleic acid (BNA)
  modified_base (2)..(2): bicyclic nucleic acid (BNA)
gtaaguucuguccaagcc

SEQ ID NO: 7933 - RNA, 18 nt, Artificial Sequence
  source: /note="Description of Artificial Sequence: Synthetic oligonucleotide"
  source: /note="RNA"
  modified_base (1)..(1): bicyclic nucleic acid (BNA)
  modified_base (2)..(2): bicyclic nucleic acid (BNA)
agucgguaaguucugucc

SEQ ID NO: 7934 - DNA, 18 bp, Artificial Sequence
  source: /note="Description of Artificial Sequence: Synthetic oligonucleotide"
  source: /note="Description of Combined DNA/RNA Molecule: Synthetic oligonucleotide"
  source: /note="DNA/RNA"
  modified_base (1)..(1): bicyclic nucleic acid (BNA)
  modified_base (2)..(2): bicyclic nucleic acid (BNA)
ctguccaagcccgguuga

SEQ ID NO: 7935 - DNA, 15 bp, Artificial Sequence
  source: /note="Description of Artificial Sequence: Synthetic oligonucleotide"
  source: /note="Description of Combined DNA/RNA Molecule: Synthetic oligonucleotide"
  source: /note="DNA/RNA"
  modified_base (1)..(1): bicyclic nucleic acid (BNA)
  modified_base (2)..(2): bicyclic nucleic acid (BNA)
taaguucuguccaag

SEQ ID NO: 7936 - DNA, 20 bp, Artificial Sequence
  source: /note="Description of Artificial Sequence: Synthetic oligonucleotide"
  source: /note="Description of Combined DNA/RNA Molecule: Synthetic oligonucleotide"
  source: /note="DNA/RNA"
  modified_base (1)..(1): bicyclic nucleic acid (BNA)
  modified_base (2)..(2): bicyclic nucleic acid (BNA)
ttcuguccaagcccgguuga

SEQ ID NO: 7937 - DNA, 19 bp, Artificial Sequence
  source: /note="Description of Artificial Sequence: Synthetic oligonucleotide"
  source: /note="Description of Combined DNA/RNA Molecule: Synthetic oligonucleotide"
  source: /note="DNA/RNA"
  modified_base (1)..(1): bicyclic nucleic acid (BNA)
  modified_base (2)..(2): bicyclic nucleic acid (BNA)
ttcuguccaagcccgguug

SEQ ID NO: 7938 - DNA, 18 bp, Artificial Sequence
  source: /note="Description of Artificial Sequence: Synthetic oligonucleotide"
  source: /note="Description of Combined DNA/RNA Molecule: Synthetic oligonucleotide"
  source: /note="DNA/RNA"
  modified_base (1)..(1): bicyclic nucleic acid (BNA)
  modified_base (2)..(2): bicyclic nucleic acid (BNA)
ttcuguccaagcccgguu

SEQ ID NO: 7939 - DNA, 17 bp, Artificial Sequence
  source: /note="Description of Artificial Sequence: Synthetic oligonucleotide"
  source: /note="Description of Combined DNA/RNA Molecule: Synthetic oligonucleotide"
  source: /note="DNA/RNA"
  modified_base (1)..(1): bicyclic nucleic acid (BNA)
  modified_base (2)..(2): bicyclic nucleic acid (BNA)
ttcuguccaagcccggu

SEQ ID NO: 7940 - DNA, 16 bp, Artificial Sequence
  source: /note="Description of Artificial Sequence: Synthetic oligonucleotide"
  source: /note="Description of Combined DNA/RNA Molecule: Synthetic oligonucleotide"
  source: /note="DNA/RNA"
  modified_base (1)..(1): bicyclic nucleic acid (BNA)
  modified_base (2)..(2): bicyclic nucleic acid (BNA)
ttcuguccaagcccgg

SEQ ID NO: 7941 - DNA, 15 bp, Artificial Sequence
  source: /note="Description of Artificial Sequence: Synthetic oligonucleotide"
  source: /note="Description of Combined DNA/RNA Molecule: Synthetic oligonucleotide"
  source: /note="DNA/RNA"
  modified_base (1)..(1): bicyclic nucleic acid (BNA)
  modified_base (2)..(2): bicyclic nucleic acid (BNA)
ttcuguccaagcccg

SEQ ID NO: 7942 - DNA, 14 bp, Artificial Sequence
  source: /note="Description of Artificial Sequence: Synthetic oligonucleotide"
  source: /note="Description of Combined DNA/RNA Molecule: Synthetic oligonucleotide"
  source: /note="DNA/RNA"
  modified_base (1)..(1): bicyclic nucleic acid (BNA)
  modified_base (2)..(2): bicyclic nucleic acid (BNA)
ttcuguccaagccc

SEQ ID NO: 7943 - DNA, 13 bp, Artificial Sequence
  source: /note="Description of Artificial Sequence: Synthetic oligonucleotide"
  source: /note="Description of Combined DNA/RNA Molecule: Synthetic oligonucleotide"
  source: /note="DNA/RNA"
  modified_base (1)..(1): bicyclic nucleic acid (BNA)
  modified_base (2)..(2): bicyclic nucleic acid (BNA)
ttcuguccaagcc

SEQ ID NO: 7944 - DNA, 12 bp, Artificial Sequence
  source: /note="Description of Artificial Sequence: Synthetic oligonucleotide"
  source: /note="Description of Combined DNA/RNA Molecule: Synthetic oligonucleotide"
  source: /note="DNA/RNA"
  modified_base (1)..(1): bicyclic nucleic acid (BNA)
  modified_base (2)..(2): bicyclic nucleic acid (BNA)
ttcuguccaagc

SEQ ID NO: 7945 - DNA, 11 bp, Artificial Sequence
  source: /note="Description of Artificial Sequence: Synthetic oligonucleotide"
  source: /note="Description of Combined DNA/RNA Molecule: Synthetic oligonucleotide"
  source: /note="DNA/RNA"
  modified_base (1)..(1): bicyclic nucleic acid (BNA)
  modified_base (2)..(2): bicyclic nucleic acid (BNA)
ttcuguccaag

SEQ ID NO: 7946 - DNA, 10 bp, Artificial Sequence
  source: /note="Description of Artificial Sequence: Synthetic oligonucleotide"
  source: /note="Description of Combined DNA/RNA Molecule: Synthetic oligonucleotide"
  source: /note="DNA/RNA"
  modified_base (1)..(1): bicyclic nucleic acid (BNA)
  modified_base (2)..(2): bicyclic nucleic acid (BNA)
ttcuguccaa

SEQ ID NO: 7947 - DNA, 9 bp, Artificial Sequence
  source: /note="Description of Artificial Sequence: Synthetic oligonucleotide"
  source: /note="Description of Combined DNA/RNA Molecule: Synthetic oligonucleotide"
  source: /note="DNA/RNA"
  modified_base (1)..(1): bicyclic nucleic acid (BNA)
  modified_base (2)..(2): bicyclic nucleic acid (BNA)
ttcugucca

SEQ ID NO: 7948 - DNA, 8 bp, Artificial Sequence
  source: /note="Description of Artificial Sequence: Synthetic oligonucleotide"
  source: /note="Description of Combined DNA/RNA Molecule: Synthetic oligonucleotide"
  source: /note="DNA/RNA"
  modified_base (1)..(1): bicyclic nucleic acid (BNA)
  modified_base (2)..(2): bicyclic nucleic acid (BNA)
ttcugucc

SEQ ID NO: 7949 - DNA, 19 bp, Artificial Sequence
  source: /note="Description of Artificial Sequence: Synthetic oligonucleotide"
  source: /note="Description of Combined DNA/RNA Molecule: Synthetic oligonucleotide"
  source: /note="DNA/RNA"
  modified_base (1)..(1): bicyclic nucleic acid (BNA)
  modified_base (2)..(2): bicyclic nucleic acid (BNA)
tcuguccaagcccgguuga

SEQ ID NO: 7950 - DNA, 18 bp, Artificial Sequence
  source: /note="Description of Artificial Sequence: Synthetic oligonucleotide"
  source: /note="Description of Combined DNA/RNA Molecule: Synthetic oligonucleotide"
  source: /note="DNA/RNA"
  modified_base (1)..(1): bicyclic nucleic acid (BNA)
  modified_base (2)..(2): bicyclic nucleic acid (BNA)
tcuguccaagcccgguug

SEQ ID NO: 7951 - DNA, 17 bp, Artificial Sequence
  source: /note="Description of Artificial Sequence: Synthetic oligonucleotide"
  source: /note="Description of Combined DNA/RNA Molecule: Synthetic oligonucleotide"
  source: /note="DNA/RNA"
  modified_base (1)..(1): bicyclic nucleic acid (BNA)
  modified_base (2)..(2): bicyclic nucleic acid (BNA)
tcuguccaagcccgguu

SEQ ID NO: 7952 - DNA, 16 bp, Artificial Sequence
  source: /note="Description of Artificial Sequence: Synthetic oligonucleotide"
  source: /note="Description of Combined DNA/RNA Molecule: Synthetic oligonucleotide"
  source: /note="DNA/RNA"
  modified_base (1)..(1): bicyclic nucleic acid (BNA)
  modified_base (2)..(2): bicyclic nucleic acid (BNA)
tcuguccaagcccggu

SEQ ID NO: 7953 - DNA, 15 bp, Artificial Sequence
  source: /note="Description of Artificial Sequence: Synthetic oligonucleotide"
  source: /note="Description of Combined DNA/RNA Molecule: Synthetic oligonucleotide"
  source: /note="DNA/RNA"
  modified_base (1)..(1): bicyclic nucleic acid (BNA)
  modified_base (2)..(2): bicyclic nucleic acid (BNA)
tcuguccaagcccgg

SEQ ID NO: 7954 - DNA, 14 bp, Artificial Sequence
  source: /note="Description of Artificial Sequence: Synthetic oligonucleotide"
  source: /note="Description of Combined DNA/RNA Molecule: Synthetic oligonucleotide"
  source: /note="DNA/RNA"
  modified_base (1)..(1): bicyclic nucleic acid (BNA)
  modified_base (2)..(2): bicyclic nucleic acid (BNA)
tcuguccaagcccg

SEQ ID NO: 7955 - DNA, 13 bp, Artificial Sequence
  source: /note="Description of Artificial Sequence: Synthetic oligonucleotide"
  source: /note="Description of Combined DNA/RNA Molecule: Synthetic oligonucleotide"
  source: /note="DNA/RNA"
  modified_base (1)..(1): bicyclic nucleic acid (BNA)
  modified_base (2)..(2): bicyclic nucleic acid (BNA)
tcuguccaagccc

SEQ ID NO: 7956 - DNA, 12 bp, Artificial Sequence
  source: /note="Description of Artificial Sequence: Synthetic oligonucleotide"
  source: /note="Description of Combined DNA/RNA Molecule: Synthetic oligonucleotide"
  source: /note="DNA/RNA"
  modified_base (1)..(1): bicyclic nucleic acid (BNA)
  modified_base (2)..(2): bicyclic nucleic acid (BNA)
tcuguccaagcc

SEQ ID NO: 7957 - DNA, 11 bp, Artificial Sequence
  source: /note="Description of Artificial Sequence: Synthetic oligonucleotide"
  source: /note="Description of Combined DNA/RNA Molecule: Synthetic oligonucleotide"
  source: /note="DNA/RNA"
  modified_base (1)..(1): bicyclic nucleic acid (BNA)
  modified_base (2)..(2): bicyclic nucleic acid (BNA)
tcuguccaagc

SEQ ID NO: 7958 - DNA, 10 bp, Artificial Sequence
  source: /note="Description of Artificial Sequence: Synthetic oligonucleotide"
  source: /note="Description of Combined DNA/RNA Molecule: Synthetic oligonucleotide"
  source: /note="DNA/RNA"
  modified_base (1)..(1): bicyclic nucleic acid (BNA)
  modified_base (2)..(2): bicyclic nucleic acid (BNA)
tcuguccaag

SEQ ID NO: 7959 - DNA, 9 bp, Artificial Sequence
  source: /note="Description of Artificial Sequence: Synthetic oligonucleotide"
  source: /note="Description of Combined DNA/RNA Molecule: Synthetic oligonucleotide"
  source: /note="DNA/RNA"
  modified_base (1)..(1): bicyclic nucleic acid (BNA)
  modified_base (2)..(2): bicyclic nucleic acid (BNA)
tcuguccaa

SEQ ID NO: 7960 - DNA, 8 bp, Artificial Sequence
  source: /note="Description of Artificial Sequence: Synthetic oligonucleotide"
  source: /note="Description of Combined DNA/RNA Molecule: Synthetic oligonucleotide"
  source: /note="DNA/RNA"
  modified_base (1)..(1): bicyclic nucleic acid (BNA)
  modified_base (2)..(2): bicyclic nucleic acid (BNA)
tcugucca

SEQ ID NO: 7961 - DNA, 17 bp, Artificial Sequence
  source: /note="Description of Artificial Sequence: Synthetic oligonucleotide"
  source: /note="Description of Combined DNA/RNA Molecule: Synthetic oligonucleotide"
  source: /note="DNA/RNA"
  modified_base (1)..(1): bicyclic nucleic acid (BNA)
  modified_base (2)..(2): bicyclic nucleic acid (BNA)
ctguccaagcccgguug

SEQ ID NO: 7962 - DNA, 16 bp, Artificial Sequence
  source: /note="Description of Artificial Sequence: Synthetic oligonucleotide"
  source: /note="Description of Combined DNA/RNA Molecule: Synthetic oligonucleotide"
  source: /note="DNA/RNA"
  modified_base (1)..(1): bicyclic nucleic acid (BNA)
  modified_base (2)..(2): bicyclic nucleic acid (BNA)
ctguccaagcccgguu

SEQ ID NO: 7963 - DNA, 15 bp, Artificial Sequence
  source: /note="Description of Artificial Sequence: Synthetic oligonucleotide"
  source: /note="Description of Combined DNA/RNA Molecule: Synthetic oligonucleotide"
  source: /note="DNA/RNA"
  modified_base (1)..(1): bicyclic nucleic acid (BNA)
  modified_base (2)..(2): bicyclic nucleic acid (BNA)
ctguccaagcccggu

SEQ ID NO: 7964 - DNA, 14 bp, Artificial Sequence
  source: /note="Description of Artificial Sequence: Synthetic oligonucleotide"
  source: /note="Description of Combined DNA/RNA Molecule: Synthetic oligonucleotide"
  source: /note="DNA/RNA"
  modified_base (1)..(1): bicyclic nucleic acid (BNA)
  modified_base (2)..(2): bicyclic nucleic acid (BNA)
ctguccaagcccgg

SEQ ID NO: 7965 - DNA, 13 bp, Artificial Sequence
  source: /note="Description of Artificial Sequence: Synthetic oligonucleotide"
  source: /note="Description of Combined DNA/RNA Molecule: Synthetic oligonucleotide"
  source: /note="DNA/RNA"
  modified_base (1)..(1): bicyclic nucleic acid (BNA)
  modified_base (2)..(2): bicyclic nucleic acid (BNA)
ctguccaagcccg

SEQ ID NO: 7966 - DNA, 12 bp, Artificial Sequence
  source: /note="Description of Artificial Sequence: Synthetic oligonucleotide"
  source: /note="Description of Combined DNA/RNA Molecule: Synthetic oligonucleotide"
  source: /note="DNA/RNA"
  modified_base (1)..(1): bicyclic nucleic acid (BNA)
  modified_base (2)..(2): bicyclic nucleic acid (BNA)
ctguccaagccc

SEQ ID NO: 7967 - DNA, 11 bp, Artificial Sequence
  source: /note="Description of Artificial Sequence: Synthetic oligonucleotide"
  source: /note="Description of Combined DNA/RNA Molecule: Synthetic oligonucleotide"
  source: /note="DNA/RNA"
  modified_base (1)..(1): bicyclic nucleic acid (BNA)
  modified_base (2)..(2): bicyclic nucleic acid (BNA)
ctguccaagcc

SEQ ID NO: 7968 - DNA, 10 bp, Artificial Sequence
  source: /note="Description of Artificial Sequence: Synthetic oligonucleotide"
  source: /note="Description of Combined DNA/RNA Molecule: Synthetic oligonucleotide"
  source: /note="DNA/RNA"
  modified_base (1)..(1): bicyclic nucleic acid (BNA)
  modified_base (2)..(2): bicyclic nucleic acid (BNA)
ctguccaagc

SEQ ID NO: 7969 - DNA, 9 bp, Artificial Sequence
  source: /note="Description of Artificial Sequence: Synthetic oligonucleotide"
  source: /note="Description of Combined DNA/RNA Molecule: Synthetic oligonucleotide"
  source: /note="DNA/RNA"
  modified_base (1)..(1): bicyclic nucleic acid (BNA)
  modified_base (2)..(2): bicyclic nucleic acid (BNA)
ctguccaag

SEQ ID NO: 7970 - DNA, 8 bp, Artificial Sequence
  source: /note="Description of Artificial Sequence: Synthetic oligonucleotide"
  source: /note="Description of Combined DNA/RNA Molecule: Synthetic oligonucleotide"
  source: /note="DNA/RNA"
  modified_base (1)..(1): bicyclic nucleic acid (BNA)
  modified_base (2)..(2): bicyclic nucleic acid (BNA)
ctguccaa

SEQ ID NO: 7971 - DNA, 20 bp, Artificial Sequence
  source: /note="Description of Artificial Sequence: Synthetic oligonucleotide"
  source: /note="Description of Combined DNA/RNA Molecule: Synthetic oligonucleotide"
  source: /note="DNA/RNA"
  modified_base (1)..(1): bicyclic nucleic acid (BNA)
  modified_base (2)..(2): bicyclic nucleic acid (BNA)
gtucuguccaagcccgguug

SEQ ID NO: 7972 - DNA, 19 bp, Artificial Sequence
  source: /note="Description of Artificial Sequence: Synthetic oligonucleotide"
  source: /note="Description of Combined DNA/RNA Molecule: Synthetic oligonucleotide"
  source: /note="DNA/RNA"
  modified_base (1)..(1): bicyclic nucleic acid (BNA)
  modified_base (2)..(2): bicyclic nucleic acid (BNA)
gtucuguccaagcccgguu

SEQ ID NO: 7973 - DNA, 18 bp, Artificial Sequence
  source: /note="Description of Artificial Sequence: Synthetic oligonucleotide"
  source: /note="Description of Combined DNA/RNA Molecule: Synthetic oligonucleotide"
  source: /note="DNA/RNA"
  modified_base (1)..(1): bicyclic nucleic acid (BNA)
  modified_base (2)..(2): bicyclic nucleic acid (BNA)
gtucuguccaagcccggu

SEQ ID NO: 7974 - DNA, 17 bp, Artificial Sequence
  source: /note="Description of Artificial Sequence: Synthetic oligonucleotide"
  source: /note="Description of Combined DNA/RNA Molecule: Synthetic oligonucleotide"
  source: /note="DNA/RNA"
  modified_base (1)..(1): bicyclic nucleic acid (BNA)
  modified_base (2)..(2): bicyclic nucleic acid (BNA)
gtucuguccaagcccgg

SEQ ID NO: 7975 - DNA, 16 bp, Artificial Sequence
  source: /note="Description of Artificial Sequence: Synthetic oligonucleotide"
  source: /note="Description of Combined DNA/RNA Molecule: Synthetic oligonucleotide"
  source: /note="DNA/RNA"
  modified_base (1)..(1): bicyclic nucleic acid (BNA)
  modified_base (2)..(2): bicyclic nucleic acid (BNA)
gtucuguccaagcccg

SEQ ID NO: 7976 - DNA, 15 bp, Artificial Sequence
  source: /note="Description of Artificial Sequence: Synthetic oligonucleotide"
  source: /note="Description of Combined DNA/RNA Molecule: Synthetic oligonucleotide"
  source: /note="DNA/RNA"
  modified_base (1)..(1): bicyclic nucleic acid (BNA)
  modified_base (2)..(2): bicyclic nucleic acid (BNA)
gtucuguccaagccc

SEQ ID NO: 7977 - DNA, 14 bp, Artificial Sequence
  source: /note="Description of Artificial Sequence: Synthetic oligonucleotide"
  source: /note="Description of Combined DNA/RNA Molecule: Synthetic oligonucleotide"
  source: /note="DNA/RNA"
  modified_base (1)..(1): bicyclic nucleic acid (BNA)
  modified_base (2)..(2): bicyclic nucleic acid (BNA)
gtucuguccaagcc

SEQ ID NO: 7978 - DNA, 13 bp, Artificial Sequence
  source: /note="Description of Artificial Sequence: Synthetic oligonucleotide"
  source: /note="Description of Combined DNA/RNA Molecule: Synthetic oligonucleotide"
  source: /note="DNA/RNA"
  modified_base (1)..(1): bicyclic nucleic acid (BNA)
  modified_base (2)..(2): bicyclic nucleic acid (BNA)
gtucuguccaagc

SEQ ID NO: 7979 - DNA, 12 bp, Artificial Sequence
  source: /note="Description of Artificial Sequence: Synthetic oligonucleotide"
  source: /note="Description of Combined DNA/RNA Molecule: Synthetic oligonucleotide"
  source: /note="DNA/RNA"
  modified_base (1)..(1): bicyclic nucleic acid (BNA)
  modified_base (2)..(2): bicyclic nucleic acid (BNA)
gtucuguccaag

SEQ ID NO: 7980 - DNA, 11 bp, Artificial Sequence
  source: /note="Description of Artificial Sequence: Synthetic oligonucleotide"
  source: /note="Description of Combined DNA/RNA Molecule: Synthetic oligonucleotide"
  source: /note="DNA/RNA"
  modified_base (1)..(1): bicyclic nucleic acid (BNA)
  modified_base (2)..(2): bicyclic nucleic acid (BNA)
gtucuguccaa

SEQ ID NO: 7981 - DNA, 10 bp, Artificial Sequence
  source: /note="Description of Artificial Sequence: Synthetic oligonucleotide"
  source: /note="Description of Combined DNA/RNA Molecule: Synthetic oligonucleotide"
  source: /note="DNA/RNA"
  modified_base (1)..(1): bicyclic nucleic acid (BNA)
  modified_base (2)..(2): bicyclic nucleic acid (BNA)
gtucugucca

SEQ ID NO: 7982 - DNA, 9 bp, Artificial Sequence
  source: /note="Description of Artificial Sequence: Synthetic oligonucleotide"
  source: /note="Description of Combined DNA/RNA Molecule: Synthetic oligonucleotide"
  source: /note="DNA/RNA"
  modified_base (1)..(1): bicyclic nucleic acid (BNA)
  modified_base (2)..(2): bicyclic nucleic acid (BNA)
gtucugucc

SEQ ID NO: 7983 - DNA, 8 bp, Artificial Sequence
  source: /note="Description of Artificial Sequence: Synthetic oligonucleotide"
  source: /note="Description of Combined DNA/RNA Molecule: Synthetic oligonucleotide"
  source: /note="DNA/RNA"
  modified_base (1)..(1): bicyclic nucleic acid (BNA)
  modified_base (2)..(2): bicyclic nucleic acid (BNA)
gtucuguc

SEQ ID NO: 7984 - RNA, 20 nt, Artificial Sequence
  source: /note="Description of Artificial Sequence: Synthetic oligonucleotide"
  source: /note="RNA"
  modified_base (1)..(1): bicyclic nucleic acid (BNA)
  modified_base (2)..(2): bicyclic nucleic acid (BNA)
aguucuguccaagcccgguu

SEQ ID NO: 7985 - RNA, 19 nt, Artificial Sequence
  source: /note="Description of Artificial Sequence: Synthetic oligonucleotide"
  source: /note="RNA"
  modified_base (1)..(1): bicyclic nucleic acid (BNA)
  modified_base (2)..(2): bicyclic nucleic acid (BNA)
aguucuguccaagcccggu

SEQ ID NO: 7986 - RNA, 18 nt, Artificial Sequence
  source: /note="Description of Artificial Sequence: Synthetic oligonucleotide"
  source: /note="RNA"
  modified_base (1)..(1): bicyclic nucleic acid (BNA)
  modified_base (2)..(2): bicyclic nucleic acid (BNA)
aguucuguccaagcccgg

SEQ ID NO: 7987 - RNA, 17 nt, Artificial Sequence
  source: /note="Description of Artificial Sequence: Synthetic oligonucleotide"
  source: /note="RNA"
  modified_base (1)..(1): bicyclic nucleic acid (BNA)
  modified_base (2)..(2): bicyclic nucleic acid (BNA)
aguucuguccaagcccg

SEQ ID NO: 7988 - RNA, 16 nt, Artificial Sequence
  source: /note="Description of Artificial Sequence: Synthetic oligonucleotide"
  source: /note="RNA"
  modified_base (1)..(1): bicyclic nucleic acid (BNA)
  modified_base (2)..(2): bicyclic nucleic acid (BNA)
aguucuguccaagccc

SEQ ID NO: 7989 - RNA, 15 nt, Artificial Sequence
  source: /note="Description of Artificial Sequence: Synthetic oligonucleotide"
  source: /note="RNA"
  modified_base (1)..(1): bicyclic nucleic acid (BNA)
  modified_base (2)..(2): bicyclic nucleic acid (BNA)
aguucuguccaagcc

SEQ ID NO: 7990 - RNA, 14 nt, Artificial Sequence
  source: /note="Description of Artificial Sequence: Synthetic oligonucleotide"
  source: /note="RNA"
  modified_base (1)..(1): bicyclic nucleic acid (BNA)
  modified_base (2)..(2): bicyclic nucleic acid (BNA)
aguucuguccaagc

SEQ ID NO: 7991 - RNA, 13 nt, Artificial Sequence
  source: /note="Description of Artificial Sequence: Synthetic oligonucleotide"
  source: /note="RNA"
  modified_base (1)..(1): bicyclic nucleic acid (BNA)
  modified_base (2)..(2): bicyclic nucleic acid (BNA)
aguucuguccaag

SEQ ID NO: 7992 - RNA, 12 nt, Artificial Sequence
  source: /note="Description of Artificial Sequence: Synthetic oligonucleotide"
  source: /note="RNA"
  modified_base (1)..(1): bicyclic nucleic acid (BNA)
  modified_base (2)..(2): bicyclic nucleic acid (BNA)
aguucuguccaa

SEQ ID NO: 7993 - RNA, 11 nt, Artificial Sequence
  source: /note="Description of Artificial Sequence: Synthetic oligonucleotide"
  source: /note="RNA"
  modified_base (1)..(1): bicyclic nucleic acid (BNA)
  modified_base (2)..(2): bicyclic nucleic acid (BNA)
aguucugucca

SEQ ID NO: 7994 - RNA, 10 nt, Artificial Sequence
  source: /note="Description of Artificial Sequence: Synthetic oligonucleotide"
  source: /note="RNA"
  modified_base (1)..(1): bicyclic nucleic acid (BNA)
  modified_base (2)..(2): bicyclic nucleic acid (BNA)
aguucugucc

SEQ ID NO: 7995 - RNA, 9 nt, Artificial Sequence
  source: /note="Description of Artificial Sequence: Synthetic oligonucleotide"
  source: /note="RNA"
  modified_base (1)..(1): bicyclic nucleic acid (BNA)
  modified_base (2)..(2): bicyclic nucleic acid (BNA)
aguucuguc

SEQ ID NO: 7996 - RNA, 8 nt, Artificial Sequence
  source: /note="Description of Artificial Sequence: Synthetic oligonucleotide"
  source: /note="RNA"
  modified_base (1)..(1): bicyclic nucleic acid (BNA)
  modified_base (2)..(2): bicyclic nucleic acid (BNA)
aguucugu

SEQ ID NO: 7997 - RNA, 20 nt, Artificial Sequence
  source: /note="Description of Artificial Sequence: Synthetic oligonucleotide"
  source: /note="RNA"
  modified_base (1)..(1): bicyclic nucleic acid (BNA)
  modified_base (2)..(2): bicyclic nucleic acid (BNA)
aaguucuguccaagcccggu

SEQ ID NO: 7998 - RNA, 19 nt, Artificial Sequence
  source: /note="Description of Artificial Sequence: Synthetic oligonucleotide"
  source: /note="RNA"
  modified_base (1)..(1): bicyclic nucleic acid (BNA)
  modified_base (2)..(2): bicyclic nucleic acid (BNA)
aaguucuguccaagcccgg

SEQ ID NO: 7999 - RNA, 18 nt, Artificial Sequence
  source: /note="Description of Artificial Sequence: Synthetic oligonucleotide"
  source: /note="RNA"
  modified_base (1)..(1): bicyclic nucleic acid (BNA)
  modified_base (2)..(2): bicyclic nucleic acid (BNA)
aaguucuguccaagcccg

SEQ ID NO: 8000 - RNA, 17 nt, Artificial Sequence
  source: /note="Description of Artificial Sequence: Synthetic oligonucleotide"
  source: /note="RNA"
  modified_base (1)..(1): bicyclic nucleic acid (BNA)
  modified_base (2)..(2): bicyclic nucleic acid (BNA)
aaguucuguccaagccc

SEQ ID NO: 8001 - RNA, 16 nt, Artificial Sequence
  source: /note="Description of Artificial Sequence: Synthetic oligonucleotide"
  source: /note="RNA"
  modified_base (1)..(1): bicyclic nucleic acid (BNA)
  modified_base (2)..(2): bicyclic nucleic acid (BNA)
aaguucuguccaagcc

SEQ ID NO: 8002 - RNA, 15 nt, Artificial Sequence
  source: /note="Description of Artificial Sequence: Synthetic oligonucleotide"
  source: /note="RNA"
  modified_base (1)..(1): bicyclic nucleic acid (BNA)
  modified_base (2)..(2): bicyclic nucleic acid (BNA)
aaguucuguccaagc

SEQ ID NO: 8003 - RNA, 14 nt, Artificial Sequence
  source: /note="Description of Artificial Sequence: Synthetic oligonucleotide"
  source: /note="RNA"
  modified_base (1)..(1): bicyclic nucleic acid (BNA)
  modified_base (2)..(2): bicyclic nucleic acid (BNA)
aaguucuguccaag

SEQ ID NO: 8004 - RNA, 13 nt, Artificial Sequence
  source: /note="Description of Artificial Sequence: Synthetic oligonucleotide"
  source: /note="RNA"
  modified_base (1)..(1): bicyclic nucleic acid (BNA)
  modified_base (2)..(2): bicyclic nucleic acid (BNA)
aaguucuguccaa

SEQ ID NO: 8005 - RNA, 12 nt, Artificial Sequence
  source: /note="Description of Artificial Sequence: Synthetic oligonucleotide"
  source: /note="RNA"
  modified_base (1)..(1): bicyclic nucleic acid (BNA)
  modified_base (2)..(2): bicyclic nucleic acid (BNA)
aaguucugucca

SEQ ID NO: 8006 - RNA, 11 nt, Artificial Sequence
  source: /note="Description of Artificial Sequence: Synthetic oligonucleotide"
  source: /note="RNA"
  modified_base (1)..(1): bicyclic nucleic acid (BNA)
  modified_base (2)..(2): bicyclic nucleic acid (BNA)
aaguucugucc

SEQ ID NO: 8007 - RNA, 10 nt, Artificial Sequence
  source: /note="Description of Artificial Sequence: Synthetic oligonucleotide"
  source: /note="RNA"
  modified_base (1)..(1): bicyclic nucleic acid (BNA)
  modified_base (2)..(2): bicyclic nucleic acid (BNA)
aaguucuguc

SEQ ID NO: 8008 - RNA, 9 nt, Artificial Sequence
  source: /note="Description of Artificial Sequence: Synthetic oligonucleotide"
  source: /note="RNA"
  modified_base (1)..(1): bicyclic nucleic acid (BNA)
  modified_base (2)..(2): bicyclic nucleic acid (BNA)
aaguucugu

SEQ ID NO: 8009 - RNA, 8 nt, Artificial Sequence
  source: /note="Description of Artificial Sequence: Synthetic oligonucleotide"
  source: /note="RNA"
  modified_base (1)..(1): bicyclic nucleic acid (BNA)
  modified_base (2)..(2): bicyclic nucleic acid (BNA)
aaguucug

SEQ ID NO: 8010 - DNA, 20 bp, Artificial Sequence
  source: /note="Description of Artificial Sequence: Synthetic oligonucleotide"
  source: /note="Description of Combined DNA/RNA Molecule: Synthetic oligonucleotide"
  source: /note="DNA/RNA"
  modified_base (1)..(1): bicyclic nucleic acid (BNA)
  modified_base (2)..(2): bicyclic nucleic acid (BNA)
taaguucuguccaagcccgg

SEQ ID NO: 8011 - DNA, 19 bp, Artificial Sequence
  source: /note="Description of Artificial Sequence: Synthetic oligonucleotide"
  source: /note="Description of Combined DNA/RNA Molecule: Synthetic oligonucleotide"
  source: /note="DNA/RNA"
  modified_base (1)..(1): bicyclic nucleic acid (BNA)
  modified_base (2)..(2): bicyclic nucleic acid (BNA)
taaguucuguccaagcccg

SEQ ID NO: 8012 - DNA, 18 bp, Artificial Sequence
  source: /note="Description of Artificial Sequence: Synthetic oligonucleotide"
  source: /note="Description of Combined DNA/RNA Molecule: Synthetic oligonucleotide"
  source: /note="DNA/RNA"
  modified_base (1)..(1): bicyclic nucleic acid (BNA)
  modified_base (2)..(2): bicyclic nucleic acid (BNA)
taaguucuguccaagccc

SEQ ID NO: 8013 - DNA, 17 bp, Artificial Sequence
  source: /note="Description of Artificial Sequence: Synthetic oligonucleotide"
  source: /note="Description of Combined DNA/RNA Molecule: Synthetic oligonucleotide"
  source: /note="DNA/RNA"
  modified_base (1)..(1): bicyclic nucleic acid (BNA)
  modified_base (2)..(2): bicyclic nucleic acid (BNA)
taaguucuguccaagcc

SEQ ID NO: 8014 - DNA, 16 bp, Artificial Sequence
  source: /note="Description of Artificial Sequence: Synthetic oligonucleotide"
  source: /note="Description of Combined DNA/RNA Molecule: Synthetic oligonucleotide"
  source: /note="DNA/RNA"
  modified_base (1)..(1): bicyclic nucleic acid (BNA)
  modified_base (2)..(2): bicyclic nucleic acid (BNA)
taaguucuguccaagc

SEQ ID NO: 8015 - DNA, 14 bp, Artificial Sequence
  source: /note="Description of Artificial Sequence: Synthetic oligonucleotide"
  source: /note="Description of Combined DNA/RNA Molecule: Synthetic oligonucleotide"
  source: /note="DNA/RNA"
  modified_base (1)..(1): bicyclic nucleic acid (BNA)
  modified_base (2)..(2): bicyclic nucleic acid (BNA)
taaguucuguccaa

SEQ ID NO: 8016 - DNA, 13 bp, Artificial Sequence
  source: /note="Description of Artificial Sequence: Synthetic oligonucleotide"
  source: /note="Description of Combined DNA/RNA Molecule: Synthetic oligonucleotide"
  source: /note="DNA/RNA"
  modified_base (1)..(1): bicyclic nucleic acid (BNA)
  modified_base (2)..(2): bicyclic nucleic acid (BNA)
taaguucugucca

SEQ ID NO: 8017 - DNA, 12 bp, Artificial Sequence
  source: /note="Description of Artificial Sequence: Synthetic oligonucleotide"
  source: /note="Description of Combined DNA/RNA Molecule: Synthetic oligonucleotide"
  source: /note="DNA/RNA"
  modified_base (1)..(1): bicyclic nucleic acid (BNA)
  modified_base (2)..(2): bicyclic nucleic acid (BNA)
taaguucugucc

SEQ ID NO: 8018 - DNA, 11 bp, Artificial Sequence
  source: /note="Description of Artificial Sequence: Synthetic oligonucleotide"
  source: /note="Description of Combined DNA/RNA Molecule: Synthetic oligonucleotide"
  source: /note="DNA/RNA"
  modified_base (1)..(1): bicyclic nucleic acid (BNA)
  modified_base (2)..(2): bicyclic nucleic acid (BNA)
taaguucuguc

SEQ ID NO: 8019 - DNA, 10 bp, Artificial Sequence
  source: /note="Description of Artificial Sequence: Synthetic oligonucleotide"
  source: /note="Description of Combined DNA/RNA Molecule: Synthetic oligonucleotide"
  source: /note="DNA/RNA"
  modified_base (1)..(1): bicyclic nucleic acid (BNA)
  modified_base (2)..(2): bicyclic nucleic acid (BNA)
taaguucugu

SEQ ID NO: 8020 - DNA, 9 bp, Artificial Sequence
  source: /note="Description of Artificial Sequence: Synthetic oligonucleotide"
  source: /note="Description of Combined DNA/RNA Molecule: Synthetic oligonucleotide"
  source: /note="DNA/RNA"
  modified_base (1)..(1): bicyclic nucleic acid (BNA)
  modified_base (2)..(2): bicyclic nucleic acid (BNA)
taaguucug

SEQ ID NO: 8021 - DNA, 8 bp, Artificial Sequence
  source: /note="Description of Artificial Sequence: Synthetic oligonucleotide"
  source: /note="Description of Combined DNA/RNA Molecule: Synthetic oligonucleotide"
  source: /note="DNA/RNA"
  modified_base (1)..(1): bicyclic nucleic acid (BNA)
  modified_base (2)..(2): bicyclic nucleic acid (BNA)
taaguucu

SEQ ID NO: 8022 - DNA, 20 bp, Artificial Sequence
  source: /note="Description of Artificial Sequence: Synthetic oligonucleotide"
  source: /note="Description of Combined DNA/RNA Molecule: Synthetic oligonucleotide"
  source: /note="DNA/RNA"
  modified_base (1)..(1): bicyclic nucleic acid (BNA)
  modified_base (2)..(2): bicyclic nucleic acid (BNA)
gtaaguucuguccaagcccg

SEQ ID NO: 8023 - DNA, 19 bp, Artificial Sequence
  source: /note="Description of Artificial Sequence: Synthetic oligonucleotide"
  source: /note="Description of Combined DNA/RNA Molecule: Synthetic oligonucleotide"
  source: /note="DNA/RNA"
  modified_base (1)..(1): bicyclic nucleic acid (BNA)
  modified_base (2)..(2): bicyclic nucleic acid (BNA)
gtaaguucuguccaagccc

SEQ ID NO: 8024 - DNA, 17 bp, Artificial Sequence
  source: /note="Description of Artificial Sequence: Synthetic oligonucleotide"
  source: /note="Description of Combined DNA/RNA Molecule: Synthetic oligonucleotide"
  source: /note="DNA/RNA"
  modified_base (1)..(1): bicyclic nucleic acid (BNA)
  modified_base (2)..(2): bicyclic nucleic acid (BNA)
gtaaguucuguccaagc

SEQ ID NO: 8025 - DNA, 16 bp, Artificial Sequence
  source: /note="Description of Artificial Sequence: Synthetic oligonucleotide"
  source: /note="Description of Combined DNA/RNA Molecule: Synthetic oligonucleotide"
  source: /note="DNA/RNA"
  modified_base (1)..(1): bicyclic nucleic acid (BNA)
  modified_base (2)..(2): bicyclic nucleic acid (BNA)
gtaaguucuguccaag

SEQ ID NO: 8026 - DNA, 15 bp, Artificial Sequence
  source: /note="Description of Artificial Sequence: Synthetic oligonucleotide"
  source: /note="Description of Combined DNA/RNA Molecule: Synthetic oligonucleotide"
  source: /note="DNA/RNA"
  modified_base (1)..(1): bicyclic nucleic acid (BNA)
  modified_base (2)..(2): bicyclic nucleic acid (BNA)
gtaaguucuguccaa

SEQ ID NO: 8027 - DNA, 14 bp, Artificial Sequence
  source: /note="Description of Artificial Sequence: Synthetic oligonucleotide"
  source: /note="Description of Combined DNA/RNA Molecule: Synthetic oligonucleotide"
  source: /note="DNA/RNA"
  modified_base (1)..(1): bicyclic nucleic acid (BNA)
  modified_base (2)..(2): bicyclic nucleic acid (BNA)
gtaaguucugucca

SEQ ID NO: 8028 - DNA, 13 bp, Artificial Sequence
  source: /note="Description of Artificial Sequence: Synthetic oligonucleotide"
  source: /note="Description of Combined DNA/RNA Molecule: Synthetic oligonucleotide"
  source: /note="DNA/RNA"
  modified_base (1)..(1): bicyclic nucleic acid (BNA)
  modified_base (2)..(2): bicyclic nucleic acid (BNA)
gtaaguucugucc

SEQ ID NO: 8029 - DNA, 12 bp, Artificial Sequence
  source: /note="Description of Artificial Sequence: Synthetic oligonucleotide"
  source: /note="Description of Combined DNA/RNA Molecule: Synthetic oligonucleotide"
  source: /note="DNA/RNA"
  modified_base (1)..(1): bicyclic nucleic acid (BNA)
  modified_base (2)..(2): bicyclic nucleic acid (BNA)
gtaaguucuguc

SEQ ID NO: 8030 - DNA, 11 bp, Artificial Sequence
  source: /note="Description of Artificial Sequence: Synthetic oligonucleotide"
  source: /note="Description of Combined DNA/RNA Molecule: Synthetic oligonucleotide"
  source: /note="DNA/RNA"
  modified_base (1)..(1): bicyclic nucleic acid (BNA)
  modified_base (2)..(2): bicyclic nucleic acid (BNA)
gtaaguucugu

SEQ ID NO: 8031 - DNA, 10 bp, Artificial Sequence
  source: /note="Description of Artificial Sequence: Synthetic oligonucleotide"
  source: /note="Description of Combined DNA/RNA Molecule: Synthetic oligonucleotide"
  source: /note="DNA/RNA"
  modified_base (1)..(1): bicyclic nucleic acid (BNA)
  modified_base (2)..(2): bicyclic nucleic acid (BNA)
gtaaguucug

SEQ ID NO: 8032 - DNA, 9 bp, Artificial Sequence
  source: /note="Description of Artificial Sequence: Synthetic oligonucleotide"
  source: /note="Description of Combined DNA/RNA Molecule: Synthetic oligonucleotide"
  source: /note="DNA/RNA"
  modified_base (1)..(1): bicyclic nucleic acid (BNA)
  modified_base (2)..(2): bicyclic nucleic acid (BNA)
gtaaguucu

SEQ ID NO: 8033 - DNA, 8 bp, Artificial Sequence
  source: /note="Description of Artificial Sequence: Synthetic oligonucleotide"
  source: /note="Description of Combined DNA/RNA Molecule: Synthetic oligonucleotide"
  source: /note="DNA/RNA"
  modified_base (1)..(1): bicyclic nucleic acid (BNA)
  modified_base (2)..(2): bicyclic nucleic acid (BNA)
gtaaguuc

SEQ ID NO: 8034 - RNA, 20 nt, Artificial Sequence
  source: /note="Description of Artificial Sequence: Synthetic oligonucleotide"
  source: /note="RNA"
  modified_base (1)..(1): bicyclic nucleic acid (BNA)
  modified_base (2)..(2): bicyclic nucleic acid (BNA)
gguaaguucuguccaagccc

SEQ ID NO: 8035 - RNA, 19 nt, Artificial Sequence
  source: /note="Description of Artificial Sequence: Synthetic oligonucleotide"
  source: /note="RNA"
  modified_base (1)..(1): bicyclic nucleic acid (BNA)
  modified_base (2)..(2): bicyclic nucleic acid (BNA)
gguaaguucuguccaagcc

SEQ ID NO: 8036 - RNA, 17 nt, Artificial Sequence
  source: /note="Description of Artificial Sequence: Synthetic oligonucleotide"
  source: /note="RNA"
  modified_base (1)..(1): bicyclic nucleic acid (BNA)
  modified_base (2)..(2): bicyclic nucleic acid (BNA)
gguaaguucuguccaag

SEQ ID NO: 8037 - RNA, 16 nt, Artificial Sequence
  source: /note="Description of Artificial Sequence: Synthetic oligonucleotide"
  source: /note="RNA"
  modified_base (1)..(1): bicyclic nucleic acid (BNA)
  modified_base (2)..(2): bicyclic nucleic acid (BNA)
gguaaguucuguccaa

SEQ ID NO: 8038 - RNA, 15 nt, Artificial Sequence
  source: /note="Description of Artificial Sequence: Synthetic oligonucleotide"
  source: /note="RNA"
  modified_base (1)..(1): bicyclic nucleic acid (BNA)
  modified_base (2)..(2): bicyclic nucleic acid (BNA)
gguaaguucugucca

SEQ ID NO: 8039 - RNA, 14 nt, Artificial Sequence
  source: /note="Description of Artificial Sequence: Synthetic oligonucleotide"
  source: /note="RNA"
  modified_base (1)..(1): bicyclic nucleic acid (BNA)
  modified_base (2)..(2): bicyclic nucleic acid (BNA)
gguaaguucugucc

SEQ ID NO: 8040 - RNA, 13 nt, Artificial Sequence
  source: /note="Description of Artificial Sequence: Synthetic oligonucleotide"
  source: /note="RNA"
  modified_base (1)..(1): bicyclic nucleic acid (BNA)
  modified_base (2)..(2): bicyclic nucleic acid (BNA)
gguaaguucuguc

SEQ ID NO: 8041 - RNA, 12 nt, Artificial Sequence
  source: /note="Description of Artificial Sequence: Synthetic oligonucleotide"
  source: /note="RNA"
  modified_base (1)..(1): bicyclic nucleic acid (BNA)
  modified_base (2)..(2): bicyclic nucleic acid (BNA)
gguaaguucugu

SEQ ID NO: 8042 - RNA, 11 nt, Artificial Sequence
  source: /note="Description of Artificial Sequence: Synthetic oligonucleotide"
  source: /note="RNA"
  modified_base (1)..(1): bicyclic nucleic acid (BNA)
  modified_base (2)..(2): bicyclic nucleic acid (BNA)
gguaaguucug

SEQ ID NO: 8043 - RNA, 10 nt, Artificial Sequence
  source: /note="Description of Artificial Sequence: Synthetic oligonucleotide"
  source: /note="RNA"
  modified_base (1)..(1): bicyclic nucleic acid (BNA)
  modified_base (2)..(2): bicyclic nucleic acid (BNA)
gguaaguucu

SEQ ID NO: 8044 - RNA, 9 nt, Artificial Sequence
  source: /note="Description of Artificial Sequence: Synthetic oligonucleotide"
  source: /note="RNA"
  modified_base (1)..(1): bicyclic nucleic acid (BNA)
  modified_base (2)..(2): bicyclic nucleic acid (BNA)
gguaaguuc

SEQ ID NO: 8045 - RNA, 8 nt, Artificial Sequence
  source: /note="Description of Artificial Sequence: Synthetic oligonucleotide"
  source: /note="RNA"
  modified_base (1)..(1): bicyclic nucleic acid (BNA)
  modified_base (2)..(2): bicyclic nucleic acid (BNA)
gguaaguu

SEQ ID NO: 8046 - RNA, 20 nt, Artificial Sequence
  source: /note="Description of Artificial Sequence: Synthetic oligonucleotide"
  source: /note="RNA"
  modified_base (1)..(1): bicyclic nucleic acid (BNA)
  modified_base (2)..(2): bicyclic nucleic acid (BNA)
cgguaaguucuguccaagcc

SEQ ID NO: 8047 - RNA, 19 nt, Artificial Sequence
  source: /note="Description of Artificial Sequence: Synthetic oligonucleotide"
  source: /note="RNA"
  modified_base (1)..(1): bicyclic nucleic acid (BNA)
  modified_base (2)..(2): bicyclic nucleic acid (BNA)
cgguaaguucuguccaagc

SEQ ID NO: 8048 - RNA, 18 nt, Artificial Sequence
  source: /note="Description of Artificial Sequence: Synthetic oligonucleotide"
  source: /note="RNA"
  modified_base (1)..(1): bicyclic nucleic acid (BNA)
  modified_base (2)..(2): bicyclic nucleic acid (BNA)
cgguaaguucuguccaag

SEQ ID NO: 8049 - RNA, 17 nt, Artificial Sequence
  source: /note="Description of Artificial Sequence: Synthetic oligonucleotide"
  source: /note="RNA"
  modified_base (1)..(1): bicyclic nucleic acid (BNA)
  modified_base (2)..(2): bicyclic nucleic acid (BNA)
cgguaaguucuguccaa

SEQ ID NO: 8050 - RNA, 16 nt, Artificial Sequence
  source: /note="Description of Artificial Sequence: Synthetic oligonucleotide"
  source: /note="RNA"
  modified_base (1)..(1): bicyclic nucleic acid (BNA)
  modified_base (2)..(2): bicyclic nucleic acid (BNA)
cgguaaguucugucca

SEQ ID NO: 8051 - RNA, 15 nt, Artificial Sequence
  source: /note="Description of Artificial Sequence: Synthetic oligonucleotide"
  source: /note="RNA"
  modified_base (1)..(1): bicyclic nucleic acid (BNA)
  modified_base (2)..(2): bicyclic nucleic acid (BNA)
cgguaaguucugucc

SEQ ID NO: 8052 - RNA, 14 nt, Artificial Sequence
  source: /note="Description of Artificial Sequence: Synthetic oligonucleotide"
  source: /note="RNA"
  modified_base (1)..(1): bicyclic nucleic acid (BNA)
  modified_base (2)..(2): bicyclic nucleic acid (BNA)
cgguaaguucuguc

SEQ ID NO: 8053 - RNA, 13 nt, Artificial Sequence
  source: /note="Description of Artificial Sequence: Synthetic oligonucleotide"
  source: /note="RNA"
  modified_base (1)..(1): bicyclic nucleic acid (BNA)
  modified_base (2)..(2): bicyclic nucleic acid (BNA)
cgguaaguucugu

SEQ ID NO: 8054 - RNA, 12 nt, Artificial Sequence
  source: /note="Description of Artificial Sequence: Synthetic oligonucleotide"
  source: /note="RNA"
  modified_base (1)..(1): bicyclic nucleic acid (BNA)
  modified_base (2)..(2): bicyclic nucleic acid (BNA)
cgguaaguucug

SEQ ID NO: 8055 - RNA, 11 nt, Artificial Sequence
  source: /note="Description of Artificial Sequence: Synthetic oligonucleotide"
  source: /note="RNA"
  modified_base (1)..(1): bicyclic nucleic acid (BNA)
  modified_base (2)..(2): bicyclic nucleic acid (BNA)
cgguaaguucu

SEQ ID NO: 8056 - RNA, 10 nt, Artificial Sequence
  source: /note="Description of Artificial Sequence: Synthetic oligonucleotide"
  source: /note="RNA"
  modified_base (1)..(1): bicyclic nucleic acid (BNA)
  modified_base (2)..(2): bicyclic nucleic acid (BNA)
cgguaaguuc

SEQ ID NO: 8057 - RNA, 9 nt, Artificial Sequence
  source: /note="Description of Artificial Sequence: Synthetic oligonucleotide"
  source: /note="RNA"
  modified_base (1)..(1): bicyclic nucleic acid (BNA)
  modified_base (2)..(2): bicyclic nucleic acid (BNA)
cgguaaguu

SEQ ID NO: 8058 - RNA, 8 nt, Artificial Sequence
  source: /note="Description of Artificial Sequence: Synthetic oligonucleotide"
  source: /note="RNA"
  modified_base (1)..(1): bicyclic nucleic acid (BNA)
  modified_base (2)..(2): bicyclic nucleic acid (BNA)
cgguaagu

SEQ ID NO: 8059 - DNA, 20 bp, Artificial Sequence
  source: /note="Description of Artificial Sequence: Synthetic oligonucleotide"
  source: /note="Description of Combined DNA/RNA Molecule: Synthetic oligonucleotide"
  source: /note="DNA/RNA"
  modified_base (1)..(1): bicyclic nucleic acid (BNA)
  modified_base (2)..(2): bicyclic nucleic acid (BNA)
tcgguaaguucuguccaagc

SEQ ID NO: 8060 - DNA, 19 bp, Artificial Sequence
  source: /note="Description of Artificial Sequence: Synthetic oligonucleotide"
  source: /note="Description of Combined DNA/RNA Molecule: Synthetic oligonucleotide"
  source: /note="DNA/RNA"
  modified_base (1)..(1): bicyclic nucleic acid (BNA)
  modified_base (2)..(2): bicyclic nucleic acid (BNA)
tcgguaaguucuguccaag

SEQ ID NO: 8061 - DNA, 18 bp, Artificial Sequence
  source: /note="Description of Artificial Sequence: Synthetic oligonucleotide"
  source: /note="Description of Combined DNA/RNA Molecule: Synthetic oligonucleotide"
  source: /note="DNA/RNA"
  modified_base (1)..(1): bicyclic nucleic acid (BNA)
  modified_base (2)..(2): bicyclic nucleic acid (BNA)
tcgguaaguucuguccaa

SEQ ID NO: 8062 - DNA, 17 bp, Artificial Sequence
  source: /note="Description of Artificial Sequence: Synthetic oligonucleotide"
  source: /note="Description of Combined DNA/RNA Molecule: Synthetic oligonucleotide"
  source: /note="DNA/RNA"
  modified_base (1)..(1): bicyclic nucleic acid (BNA)
  modified_base (2)..(2): bicyclic nucleic acid (BNA)
tcgguaaguucugucca

SEQ ID NO: 8063 - DNA, 16 bp, Artificial Sequence
  source: /note="Description of Artificial Sequence: Synthetic oligonucleotide"
  source: /note="Description of Combined DNA/RNA Molecule: Synthetic oligonucleotide"
  source: /note="DNA/RNA"
  modified_base (1)..(1): bicyclic nucleic acid (BNA)
  modified_base (2)..(2): bicyclic nucleic acid (BNA)
tcgguaaguucugucc

SEQ ID NO: 8064 - DNA, 15 bp, Artificial Sequence
  source: /note="Description of Artificial Sequence: Synthetic oligonucleotide"
  source: /note="Description of Combined DNA/RNA Molecule: Synthetic oligonucleotide"
  source: /note="DNA/RNA"
  modified_base (1)..(1): bicyclic nucleic acid (BNA)
  modified_base (2)..(2): bicyclic nucleic acid (BNA)
tcgguaaguucuguc

SEQ ID NO: 8065 - DNA, 14 bp, Artificial Sequence
  source: /note="Description of Artificial Sequence: Synthetic oligonucleotide"
  source: /note="Description of Combined DNA/RNA Molecule: Synthetic oligonucleotide"
  source: /note="DNA/RNA"
  modified_base (1)..(1): bicyclic nucleic acid (BNA)
  modified_base (2)..(2): bicyclic nucleic acid (BNA)
tcgguaaguucugu

SEQ ID NO: 8066 - DNA, 13 bp, Artificial Sequence
  source: /note="Description of Artificial Sequence: Synthetic oligonucleotide"
  source: /note="Description of Combined DNA/RNA Molecule: Synthetic oligonucleotide"
  source: /note="DNA/RNA"
  modified_base (1)..(1): bicyclic nucleic acid (BNA)
  modified_base (2)..(2): bicyclic nucleic acid (BNA)
tcgguaaguucug

SEQ ID NO: 8067 - DNA, 12 bp, Artificial Sequence
  source: /note="Description of Artificial Sequence: Synthetic oligonucleotide"
  source: /note="Description of Combined DNA/RNA Molecule: Synthetic oligonucleotide"
  source: /note="DNA/RNA"
  modified_base (1)..(1): bicyclic nucleic acid (BNA)
  modified_base (2)..(2): bicyclic nucleic acid (BNA)
tcgguaaguucu

SEQ ID NO: 8068 - DNA, 11 bp, Artificial Sequence
  source: /note="Description of Artificial Sequence: Synthetic oligonucleotide"
  source: /note="Description of Combined DNA/RNA Molecule: Synthetic oligonucleotide"
  source: /note="DNA/RNA"
  modified_base (1)..(1): bicyclic nucleic acid (BNA)
  modified_base (2)..(2): bicyclic nucleic acid (BNA)
tcgguaaguuc

SEQ ID NO: 8069 - DNA, 10 bp, Artificial Sequence
  source: /note="Description of Artificial Sequence: Synthetic oligonucleotide"
  source: /note="Description of Combined DNA/RNA Molecule: Synthetic oligonucleotide"
  source: /note="DNA/RNA"
  modified_base (1)..(1): bicyclic nucleic acid (BNA)
  modified_base (2)..(2): bicyclic nucleic acid (BNA)
tcgguaaguu

SEQ ID NO: 8070 - DNA, 9 bp, Artificial Sequence
  source: /note="Description of Artificial Sequence: Synthetic oligonucleotide"
  source: /note="Description of Combined DNA/RNA Molecule: Synthetic oligonucleotide"
  source: /note="DNA/RNA"
  modified_base (1)..(1): bicyclic nucleic acid (BNA)
  modified_base (2)..(2): bicyclic nucleic acid (BNA)
tcgguaagu

SEQ ID NO: 8071 - DNA, 20 bp, Artificial Sequence
  source: /note="Description of Artificial Sequence: Synthetic oligonucleotide"
  source: /note="Description of Combined DNA/RNA Molecule: Synthetic oligonucleotide"
  source: /note="DNA/RNA"
  modified_base (1)..(1): bicyclic nucleic acid (BNA)
  modified_base (2)..(2): bicyclic nucleic acid (BNA)
gtcgguaaguucuguccaag

SEQ ID NO: 8072 - DNA, 19 bp, Artificial Sequence
  source: /note="Description of Artificial Sequence: Synthetic oligonucleotide"
  source: /note="Description of Combined DNA/RNA Molecule: Synthetic oligonucleotide"
  source: /note="DNA/RNA"
  modified_base (1)..(1): bicyclic nucleic acid (BNA)
  modified_base (2)..(2): bicyclic nucleic acid (BNA)
gtcgguaaguucuguccaa

SEQ ID NO: 8073 - DNA, 18 bp, Artificial Sequence
  source: /note="Description of Artificial Sequence: Synthetic oligonucleotide"
  source: /note="Description of Combined DNA/RNA Molecule: Synthetic oligonucleotide"
  source: /note="DNA/RNA"
  modified_base (1)..(1): bicyclic nucleic acid (BNA)
  modified_base (2)..(2): bicyclic nucleic acid (BNA)
gtcgguaaguucugucca

SEQ ID NO: 8074 - DNA, 17 bp, Artificial Sequence
  source: /note="Description of Artificial Sequence: Synthetic oligonucleotide"
  source: /note="Description of Combined DNA/RNA Molecule: Synthetic oligonucleotide"
  source: /note="DNA/RNA"
  modified_base (1)..(1): bicyclic nucleic acid (BNA)
  modified_base (2)..(2): bicyclic nucleic acid (BNA)
gtcgguaaguucugucc

SEQ ID NO: 8075 - DNA, 16 bp, Artificial Sequence
  source: /note="Description of Artificial Sequence: Synthetic oligonucleotide"
  source: /note="Description of Combined DNA/RNA Molecule: Synthetic oligonucleotide"
  source: /note="DNA/RNA"
  modified_base (1)..(1): bicyclic nucleic acid (BNA)
  modified_base (2)..(2): bicyclic nucleic acid (BNA)
gtcgguaaguucuguc

SEQ ID NO: 8076 - DNA, 15 bp, Artificial Sequence
  source: /note="Description of Artificial Sequence: Synthetic oligonucleotide"
  source: /note="Description of Combined DNA/RNA Molecule: Synthetic oligonucleotide"
  source: /note="DNA/RNA"
  modified_base (1)..(1): bicyclic nucleic acid (BNA)
  modified_base (2)..(2): bicyclic nucleic acid (BNA)
gtcgguaaguucugu

SEQ ID NO: 8077 - DNA, 14 bp, Artificial Sequence
  source: /note="Description of Artificial Sequence: Synthetic oligonucleotide"
  source: /note="Description of Combined DNA/RNA Molecule: Synthetic oligonucleotide"
  source: /note="DNA/RNA"
  modified_base (1)..(1): bicyclic nucleic acid (BNA)
  modified_base (2)..(2): bicyclic nucleic acid (BNA)
gtcgguaaguucug

SEQ ID NO: 8078 - DNA, 13 bp, Artificial Sequence
  source: /note="Description of Artificial Sequence: Synthetic oligonucleotide"
  source: /note="Description of Combined DNA/RNA Molecule: Synthetic oligonucleotide"
  source: /note="DNA/RNA"
  modified_base (1)..(1): bicyclic nucleic acid (BNA)
  modified_base (2)..(2): bicyclic nucleic acid (BNA)
gtcgguaaguucu

SEQ ID NO: 8079 - DNA, 12 bp, Artificial Sequence
  source: /note="Description of Artificial Sequence: Synthetic oligonucleotide"
  source: /note="Description of Combined DNA/RNA Molecule: Synthetic oligonucleotide"
  source: /note="DNA/RNA"
  modified_base (1)..(1): bicyclic nucleic acid (BNA)
  modified_base (2)..(2): bicyclic nucleic acid (BNA)
gtcgguaaguuc

SEQ ID NO: 8080 - DNA, 11 bp, Artificial Sequence
  source: /note="Description of Artificial Sequence: Synthetic oligonucleotide"
  source: /note="Description of Combined DNA/RNA Molecule: Synthetic oligonucleotide"
  source: /note="DNA/RNA"
  modified_base (1)..(1): bicyclic nucleic acid (BNA)
  modified_base (2)..(2): bicyclic nucleic acid (BNA)
gtcgguaaguu

SEQ ID NO: 8081 - DNA, 10 bp, Artificial Sequence
  source: /note="Description of Artificial Sequence: Synthetic oligonucleotide"
  source: /note="Description of Combined DNA/RNA Molecule: Synthetic oligonucleotide"
  source: /note="DNA/RNA"
  modified_base (1)..(1): bicyclic nucleic acid (BNA)
  modified_base (2)..(2): bicyclic nucleic acid (BNA)
gtcgguaagu

SEQ ID NO: 8082 - RNA, 20 nt, Artificial Sequence
  source: /note="Description of Artificial Sequence: Synthetic oligonucleotide"
  source: /note="RNA"
  modified_base (1)..(1): bicyclic nucleic acid (BNA)
  modified_base (2)..(2): bicyclic nucleic acid (BNA)
agucgguaaguucuguccaa

SEQ ID NO: 8083 - RNA, 19 nt, Artificial Sequence
  source: /note="Description of Artificial Sequence: Synthetic oligonucleotide"
  source: /note="RNA"
  modified_base (1)..(1): bicyclic nucleic acid (BNA)
  modified_base (2)..(2): bicyclic nucleic acid (BNA)
agucgguaaguucugucca

SEQ ID NO: 8084 - RNA, 17 nt, Artificial Sequence
  source: /note="Description of Artificial Sequence: Synthetic oligonucleotide"
  source: /note="RNA"
  modified_base (1)..(1): bicyclic nucleic acid (BNA)
  modified_base (2)..(2): bicyclic nucleic acid (BNA)
agucgguaaguucuguc

SEQ ID NO: 8085 - RNA, 16 nt, Artificial Sequence
  source: /note="Description of Artificial Sequence: Synthetic oligonucleotide"
  source: /note="RNA"
  modified_base (1)..(1): bicyclic nucleic acid (BNA)
  modified_base (2)..(2): bicyclic nucleic acid (BNA)
agucgguaaguucugu

SEQ ID NO: 8086 - RNA, 15 nt, Artificial Sequence
  source: /note="Description of Artificial Sequence: Synthetic oligonucleotide"
  source: /note="RNA"
  modified_base (1)..(1): bicyclic nucleic acid (BNA)
  modified_base (2)..(2): bicyclic nucleic acid (BNA)
agucgguaaguucug

SEQ ID NO: 8087 - RNA, 14 nt, Artificial Sequence
  source: /note="Description of Artificial Sequence: Synthetic oligonucleotide"
  source: /note="RNA"
  modified_base (1)..(1): bicyclic nucleic acid (BNA)
  modified_base (2)..(2): bicyclic nucleic acid (BNA)
agucgguaaguucu

SEQ ID NO: 8088 - RNA, 13 nt, Artificial Sequence
  source: /note="Description of Artificial Sequence: Synthetic oligonucleotide"
  source: /note="RNA"
  modified_base (1)..(1): bicyclic nucleic acid (BNA)
  modified_base (2)..(2): bicyclic nucleic acid (BNA)
agucgguaaguuc

SEQ ID NO: 8089 - RNA, 12 nt, Artificial Sequence
  source: /note="Description of Artificial Sequence: Synthetic oligonucleotide"
  source: /note="RNA"
  modified_base (1)..(1): bicyclic nucleic acid (BNA)
  modified_base (2)..(2): bicyclic nucleic acid (BNA)
agucgguaaguu

SEQ ID NO: 8090 - RNA, 11 nt, Artificial Sequence
  source: /note="Description of Artificial Sequence: Synthetic oligonucleotide"
  source: /note="RNA"
  modified_base (1)..(1): bicyclic nucleic acid (BNA)
  modified_base (2)..(2): bicyclic nucleic acid (BNA)
agucgguaagu

SEQ ID NO: 8091 - RNA, 20 nt, Artificial Sequence
  source: /note="Description of Artificial Sequence: Synthetic oligonucleotide"
  source: /note="RNA"
  modified_base (1)..(1): bicyclic nucleic acid (BNA)
  modified_base (2)..(2): bicyclic nucleic acid (BNA)
cagucgguaaguucugucca

SEQ ID NO: 8092 - RNA, 19 nt, Artificial Sequence
  source: /note="Description of Artificial Sequence: Synthetic oligonucleotide"
  source: /note="RNA"
  modified_base (1)..(1): bicyclic nucleic acid (BNA)
  modified_base (2)..(2): bicyclic nucleic acid (BNA)
cagucgguaaguucugucc

SEQ ID NO: 8093 - RNA, 18 nt, Artificial Sequence
  source: /note="Description of Artificial Sequence: Synthetic oligonucleotide"
  source: /note="RNA"
  modified_base (1)..(1): bicyclic nucleic acid (BNA)
  modified_base (2)..(2): bicyclic nucleic acid (BNA)
cagucgguaaguucuguc

SEQ ID NO: 8094 - RNA, 17 nt, Artificial Sequence
  source: /note="Description of Artificial Sequence: Synthetic oligonucleotide"
  source: /note="RNA"
  modified_base (1)..(1): bicyclic nucleic acid (BNA)
  modified_base (2)..(2): bicyclic nucleic acid (BNA)
cagucgguaaguucugu

SEQ ID NO: 8095 - RNA, 16 nt, Artificial Sequence
  source: /note="Description of Artificial Sequence: Synthetic oligonucleotide"
  source: /note="RNA"
  modified_base (1)..(1): bicyclic nucleic acid (BNA)
  modified_base (2)..(2): bicyclic nucleic acid (BNA)
cagucgguaaguucug

SEQ ID NO: 8096 - RNA, 15 nt, Artificial Sequence
  source: /note="Description of Artificial Sequence: Synthetic oligonucleotide"
  source: /note="RNA"
  modified_base (1)..(1): bicyclic nucleic acid (BNA)
  modified_base (2)..(2): bicyclic nucleic acid (BNA)
cagucgguaaguucu

SEQ ID NO: 8097 - RNA, 14 nt, Artificial Sequence
  source: /note="Description of Artificial Sequence: Synthetic oligonucleotide"
  source: /note="RNA"
  modified_base (1)..(1): bicyclic nucleic acid (BNA)
  modified_base (2)..(2): bicyclic nucleic acid (BNA)
cagucgguaaguuc

SEQ ID NO: 8098 - RNA, 13 nt, Artificial Sequence
  source: /note="Description of Artificial Sequence: Synthetic oligonucleotide"
  source: /note="RNA"
  modified_base (1)..(1): bicyclic nucleic acid (BNA)
  modified_base (2)..(2): bicyclic nucleic acid (BNA)
cagucgguaaguu

SEQ ID NO: 8099 - RNA, 12 nt, Artificial Sequence
  source: /note="Description of Artificial Sequence: Synthetic oligonucleotide"
  source: /note="RNA"
  modified_base (1)..(1): bicyclic nucleic acid (BNA)
  modified_base (2)..(2): bicyclic nucleic acid (BNA)
cagucgguaagu

SEQ ID NO: 8100 - RNA, 20 nt, Artificial Sequence
  source: /note="Description of Artificial Sequence: Synthetic oligonucleotide"
  source: /note="RNA"
  modified_base (1)..(1): bicyclic nucleic acid (BNA)
  modified_base (2)..(2): bicyclic nucleic acid (BNA)
ccagucgguaaguucugucc

SEQ ID NO: 8101 - RNA, 19 nt, Artificial Sequence
  source: /note="Description of Artificial Sequence: Synthetic oligonucleotide"
  source: /note="RNA"
  modified_base (1)..(1): bicyclic nucleic acid (BNA)
  modified_base (2)..(2): bicyclic nucleic acid (BNA)
ccagucgguaaguucuguc

SEQ ID NO: 8102 - RNA, 18 nt, Artificial Sequence
  source: /note="Description of Artificial Sequence: Synthetic oligonucleotide"
  source: /note="RNA"
  modified_base (1)..(1): bicyclic nucleic acid (BNA)
  modified_base (2)..(2): bicyclic nucleic acid (BNA)
ccagucgguaaguucugu

SEQ ID NO: 8103 - RNA, 17 nt, Artificial Sequence
  source: /note="Description of Artificial Sequence: Synthetic oligonucleotide"
  source: /note="RNA"
  modified_base (1)..(1): bicyclic nucleic acid (BNA)
  modified_base (2)..(2): bicyclic nucleic acid (BNA)
ccagucgguaaguucug

SEQ ID NO: 8104 - RNA, 16 nt, Artificial Sequence
  source: /note="Description of Artificial Sequence: Synthetic oligonucleotide"
  source: /note="RNA"
  modified_base (1)..(1): bicyclic nucleic acid (BNA)
  modified_base (2)..(2): bicyclic nucleic acid (BNA)
ccagucgguaaguucu

SEQ ID NO: 8105 - RNA, 15 nt, Artificial Sequence
  source: /note="Description of Artificial Sequence: Synthetic oligonucleotide"
  source: /note="RNA"
  modified_base (1)..(1): bicyclic nucleic acid (BNA)
  modified_base (2)..(2): bicyclic nucleic acid (BNA)
ccagucgguaaguuc

SEQ ID NO: 8106 - RNA, 14 nt, Artificial Sequence
  source: /note="Description of Artificial Sequence: Synthetic oligonucleotide"
  source: /note="RNA"
  modified_base (1)..(1): bicyclic nucleic acid (BNA)
  modified_base (2)..(2): bicyclic nucleic acid (BNA)
ccagucgguaaguu

SEQ ID NO: 8107 - RNA, 13 nt, Artificial Sequence
  source: /note="Description of Artificial Sequence: Synthetic oligonucleotide"
  source: /note="RNA"
  modified_base (1)..(1): bicyclic nucleic acid (BNA)
  modified_base (2)..(2): bicyclic nucleic acid (BNA)
ccagucgguaagu

SEQ ID NO: 8108 - RNA, 20 nt, Artificial Sequence
  source: /note="Description of Artificial Sequence: Synthetic oligonucleotide"
  source: /note="RNA"
  modified_base (1)..(1): bicyclic nucleic acid (BNA)
  modified_base (2)..(2): bicyclic nucleic acid (BNA)
gccagucgguaaguucuguc

SEQ ID NO: 8109 - RNA, 19 nt, Artificial Sequence
  source: /note="Description of Artificial Sequence: Synthetic oligonucleotide"
  source: /note="RNA"
  modified_base (1)..(1): bicyclic nucleic acid (BNA)
  modified_base (2)..(2): bicyclic nucleic acid (BNA)
gccagucgguaaguucugu

SEQ ID NO: 8110 - RNA, 18 nt, Artificial Sequence
  source: /note="Description of Artificial Sequence: Synthetic oligonucleotide"
  source: /note="RNA"
  modified_base (1)..(1): bicyclic nucleic acid (BNA)
  modified_base (2)..(2): bicyclic nucleic acid (BNA)
gccagucgguaaguucug

SEQ ID NO: 8111 - RNA, 17 nt, Artificial Sequence
  source: /note="Description of Artificial Sequence: Synthetic oligonucleotide"
  source: /note="RNA"
  modified_base (1)..(1): bicyclic nucleic acid (BNA)
  modified_base (2)..(2): bicyclic nucleic acid (BNA)
gccagucgguaaguucu

SEQ ID NO: 8112 - RNA, 16 nt, Artificial Sequence
  source: /note="Description of Artificial Sequence: Synthetic oligonucleotide"
  source: /note="RNA"
  modified_base (1)..(1): bicyclic nucleic acid (BNA)
  modified_base (2)..(2): bicyclic nucleic acid (BNA)
gccagucgguaaguuc

SEQ ID NO: 8113 - RNA, 15 nt, Artificial Sequence
  source: /note="Description of Artificial Sequence: Synthetic oligonucleotide"
  source: /note="RNA"
  modified_base (1)..(1): bicyclic nucleic acid (BNA)
  modified_base (2)..(2): bicyclic nucleic acid (BNA)
gccagucgguaaguu

SEQ ID NO: 8114 - RNA, 14 nt, Artificial Sequence
  source: /note="Description of Artificial Sequence: Synthetic oligonucleotide"
  source: /note="RNA"
  modified_base (1)..(1): bicyclic nucleic acid (BNA)
  modified_base (2)..(2): bicyclic nucleic acid (BNA)
gccagucgguaagu

SEQ ID NO: 8115 - DNA, 20 bp, Artificial Sequence
  source: /note="Description of Artificial Sequence: Synthetic oligonucleotide"
  source: /note="Description of Combined DNA/RNA Molecule: Synthetic oligonucleotide"
  source: /note="DNA/RNA"
  modified_base (1)..(1): bicyclic nucleic acid (BNA)
  modified_base (2)..(2): bicyclic nucleic acid (BNA)
tcaaggaagauggcauuucu

SEQ ID NO: 8116 - DNA, 22 bp, Artificial Sequence
  source: /note="Description of Artificial Sequence: Synthetic oligonucleotide"
  source: /note="Description of Combined DNA/RNA Molecule: Synthetic oligonucleotide"
  source: /note="DNA/RNA"
  modified_base (1)..(1): bicyclic nucleic acid (BNA)
  modified_base (2)..(2): bicyclic nucleic acid (BNA)
tcaaggaagauggcauuucuag

SEQ ID NO: 8117 - DNA, 16 bp, Artificial Sequence
  source: /note="Description of Artificial Sequence: Synthetic oligonucleotide"
  source: /note="Description of Combined DNA/RNA Molecule: Synthetic oligonucleotide"
  source: /note="DNA/RNA"
  modified_base (1)..(1): bicyclic nucleic acid (BNA)
  modified_base (2)..(2): bicyclic nucleic acid (BNA)
tcaaggaagauggcau

SEQ ID NO: 8118 - RNA, 15 nt, Artificial Sequence
  source: /note="Description of Artificial Sequence: Synthetic oligonucleotide"
  source: /note="RNA"
  modified_base (1)..(1): bicyclic nucleic acid (BNA)
  modified_base (2)..(2): bicyclic nucleic acid (BNA)
gaagauggcauuucu

SEQ ID NO: 8119 - DNA, 21 bp, Artificial Sequence
  source: /note="Description of Artificial Sequence: Synthetic oligonucleotide"
  source: /note="Description of Combined DNA/RNA Molecule: Synthetic oligonucleotide"
  source: /note="DNA/RNA"
  modified_base (1)..(1): bicyclic nucleic acid (BNA)
  modified_base (2)..(2): bicyclic nucleic acid (BNA)
tcaaggaagauggcauuucua

SEQ ID NO: 8120 - DNA, 19 bp, Artificial Sequence
  source: /note="Description of Artificial Sequence: Synthetic oligonucleotide"
  source: /note="Description of Combined DNA/RNA Molecule: Synthetic oligonucleotide"
  source: /note="DNA/RNA"
  modified_base (1)..(1): bicyclic nucleic acid (BNA)
  modified_base (2)..(2): bicyclic nucleic acid (BNA)
tcaaggaagauggcauuuc

SEQ ID NO: 8121 - DNA, 18 bp, Artificial Sequence
  source: /note="Description of Artificial Sequence: Synthetic oligonucleotide"
  source: /note="Description of Combined DNA/RNA Molecule: Synthetic oligonucleotide"
  source: /note="DNA/RNA"
  modified_base (1)..(1): bicyclic nucleic acid (BNA)
  modified_base (2)..(2): bicyclic nucleic acid (BNA)
tcaaggaagauggcauuu

SEQ ID NO: 8122 - DNA, 17 bp, Artificial Sequence
  source: /note="Description of Artificial Sequence: Synthetic oligonucleotide"
  source: /note="Description of Combined DNA/RNA Molecule: Synthetic oligonucleotide"
  source: /note="DNA/RNA"
  modified_base (1)..(1): bicyclic nucleic acid (BNA)
  modified_base (2)..(2): bicyclic nucleic acid (BNA)
tcaaggaagauggcauu

SEQ ID NO: 8123 - DNA, 15 bp, Artificial Sequence
  source: /note="Description of Artificial Sequence: Synthetic oligonucleotide"
  source: /note="Description of Combined DNA/RNA Molecule: Synthetic oligonucleotide"
  source: /note="DNA/RNA"
  modified_base (1)..(1): bicyclic nucleic acid (BNA)
  modified_base (2)..(2): bicyclic nucleic acid (BNA)
tcaaggaagauggca

SEQ ID NO: 8124 - DNA, 14 bp, Artificial Sequence
  source: /note="Description of Artificial Sequence: Synthetic oligonucleotide"
  source: /note="Description of Combined DNA/RNA Molecule: Synthetic oligonucleotide"
  source: /note="DNA/RNA"
  modified_base (1)..(1): bicyclic nucleic acid (BNA)
  modified_base (2)..(2): bicyclic nucleic acid (BNA)
tcaaggaagauggc

SEQ ID NO: 8125 - DNA, 13 bp, Artificial Sequence
  source: /note="Description of Artificial Sequence: Synthetic oligonucleotide"
  source: /note="Description of Combined DNA/RNA Molecule: Synthetic oligonucleotide"
  source: /note="DNA/RNA"
  modified_base (1)..(1): bicyclic nucleic acid (BNA)
  modified_base (2)..(2): bicyclic nucleic acid (BNA)
tcaaggaagaugg

SEQ ID NO: 8126 - DNA, 12 bp, Artificial Sequence
  source: /note="Description of Artificial Sequence: Synthetic oligonucleotide"
  source: /note="Description of Combined DNA/RNA Molecule: Synthetic oligonucleotide"
  source: /note="DNA/RNA"
  modified_base (1)..(1): bicyclic nucleic acid (BNA)
  modified_base (2)..(2): bicyclic nucleic acid (BNA)
tcaaggaagaug

SEQ ID NO: 8127 - DNA, 11 bp, Artificial Sequence
  source: /note="Description of Artificial Sequence: Synthetic oligonucleotide"
  source: /note="Description of Combined DNA/RNA Molecule: Synthetic oligonucleotide"
  source: /note="DNA/RNA"
  modified_base (1)..(1): bicyclic nucleic acid (BNA)
  modified_base (2)..(2): bicyclic nucleic acid (BNA)
tcaaggaagau

SEQ ID NO: 8128 - DNA, 10 bp, Artificial Sequence
  source: /note="Description of Artificial Sequence: Synthetic oligonucleotide"
  source: /note="DNA/RNA"
  modified_base (1)..(1): bicyclic nucleic acid (BNA)
  modified_base (2)..(2): bicyclic nucleic acid (BNA)
tcaaggaaga

SEQ ID NO: 8129 - DNA, 9 bp, Artificial Sequence
  source: /note="Description of Artificial Sequence: Synthetic oligonucleotide"
  source: /note="DNA/RNA"
  modified_base (1)..(1): bicyclic nucleic acid (BNA)
  modified_base (2)..(2): bicyclic nucleic acid (BNA)
tcaaggaag

SEQ ID NO: 8130 - RNA, 21 nt, Artificial Sequence
  source: /note="Description of Artificial Sequence: Synthetic oligonucleotide"
  source: /note="RNA"
  modified_base (1)..(1): bicyclic nucleic acid (BNA)
  modified_base (2)..(2): bicyclic nucleic acid (BNA)
caaggaagauggcauuucuag

SEQ ID NO: 8131 - RNA, 20 nt, Artificial Sequence
  source: /note="Description of Artificial Sequence: Synthetic oligonucleotide"
  source: /note="RNA"
  modified_base (1)..(1): bicyclic nucleic acid (BNA)
  modified_base (2)..(2): bicyclic nucleic acid (BNA)
caaggaagauggcauuucua

SEQ ID NO: 8132 - RNA, 19 nt, Artificial Sequence
  source: /note="Description of Artificial Sequence: Synthetic oligonucleotide"
  source: /note="RNA"
  modified_base (1)..(1): bicyclic nucleic acid (BNA)
  modified_base (2)..(2): bicyclic nucleic acid (BNA)
caaggaagauggcauuucu

SEQ ID NO: 8133 - RNA, 18 nt, Artificial Sequence
  source: /note="Description of Artificial Sequence: Synthetic oligonucleotide"
  source: /note="RNA"
  modified_base (1)..(1): bicyclic nucleic acid (BNA)
  modified_base (2)..(2): bicyclic nucleic acid (BNA)
caaggaagauggcauuuc

SEQ ID NO: 8134 - RNA, 17 nt, Artificial Sequence
  source: /note="Description of Artificial Sequence: Synthetic oligonucleotide"
  source: /note="RNA"
  modified_base (1)..(1): bicyclic nucleic acid (BNA)
  modified_base (2)..(2): bicyclic nucleic acid (BNA)
caaggaagauggcauuu

SEQ ID NO: 8135 - RNA, 16 nt, Artificial Sequence
  source: /note="Description of Artificial Sequence: Synthetic oligonucleotide"
  source: /note="RNA"
  modified_base (1)..(1): bicyclic nucleic acid (BNA)
  modified_base (2)..(2): bicyclic nucleic acid (BNA)
caaggaagauggcauu

SEQ ID NO: 8136 - RNA, 15 nt, Artificial Sequence
  source: /note="Description of Artificial Sequence: Synthetic oligonucleotide"
  source: /note="RNA"
  modified_base (1)..(1): bicyclic nucleic acid (BNA)
  modified_base (2)..(2): bicyclic nucleic acid (BNA)
caaggaagauggcau

SEQ ID NO: 8137 - RNA, 14 nt, Artificial Sequence
  source: /note="Description of Artificial Sequence: Synthetic oligonucleotide"
  source: /note="RNA"
  modified_base (1)..(1): bicyclic nucleic acid (BNA)
  modified_base (2)..(2): bicyclic nucleic acid (BNA)
caaggaagauggca

SEQ ID NO: 8138 - RNA, 13 nt, Artificial Sequence
  source: /note="Description of Artificial Sequence: Synthetic oligonucleotide"
  source: /note="RNA"
  modified_base (1)..(1): bicyclic nucleic acid (BNA)
  modified_base (2)..(2): bicyclic nucleic acid (BNA)
caaggaagauggc

SEQ ID NO: 8139 - RNA, 12 nt, Artificial Sequence
  source: /note="Description of Artificial Sequence: Synthetic oligonucleotide"
  source: /note="RNA"
  modified_base (1)..(1): bicyclic nucleic acid (BNA)
  modified_base (2)..(2): bicyclic nucleic acid (BNA)
caaggaagaugg

SEQ ID NO: 8140 - RNA, 11 nt, Artificial Sequence
  source: /note="Description of Artificial Sequence: Synthetic oligonucleotide"
  source: /note="RNA"
  modified_base (1)..(1): bicyclic nucleic acid (BNA)
  modified_base (2)..(2): bicyclic nucleic acid (BNA)
caaggaagaug

SEQ ID NO: 8141 - RNA, 10 nt, Artificial Sequence
  source: /note="Description of Artificial Sequence: Synthetic oligonucleotide"
  source: /note="RNA"
  modified_base (1)..(1): bicyclic nucleic acid (BNA)
  modified_base (2)..(2): bicyclic nucleic acid (BNA)
caaggaagau

SEQ ID NO: 8142 - RNA, 9 nt, Artificial Sequence
  source: /note="Description of Artificial Sequence: Synthetic oligonucleotide"
  source: /note="RNA/Antisense Oligonucleotide"
  modified_base (1)..(1): bicyclic nucleic acid (BNA)
  modified_base (2)..(2): bicyclic nucleic acid (BNA)
caaggaaga

SEQ ID NO: 8143 - RNA, 8 nt, Artificial Sequence
  source: /note="Description of Artificial Sequence: Synthetic oligonucleotide"
  source: /note="RNA/Antisense Oligonucleotide"
  modified_base (1)..(1): bicyclic nucleic acid (BNA)
  modified_base (2)..(2): bicyclic nucleic acid (BNA)
caaggaag

SEQ ID NO: 8144 - RNA, 20 nt, Artificial Sequence
  source: /note="Description of Artificial Sequence: Synthetic oligonucleotide"
  source: /note="RNA"
  modified_base (1)..(1): bicyclic nucleic acid (BNA)
  modified_base (2)..(2): bicyclic nucleic acid (BNA)
aaggaagauggcauuucuag

SEQ ID NO: 8145 - RNA, 19 nt, Artificial Sequence
  source: /note="Description of Artificial Sequence: Synthetic oligonucleotide"
  source: /note="RNA"
  modified_base (1)..(1): bicyclic nucleic acid (BNA)
  modified_base (2)..(2): bicyclic nucleic acid (BNA)
aaggaagauggcauuucua

SEQ ID NO: 8146 - RNA, 18 nt, Artificial Sequence
  source: /note="Description of Artificial Sequence: Synthetic oligonucleotide"
  source: /note="RNA"
  modified_base (1)..(1): bicyclic nucleic acid (BNA)
  modified_base (2)..(2): bicyclic nucleic acid (BNA)
aaggaagauggcauuucu

SEQ ID NO: 8147 - RNA, 17 nt, Artificial Sequence
  source: /note="Description of Artificial Sequence: Synthetic oligonucleotide"
  source: /note="RNA"
  modified_base (1)..(1): bicyclic nucleic acid (BNA)
  modified_base (2)..(2): bicyclic nucleic acid (BNA)
aaggaagauggcauuuc

SEQ ID NO: 8148 - RNA, 16 nt, Artificial Sequence
  source: /note="Description of Artificial Sequence: Synthetic oligonucleotide"
  source: /note="RNA"
  modified_base (1)..(1): bicyclic nucleic acid (BNA)
  modified_base (2)..(2): bicyclic nucleic acid (BNA)
aaggaagauggcauuu

SEQ ID NO: 8149 - RNA, 15 nt, Artificial Sequence
  source: /note="Description of Artificial Sequence: Synthetic oligonucleotide"
  source: /note="RNA"
  modified_base (1)..(1): bicyclic nucleic acid (BNA)
  modified_base (2)..(2): bicyclic nucleic acid (BNA)
aaggaagauggcauu

SEQ ID NO: 8150 - RNA, 14 nt, Artificial Sequence
  source: /note="Description of Artificial Sequence: Synthetic oligonucleotide"
  source: /note="RNA"
  modified_base (1)..(1): bicyclic nucleic acid (BNA)
  modified_base (2)..(2): bicyclic nucleic acid (BNA)
aaggaagauggcau

SEQ ID NO: 8151 - RNA, 13 nt, Artificial Sequence
  source: /note="Description of Artificial Sequence: Synthetic oligonucleotide"
  source: /note="RNA"
  modified_base (1)..(1): bicyclic nucleic acid (BNA)
  modified_base (2)..(2): bicyclic nucleic acid (BNA)
aaggaagauggca

SEQ ID NO: 8152 - RNA, 12 nt, Artificial Sequence
  source: /note="Description of Artificial Sequence: Synthetic oligonucleotide"
  source: /note="RNA"
  modified_base (1)..(1): bicyclic nucleic acid (BNA)
  modified_base (2)..(2): bicyclic nucleic acid (BNA)
aaggaagauggc

SEQ ID NO: 8153 - RNA, 11 nt, Artificial Sequence
  source: /note="Description of Artificial Sequence: Synthetic oligonucleotide"
  source: /note="RNA"
  modified_base (1)..(1): bicyclic nucleic acid (BNA)
  modified_base (2)..(2): bicyclic nucleic acid (BNA)
aaggaagaugg

SEQ ID NO: 8154 - RNA, 10 nt, Artificial Sequence
  source: /note="Description of Artificial Sequence: Synthetic oligonucleotide"
  source: /note="RNA"
  modified_base (1)..(1): bicyclic nucleic acid (BNA)
  modified_base (2)..(2): bicyclic nucleic acid (BNA)
aaggaagaug

SEQ ID NO: 8155 - RNA, 9 nt, Artificial Sequence
  source: /note="Description of Artificial Sequence: Synthetic oligonucleotide"
  source: /note="RNA"
  modified_base (1)..(1): bicyclic nucleic acid (BNA)
  modified_base (2)..(2): bicyclic nucleic acid (BNA)
aaggaagau

SEQ ID NO: 8156 - RNA, 8 nt, Artificial Sequence
  source: /note="Description of Artificial Sequence: Synthetic oligonucleotide"
  source: /note="RNA/Antisense Oligonucleotide"
  modified_base (1)..(1): bicyclic nucleic acid (BNA)
  modified_base (2)..(2): bicyclic nucleic acid (BNA)
aaggaaga

SEQ ID NO: 8157 - RNA, 19 nt, Artificial Sequence
  source: /note="Description of Artificial Sequence: Synthetic oligonucleotide"
  source: /note="RNA"
  modified_base (1)..(1): bicyclic nucleic acid (BNA)
  modified_base (2)..(2): bicyclic nucleic acid (BNA)
aggaagauggcauuucuag

SEQ ID NO: 8158 - RNA, 18 nt, Artificial Sequence
  source: /note="Description of Artificial Sequence: Synthetic oligonucleotide"
  source: /note="RNA"
  modified_base (1)..(1): bicyclic nucleic acid (BNA)
  modified_base (2)..(2): bicyclic nucleic acid (BNA)
aggaagauggcauuucua

SEQ ID NO: 8159 - RNA, 17 nt, Artificial Sequence
  source: /note="Description of Artificial Sequence: Synthetic oligonucleotide"
  source: /note="RNA"
  modified_base (1)..(1): bicyclic nucleic acid (BNA)
  modified_base (2)..(2): bicyclic nucleic acid (BNA)
aggaagauggcauuucu

SEQ ID NO: 8160 - RNA, 16 nt, Artificial Sequence
  source: /note="Description of Artificial Sequence: Synthetic oligonucleotide"
  source: /note="RNA"
  modified_base (1)..(1): bicyclic nucleic acid (BNA)
  modified_base (2)..(2): bicyclic nucleic acid (BNA)
aggaagauggcauuuc

SEQ ID NO: 8161 - RNA, 15 nt, Artificial Sequence
  source: /note="Description of Artificial Sequence: Synthetic oligonucleotide"
  source: /note="RNA"
  modified_base (1)..(1): bicyclic nucleic acid (BNA)
  modified_base (2)..(2): bicyclic nucleic acid (BNA)
aggaagauggcauuu

SEQ ID NO: 8162 - RNA, 14 nt, Artificial Sequence
  source: /note="Description of Artificial Sequence: Synthetic oligonucleotide"
  source: /note="RNA"
  modified_base (1)..(1): bicyclic nucleic acid (BNA)
  modified_base (2)..(2): bicyclic nucleic acid (BNA)
aggaagauggcauu

SEQ ID NO: 8163 - RNA, 13 nt, Artificial Sequence
  source: /note="Description of Artificial Sequence: Synthetic oligonucleotide"
  source: /note="RNA"
  modified_base (1)..(1): bicyclic nucleic acid (BNA)
  modified_base (2)..(2): bicyclic nucleic acid (BNA)
aggaagauggcau

SEQ ID NO: 8164 - RNA, 12 nt, Artificial Sequence
  source: /note="Description of Artificial Sequence: Synthetic oligonucleotide"
  source: /note="RNA"
  modified_base (1)..(1): bicyclic nucleic acid (BNA)
  modified_base (2)..(2): bicyclic nucleic acid (BNA)
aggaagauggca

SEQ ID NO: 8165 - RNA, 10 nt, Artificial Sequence
  source: /note="Description of Artificial Sequence: Synthetic oligonucleotide"
  source: /note="RNA"
  modified_base (1)..(1): bicyclic nucleic acid (BNA)
  modified_base (2)..(2): bicyclic nucleic acid (BNA)
aggaagaugg

SEQ ID NO: 8166 - RNA, 9 nt, Artificial Sequence
  source: /note="Description of Artificial Sequence: Synthetic oligonucleotide"
  source: /note="RNA"
  modified_base (1)..(1): bicyclic nucleic acid (BNA)
  modified_base (2)..(2): bicyclic nucleic acid (BNA)
aggaagaug

SEQ ID NO: 8167 - RNA, 8 nt, Artificial Sequence
  source: /note="Description of Artificial Sequence: Synthetic oligonucleotide"
  source: /note="RNA"
  modified_base (1)..(1): bicyclic nucleic acid (BNA)
  modified_base (2)..(2): bicyclic nucleic acid (BNA)
aggaagau

SEQ ID NO: 8168 - RNA, 18 nt, Artificial Sequence
  source: /note="Description of Artificial Sequence: Synthetic oligonucleotide"
  source: /note="RNA"
  modified_base (1)..(1): bicyclic nucleic acid (BNA)
  modified_base (2)..(2): bicyclic nucleic acid (BNA)
ggaagauggcauuucuag

SEQ ID NO: 8169 - RNA, 17 nt, Artificial Sequence
  source: /note="Description of Artificial Sequence: Synthetic oligonucleotide"
  source: /note="RNA"
  modified_base (1)..(1): bicyclic nucleic acid (BNA)
  modified_base (2)..(2): bicyclic nucleic acid (BNA)
ggaagauggcauuucua

SEQ ID NO: 8170 - RNA, 16 nt, Artificial Sequence
  source: /note="Description of Artificial Sequence: Synthetic oligonucleotide"
  source: /note="RNA"
  modified_base (1)..(1): bicyclic nucleic acid (BNA)
  modified_base (2)..(2): bicyclic nucleic acid (BNA)
ggaagauggcauuucu

SEQ ID NO: 8171 - RNA, 15 nt, Artificial Sequence
  source: /note="Description of Artificial Sequence: Synthetic oligonucleotide"
  source: /note="RNA"
  modified_base (1)..(1): bicyclic nucleic acid (BNA)
  modified_base (2)..(2): bicyclic nucleic acid (BNA)
ggaagauggcauuuc

SEQ ID NO: 8172 - RNA, 14 nt, Artificial Sequence
  source: /note="Description of Artificial Sequence: Synthetic oligonucleotide"
  source: /note="RNA"
  modified_base (1)..(1): bicyclic nucleic acid (BNA)
  modified_base (2)..(2): bicyclic nucleic acid (BNA)
ggaagauggcauuu

SEQ ID NO: 8173 - RNA, 13 nt, Artificial Sequence
  source: /note="Description of Artificial Sequence: Synthetic oligonucleotide"
  source: /note="RNA"
  modified_base (1)..(1): bicyclic nucleic acid (BNA)
  modified_base (2)..(2): bicyclic nucleic acid (BNA)
ggaagauggcauu

SEQ ID NO: 8174 - RNA, 12 nt, Artificial Sequence
  source: /note="Description of Artificial Sequence: Synthetic oligonucleotide"
  source: /note="RNA"
  modified_base (1)..(1): bicyclic nucleic acid (BNA)
  modified_base (2)..(2): bicyclic nucleic acid (BNA)
ggaagauggcau

SEQ ID NO: 8175 - RNA, 11 nt, Artificial Sequence
  source: /note="Description of Artificial Sequence: Synthetic oligonucleotide"
  source: /note="RNA"
  modified_base (1)..(1): bicyclic nucleic acid (BNA)
  modified_base (2)..(2): bicyclic nucleic acid (BNA)
ggaagauggca

SEQ ID NO: 8176 - RNA, 10 nt, Artificial Sequence
  source: /note="Description of Artificial Sequence: Synthetic oligonucleotide"
  source: /note="RNA"
  modified_base (1)..(1): bicyclic nucleic acid (BNA)
  modified_base (2)..(2): bicyclic nucleic acid (BNA)
ggaagauggc

SEQ ID NO: 8177 - RNA, 8 nt, Artificial Sequence
  source: /note="Description of Artificial Sequence: Synthetic oligonucleotide"
  source: /note="RNA"
  modified_base (1)..(1): bicyclic nucleic acid (BNA)
  modified_base (2)..(2): bicyclic nucleic acid (BNA)
ggaagaug

SEQ ID NO: 8178 - RNA, 17 nt, Artificial Sequence
  source: /note="Description of Artificial Sequence: Synthetic oligonucleotide"
  source: /note="RNA"
  modified_base (1)..(1): bicyclic nucleic acid (BNA)
  modified_base (2)..(2): bicyclic nucleic acid (BNA)
gaagauggcauuucuag

SEQ ID NO: 8179 - RNA, 16 nt, Artificial Sequence
  source: /note="Description of Artificial Sequence: Synthetic oligonucleotide"
  source: /note="RNA"
  modified_base (1)..(1): bicyclic nucleic acid (BNA)
  modified_base (2)..(2): bicyclic nucleic acid (BNA)
gaagauggcauuucua

SEQ ID NO: 8180 - RNA, 14 nt, Artificial Sequence
  source: /note="Description of Artificial Sequence: Synthetic oligonucleotide"
  source: /note="RNA"
  modified_base (1)..(1): bicyclic nucleic acid (BNA)
  modified_base (2)..(2): bicyclic nucleic acid (BNA)
gaagauggcauuuc

SEQ ID NO: 8181 - RNA, 13 nt, Artificial Sequence
  source: /note="Description of Artificial Sequence: Synthetic oligonucleotide"
  source: /note="RNA"
  modified_base (1)..(1): bicyclic nucleic acid (BNA)
  modified_base (2)..(2): bicyclic nucleic acid (BNA)
gaagauggcauuu

SEQ ID NO: 8182 - RNA, 12 nt, Artificial Sequence
  source: /note="Description of Artificial Sequence: Synthetic oligonucleotide"
  source: /note="RNA"
  modified_base (1)..(1): bicyclic nucleic acid (BNA)
  modified_base (2)..(2): bicyclic nucleic acid (BNA)
gaagauggcauu

SEQ ID NO: 8183 - RNA, 11 nt, Artificial Sequence
  source: /note="Description of Artificial Sequence: Synthetic oligonucleotide"
  source: /note="RNA"
  modified_base (1)..(1): bicyclic nucleic acid (BNA)
  modified_base (2)..(2): bicyclic nucleic acid (BNA)
gaagauggcau

SEQ ID NO: 8184 - RNA, 10 nt, Artificial Sequence
  source: /note="Description of Artificial Sequence: Synthetic oligonucleotide"
  source: /note="RNA"
  modified_base (1)..(1): bicyclic nucleic acid (BNA)
  modified_base (2)..(2): bicyclic nucleic acid (BNA)
gaagauggca

SEQ ID NO: 8185 - RNA, 9 nt, Artificial Sequence
  source: /note="Description of Artificial Sequence: Synthetic oligonucleotide"
  source: /note="RNA"
  modified_base (1)..(1): bicyclic nucleic acid (BNA)
  modified_base (2)..(2): bicyclic nucleic acid (BNA)
gaagauggc

SEQ ID NO: 8186 - RNA, 8 nt, Artificial Sequence
  source: /note="Description of Artificial Sequence: Synthetic oligonucleotide"
  source: /note="RNA"
  modified_base (1)..(1): bicyclic nucleic acid (BNA)
  modified_base (2)..(2): bicyclic nucleic acid (BNA)
gaagaugg

SEQ ID NO: 8187 - RNA, 16 nt, Artificial Sequence
  source: /note="Description of Artificial Sequence: Synthetic oligonucleotide"
  source: /note="RNA"
  modified_base (1)..(1): bicyclic nucleic acid (BNA)
  modified_base (2)..(2): bicyclic nucleic acid (BNA)
aagauggcauuucuag

SEQ ID NO: 8188 - RNA, 15 nt, Artificial Sequence
  source: /note="Description of Artificial Sequence: Synthetic oligonucleotide"
  source: /note="RNA"
  modified_base (1)..(1): bicyclic nucleic acid (BNA)
  modified_base (2)..(2): bicyclic nucleic acid (BNA)
aagauggcauuucua

SEQ ID NO: 8189 - RNA, 14 nt, Artificial Sequence
  source: /note="Description of Artificial Sequence: Synthetic oligonucleotide"
  source: /note="RNA"
  modified_base (1)..(1): bicyclic nucleic acid (BNA)
  modified_base (2)..(2): bicyclic nucleic acid (BNA)
aagauggcauuucu

SEQ ID NO: 8190 - RNA, 13 nt, Artificial Sequence
  source: /note="Description of Artificial Sequence: Synthetic oligonucleotide"
  source: /note="RNA"
  modified_base (1)..(1): bicyclic nucleic acid (BNA)
  modified_base (2)..(2): bicyclic nucleic acid (BNA)
aagauggcauuuc

SEQ ID NO: 8191 - RNA, 12 nt, Artificial Sequence
  source: /note="Description of Artificial Sequence: Synthetic oligonucleotide"
  source: /note="RNA"
  modified_base (1)..(1): bicyclic nucleic acid (BNA)
  modified_base (2)..(2): bicyclic nucleic acid (BNA)
aagauggcauuu

SEQ ID NO: 8192 - RNA, 11 nt, Artificial Sequence
  source: /note="Description of Artificial Sequence: Synthetic oligonucleotide"
  source: /note="RNA"
  modified_base (1)..(1): bicyclic nucleic acid (BNA)
  modified_base (2)..(2): bicyclic nucleic acid (BNA)
aagauggcauu

SEQ ID NO: 8193 - RNA, 10 nt, Artificial Sequence
  source: /note="Description of Artificial Sequence: Synthetic oligonucleotide"
  source: /note="RNA"
  modified_base (1)..(1): bicyclic nucleic acid (BNA)
  modified_base (2)..(2): bicyclic nucleic acid (BNA)
aagauggcau

SEQ ID NO: 8194 - RNA, 9 nt, Artificial Sequence
  source: /note="Description of Artificial Sequence: Synthetic oligonucleotide"
  source: /note="RNA"
  modified_base (1)..(1): bicyclic nucleic acid (BNA)
  modified_base (2)..(2): bicyclic nucleic acid (BNA)
aagauggca

SEQ ID NO: 8195 - RNA, 8 nt, Artificial Sequence
  source: /note="Description of Artificial Sequence: Synthetic oligonucleotide"
  source: /note="RNA"
  modified_base (1)..(1): bicyclic nucleic acid (BNA)
  modified_base (2)..(2): bicyclic nucleic acid (BNA)
aagauggc

SEQ ID NO: 8196 - RNA, 15 nt, Artificial Sequence
  source: /note="Description of Artificial Sequence: Synthetic oligonucleotide"
  source: /note="RNA"
  modified_base (1)..(1): bicyclic nucleic acid (BNA)
  modified_base (2)..(2): bicyclic nucleic acid (BNA)
agauggcauuucuag

SEQ ID NO: 8197 - RNA, 14 nt, Artificial Sequence
  source: /note="Description of Artificial Sequence: Synthetic oligonucleotide"
  source: /note="RNA"
  modified_base (1)..(1): bicyclic nucleic acid (BNA)
  modified_base (2)..(2): bicyclic nucleic acid (BNA)
agauggcauuucua

SEQ ID NO: 8198 - RNA, 13 nt, Artificial Sequence
  source: /note="Description of Artificial Sequence: Synthetic oligonucleotide"
  source: /note="RNA"
  modified_base (1)..(1): bicyclic nucleic acid (BNA)
  modified_base (2)..(2): bicyclic nucleic acid (BNA)
agauggcauuucu

SEQ ID NO: 8199 - RNA, 12 nt, Artificial Sequence
  source: /note="Description of Artificial Sequence: Synthetic oligonucleotide"
  source: /note="RNA"
  modified_base (1)..(1): bicyclic nucleic acid (BNA)
  modified_base (2)..(2): bicyclic nucleic acid (BNA)
agauggcauuuc

SEQ ID NO: 8200 - RNA, 11 nt, Artificial Sequence
  source: /note="Description of Artificial Sequence: Synthetic oligonucleotide"
  source: /note="RNA"
  modified_base (1)..(1): bicyclic nucleic acid (BNA)
  modified_base (2)..(2): bicyclic nucleic acid (BNA)
agauggcauuu

SEQ ID NO: 8201 - RNA, 10 nt, Artificial Sequence
  source: /note="Description of Artificial Sequence: Synthetic oligonucleotide"
  source: /note="RNA"
  modified_base (1)..(1): bicyclic nucleic acid (BNA)
  modified_base (2)..(2): bicyclic nucleic acid (BNA)
agauggcauu

SEQ ID NO: 8202 - RNA, 9 nt, Artificial Sequence
  source: /note="Description of Artificial Sequence: Synthetic oligonucleotide"
  source: /note="RNA"
  modified_base (1)..(1): bicyclic nucleic acid (BNA)
  modified_base (2)..(2): bicyclic nucleic acid (BNA)
agauggcau

SEQ ID NO: 8203 - RNA, 8 nt, Artificial Sequence
  source: /note="Description of Artificial Sequence: Synthetic oligonucleotide"
  source: /note="RNA"
  modified_base (1)..(1): bicyclic nucleic acid (BNA)
  modified_base (2)..(2): bicyclic nucleic acid (BNA)
agauggca

SEQ ID NO: 8204 - DNA, 30 bp, Artificial Sequence
  source: /note="Description of Artificial Sequence: Synthetic oligonucleotide"
  source: /note="Description of Combined DNA/RNA Molecule: Synthetic oligonucleotide"
  source: /note="DNA/RNA"
  modified_base (1)..(1): bicyclic nucleic acid (BNA)
  modified_base (2)..(2): bicyclic nucleic acid (BNA)
ctccaacaucaaggaagauggcauuucuag

SEQ ID NO: 8205 - DNA, 29 bp, Artificial Sequence
  source: /note="Description of Artificial Sequence: Synthetic oligonucleotide"
  source: /note="Description of Combined DNA/RNA Molecule: Synthetic oligonucleotide"
  source: /note="DNA/RNA"
  modified_base (1)..(1): bicyclic nucleic acid (BNA)
  modified_base (2)..(2): bicyclic nucleic acid (BNA)
ctccaacaucaaggaagauggcauuucua

SEQ ID NO: 8206 - DNA, 28 bp, Artificial Sequence
  source: /note="Description of Artificial Sequence: Synthetic oligonucleotide"
  source: /note="Description of Combined DNA/RNA Molecule: Synthetic oligonucleotide"
  source: /note="DNA/RNA"
  modified_base (1)..(1): bicyclic nucleic acid (BNA)
  modified_base (2)..(2): bicyclic nucleic acid (BNA)
ctccaacaucaaggaagauggcauuucu

SEQ ID NO: 8207 - DNA, 27 bp, Artificial Sequence
  source: /note="Description of Artificial Sequence: Synthetic oligonucleotide"
  source: /note="Description of Combined DNA/RNA Molecule: Synthetic oligonucleotide"
  source: /note="DNA/RNA"
  modified_base (1)..(1): bicyclic nucleic acid (BNA)
  modified_base (2)..(2): bicyclic nucleic acid (BNA)
ctccaacaucaaggaagauggcauuuc

SEQ ID NO: 8208 - DNA, 26 bp, Artificial Sequence
  source: /note="Description of Artificial Sequence: Synthetic oligonucleotide"
  source: /note="Description of Combined DNA/RNA Molecule: Synthetic oligonucleotide"
  source: /note="DNA/RNA"
  modified_base (1)..(1): bicyclic nucleic acid (BNA)
  modified_base (2)..(2): bicyclic nucleic acid (BNA)
ctccaacaucaaggaagauggcauuu

SEQ ID NO: 8209 - DNA, 25 bp, Artificial Sequence
  source: /note="Description of Artificial Sequence: Synthetic oligonucleotide"
  source: /note="Description of Combined DNA/RNA Molecule: Synthetic oligonucleotide"
  source: /note="DNA/RNA"
  modified_base (1)..(1): bicyclic nucleic acid (BNA)
  modified_base (2)..(2): bicyclic nucleic acid (BNA)
ctccaacaucaaggaagauggcauu

SEQ ID NO: 8210 - DNA, 24 bp, Artificial Sequence
  source: /note="Description of Artificial Sequence: Synthetic oligonucleotide"
  source: /note="Description of Combined DNA/RNA Molecule: Synthetic oligonucleotide"
  source: /note="DNA/RNA"
  modified_base (1)..(1): bicyclic nucleic acid (BNA)
  modified_base (2)..(2): bicyclic nucleic acid (BNA)
ctccaacaucaaggaagauggcau

SEQ ID NO: 8211 - DNA, 23 bp, Artificial Sequence
  source: /note="Description of Artificial Sequence: Synthetic oligonucleotide"
  source: /note="Description of Combined DNA/RNA Molecule: Synthetic oligonucleotide"
  source: /note="DNA/RNA"
  modified_base (1)..(1): bicyclic nucleic acid (BNA)
  modified_base (2)..(2): bicyclic nucleic acid (BNA)
ctccaacaucaaggaagauggca

SEQ ID NO: 8212 - DNA, 22 bp, Artificial Sequence
  source: /note="Description of Artificial Sequence: Synthetic oligonucleotide"
  source: /note="Description of Combined DNA/RNA Molecule: Synthetic oligonucleotide"
  source: /note="DNA/RNA"
  modified_base (1)..(1): bicyclic nucleic acid (BNA)
  modified_base (2)..(2): bicyclic nucleic acid (BNA)
ctccaacaucaaggaagauggc

SEQ ID NO: 8213 - DNA, 21 bp, Artificial Sequence
  source: /note="Description of Artificial Sequence: Synthetic oligonucleotide"
  source: /note="Description of Combined DNA/RNA Molecule: Synthetic oligonucleotide"
  source: /note="DNA/RNA"
  modified_base (1)..(1): bicyclic nucleic acid (BNA)
  modified_base (2)..(2): bicyclic nucleic acid (BNA)
ctccaacaucaaggaagaugg

SEQ ID NO: 8214 - DNA, 20 bp, Artificial Sequence
  source: /note="Description of Artificial Sequence: Synthetic oligonucleotide"
  source: /note="Description of Combined DNA/RNA Molecule: Synthetic oligonucleotide"
  source: /note="DNA/RNA"
  modified_base (1)..(1): bicyclic nucleic acid (BNA)
  modified_base (2)..(2): bicyclic nucleic acid (BNA)
ctccaacaucaaggaagaug

SEQ ID NO: 8215 - DNA, 19 bp, Artificial Sequence
  source: /note="Description of Artificial Sequence: Synthetic oligonucleotide"
  source: /note="Description of Combined DNA/RNA Molecule: Synthetic oligonucleotide"
  source: /note="DNA/RNA"
  modified_base (1)..(1): bicyclic nucleic acid (BNA)
  modified_base (2)..(2): bicyclic nucleic acid (BNA)
ctccaacaucaaggaagau

SEQ ID NO: 8216 - DNA, 18 bp, Artificial Sequence
  source: /note="Description of Artificial Sequence: Synthetic oligonucleotide"
  source: /note="Description of Combined DNA/RNA Molecule: Synthetic oligonucleotide"
  source: /note="DNA/RNA"
  modified_base (1)..(1): bicyclic nucleic acid (BNA)
  modified_base (2)..(2): bicyclic nucleic acid (BNA)
ctccaacaucaaggaaga

SEQ ID NO: 8217 - DNA, 17 bp, Artificial Sequence
  source: /note="Description of Artificial Sequence: Synthetic oligonucleotide"
  source: /note="Description of Combined DNA/RNA Molecule: Synthetic oligonucleotide"
  source: /note="DNA/RNA"
  modified_base (1)..(1): bicyclic nucleic acid (BNA)
  modified_base (2)..(2): bicyclic nucleic acid (BNA)
ctccaacaucaaggaag

SEQ ID NO: 8218 - DNA, 29 bp, Artificial Sequence
  source: /note="Description of Artificial Sequence: Synthetic oligonucleotide"
  source: /note="Description of Combined DNA/RNA Molecule: Synthetic oligonucleotide"
  source: /note="DNA/RNA"
  modified_base (1)..(1): bicyclic nucleic acid (BNA)
  modified_base (2)..(2): bicyclic nucleic acid (BNA)
tccaacaucaaggaagauggcauuucuag

SEQ ID NO: 8219 - DNA, 28 bp, Artificial Sequence
  source: /note="Description of Artificial Sequence: Synthetic oligonucleotide"
  source: /note="Description of Combined DNA/RNA Molecule: Synthetic oligonucleotide"
  source: /note="DNA/RNA"
  modified_base (1)..(1): bicyclic nucleic acid (BNA)
  modified_base (2)..(2): bicyclic nucleic acid (BNA)
tccaacaucaaggaagauggcauuucua

SEQ ID NO: 8220 - DNA, 27 bp, Artificial Sequence
  source: /note="Description of Artificial Sequence: Synthetic oligonucleotide"
  source: /note="Description of Combined DNA/RNA Molecule: Synthetic oligonucleotide"
  source: /note="DNA/RNA"
  modified_base (1)..(1): bicyclic nucleic acid (BNA)
  modified_base (2)..(2): bicyclic nucleic acid (BNA)
tccaacaucaaggaagauggcauuucu

SEQ ID NO: 8221 - DNA, 26 bp, Artificial Sequence
  source: /note="Description of Artificial Sequence: Synthetic oligonucleotide"
  source: /note="Description of Combined DNA/RNA Molecule: Synthetic oligonucleotide"
  source: /note="DNA/RNA"
  modified_base (1)..(1): bicyclic nucleic acid (BNA)
  modified_base (2)..(2): bicyclic nucleic acid (BNA)
tccaacaucaaggaagauggcauuuc

SEQ ID NO: 8222 - DNA, 25 bp, Artificial Sequence
  source: /note="Description of Artificial Sequence: Synthetic oligonucleotide"
  source: /note="Description of Combined DNA/RNA Molecule: Synthetic oligonucleotide"
  source: /note="DNA/RNA"
  modified_base (1)..(1): bicyclic nucleic acid (BNA)
  modified_base (2)..(2): bicyclic nucleic acid (BNA)
tccaacaucaaggaagauggcauuu

SEQ ID NO: 8223 - DNA, 24 bp, Artificial Sequence
  source: /note="Description of Artificial Sequence: Synthetic oligonucleotide"
  source: /note="Description of Combined DNA/RNA Molecule: Synthetic oligonucleotide"
  source: /note="DNA/RNA"
  modified_base (1)..(1): bicyclic nucleic acid (BNA)
  modified_base (2)..(2): bicyclic nucleic acid (BNA)
tccaacaucaaggaagauggcauu

SEQ ID NO: 8224 - DNA, 23 bp, Artificial Sequence
  source: /note="Description of Artificial Sequence: Synthetic oligonucleotide"
  source: /note="Description of Combined DNA/RNA Molecule: Synthetic oligonucleotide"
  source: /note="DNA/RNA"
  modified_base (1)..(1): bicyclic nucleic acid (BNA)
  modified_base (2)..(2): bicyclic nucleic acid (BNA)
tccaacaucaaggaagauggcau

SEQ ID NO: 8225 - DNA, 22 bp, Artificial Sequence
  source: /note="Description of Artificial Sequence: Synthetic oligonucleotide"
  source: /note="Description of Combined DNA/RNA Molecule: Synthetic oligonucleotide"
  source: /note="DNA/RNA"
  modified_base (1)..(1): bicyclic nucleic acid (BNA)
  modified_base (2)..(2): bicyclic nucleic acid (BNA)
tccaacaucaaggaagauggca

SEQ ID NO: 8226 - DNA, 21 bp, Artificial Sequence
  source: /note="Description of Artificial Sequence: Synthetic oligonucleotide"
  source: /note="Description of Combined DNA/RNA Molecule: Synthetic oligonucleotide"
  source: /note="DNA/RNA"
  modified_base (1)..(1): bicyclic nucleic acid (BNA)
  modified_base (2)..(2): bicyclic nucleic acid (BNA)
tccaacaucaaggaagauggc

SEQ ID NO: 8227 - DNA, 20 bp, Artificial Sequence
  source: /note="Description of Artificial Sequence: Synthetic oligonucleotide"
  source: /note="Description of Combined DNA/RNA Molecule: Synthetic oligonucleotide"
  source: /note="DNA/RNA"
  modified_base (1)..(1): bicyclic nucleic acid (BNA)
  modified_base (2)..(2): bicyclic nucleic acid (BNA)
tccaacaucaaggaagaugg

SEQ ID NO: 8228 - DNA, 19 bp, Artificial Sequence
  source: /note="Description of Artificial Sequence: Synthetic oligonucleotide"
  source: /note="Description of Combined DNA/RNA Molecule: Synthetic oligonucleotide"
  source: /note="DNA/RNA"
  modified_base (1)..(1): bicyclic nucleic acid (BNA)
  modified_base (2)..(2): bicyclic nucleic acid (BNA)
tccaacaucaaggaagaug

SEQ ID NO: 8229 - DNA, 18 bp, Artificial Sequence
  source: /note="Description of Artificial Sequence: Synthetic oligonucleotide"
  source: /note="Description of Combined DNA/RNA Molecule: Synthetic oligonucleotide"
  source: /note="DNA/RNA"
  modified_base (1)..(1): bicyclic nucleic acid (BNA)
  modified_base (2)..(2): bicyclic nucleic acid (BNA)
tccaacaucaaggaagau

SEQ ID NO: 8230 - DNA, 17 bp, Artificial Sequence
  source: /note="Description of Artificial Sequence: Synthetic oligonucleotide"
  source: /note="Description of Combined DNA/RNA Molecule: Synthetic oligonucleotide"
  source: /note="DNA/RNA"
  modified_base (1)..(1): bicyclic nucleic acid (BNA)
  modified_base (2)..(2): bicyclic nucleic acid (BNA)
tccaacaucaaggaaga

SEQ ID NO: 8231 - DNA, 16 bp, Artificial Sequence
  source: /note="Description of Artificial Sequence: Synthetic oligonucleotide"
  source: /note="Description of Combined DNA/RNA Molecule: Synthetic oligonucleotide"
  source: /note="DNA/RNA"
  modified_base (1)..(1): bicyclic nucleic acid (BNA)
  modified_base (2)..(2): bicyclic nucleic acid (BNA)
tccaacaucaaggaag

SEQ ID NO: 8232 - RNA, 28 nt, Artificial Sequence
  source: /note="Description of Artificial Sequence: Synthetic oligonucleotide"
  source: /note="RNA"
  modified_base (1)..(1): bicyclic nucleic acid (BNA)
  modified_base (2)..(2): bicyclic nucleic acid (BNA)
ccaacaucaaggaagauggcauuucuag

SEQ ID NO: 8233 - RNA, 27 nt, Artificial Sequence
  source: /note="Description of Artificial Sequence: Synthetic oligonucleotide"
  source: /note="RNA"
  modified_base (1)..(1): bicyclic nucleic acid (BNA)
  modified_base (2)..(2): bicyclic nucleic acid (BNA)
ccaacaucaaggaagauggcauuucua

SEQ ID NO: 8234 - RNA, 26 nt, Artificial Sequence
  source: /note="Description of Artificial Sequence: Synthetic oligonucleotide"
  source: /note="RNA"
  modified_base (1)..(1): bicyclic nucleic acid (BNA)
  modified_base (2)..(2): bicyclic nucleic acid (BNA)
ccaacaucaaggaagauggcauuucu

SEQ ID NO: 8235 - RNA, 25 nt, Artificial Sequence
  source: /note="Description of Artificial Sequence: Synthetic oligonucleotide"
  source: /note="RNA"
  modified_base (1)..(1): bicyclic nucleic acid (BNA)
  modified_base (2)..(2): bicyclic nucleic acid (BNA)
ccaacaucaaggaagauggcauuuc

SEQ ID NO: 8236 - RNA, 24 nt, Artificial Sequence
  source: /note="Description of Artificial Sequence: Synthetic oligonucleotide"
  source: /note="RNA"
  modified_base (1)..(1): bicyclic nucleic acid (BNA)
  modified_base (2)..(2): bicyclic nucleic acid (BNA)
ccaacaucaaggaagauggcauuu

SEQ ID NO: 8237 - RNA, 23 nt, Artificial Sequence
  source: /note="Description of Artificial Sequence: Synthetic oligonucleotide"
  source: /note="RNA"
  modified_base (1)..(1): bicyclic nucleic acid (BNA)
  modified_base (2)..(2): bicyclic nucleic acid (BNA)
ccaacaucaaggaagauggcauu

SEQ ID NO: 8238 - RNA, 22 nt, Artificial Sequence
  source: /note="Description of Artificial Sequence: Synthetic oligonucleotide"
  source: /note="RNA"
  modified_base (1)..(1): bicyclic nucleic acid (BNA)
  modified_base (2)..(2): bicyclic nucleic acid (BNA)
ccaacaucaaggaagauggcau

SEQ ID NO: 8239 - RNA, 21 nt, Artificial Sequence
  source: /note="Description of Artificial Sequence: Synthetic oligonucleotide"
  source: /note="RNA"
  modified_base (1)..(1): bicyclic nucleic acid (BNA)
  modified_base (2)..(2): bicyclic nucleic acid (BNA)
ccaacaucaaggaagauggca

SEQ ID NO: 8240 - RNA, 20 nt, Artificial Sequence
  source: /note="Description of Artificial Sequence: Synthetic oligonucleotide"
  source: /note="RNA"
  modified_base (1)..(1): bicyclic nucleic acid (BNA)
  modified_base (2)..(2): bicyclic nucleic acid (BNA)
ccaacaucaaggaagauggc

SEQ ID NO: 8241 - RNA, 19 nt, Artificial Sequence
  source: /note="Description of Artificial Sequence: Synthetic oligonucleotide"
  source: /note="RNA"
  modified_base (1)..(1): bicyclic nucleic acid (BNA)
  modified_base (2)..(2): bicyclic nucleic acid (BNA)
ccaacaucaaggaagaugg

SEQ ID NO: 8242 - RNA, 18 nt, Artificial Sequence
  source: /note="Description of Artificial Sequence: Synthetic oligonucleotide"
  source: /note="RNA"
  modified_base (1)..(1): bicyclic nucleic acid (BNA)
  modified_base (2)..(2): bicyclic nucleic acid (BNA)
ccaacaucaaggaagaug

SEQ ID NO: 8243 - RNA, 17 nt, Artificial Sequence
  source: /note="Description of Artificial Sequence: Synthetic oligonucleotide"
  source: /note="RNA"
  modified_base (1)..(1): bicyclic nucleic acid (BNA)
  modified_base (2)..(2): bicyclic nucleic acid (BNA)
ccaacaucaaggaagau

SEQ ID NO: 8244 - RNA, 16 nt, Artificial Sequence
  source: /note="Description of Artificial Sequence: Synthetic oligonucleotide"
  source: /note="RNA"
  modified_base (1)..(1): bicyclic nucleic acid (BNA)
  modified_base (2)..(2): bicyclic nucleic acid (BNA)
ccaacaucaaggaaga

SEQ ID NO: 8245 - RNA, 15 nt, Artificial Sequence
  source: /note="Description of Artificial Sequence: Synthetic oligonucleotide"
  source: /note="RNA"
  modified_base (1)..(1): bicyclic nucleic acid (BNA)
  modified_base (2)..(2): bicyclic nucleic acid (BNA)
ccaacaucaaggaag

SEQ ID NO: 8246 - RNA, 27 nt, Artificial Sequence
  source: /note="Description of Artificial Sequence: Synthetic oligonucleotide"
  source: /note="RNA"
  modified_base (1)..(1): bicyclic nucleic acid (BNA)
  modified_base (2)..(2): bicyclic nucleic acid (BNA)
caacaucaaggaagauggcauuucuag

SEQ ID NO: 8247 - RNA, 26 nt, Artificial Sequence
  source: /note="Description of Artificial Sequence: Synthetic oligonucleotide"
  source: /note="RNA"
  modified_base (1)..(1): bicyclic nucleic acid (BNA)
  modified_base (2)..(2): bicyclic nucleic acid (BNA)
caacaucaaggaagauggcauuucua

SEQ ID NO: 8248 - RNA, 25 nt, Artificial Sequence
  source: /note="Description of Artificial Sequence: Synthetic oligonucleotide"
  source: /note="RNA"
  modified_base (1)..(1): bicyclic nucleic acid (BNA)
  modified_base (2)..(2): bicyclic nucleic acid (BNA)
caacaucaaggaagauggcauuucu

SEQ ID NO: 8249 - RNA, 24 nt, Artificial Sequence
  source: /note="Description of Artificial Sequence: Synthetic oligonucleotide"
  source: /note="RNA"
  modified_base (1)..(1): bicyclic nucleic acid (BNA)
  modified_base (2)..(2): bicyclic nucleic acid (BNA)
caacaucaaggaagauggcauuuc

SEQ ID NO: 8250 - RNA, 23 nt, Artificial Sequence
  source: /note="Description of Artificial Sequence: Synthetic oligonucleotide"
  source: /note="RNA"
  modified_base (1)..(1): bicyclic nucleic acid (BNA)
  modified_base (2)..(2): bicyclic nucleic acid (BNA)
caacaucaaggaagauggcauuu

SEQ ID NO: 8251 - RNA, 22 nt, Artificial Sequence
  source: /note="Description of Artificial Sequence: Synthetic oligonucleotide"
  source: /note="RNA"
  modified_base (1)..(1): bicyclic nucleic acid (BNA)
  modified_base (2)..(2): bicyclic nucleic acid (BNA)
caacaucaaggaagauggcauu

SEQ ID NO: 8252 - RNA, 21 nt, Artificial Sequence
  source: /note="Description of Artificial Sequence: Synthetic oligonucleotide"
  source: /note="RNA"
  modified_base (1)..(1): bicyclic nucleic acid (BNA)
  modified_base (2)..(2): bicyclic nucleic acid (BNA)
caacaucaaggaagauggcau

SEQ ID NO: 8253 - RNA, 20 nt, Artificial Sequence
  source: /note="Description of Artificial Sequence: Synthetic oligonucleotide"
  source: /note="RNA"
  modified_base (1)..(1): bicyclic nucleic acid (BNA)
  modified_base (2)..(2): bicyclic nucleic acid (BNA)
caacaucaaggaagauggca

SEQ ID NO: 8254 - RNA, 19 nt, Artificial Sequence
  source: /note="Description of Artificial Sequence: Synthetic oligonucleotide"
  source: /note="RNA"
  modified_base (1)..(1): bicyclic nucleic acid (BNA)
  modified_base (2)..(2): bicyclic nucleic acid (BNA)
caacaucaaggaagauggc

SEQ ID NO: 8255 - RNA, 18 nt, Artificial Sequence
  source: /note="Description of Artificial Sequence: Synthetic oligonucleotide"
  source: /note="RNA"
  modified_base (1)..(1): bicyclic nucleic acid (BNA)
  modified_base (2)..(2): bicyclic nucleic acid (BNA)
caacaucaaggaagaugg

SEQ ID NO: 8256 - RNA, 17 nt, Artificial Sequence
  source: /note="Description of Artificial Sequence: Synthetic oligonucleotide"
  source: /note="RNA"
  modified_base (1)..(1): bicyclic nucleic acid (BNA)
  modified_base (2)..(2): bicyclic nucleic acid (BNA)
caacaucaaggaagaug

SEQ ID NO: 8257 - RNA, 16 nt, Artificial Sequence
  source: /note="Description of Artificial Sequence: Synthetic oligonucleotide"
  source: /note="RNA"
  modified_base (1)..(1): bicyclic nucleic acid (BNA)
  modified_base (2)..(2): bicyclic nucleic acid (BNA)
caacaucaaggaagau

SEQ ID NO: 8258 - RNA, 15 nt, Artificial Sequence
  source: /note="Description of Artificial Sequence: Synthetic oligonucleotide"
  source: /note="RNA"
  modified_base (1)..(1): bicyclic nucleic acid (BNA)
  modified_base (2)..(2): bicyclic nucleic acid (BNA)
caacaucaaggaaga

SEQ ID NO: 8259 - RNA, 14 nt, Artificial Sequence
  source: /note="Description of Artificial Sequence: Synthetic oligonucleotide"
  source: /note="RNA"
  modified_base (1)..(1): bicyclic nucleic acid (BNA)
  modified_base (2)..(2): bicyclic nucleic acid (BNA)
caacaucaaggaag

SEQ ID NO: 8260 - RNA, 26 nt, Artificial Sequence
  source: /note="Description of Artificial Sequence: Synthetic oligonucleotide"
  source: /note="RNA"
  modified_base (1)..(1): bicyclic nucleic acid (BNA)
  modified_base (2)..(2): bicyclic nucleic acid (BNA)
aacaucaaggaagauggcauuucuag

SEQ ID NO: 8261 - RNA, 25 nt, Artificial Sequence
  source: /note="Description of Artificial Sequence: Synthetic oligonucleotide"
  source: /note="RNA"
  modified_base (1)..(1): bicyclic nucleic acid (BNA)
  modified_base (2)..(2): bicyclic nucleic acid (BNA)
aacaucaaggaagauggcauuucua

SEQ ID NO: 8262 - RNA, 24 nt, Artificial Sequence
  source: /note="Description of Artificial Sequence: Synthetic oligonucleotide"
  source: /note="RNA"
  modified_base (1)..(1): bicyclic nucleic acid (BNA)
  modified_base (2)..(2): bicyclic nucleic acid (BNA)
aacaucaaggaagauggcauuucu

SEQ ID NO: 8263 - RNA, 23 nt, Artificial Sequence
  source: /note="Description of Artificial Sequence: Synthetic oligonucleotide"
  source: /note="RNA"
  modified_base (1)..(1): bicyclic nucleic acid (BNA)
  modified_base (2)..(2): bicyclic nucleic acid (BNA)
aacaucaaggaagauggcauuuc

SEQ ID NO: 8264 - RNA, 22 nt, Artificial Sequence
  source: /note="Description of Artificial Sequence: Synthetic oligonucleotide"
  source: /note="RNA"
  modified_base (1)..(1): bicyclic nucleic acid (BNA)
  modified_base (2)..(2): bicyclic nucleic acid (BNA)
aacaucaaggaagauggcauuu

SEQ ID NO: 8265 - RNA, 21 nt, Artificial Sequence
  source: /note="Description of Artificial Sequence: Synthetic oligonucleotide"
  source: /note="RNA"
  modified_base (1)..(1): bicyclic nucleic acid (BNA)
  modified_base (2)..(2): bicyclic nucleic acid (BNA)
aacaucaaggaagauggcauu

SEQ ID NO: 8266 - RNA, 20 nt, Artificial Sequence
  source: /note="Description of Artificial Sequence: Synthetic oligonucleotide"
  source: /note="RNA"
  modified_base (1)..(1): bicyclic nucleic acid (BNA)
  modified_base (2)..(2): bicyclic nucleic acid (BNA)
aacaucaaggaagauggcau

SEQ ID NO: 8267 - RNA, 19 nt, Artificial Sequence
  source: /note="Description of Artificial Sequence: Synthetic oligonucleotide"
  source: /note="RNA"
  modified_base (1)..(1): bicyclic nucleic acid (BNA)
  modified_base (2)..(2): bicyclic nucleic acid (BNA)
aacaucaaggaagauggca

SEQ ID NO: 8268 - RNA, 18 nt, Artificial Sequence
  source: /note="Description of Artificial Sequence: Synthetic oligonucleotide"
  source: /note="RNA"
  modified_base (1)..(1): bicyclic nucleic acid (BNA)
  modified_base (2)..(2): bicyclic nucleic acid (BNA)
aacaucaaggaagauggc

SEQ ID NO: 8269 - RNA, 17 nt, Artificial Sequence
  source: /note="Description of Artificial Sequence: Synthetic oligonucleotide"
  source: /note="RNA"
  modified_base (1)..(1): bicyclic nucleic acid (BNA)
  modified_base (2)..(2): bicyclic nucleic acid (BNA)
aacaucaaggaagaugg

SEQ ID NO: 8270 - RNA, 16 nt, Artificial Sequence
  source: /note="Description of Artificial Sequence: Synthetic oligonucleotide"
  source: /note="RNA"
  modified_base (1)..(1): bicyclic nucleic acid (BNA)
  modified_base (2)..(2): bicyclic nucleic acid (BNA)
aacaucaaggaagaug

SEQ ID NO: 8271 - RNA, 15 nt, Artificial Sequence
  source: /note="Description of Artificial Sequence: Synthetic oligonucleotide"
  source: /note="RNA"
  modified_base (1)..(1): bicyclic nucleic acid (BNA)
  modified_base (2)..(2): bicyclic nucleic acid (BNA)
aacaucaaggaagau

SEQ ID NO: 8272 - RNA, 14 nt, Artificial Sequence
  source: /note="Description of Artificial Sequence: Synthetic oligonucleotide"
  source: /note="RNA"
  modified_base (1)..(1): bicyclic nucleic acid (BNA)
  modified_base (2)..(2): bicyclic nucleic acid (BNA)
aacaucaaggaaga

SEQ ID NO: 8273 - RNA, 13 nt, Artificial Sequence
  source: /note="Description of Artificial Sequence: Synthetic oligonucleotide"
  source: /note="RNA"
  modified_base (1)..(1): bicyclic nucleic acid (BNA)
  modified_base (2)..(2): bicyclic nucleic acid (BNA)
aacaucaaggaag

SEQ ID NO: 8274 - RNA, 25 nt, Artificial Sequence
  source: /note="Description of Artificial Sequence: Synthetic oligonucleotide"
  source: /note="RNA"
  modified_base (1)..(1): bicyclic nucleic acid (BNA)
  modified_base (2)..(2): bicyclic nucleic acid (BNA)
acaucaaggaagauggcauuucuag

SEQ ID NO: 8275 - RNA, 24 nt, Artificial Sequence
  source: /note="Description of Artificial Sequence: Synthetic oligonucleotide"
  source: /note="RNA"
  modified_base (1)..(1): bicyclic nucleic acid (BNA)
  modified_base (2)..(2): bicyclic nucleic acid (BNA)
acaucaaggaagauggcauuucua

SEQ ID NO: 8276 - RNA, 23 nt, Artificial Sequence
  source: /note="Description of Artificial Sequence: Synthetic oligonucleotide"
  source: /note="RNA"
  modified_base (1)..(1): bicyclic nucleic acid (BNA)
  modified_base (2)..(2): bicyclic nucleic acid (BNA)
acaucaaggaagauggcauuucu

SEQ ID NO: 8277 - RNA, 22 nt, Artificial Sequence
  source: /note="Description of Artificial Sequence: Synthetic oligonucleotide"
  source: /note="RNA"
  modified_base (1)..(1): bicyclic nucleic acid (BNA)
  modified_base (2)..(2): bicyclic nucleic acid (BNA)
acaucaaggaagauggcauuuc

SEQ ID NO: 8278 - RNA, 21 nt, Artificial Sequence
  source: /note="Description of Artificial Sequence: Synthetic oligonucleotide"
  source: /note="RNA"
  modified_base (1)..(1): bicyclic nucleic acid (BNA)
  modified_base (2)..(2): bicyclic nucleic acid (BNA)
acaucaaggaagauggcauuu

SEQ ID NO: 8279 - RNA, 20 nt, Artificial Sequence
  source: /note="Description of Artificial Sequence: Synthetic oligonucleotide"
  source: /note="RNA"
  modified_base (1)..(1): bicyclic nucleic acid (BNA)
  modified_base (2)..(2): bicyclic nucleic acid (BNA)
acaucaaggaagauggcauu

SEQ ID NO: 8280 - RNA, 19 nt, Artificial Sequence
  source: /note="Description of Artificial Sequence: Synthetic oligonucleotide"
  source: /note="RNA"
  modified_base (1)..(1): bicyclic nucleic acid (BNA)
  modified_base (2)..(2): bicyclic nucleic acid (BNA)
acaucaaggaagauggcau

SEQ ID NO: 8281 - RNA, 18 nt, Artificial Sequence
  source: /note="Description of Artificial Sequence: Synthetic oligonucleotide"
  source: /note="RNA"
  modified_base (1)..(1): bicyclic nucleic acid (BNA)
  modified_base (2)..(2): bicyclic nucleic acid (BNA)
acaucaaggaagauggca

SEQ ID NO: 8282 - RNA, 17 nt, Artificial Sequence
  source: /note="Description of Artificial Sequence: Synthetic oligonucleotide"
  source: /note="RNA"
  modified_base (1)..(1): bicyclic nucleic acid (BNA)
  modified_base (2)..(2): bicyclic nucleic acid (BNA)
acaucaaggaagauggc

SEQ ID NO: 8283 - RNA, 16 nt, Artificial Sequence
  source: /note="Description of Artificial Sequence: Synthetic oligonucleotide"
  source: /note="RNA"
  modified_base (1)..(1): bicyclic nucleic acid (BNA)
  modified_base (2)..(2): bicyclic nucleic acid (BNA)
acaucaaggaagaugg

SEQ ID NO: 8284 - RNA, 15 nt, Artificial Sequence
  source: /note="Description of Artificial Sequence: Synthetic oligonucleotide"
  source: /note="RNA"
  modified_base (1)..(1): bicyclic nucleic acid (BNA)
  modified_base (2)..(2): bicyclic nucleic acid (BNA)
acaucaaggaagaug

SEQ ID NO: 8285 - RNA, 14 nt, Artificial Sequence
  source: /note="Description of Artificial Sequence: Synthetic oligonucleotide"
  source: /note="RNA"
  modified_base (1)..(1): bicyclic nucleic acid (BNA)
  modified_base (2)..(2): bicyclic nucleic acid (BNA)
acaucaaggaagau

SEQ ID NO: 8286 - RNA, 13 nt, Artificial Sequence
  source: /note="Description of Artificial Sequence: Synthetic oligonucleotide"
  source: /note="RNA"
  modified_base (1)..(1): bicyclic nucleic acid (BNA)
  modified_base (2)..(2): bicyclic nucleic acid (BNA)
acaucaaggaaga

SEQ ID NO: 8287 - RNA, 12 nt, Artificial Sequence
  source: /note="Description of Artificial Sequence: Synthetic oligonucleotide"
  source: /note="RNA"
  modified_base (1)..(1): bicyclic nucleic acid (BNA)
  modified_base (2)..(2): bicyclic nucleic acid (BNA)
acaucaaggaag

SEQ ID NO: 8288 - RNA, 24 nt, Artificial Sequence
  source: /note="Description of Artificial Sequence: Synthetic oligonucleotide"
  source: /note="RNA"
  modified_base (1)..(1): bicyclic nucleic acid (BNA)
  modified_base (2)..(2): bicyclic nucleic acid (BNA)
caucaaggaagauggcauuucuag

SEQ ID NO: 8289 - RNA, 23 nt, Artificial Sequence
  source: /note="Description of Artificial Sequence: Synthetic oligonucleotide"
  source: /note="RNA"
  modified_base (1)..(1): bicyclic nucleic acid (BNA)
  modified_base (2)..(2): bicyclic nucleic acid (BNA)
caucaaggaagauggcauuucua

SEQ ID NO: 8290 - RNA, 22 nt, Artificial Sequence
  source: /note="Description of Artificial Sequence: Synthetic oligonucleotide"
  source: /note="RNA"
  modified_base (1)..(1): bicyclic nucleic acid (BNA)
  modified_base (2)..(2): bicyclic nucleic acid (BNA)
caucaaggaagauggcauuucu

SEQ ID NO: 8291 - RNA, 21 nt, Artificial Sequence
  source: /note="Description of Artificial Sequence: Synthetic oligonucleotide"
  source: /note="RNA"
  modified_base (1)..(1): bicyclic nucleic acid (BNA)
  modified_base (2)..(2): bicyclic nucleic acid (BNA)
caucaaggaagauggcauuuc

SEQ ID NO: 8292 - RNA, 20 nt, Artificial Sequence
  source: /note="Description of Artificial Sequence: Synthetic oligonucleotide"
  source: /note="RNA"
  modified_base (1)..(1): bicyclic nucleic acid (BNA)
  modified_base (2)..(2): bicyclic nucleic acid (BNA)
caucaaggaagauggcauuu

SEQ ID NO: 8293 - RNA, 19 nt, Artificial Sequence
  source: /note="Description of Artificial Sequence: Synthetic oligonucleotide"
  source: /note="RNA"
  modified_base (1)..(1): bicyclic nucleic acid (BNA)
  modified_base (2)..(2): bicyclic nucleic acid (BNA)
caucaaggaagauggcauu

SEQ ID NO: 8294 - RNA, 18 nt, Artificial Sequence
  source: /note="Description of Artificial Sequence: Synthetic oligonucleotide"
  source: /note="RNA"
  modified_base (1)..(1): bicyclic nucleic acid (BNA)
  modified_base (2)..(2): bicyclic nucleic acid (BNA)
caucaaggaagauggcau

SEQ ID NO: 8295 - RNA, 17 nt, Artificial Sequence
  source: /note="Description of Artificial Sequence: Synthetic oligonucleotide"
  source: /note="RNA"
  modified_base (1)..(1): bicyclic nucleic acid (BNA)
  modified_base (2)..(2): bicyclic nucleic acid (BNA)
caucaaggaagauggca

SEQ ID NO: 8296 - RNA, 16 nt, Artificial Sequence
  source: /note="Description of Artificial Sequence: Synthetic oligonucleotide"
  source: /note="RNA"
  modified_base (1)..(1): bicyclic nucleic acid (BNA)
  modified_base (2)..(2): bicyclic nucleic acid (BNA)
caucaaggaagauggc

SEQ ID NO: 8297 - RNA, 15 nt, Artificial Sequence
  source: /note="Description of Artificial Sequence: Synthetic oligonucleotide"
  source: /note="RNA"
  modified_base (1)..(1): bicyclic nucleic acid (BNA)
  modified_base (2)..(2): bicyclic nucleic acid (BNA)
caucaaggaagaugg

SEQ ID NO: 8298 - RNA, 14 nt, Artificial Sequence
  source: /note="Description of Artificial Sequence: Synthetic oligonucleotide"
  source: /note="RNA"
  modified_base (1)..(1): bicyclic nucleic acid (BNA)
  modified_base (2)..(2): bicyclic nucleic acid (BNA)
caucaaggaagaug

SEQ ID NO: 8299 - RNA, 13 nt, Artificial Sequence
  source: /note="Description of Artificial Sequence: Synthetic oligonucleotide"
  source: /note="RNA"
  modified_base (1)..(1): bicyclic nucleic acid (BNA)
  modified_base (2)..(2): bicyclic nucleic acid (BNA)
caucaaggaagau

SEQ ID NO: 8300 - RNA, 12 nt, Artificial Sequence
  source: /note="Description of Artificial Sequence: Synthetic oligonucleotide"
  source: /note="RNA"
  modified_base (1)..(1): bicyclic nucleic acid (BNA)
  modified_base (2)..(2): bicyclic nucleic acid (BNA)
caucaaggaaga

SEQ ID NO: 8301 - RNA, 11 nt, Artificial Sequence
  source: /note="Description of Artificial Sequence: Synthetic oligonucleotide"
  source: /note="RNA"
  modified_base (1)..(1): bicyclic nucleic acid (BNA)
  modified_base (2)..(2): bicyclic nucleic acid (BNA)
caucaaggaag

SEQ ID NO: 8302 - DNA, 23 bp, Artificial Sequence
  source: /note="Description of Artificial Sequence: Synthetic oligonucleotide"
  source: /note="Description of Combined DNA/RNA Molecule: Synthetic oligonucleotide"
  source: /note="DNA/RNA"
  modified_base (1)..(1): bicyclic nucleic acid (BNA)
  modified_base (2)..(2): bicyclic nucleic acid (BNA)
atcaaggaagauggcauuucuag

SEQ ID NO: 8303 - DNA, 22 bp, Artificial Sequence
  source: /note="Description of Artificial Sequence: Synthetic oligonucleotide"
  source: /note="Description of Combined DNA/RNA Molecule: Synthetic oligonucleotide"
  source: /note="DNA/RNA"
  modified_base (1)..(1): bicyclic nucleic acid (BNA)
  modified_base (2)..(2): bicyclic nucleic acid (BNA)
atcaaggaagauggcauuucua

SEQ ID NO: 8304 - DNA, 21 bp, Artificial Sequence
  source: /note="Description of Artificial Sequence: Synthetic oligonucleotide"
  source: /note="Description of Combined DNA/RNA Molecule: Synthetic oligonucleotide"
  source: /note="DNA/RNA"
  modified_base (1)..(1): bicyclic nucleic acid (BNA)
  modified_base (2)..(2): bicyclic nucleic acid (BNA)
atcaaggaagauggcauuucu

SEQ ID NO: 8305 - DNA, 20 bp, Artificial Sequence
  source: /note="Description of Artificial Sequence: Synthetic oligonucleotide"
  source: /note="Description of Combined DNA/RNA Molecule: Synthetic oligonucleotide"
  source: /note="DNA/RNA"
  modified_base (1)..(1): bicyclic nucleic acid (BNA)
  modified_base (2)..(2): bicyclic nucleic acid (BNA)
atcaaggaagauggcauuuc

SEQ ID NO: 8306 - DNA, 19 bp, Artificial Sequence
  source: /note="Description of Artificial Sequence: Synthetic oligonucleotide"
  source: /note="Description of Combined DNA/RNA Molecule: Synthetic oligonucleotide"
  source: /note="DNA/RNA"
  modified_base (1)..(1): bicyclic nucleic acid (BNA)
  modified_base (2)..(2): bicyclic nucleic acid (BNA)
atcaaggaagauggcauuu

SEQ ID NO: 8307 - DNA, 18 bp, Artificial Sequence
  source: /note="Description of Artificial Sequence: Synthetic oligonucleotide"
  source: /note="Description of Combined DNA/RNA Molecule: Synthetic oligonucleotide"
  source: /note="DNA/RNA"
  modified_base (1)..(1): bicyclic nucleic acid (BNA)
  modified_base (2)..(2): bicyclic nucleic acid (BNA)
atcaaggaagauggcauu

SEQ ID NO: 8308 - DNA, 17 bp, Artificial Sequence
  source: /note="Description of Artificial Sequence: Synthetic oligonucleotide"
  source: /note="Description of Combined DNA/RNA Molecule: Synthetic oligonucleotide"
  source: /note="DNA/RNA"
  modified_base (1)..(1): bicyclic nucleic acid (BNA)
  modified_base (2)..(2): bicyclic nucleic acid (BNA)
atcaaggaagauggcau

SEQ ID NO: 8309 - DNA, 16 bp, Artificial Sequence
  source: /note="Description of Artificial Sequence: Synthetic oligonucleotide"
  source: /note="Description of Combined DNA/RNA Molecule: Synthetic oligonucleotide"
  source: /note="DNA/RNA"
  modified_base (1)..(1): bicyclic nucleic acid (BNA)
  modified_base (2)..(2): bicyclic nucleic acid (BNA)
atcaaggaagauggca

SEQ ID NO: 8310 - DNA, 15 bp, Artificial Sequence
  source: /note="Description of Artificial Sequence: Synthetic oligonucleotide"
  source: /note="Description of Combined DNA/RNA Molecule: Synthetic oligonucleotide"
  source: /note="DNA/RNA"
  modified_base (1)..(1): bicyclic nucleic acid (BNA)
  modified_base (2)..(2): bicyclic nucleic acid (BNA)
atcaaggaagauggc

SEQ ID NO: 8311 - DNA, 14 bp, Artificial Sequence
  source: /note="Description of Artificial Sequence: Synthetic oligonucleotide"
  source: /note="Description of Combined DNA/RNA Molecule: Synthetic oligonucleotide"
  source: /note="DNA/RNA"
  modified_base (1)..(1): bicyclic nucleic acid (BNA)
  modified_base (2)..(2): bicyclic nucleic acid (BNA)
atcaaggaagaugg

SEQ ID NO: 8312 - DNA, 13 bp, Artificial Sequence
  source: /note="Description of Artificial Sequence: Synthetic oligonucleotide"
  source: /note="Description of Combined DNA/RNA Molecule: Synthetic oligonucleotide"
  source: /note="DNA/RNA"
  modified_base (1)..(1): bicyclic nucleic acid (BNA)
  modified_base (2)..(2): bicyclic nucleic acid (BNA)
atcaaggaagaug

SEQ ID NO: 8313 - DNA, 12 bp, Artificial Sequence
  source: /note="Description of Artificial Sequence: Synthetic oligonucleotide"
  source: /note="Description of Combined DNA/RNA Molecule: Synthetic oligonucleotide"
  source: /note="DNA/RNA"
  modified_base (1)..(1): bicyclic nucleic acid (BNA)
  modified_base (2)..(2): bicyclic nucleic acid (BNA)
atcaaggaagau

SEQ ID NO: 8314 - DNA, 11 bp, Artificial Sequence
  source: /note="Description of Artificial Sequence: Synthetic oligonucleotide"
  source: /note="DNA/RNA"
  modified_base (1)..(1): bicyclic nucleic acid (BNA)
  modified_base (2)..(2): bicyclic nucleic acid (BNA)
atcaaggaaga

SEQ ID NO: 8315 - DNA, 10 bp, Artificial Sequence
  source: /note="Description of Artificial Sequence: Synthetic oligonucleotide"
  source: /note="DNA/RNA"
  modified_base (1)..(1): bicyclic nucleic acid (BNA)
  modified_base (2)..(2): bicyclic nucleic acid (BNA)
atcaaggaag

SEQ ID NO: 8316 - RNA, 23 nt, Artificial Sequence
  source: /note="Description of Artificial Sequence: Synthetic oligonucleotide"
  source: /note="RNA"
  modified_base (1)..(1): bicyclic nucleic acid (BNA)
  modified_base (2)..(2): bicyclic nucleic acid (BNA)
ccagagcagguaccuccaacauc

SEQ ID NO: 8317 - RNA, 18 nt, Artificial Sequence
  source: /note="Description of Artificial Sequence: Synthetic oligonucleotide"
  source: /note="RNA"
  modified_base (1)..(1): bicyclic nucleic acid (BNA)
  modified_base (2)..(2): bicyclic nucleic acid (BNA)
ccagagcagguaccucca

SEQ ID NO: 8318 - RNA, 23 nt, Artificial Sequence
  source: /note="Description of Artificial Sequence: Synthetic oligonucleotide"
  source: /note="RNA"
  modified_base (1)..(1): bicyclic nucleic acid (BNA)
  modified_base (2)..(2): bicyclic nucleic acid (BNA)
ccucugugauuuuauaacuugau

SEQ ID NO: 8319 - DNA, 17 bp, Artificial Sequence
  source: /note="Description of Artificial Sequence: Synthetic oligonucleotide"
  source: /note="Description of Combined DNA/RNA Molecule: Synthetic oligonucleotide"
  source: /note="DNA/RNA"
  modified_base (1)..(1): bicyclic nucleic acid (BNA)
  modified_base (2)..(2): bicyclic nucleic acid (BNA)
tcacccaccaucacccu

SEQ ID NO: 8320 - DNA, 20 bp, Artificial Sequence
  source: /note="Description of Artificial Sequence: Synthetic oligonucleotide"
  source: /note="Description of Combined DNA/RNA Molecule: Synthetic oligonucleotide"
  source: /note="DNA/RNA"
  modified_base (1)..(1): bicyclic nucleic acid (BNA)
  modified_base (2)..(2): bicyclic nucleic acid (BNA)
tgauauccucaaggucaccc

SEQ ID NO: 8321 - DNA, 22 bp, Artificial Sequence
  source: /note="Description of Artificial Sequence: Synthetic oligonucleotide"
  source: /note="Description of Combined DNA/RNA Molecule: Synthetic oligonucleotide"
  source: /note="DNA/RNA"
  modified_base (1)..(1): bicyclic nucleic acid (BNA)
  modified_base (2)..(2): bicyclic nucleic acid (BNA)
ctgcuugaugaucaucucguug

SEQ ID NO: 8322 - DNA, 18 bp, Artificial Sequence
  source: /note="Description of Artificial Sequence: Synthetic oligonucleotide"
  source: /note="Description of Combined DNA/RNA Molecule: Synthetic oligonucleotide"
  source: /note="DNA/RNA"
  modified_base (1)..(1): bicyclic nucleic acid (BNA)
  modified_base (2)..(2): bicyclic nucleic acid (BNA)
ctgcuugaugaucaucuc

SEQ ID NO: 8323 - DNA, 19 bp, Artificial Sequence
  source: /note="Description of Artificial Sequence: Synthetic oligonucleotide"
  source: /note="Description of Combined DNA/RNA Molecule: Synthetic oligonucleotide"
  source: /note="DNA/RNA"
  modified_base (1)..(1): bicyclic nucleic acid (BNA)
  modified_base (2)..(2): bicyclic nucleic acid (BNA)
gtuuccuuaguaaccacag

SEQ ID NO: 8324 - DNA, 17 bp, Artificial Sequence
  source: /note="Description of Artificial Sequence: Synthetic oligonucleotide"
  source: /note="Description of Combined DNA/RNA Molecule: Synthetic oligonucleotide"
  source: /note="DNA/RNA"
  modified_base (1)..(1): bicyclic nucleic acid (BNA)
  modified_base (2)..(2): bicyclic nucleic acid (BNA)
gtuuccuuaguaaccac

SEQ ID NO: 8325 - DNA, 20 bp, Artificial Sequence
  source: /note="Description of Artificial Sequence: Synthetic oligonucleotide"
  source: /note="Description of Combined DNA/RNA Molecule: Synthetic oligonucleotide"
  source: /note="DNA/RNA"
  source: /note="5' tri-ethylene glycol (TEG)"
  modified_base (1)..(1): bicyclic nucleic acid (BNA)
  modified_base (2)..(2): bicyclic nucleic acid (BNA)
tcaaggaagauggcauuucu

SEQ ID NO: 8326 - DNA, 22 bp, Artificial Sequence
  source: /note="Description of Artificial Sequence: Synthetic oligonucleotide"
  source: /note="Description of Combined DNA/RNA Molecule: Synthetic oligonucleotide"
  source: /note="DNA/RNA"
  source: /note="5' tri-ethylene glycol (TEG)"
  modified_base (1)..(1): bicyclic nucleic acid (BNA)
  modified_base (2)..(2): bicyclic nucleic acid (BNA)
tcaaggaagauggcauuucuag

SEQ ID NO: 8327 - RNA, 18 nt, Artificial Sequence
  source: /note="Description of Artificial Sequence: Synthetic oligonucleotide"
  source: /note="RNA"
  source: /note="5' tri-ethylene glycol (TEG)"
  modified_base (1)..(1): bicyclic nucleic acid (BNA)
  modified_base (2)..(2): bicyclic nucleic acid (BNA)
gguaaguucuguccaagc

SEQ ID NO: 8328 - DNA, 18 bp, Artificial Sequence
  source: /note="Description of Artificial Sequence: Synthetic oligonucleotide"
  source: /note="Description of Combined DNA/RNA Molecule: Synthetic oligonucleotide"
  source: /note="DNA/RNA"
  source: /note="5' tri-ethylene glycol (TEG)"
  modified_base (1)..(1): bicyclic nucleic acid (BNA)
  modified_base (2)..(2): bicyclic nucleic acid (BNA)
gtaaguucuguccaagcc

SEQ ID NO: 8329 - RNA, 18 nt, Artificial Sequence
  source: /note="Description of Artificial Sequence: Synthetic oligonucleotide"
  source: /note="RNA"
  source: /note="5' tri-ethylene glycol (TEG)"
  modified_base (1)..(1): bicyclic nucleic acid (BNA)
  modified_base (2)..(2): bicyclic nucleic acid (BNA)
agucgguaaguucugucc

SEQ ID NO: 8330 - DNA, 18 bp, Artificial Sequence
  source: /note="Description of Artificial Sequence: Synthetic oligonucleotide"
  source: /note="Description of Combined DNA/RNA Molecule: Synthetic oligonucleotide"
  source: /note="DNA/RNA"
  source: /note="5' tri-ethylene glycol (TEG)"
  modified_base (1)..(1): bicyclic nucleic acid (BNA)
  modified_base (2)..(2): bicyclic nucleic acid (BNA)
ctguccaagcccgguuga

SEQ ID NO: 8331 - DNA, 15 bp, Artificial Sequence
  source: /note="Description of Artificial Sequence: Synthetic oligonucleotide"
  source: /note="Description of Combined DNA/RNA Molecule: Synthetic oligonucleotide"
  source: /note="DNA/RNA"
  source: /note="5' tri-ethylene glycol (TEG)"
  modified_base (1)..(1): bicyclic nucleic acid (BNA)
  modified_base (2)..(2): bicyclic nucleic acid (BNA)
taaguucuguccaag

SEQ ID NO: 8332 - DNA, 20 bp, Artificial Sequence
  source: /note="Description of Artificial Sequence: Synthetic oligonucleotide"
  source: /note="Description of Combined DNA/RNA Molecule: Synthetic oligonucleotide"
  source: /note="DNA/RNA"
  source: /note="5' tri-ethylene glycol (TEG)"
  modified_base (1)..(1): bicyclic nucleic acid (BNA)
  modified_base (2)..(2): bicyclic nucleic acid (BNA)
ttcuguccaagcccgguuga

SEQ ID NO: 8333 - DNA, 19 bp, Artificial Sequence
  source: /note="Description of Artificial Sequence: Synthetic oligonucleotide"
  source: /note="Description of Combined DNA/RNA Molecule: Synthetic oligonucleotide"
  source: /note="DNA/RNA"
  source: /note="5' tri-ethylene glycol (TEG)"
  modified_base (1)..(1): bicyclic nucleic acid (BNA)
  modified_base (2)..(2): bicyclic nucleic acid (BNA)
ttcuguccaagcccgguug

SEQ ID NO: 8334 - DNA, 18 bp, Artificial Sequence
  source: /note="Description of Artificial Sequence: Synthetic oligonucleotide"
  source: /note="Description of Combined DNA/RNA Molecule: Synthetic oligonucleotide"
  source: /note="DNA/RNA"
  source: /note="5' tri-ethylene glycol (TEG)"
  modified_base (1)..(1): bicyclic nucleic acid (BNA)
  modified_base (2)..(2): bicyclic nucleic acid (BNA)
ttcuguccaagcccgguu

SEQ ID NO: 8335 - DNA, 17 bp, Artificial Sequence
  source: /note="Description of Artificial Sequence: Synthetic oligonucleotide"
  source: /note="Description of Combined DNA/RNA Molecule: Synthetic oligonucleotide"
  source: /note="DNA/RNA"
  source: /note="5' tri-ethylene glycol (TEG)"
  modified_base (1)..(1): bicyclic nucleic acid (BNA)
  modified_base (2)..(2): bicyclic nucleic acid (BNA)
ttcuguccaagcccggu

SEQ ID NO: 8336 - DNA, 16 bp, Artificial Sequence
  source: /note="Description of Artificial Sequence: Synthetic oligonucleotide"
  source: /note="Description of Combined DNA/RNA Molecule: Synthetic oligonucleotide"
  source: /note="DNA/RNA"
  source: /note="5' tri-ethylene glycol (TEG)"
  modified_base (1)..(1): bicyclic nucleic acid (BNA)
  modified_base (2)..(2): bicyclic nucleic acid (BNA)
ttcuguccaagcccgg

SEQ ID NO: 8337 - DNA, 15 bp, Artificial Sequence
  source: /note="Description of Artificial Sequence: Synthetic oligonucleotide"
  source: /note="Description of Combined DNA/RNA Molecule: Synthetic oligonucleotide"
  source: /note="DNA/RNA"
  source: /note="5' tri-ethylene glycol (TEG)"
  modified_base (1)..(1): bicyclic nucleic acid (BNA)
  modified_base (2)..(2): bicyclic nucleic acid (BNA)
ttcuguccaagcccg

SEQ ID NO: 8338 - DNA, 14 bp, Artificial Sequence
  source: /note="Description of Artificial Sequence: Synthetic oligonucleotide"
  source: /note="Description of Combined DNA/RNA Molecule: Synthetic oligonucleotide"
  source: /note="DNA/RNA"
  source: /note="5' tri-ethylene glycol (TEG)"
  modified_base (1)..(1): bicyclic nucleic acid (BNA)
  modified_base (2)..(2): bicyclic nucleic acid (BNA)
ttcuguccaagccc

SEQ ID NO: 8339 - DNA, 13 bp, Artificial Sequence
  source: /note="Description of Artificial Sequence: Synthetic oligonucleotide"
  source: /note="Description of Combined DNA/RNA Molecule: Synthetic oligonucleotide"
  source: /note="DNA/RNA"
  source: /note="5' tri-ethylene glycol (TEG)"
  modified_base (1)..(1): bicyclic nucleic acid (BNA)
  modified_base (2)..(2): bicyclic nucleic acid (BNA)
ttcuguccaagcc

SEQ ID NO: 8340 - DNA, 12 bp, Artificial Sequence
  source: /note="Description of Artificial Sequence: Synthetic oligonucleotide"
  source: /note="Description of Combined DNA/RNA Molecule: Synthetic oligonucleotide"
  source: /note="DNA/RNA"
  source: /note="5' tri-ethylene glycol (TEG)"
  modified_base (1)..(1): bicyclic nucleic acid (BNA)
  modified_base (2)..(2): bicyclic nucleic acid (BNA)
ttcuguccaagc

SEQ ID NO: 8341 - DNA, 11 bp, Artificial Sequence
  source: /note="Description of Artificial Sequence: Synthetic oligonucleotide"
  source: /note="Description of Combined DNA/RNA Molecule: Synthetic oligonucleotide"
  source: /note="DNA/RNA"
  source: /note="5' tri-ethylene glycol (TEG)"
  modified_base (1)..(1): bicyclic nucleic acid (BNA)
  modified_base (2)..(2): bicyclic nucleic acid (BNA)
ttcuguccaag

SEQ ID NO: 8342 - DNA, 10 bp, Artificial Sequence
  source: /note="Description of Artificial Sequence: Synthetic oligonucleotide"
  source: /note="Description of Combined DNA/RNA Molecule: Synthetic oligonucleotide"
  source: /note="DNA/RNA"
  source: /note="5' tri-ethylene glycol (TEG)"
  modified_base (1)..(1): bicyclic nucleic acid (BNA)
  modified_base (2)..(2): bicyclic nucleic acid (BNA)
ttcuguccaa

SEQ ID NO: 8343 - DNA, 9 bp, Artificial Sequence
  source: /note="Description of Artificial Sequence: Synthetic oligonucleotide"
  source: /note="Description of Combined DNA/RNA Molecule: Synthetic oligonucleotide"
  source: /note="DNA/RNA"
  source: /note="5' tri-ethylene glycol (TEG)"
  modified_base (1)..(1): bicyclic nucleic acid (BNA)
  modified_base (2)..(2): bicyclic nucleic acid (BNA)
ttcugucca

SEQ ID NO: 8344 - DNA, 8 bp, Artificial Sequence
  source: /note="Description of Artificial Sequence: Synthetic oligonucleotide"
  source: /note="Description of Combined DNA/RNA Molecule: Synthetic oligonucleotide"
  source: /note="DNA/RNA"
  source: /note="5' tri-ethylene glycol (TEG)"
  modified_base (1)..(1): bicyclic nucleic acid (BNA)
  modified_base (2)..(2): bicyclic nucleic acid (BNA)
ttcugucc

SEQ ID NO: 8345 - DNA, 19 bp, Artificial Sequence
  source: /note="Description of Artificial Sequence: Synthetic oligonucleotide"
  source: /note="Description of Combined DNA/RNA Molecule: Synthetic oligonucleotide"
  source: /note="DNA/RNA"
  source: /note="5' tri-ethylene glycol (TEG)"
  modified_base (1)..(1): bicyclic nucleic acid (BNA)
  modified_base (2)..(2): bicyclic nucleic acid (BNA)
tcuguccaagcccgguuga

SEQ ID NO: 8346 - DNA, 18 bp, Artificial Sequence
  source: /note="Description of Artificial Sequence: Synthetic oligonucleotide"
  source: /note="Description of Combined DNA/RNA Molecule: Synthetic oligonucleotide"
  source: /note="DNA/RNA"
  source: /note="5' tri-ethylene glycol (TEG)"
  modified_base (1)..(1): bicyclic nucleic acid (BNA)
  modified_base (2)..(2): bicyclic nucleic acid (BNA)
tcuguccaagcccgguug

SEQ ID NO: 8347 - DNA, 17 bp, Artificial Sequence
  source: /note="Description of Artificial Sequence: Synthetic oligonucleotide"
  source: /note="Description of Combined DNA/RNA Molecule: Synthetic oligonucleotide"
  source: /note="DNA/RNA"
  source: /note="5' tri-ethylene glycol (TEG)"
  modified_base (1)..(1): bicyclic nucleic acid (BNA)
  modified_base (2)..(2): bicyclic nucleic acid (BNA)
tcuguccaagcccgguu

SEQ ID NO: 8348 - DNA, 16 bp, Artificial Sequence
  source: /note="Description of Artificial Sequence: Synthetic oligonucleotide"
  source: /note="Description of Combined DNA/RNA Molecule: Synthetic oligonucleotide"
  source: /note="DNA/RNA"
  source: /note="5' tri-ethylene glycol (TEG)"
  modified_base (1)..(1): bicyclic nucleic acid (BNA)
  modified_base (2)..(2): bicyclic nucleic acid (BNA)
tcuguccaagcccggu

SEQ ID NO: 8349 - DNA, 15 bp, Artificial Sequence
  source: /note="Description of Artificial Sequence: Synthetic oligonucleotide"
  source: /note="Description of Combined DNA/RNA Molecule: Synthetic oligonucleotide"
  source: /note="DNA/RNA"
  source: /note="5' tri-ethylene glycol (TEG)"
  modified_base (1)..(1): bicyclic nucleic acid (BNA)
  modified_base (2)..(2): bicyclic nucleic acid (BNA)
tcuguccaagcccgg

SEQ ID NO: 8350 - DNA, 14 bp, Artificial Sequence
  source: /note="Description of Artificial Sequence: Synthetic oligonucleotide"
  source: /note="Description of Combined DNA/RNA Molecule: Synthetic oligonucleotide"
  source: /note="DNA/RNA"
  source: /note="5' tri-ethylene glycol (TEG)"
  modified_base (1)..(1): bicyclic nucleic acid (BNA)
  modified_base (2)..(2): bicyclic nucleic acid (BNA)
tcuguccaagcccg

SEQ ID NO: 8351 - DNA, 13 bp, Artificial Sequence
  source: /note="Description of Artificial Sequence: Synthetic oligonucleotide"
  source: /note="Description of Combined DNA/RNA Molecule: Synthetic oligonucleotide"
  source: /note="DNA/RNA"
  source: /note="5' tri-ethylene glycol (TEG)"
  modified_base (1)..(1): bicyclic nucleic acid (BNA)
  modified_base (2)..(2): bicyclic nucleic acid (BNA)
tcuguccaagccc

SEQ ID NO: 8352 - DNA, 12 bp, Artificial Sequence
  source: /note="Description of Artificial Sequence: Synthetic oligonucleotide"
  source: /note="Description of Combined DNA/RNA Molecule: Synthetic oligonucleotide"
  source: /note="DNA/RNA"
  source: /note="5' tri-ethylene glycol (TEG)"
  modified_base (1)..(1): bicyclic nucleic acid (BNA)
  modified_base (2)..(2): bicyclic nucleic acid (BNA)
tcuguccaagcc

SEQ ID NO: 8353 - DNA, 11 bp, Artificial Sequence
  source: /note="Description of Artificial Sequence: Synthetic oligonucleotide"
  source: /note="Description of Combined DNA/RNA Molecule: Synthetic oligonucleotide"
  source: /note="DNA/RNA"
  source: /note="5' tri-ethylene glycol (TEG)"
  modified_base (1)..(1): bicyclic nucleic acid (BNA)
  modified_base (2)..(2): bicyclic nucleic acid (BNA)
tcuguccaagc

SEQ ID NO: 8354 - DNA, 10 bp, Artificial Sequence
  source: /note="Description of Artificial Sequence: Synthetic oligonucleotide"
  source: /note="Description of Combined DNA/RNA Molecule: Synthetic oligonucleotide"
  source: /note="DNA/RNA"
  source: /note="5' tri-ethylene glycol (TEG)"
  modified_base (1)..(1): bicyclic nucleic acid (BNA)
  modified_base (2)..(2): bicyclic nucleic acid (BNA)
tcuguccaag

SEQ ID NO: 8355 - DNA, 9 bp, Artificial Sequence
  source: /note="Description of Artificial Sequence: Synthetic oligonucleotide"
  source: /note="Description of Combined DNA/RNA Molecule: Synthetic oligonucleotide"
  source: /note="DNA/RNA"
  source: /note="5' tri-ethylene glycol (TEG)"
  modified_base (1)..(1): bicyclic nucleic acid (BNA)
  modified_base (2)..(2): bicyclic nucleic acid (BNA)
tcuguccaa

SEQ ID NO: 8356 - DNA, 8 bp, Artificial Sequence
  source: /note="Description of Artificial Sequence: Synthetic oligonucleotide"
  source: /note="Description of Combined DNA/RNA Molecule: Synthetic oligonucleotide"
  source: /note="DNA/RNA"
  source: /note="5' tri-ethylene glycol (TEG)"
  modified_base (1)..(1): bicyclic nucleic acid (BNA)
  modified_base (2)..(2): bicyclic nucleic acid (BNA)
tcugucca

SEQ ID NO: 8357 - DNA, 17 bp, Artificial Sequence
  source: /note="Description of Artificial Sequence: Synthetic oligonucleotide"
  source: /note="Description of Combined DNA/RNA Molecule: Synthetic oligonucleotide"
  source: /note="DNA/RNA"
  source: /note="5' tri-ethylene glycol (TEG)"
  modified_base (1)..(1): bicyclic nucleic acid (BNA)
  modified_base (2)..(2): bicyclic nucleic acid (BNA)
ctguccaagcccgguug

SEQ ID NO: 8358 - DNA, 16 bp, Artificial Sequence
  source: /note="Description of Artificial Sequence: Synthetic oligonucleotide"
  source: /note="Description of Combined DNA/RNA Molecule: Synthetic oligonucleotide"
  source: /note="DNA/RNA"
  source: /note="5' tri-ethylene glycol (TEG)"
  modified_base (1)..(1): bicyclic nucleic acid (BNA)
  modified_base (2)..(2): bicyclic nucleic acid (BNA)
ctguccaagcccgguu

SEQ ID NO: 8359 - DNA, 15 bp, Artificial Sequence
  source: /note="Description of Artificial Sequence: Synthetic oligonucleotide"
  source: /note="Description of Combined DNA/RNA Molecule: Synthetic oligonucleotide"
  source: /note="DNA/RNA"
  source: /note="5' tri-ethylene glycol (TEG)"
  modified_base (1)..(1): bicyclic nucleic acid (BNA)
  modified_base (2)..(2): bicyclic nucleic acid (BNA)
ctguccaagcccggu

SEQ ID NO: 8360 - DNA, 14 bp, Artificial Sequence
  source: /note="Description of Artificial Sequence: Synthetic oligonucleotide"
  source: /note="Description of Combined DNA/RNA Molecule: Synthetic oligonucleotide"
  source: /note="DNA/RNA"
  source: /note="5' tri-ethylene glycol (TEG)"
  modified_base (1)..(1): bicyclic nucleic acid (BNA)
  modified_base (2)..(2): bicyclic nucleic acid (BNA)
ctguccaagcccgg

SEQ ID NO: 8361 - DNA, 13 bp, Artificial Sequence
  source: /note="Description of Artificial Sequence: Synthetic oligonucleotide"
  source: /note="Description of Combined DNA/RNA Molecule: Synthetic oligonucleotide"
  source: /note="DNA/RNA"
  source: /note="5' tri-ethylene glycol (TEG)"
  modified_base (1)..(1): bicyclic nucleic acid (BNA)
  modified_base (2)..(2): bicyclic nucleic acid (BNA)
ctguccaagcccg

SEQ ID NO: 8362 - DNA, 12 bp, Artificial Sequence
  source: /note="Description of Artificial Sequence: Synthetic oligonucleotide"
  source: /note="Description of Combined DNA/RNA Molecule: Synthetic oligonucleotide"
  source: /note="DNA/RNA"
  source: /note="5' tri-ethylene glycol (TEG)"
  modified_base (1)..(1): bicyclic nucleic acid (BNA)
  modified_base (2)..(2): bicyclic nucleic acid (BNA)
ctguccaagccc

SEQ ID NO: 8363 - DNA, 11 bp, Artificial Sequence
  source: /note="Description of Artificial Sequence: Synthetic oligonucleotide"
  source: /note="Description of Combined DNA/RNA Molecule: Synthetic oligonucleotide"
  source: /note="DNA/RNA"
  source: /note="5' tri-ethylene glycol (TEG)"
  modified_base (1)..(1): bicyclic nucleic acid (BNA)
  modified_base (2)..(2): bicyclic nucleic acid (BNA)
ctguccaagcc

SEQ ID NO: 8364 - DNA, 10 bp, Artificial Sequence
  source: /note="Description of Artificial Sequence: Synthetic oligonucleotide"
  source: /note="Description of Combined DNA/RNA Molecule: Synthetic oligonucleotide"
  source: /note="DNA/RNA"
  source: /note="5' tri-ethylene glycol (TEG)"
  modified_base (1)..(1): bicyclic nucleic acid (BNA)
  modified_base (2)..(2): bicyclic nucleic acid (BNA)
ctguccaagc

SEQ ID NO: 8365 - DNA, 9 bp, Artificial Sequence
  source: /note="Description of Artificial Sequence: Synthetic oligonucleotide"
  source: /note="Description of Combined DNA/RNA Molecule: Synthetic oligonucleotide"
  source: /note="DNA/RNA"
  source: /note="5' tri-ethylene glycol (TEG)"
  modified_base (1)..(1): bicyclic nucleic acid (BNA)
  modified_base (2)..(2): bicyclic nucleic acid (BNA)
ctguccaag

SEQ ID NO: 8366 - DNA, 8 bp, Artificial Sequence
  source: /note="Description of Artificial Sequence: Synthetic oligonucleotide"
  source: /note="Description of Combined DNA/RNA Molecule: Synthetic oligonucleotide"
  source: /note="DNA/RNA"
  source: /note="5' tri-ethylene glycol (TEG)"
  modified_base (1)..(1): bicyclic nucleic acid (BNA)
  modified_base (2)..(2): bicyclic nucleic acid (BNA)
ctguccaa

SEQ ID NO: 8367 - DNA, 20 bp, Artificial Sequence
  source: /note="Description of Artificial Sequence: Synthetic oligonucleotide"
  source: /note="Description of Combined DNA/RNA Molecule: Synthetic oligonucleotide"
  source: /note="DNA/RNA"
  source: /note="5' tri-ethylene glycol (TEG)"
  modified_base (1)..(1): bicyclic nucleic acid (BNA)
  modified_base (2)..(2): bicyclic nucleic acid (BNA)
gtucuguccaagcccgguug

SEQ ID NO: 8368 - DNA, 19 bp, Artificial Sequence
  source: /note="Description of Artificial Sequence: Synthetic oligonucleotide"
  source: /note="Description of Combined DNA/RNA Molecule: Synthetic oligonucleotide"
  source: /note="DNA/RNA"
  source: /note="5' tri-ethylene glycol (TEG)"
  modified_base (1)..(1): bicyclic nucleic acid (BNA)
  modified_base (2)..(2): bicyclic nucleic acid (BNA)
gtucuguccaagcccgguu

SEQ ID NO: 8369 - DNA, 18 bp, Artificial Sequence
  source: /note="Description of Artificial Sequence: Synthetic oligonucleotide"
  source: /note="Description of Combined DNA/RNA Molecule: Synthetic oligonucleotide"
  source: /note="DNA/RNA"
  source: /note="5' tri-ethylene glycol (TEG)"
  modified_base (1)..(1): bicyclic nucleic acid (BNA)
  modified_base (2)..(2): bicyclic nucleic acid (BNA)
gtucuguccaagcccggu

SEQ ID NO: 8370 - DNA, 17 bp, Artificial Sequence
  source: /note="Description of Artificial Sequence: Synthetic oligonucleotide"
  source: /note="Description of Combined DNA/RNA Molecule: Synthetic oligonucleotide"
  source: /note="DNA/RNA"
  source: /note="5' tri-ethylene glycol (TEG)"
  modified_base (1)..(1): bicyclic nucleic acid (BNA)
  modified_base (2)..(2): bicyclic nucleic acid (BNA)
gtucuguccaagcccgg

SEQ ID NO: 8371 - DNA, 16 bp, Artificial Sequence
  source: /note="Description of Artificial Sequence: Synthetic oligonucleotide"
  source: /note="Description of Combined DNA/RNA Molecule: Synthetic oligonucleotide"
  source: /note="DNA/RNA"
  source: /note="5' tri-ethylene glycol (TEG)"
  modified_base (1)..(1): bicyclic nucleic acid (BNA)
  modified_base (2)..(2): bicyclic nucleic acid (BNA)
gtucuguccaagcccg

SEQ ID NO: 8372 - DNA, 15 bp, Artificial Sequence
  source: /note="Description of Artificial Sequence: Synthetic oligonucleotide"
  source: /note="Description of Combined DNA/RNA Molecule: Synthetic oligonucleotide"
  source: /note="DNA/RNA"
  source: /note="5' tri-ethylene glycol (TEG)"
  modified_base (1)..(1): bicyclic nucleic acid (BNA)
  modified_base (2)..(2): bicyclic nucleic acid (BNA)
gtucuguccaagccc

SEQ ID NO: 8373 - DNA, 14 bp, Artificial Sequence
  source: /note="Description of Artificial Sequence: Synthetic oligonucleotide"
  source: /note="Description of Combined DNA/RNA Molecule: Synthetic oligonucleotide"
  source: /note="DNA/RNA"
  source: /note="5' tri-ethylene glycol (TEG)"
  modified_base (1)..(1): bicyclic nucleic acid (BNA)
  modified_base (2)..(2): bicyclic nucleic acid (BNA)
gtucuguccaagcc

SEQ ID NO: 8374 - DNA, 13 bp, Artificial Sequence
  source: /note="Description of Artificial Sequence: Synthetic oligonucleotide"
  source: /note="Description of Combined DNA/RNA Molecule: Synthetic oligonucleotide"
  source: /note="DNA/RNA"
  source: /note="5' tri-ethylene glycol (TEG)"
  modified_base (1)..(1): bicyclic nucleic acid (BNA)
  modified_base (2)..(2): bicyclic nucleic acid (BNA)
gtucuguccaagc

SEQ ID NO: 8375 - DNA, 12 bp, Artificial Sequence
  source: /note="Description of Artificial Sequence: Synthetic oligonucleotide"
  source: /note="Description of Combined DNA/RNA Molecule: Synthetic oligonucleotide"
  source: /note="DNA/RNA"
  source: /note="5' tri-ethylene glycol (TEG)"
  modified_base (1)..(1): bicyclic nucleic acid (BNA)
  modified_base (2)..(2): bicyclic nucleic acid (BNA)
gtucuguccaag

SEQ ID NO: 8376 - DNA, 11 bp, Artificial Sequence
  source: /note="Description of Artificial Sequence: Synthetic oligonucleotide"
  source: /note="Description of Combined DNA/RNA Molecule: Synthetic oligonucleotide"
  source: /note="DNA/RNA"
  source: /note="5' tri-ethylene glycol (TEG)"
  modified_base (1)..(1): bicyclic nucleic acid (BNA)
  modified_base (2)..(2): bicyclic nucleic acid (BNA)
gtucuguccaa

SEQ ID NO: 8377 - DNA, 10 bp, Artificial Sequence
  source: /note="Description of Artificial Sequence: Synthetic oligonucleotide"
  source: /note="Description of Combined DNA/RNA Molecule: Synthetic oligonucleotide"
  source: /note="DNA/RNA"
  source: /note="5' tri-ethylene glycol (TEG)"
  modified_base (1)..(1): bicyclic nucleic acid (BNA)
  modified_base (2)..(2): bicyclic nucleic acid (BNA)
gtucugucca

SEQ ID NO: 8378 - DNA, 9 bp, Artificial Sequence
  source: /note="Description of Artificial Sequence: Synthetic oligonucleotide"
  source: /note="Description of Combined DNA/RNA Molecule: Synthetic oligonucleotide"
  source: /note="DNA/RNA"
  source: /note="5' tri-ethylene glycol (TEG)"
  modified_base (1)..(1): bicyclic nucleic acid (BNA)
  modified_base (2)..(2): bicyclic nucleic acid (BNA)
gtucugucc

SEQ ID NO: 8379 - DNA, 8 bp, Artificial Sequence
  source: /note="Description of Artificial Sequence: Synthetic oligonucleotide"
  source: /note="Description of Combined DNA/RNA Molecule: Synthetic oligonucleotide"
  source: /note="DNA/RNA"
  source: /note="5' tri-ethylene glycol (TEG)"
  modified_base (1)..(1): bicyclic nucleic acid (BNA)
  modified_base (2)..(2): bicyclic nucleic acid (BNA)
gtucuguc

SEQ ID NO: 8380 - RNA, 20 nt, Artificial Sequence
  source: /note="Description of Artificial Sequence: Synthetic oligonucleotide"
  source: /note="RNA"
  source: /note="5' tri-ethylene glycol (TEG)"
  modified_base (1)..(1): bicyclic nucleic acid (BNA)
  modified_base (2)..(2): bicyclic nucleic acid (BNA)
aguucuguccaagcccgguu

SEQ ID NO: 8381 - RNA, 19 nt, Artificial Sequence
  source: /note="Description of Artificial Sequence: Synthetic oligonucleotide"
  source: /note="RNA"
  source: /note="5' tri-ethylene glycol (TEG)"
  modified_base (1)..(1): bicyclic nucleic acid (BNA)
  modified_base (2)..(2): bicyclic nucleic acid (BNA)
aguucuguccaagcccggu

SEQ ID NO: 8382 - RNA, 18 nt, Artificial Sequence
  source: /note="Description of Artificial Sequence: Synthetic oligonucleotide"
  source: /note="RNA"
  source: /note="5' tri-ethylene glycol (TEG)"
  modified_base (1)..(1): bicyclic nucleic acid (BNA)
  modified_base (2)..(2): bicyclic nucleic acid (BNA)
aguucuguccaagcccgg

SEQ ID NO: 8383 - RNA, 17 nt, Artificial Sequence
  source: /note="Description of Artificial Sequence: Synthetic oligonucleotide"
  source: /note="RNA"
  source: /note="5' tri-ethylene glycol (TEG)"
  modified_base (1)..(1): bicyclic nucleic acid (BNA)
  modified_base (2)..(2): bicyclic nucleic acid (BNA)
aguucuguccaagcccg

SEQ ID NO: 8384 - RNA, 16 nt, Artificial Sequence
  source: /note="Description of Artificial Sequence: Synthetic oligonucleotide"
  source: /note="RNA"
  source: /note="5' tri-ethylene glycol (TEG)"
  modified_base (1)..(1): bicyclic nucleic acid (BNA)
  modified_base (2)..(2): bicyclic nucleic acid (BNA)
aguucuguccaagccc

SEQ ID NO: 8385 - RNA, 15 nt, Artificial Sequence
  source: /note="Description of Artificial Sequence: Synthetic oligonucleotide"
  source: /note="RNA"
  source: /note="5' tri-ethylene glycol (TEG)"
  modified_base (1)..(1): bicyclic nucleic acid (BNA)
  modified_base (2)..(2): bicyclic nucleic acid (BNA)
aguucuguccaagcc

SEQ ID NO: 8386 - RNA, 14 nt, Artificial Sequence
  source: /note="Description of Artificial Sequence: Synthetic oligonucleotide"
  source: /note="RNA"
  source: /note="5' tri-ethylene glycol (TEG)"
  modified_base (1)..(1): bicyclic nucleic acid (BNA)
  modified_base (2)..(2): bicyclic nucleic acid (BNA)
aguucuguccaagc

SEQ ID NO: 8387 - RNA, 13 nt, Artificial Sequence
  source: /note="Description of Artificial Sequence: Synthetic oligonucleotide"
  source: /note="RNA"
  source: /note="5' tri-ethylene glycol (TEG)"
  modified_base (1)..(1): bicyclic nucleic acid (BNA)
  modified_base (2)..(2): bicyclic nucleic acid (BNA)
aguucuguccaag

SEQ ID NO: 8388 - RNA, 12 nt, Artificial Sequence
  source: /note="Description of Artificial Sequence: Synthetic oligonucleotide"
  source: /note="RNA"
  source: /note="5' tri-ethylene glycol (TEG)"
  modified_base (1)..(1): bicyclic nucleic acid (BNA)
  modified_base (2)..(2): bicyclic nucleic acid (BNA)
aguucuguccaa

SEQ ID NO: 8389 - RNA, 11 nt, Artificial Sequence
  source: /note="Description of Artificial Sequence: Synthetic oligonucleotide"
  source: /note="RNA"
  source: /note="5' tri-ethylene glycol (TEG)"
  modified_base (1)..(1): bicyclic nucleic acid (BNA)
  modified_base (2)..(2): bicyclic nucleic acid (BNA)
aguucugucca

SEQ ID NO: 8390 - RNA, 10 nt, Artificial Sequence
  source: /note="Description of Artificial Sequence: Synthetic oligonucleotide"
  source: /note="RNA"
  source: /note="5' tri-ethylene glycol (TEG)"
  modified_base (1)..(1): bicyclic nucleic acid (BNA)
  modified_base (2)..(2): bicyclic nucleic acid (BNA)
aguucugucc

SEQ ID NO: 8391 - RNA, 9 nt, Artificial Sequence
  source: /note="Description of Artificial Sequence: Synthetic oligonucleotide"
  source: /note="RNA"
  source: /note="5' tri-ethylene glycol (TEG)"
  modified_base (1)..(1): bicyclic nucleic acid (BNA)
  modified_base (2)..(2): bicyclic nucleic acid (BNA)
aguucuguc

SEQ ID NO: 8392 - RNA, 8 nt, Artificial Sequence
  source: /note="Description of Artificial Sequence: Synthetic oligonucleotide"
  source: /note="RNA"
  source: /note="5' tri-ethylene glycol (TEG)"
  modified_base (1)..(1): bicyclic nucleic acid (BNA)
  modified_base (2)..(2): bicyclic nucleic acid (BNA)
aguucugu

SEQ ID NO: 8393 - RNA, 20 nt, Artificial Sequence
  source: /note="Description of Artificial Sequence: Synthetic oligonucleotide"
  source: /note="RNA"
  source: /note="5' tri-ethylene glycol (TEG)"
  modified_base (1)..(1): bicyclic nucleic acid (BNA)
  modified_base (2)..(2): bicyclic nucleic acid (BNA)
aaguucuguccaagcccggu

SEQ ID NO: 8394 - RNA, 19 nt, Artificial Sequence
  source: /note="Description of Artificial Sequence: Synthetic oligonucleotide"
  source: /note="RNA"
  source: /note="5' tri-ethylene glycol (TEG)"
  modified_base (1)..(1): bicyclic nucleic acid (BNA)
  modified_base (2)..(2): bicyclic nucleic acid (BNA)
aaguucuguccaagcccgg

SEQ ID NO: 8395 - RNA, 18 nt, Artificial Sequence
  source: /note="Description of Artificial Sequence: Synthetic oligonucleotide"
  source: /note="RNA"
  source: /note="5' tri-ethylene glycol (TEG)"
  modified_base (1)..(1): bicyclic nucleic acid (BNA)
  modified_base (2)..(2): bicyclic nucleic acid (BNA)
aaguucuguccaagcccg

SEQ ID NO: 8396 - RNA, 17 nt, Artificial Sequence
  source: /note="Description of Artificial Sequence: Synthetic oligonucleotide"
  source: /note="RNA"
  source: /note="5' tri-ethylene glycol (TEG)"
  modified_base (1)..(1): bicyclic nucleic acid (BNA)
  modified_base (2)..(2): bicyclic nucleic acid (BNA)
aaguucuguccaagccc

SEQ ID NO: 8397 - RNA, 16 nt, Artificial Sequence
  source: /note="Description of Artificial Sequence: Synthetic oligonucleotide"
  source: /note="RNA"
  source: /note="5' tri-ethylene glycol (TEG)"
  modified_base (1)..(1): bicyclic nucleic acid (BNA)
  modified_base (2)..(2): bicyclic nucleic acid (BNA)
aaguucuguccaagcc

SEQ ID NO: 8398 - RNA, 15 nt, Artificial Sequence
  source: /note="Description of Artificial Sequence: Synthetic oligonucleotide"
  source: /note="RNA"
  source: /note="5' tri-ethylene glycol (TEG)"
  modified_base (1)..(1): bicyclic nucleic acid (BNA)
  modified_base (2)..(2): bicyclic nucleic acid (BNA)
aaguucuguccaagc

SEQ ID NO: 8399 - RNA, 14 nt, Artificial Sequence
  source: /note="Description of Artificial Sequence: Synthetic oligonucleotide"
  source: /note="RNA"
  source: /note="5' tri-ethylene glycol (TEG)"
  modified_base (1)..(1): bicyclic nucleic acid (BNA)
  modified_base (2)..(2): bicyclic nucleic acid (BNA)
aaguucuguccaag

SEQ ID NO: 8400 - RNA, 13 nt, Artificial Sequence
  source: /note="Description of Artificial Sequence: Synthetic oligonucleotide"
  source: /note="RNA"
  source: /note="5' tri-ethylene glycol (TEG)"
  modified_base (1)..(1): bicyclic nucleic acid (BNA)
  modified_base (2)..(2): bicyclic nucleic acid (BNA)
aaguucuguccaa

SEQ ID NO: 8401 - RNA, 12 nt, Artificial Sequence
  source: /note="Description of Artificial Sequence: Synthetic oligonucleotide"
  source: /note="RNA"
  source: /note="5' tri-ethylene glycol (TEG)"
  modified_base (1)..(1): bicyclic nucleic acid (BNA)
  modified_base (2)..(2): bicyclic nucleic acid (BNA)
aaguucugucca

SEQ ID NO: 8402 - RNA, 11 nt, Artificial Sequence
  source: /note="Description of Artificial Sequence: Synthetic oligonucleotide"
  source: /note="RNA"
  source: /note="5' tri-ethylene glycol (TEG)"
  modified_base (1)..(1): bicyclic nucleic acid (BNA)
  modified_base (2)..(2): bicyclic nucleic acid (BNA)
aaguucugucc

SEQ ID NO: 8403 - RNA, 10 nt, Artificial Sequence
  source: /note="Description of Artificial Sequence: Synthetic oligonucleotide"
  source: /note="RNA"
  source: /note="5' tri-ethylene glycol (TEG)"
  modified_base (1)..(1): bicyclic nucleic acid (BNA)
  modified_base (2)..(2): bicyclic nucleic acid (BNA)
aaguucuguc

SEQ ID NO: 8404 - RNA, 9 nt, Artificial Sequence
  source: /note="Description of Artificial Sequence: Synthetic oligonucleotide"
  source: /note="RNA"
  source: /note="5' tri-ethylene glycol (TEG)"
  modified_base (1)..(1): bicyclic nucleic acid (BNA)
  modified_base (2)..(2): bicyclic nucleic acid (BNA)
aaguucugu

SEQ ID NO: 8405 - RNA, 8 nt, Artificial Sequence
  source: /note="Description of Artificial Sequence: Synthetic oligonucleotide"
  source: /note="RNA"
  source: /note="5' tri-ethylene glycol (TEG)"
  modified_base (1)..(1): bicyclic nucleic acid (BNA)
  modified_base (2)..(2): bicyclic nucleic acid (BNA)
aaguucug

SEQ ID NO: 8406 - DNA, 20 bp, Artificial Sequence
  source: /note="Description of Artificial Sequence: Synthetic oligonucleotide"
  source: /note="Description of Combined DNA/RNA Molecule: Synthetic oligonucleotide"
  source: /note="DNA/RNA"
  source: /note="5' tri-ethylene glycol (TEG)"
  modified_base (1)..(1): bicyclic nucleic acid (BNA)
  modified_base (2)..(2): bicyclic nucleic acid (BNA)
taaguucuguccaagcccgg

SEQ ID NO: 8407 - DNA, 19 bp, Artificial Sequence
  source: /note="Description of Artificial Sequence: Synthetic oligonucleotide"
  source: /note="Description of Combined DNA/RNA Molecule: Synthetic oligonucleotide"
  source: /note="DNA/RNA"
  source: /note="5' tri-ethylene glycol (TEG)"
  modified_base (1)..(1): bicyclic nucleic acid (BNA)
  modified_base (2)..(2): bicyclic nucleic acid (BNA)
taaguucuguccaagcccg

SEQ ID NO: 8408 - DNA, 18 bp, Artificial Sequence
  source: /note="Description of Artificial Sequence: Synthetic oligonucleotide"
  source: /note="Description of Combined DNA/RNA Molecule: Synthetic oligonucleotide"
  source: /note="DNA/RNA"
  source: /note="5' tri-ethylene glycol (TEG)"
  modified_base (1)..(1): bicyclic nucleic acid (BNA)
  modified_base (2)..(2): bicyclic nucleic acid (BNA)
taaguucuguccaagccc

SEQ ID NO: 8409 - DNA, 17 bp, Artificial Sequence
  source: /note="Description of Artificial Sequence: Synthetic oligonucleotide"
  source: /note="Description of Combined DNA/RNA Molecule: Synthetic oligonucleotide"
  source: /note="DNA/RNA"
  source: /note="5' tri-ethylene glycol (TEG)"
  modified_base (1)..(1): bicyclic nucleic acid (BNA)
  modified_base (2)..(2): bicyclic nucleic acid (BNA)
taaguucuguccaagcc

SEQ ID NO: 8410 - DNA, 16 bp, Artificial Sequence
  source: /note="Description of Artificial Sequence: Synthetic oligonucleotide"
  source: /note="Description of Combined DNA/RNA Molecule: Synthetic oligonucleotide"
  source: /note="DNA/RNA"
  source: /note="5' tri-ethylene glycol (TEG)"
  modified_base (1)..(1): bicyclic nucleic acid (BNA)
  modified_base (2)..(2): bicyclic nucleic acid (BNA)
taaguucuguccaagc

SEQ ID NO: 8411 - DNA, 14 bp, Artificial Sequence
  source: /note="Description of Artificial Sequence: Synthetic oligonucleotide"
  source: /note="Description of Combined DNA/RNA Molecule: Synthetic oligonucleotide"
  source: /note="DNA/RNA"
  source: /note="5' tri-ethylene glycol (TEG)"
  modified_base (1)..(1): bicyclic nucleic acid (BNA)
  modified_base (2)..(2): bicyclic nucleic acid (BNA)
taaguucuguccaa

SEQ ID NO: 8412 - DNA, 13 bp, Artificial Sequence
  source: /note="Description of Artificial Sequence: Synthetic oligonucleotide"
  source: /note="Description of Combined DNA/RNA Molecule: Synthetic oligonucleotide"
  source: /note="DNA/RNA"
  source: /note="5' tri-ethylene glycol (TEG)"
  modified_base (1)..(1): bicyclic nucleic acid (BNA)
  modified_base (2)..(2): bicyclic nucleic acid (BNA)
taaguucugucca

SEQ ID NO: 8413 - DNA, 12 bp, Artificial Sequence
  source: /note="Description of Artificial Sequence: Synthetic oligonucleotide"
  source: /note="Description of Combined DNA/RNA Molecule: Synthetic oligonucleotide"
  source: /note="DNA/RNA"
  source: /note="5' tri-ethylene glycol (TEG)"
  modified_base (1)..(1): bicyclic nucleic acid (BNA)
  modified_base (2)..(2): bicyclic nucleic acid (BNA)
taaguucugucc

SEQ ID NO: 8414 - DNA, 11 bp, Artificial Sequence
  source: /note="Description of Artificial Sequence: Synthetic oligonucleotide"
  source: /note="Description of Combined DNA/RNA Molecule: Synthetic oligonucleotide"
  source: /note="DNA/RNA"
  source: /note="5' tri-ethylene glycol (TEG)"
  modified_base (1)..(1): bicyclic nucleic acid (BNA)
  modified_base (2)..(2): bicyclic nucleic acid (BNA)
taaguucuguc

SEQ ID NO: 8415 - DNA, 10 bp, Artificial Sequence
  source: /note="Description of Artificial Sequence: Synthetic oligonucleotide"
  source: /note="Description of Combined DNA/RNA Molecule: Synthetic oligonucleotide"
  source: /note="DNA/RNA"
  source: /note="5' tri-ethylene glycol (TEG)"
  modified_base (1)..(1): bicyclic nucleic acid (BNA)
  modified_base (2)..(2): bicyclic nucleic acid (BNA)
taaguucugu

SEQ ID NO: 8416 - DNA, 9 bp, Artificial Sequence
  source: /note="Description of Artificial Sequence: Synthetic oligonucleotide"
  source: /note="Description of Combined DNA/RNA Molecule: Synthetic oligonucleotide"
  source: /note="DNA/RNA"
  source: /note="5' tri-ethylene glycol (TEG)"
  modified_base (1)..(1): bicyclic nucleic acid (BNA)
  modified_base (2)..(2): bicyclic nucleic acid (BNA)
taaguucug

SEQ ID NO: 8417 - DNA, 8 bp, Artificial Sequence
  source: /note="Description of Artificial Sequence: Synthetic oligonucleotide"
  source: /note="Description of Combined DNA/RNA Molecule: Synthetic oligonucleotide"
  source: /note="DNA/RNA"
  source: /note="5' tri-ethylene glycol (TEG)"
  modified_base (1)..(1): bicyclic nucleic acid (BNA)
  modified_base (2)..(2): bicyclic nucleic acid (BNA)
taaguucu

SEQ ID NO: 8418 - DNA, 20 bp, Artificial Sequence
  source: /note="Description of Artificial Sequence: Synthetic oligonucleotide"
  source: /note="Description of Combined DNA/RNA Molecule: Synthetic oligonucleotide"
  source: /note="DNA/RNA"
  source: /note="5' tri-ethylene glycol (TEG)"
  modified_base (1)..(1): bicyclic nucleic acid (BNA)
  modified_base (2)..(2): bicyclic nucleic acid (BNA)
gtaaguucuguccaagcccg

SEQ ID NO: 8419 - DNA, 19 bp, Artificial Sequence
  source: /note="Description of Artificial Sequence: Synthetic oligonucleotide"
  source: /note="Description of Combined DNA/RNA Molecule: Synthetic oligonucleotide"
  source: /note="DNA/RNA"
  source: /note="5' tri-ethylene glycol (TEG)"
  modified_base (1)..(1): bicyclic nucleic acid (BNA)
  modified_base (2)..(2): bicyclic nucleic acid (BNA)
gtaaguucuguccaagccc

SEQ ID NO: 8420 - DNA, 17 bp, Artificial Sequence
  source: /note="Description of Artificial Sequence: Synthetic oligonucleotide"
  source: /note="Description of Combined DNA/RNA Molecule: Synthetic oligonucleotide"
  source: /note="DNA/RNA"
  source: /note="5' tri-ethylene glycol (TEG)"
  modified_base (1)..(1): bicyclic nucleic acid (BNA)
  modified_base (2)..(2): bicyclic nucleic acid (BNA)
gtaaguucuguccaagc

SEQ ID NO: 8421 - DNA, 16 bp, Artificial Sequence
  source: /note="Description of Artificial Sequence: Synthetic oligonucleotide"
  source: /note="Description of Combined DNA/RNA Molecule: Synthetic oligonucleotide"
  source: /note="DNA/RNA"
  source: /note="5' tri-ethylene glycol (TEG)"
  modified_base (1)..(1): bicyclic nucleic acid (BNA)
  modified_base (2)..(2): bicyclic nucleic acid (BNA)
gtaaguucuguccaag

SEQ ID NO: 8422 - DNA, 15 bp, Artificial Sequence
  source: /note="Description of Artificial Sequence: Synthetic oligonucleotide"
  source: /note="Description of Combined DNA/RNA Molecule: Synthetic oligonucleotide"
  source: /note="DNA/RNA"
  source: /note="5' tri-ethylene glycol (TEG)"
  modified_base (1)..(1): bicyclic nucleic acid (BNA)
  modified_base (2)..(2): bicyclic nucleic acid (BNA)
gtaaguucuguccaa

SEQ ID NO: 8423 - DNA, 14 bp, Artificial Sequence
  source: /note="Description of Artificial Sequence: Synthetic oligonucleotide"
  source: /note="Description of Combined DNA/RNA Molecule: Synthetic oligonucleotide"
  source: /note="DNA/RNA"
  source: /note="5' tri-ethylene glycol (TEG)"
  modified_base (1)..(1): bicyclic nucleic acid (BNA)
  modified_base (2)..(2): bicyclic nucleic acid (BNA)
gtaaguucugucca

SEQ ID NO: 8424 - DNA, 13 bp, Artificial Sequence
  source: /note="Description of Artificial Sequence: Synthetic oligonucleotide"
  source: /note="Description of Combined DNA/RNA Molecule: Synthetic oligonucleotide"
  source: /note="DNA/RNA"
  source: /note="5' tri-ethylene glycol (TEG)"
  modified_base (1)..(1): bicyclic nucleic acid (BNA)
  modified_base (2)..(2): bicyclic nucleic acid (BNA)
gtaaguucugucc

SEQ ID NO: 8425 - DNA, 12 bp, Artificial Sequence
  source: /note="Description of Artificial Sequence: Synthetic oligonucleotide"
  source: /note="Description of Combined DNA/RNA Molecule: Synthetic oligonucleotide"
  source: /note="DNA/RNA"
  source: /note="5' tri-ethylene glycol (TEG)"
  modified_base (1)..(1): bicyclic nucleic acid (BNA)
  modified_base (2)..(2): bicyclic nucleic acid (BNA)
gtaaguucuguc

SEQ ID NO: 8426 - DNA, 11 bp, Artificial Sequence
  source: /note="Description of Artificial Sequence: Synthetic oligonucleotide"
  source: /note="Description of Combined DNA/RNA Molecule: Synthetic oligonucleotide"
  source: /note="DNA/RNA"
  source: /note="5' tri-ethylene glycol (TEG)"
  modified_base (1)..(1): bicyclic nucleic acid (BNA)
  modified_base (2)..(2): bicyclic nucleic acid (BNA)
gtaaguucugu

SEQ ID NO: 8427 - DNA, 10 bp, Artificial Sequence
  source: /note="Description of Artificial Sequence: Synthetic oligonucleotide"
  source: /note="Description of Combined DNA/RNA Molecule: Synthetic oligonucleotide"
  source: /note="DNA/RNA"
  source: /note="5' tri-ethylene glycol (TEG)"
  modified_base (1)..(1): bicyclic nucleic acid (BNA)
  modified_base (2)..(2): bicyclic nucleic acid (BNA)
gtaaguucug

SEQ ID NO: 8428 - DNA, 9 bp, Artificial Sequence
  source: /note="Description of Artificial Sequence: Synthetic oligonucleotide"
  source: /note="Description of Combined DNA/RNA Molecule: Synthetic oligonucleotide"
  source: /note="DNA/RNA"
  source: /note="5' tri-ethylene glycol (TEG)"
  modified_base (1)..(1): bicyclic nucleic acid (BNA)
  modified_base (2)..(2): bicyclic nucleic acid (BNA)
gtaaguucu

SEQ ID NO: 8429 - DNA, 8 bp, Artificial Sequence
  source: /note="Description of Artificial Sequence: Synthetic oligonucleotide"
  source: /note="Description of Combined DNA/RNA Molecule: Synthetic oligonucleotide"
  source: /note="DNA/RNA"
  source: /note="5' tri-ethylene glycol (TEG)"
  modified_base (1)..(1): bicyclic nucleic acid (BNA)
  modified_base (2)..(2): bicyclic nucleic acid (BNA)
gtaaguuc

SEQ ID NO: 8430 - RNA, 20 nt, Artificial Sequence
  source: /note="Description of Artificial Sequence: Synthetic oligonucleotide"
  source: /note="RNA"
  source: /note="5' tri-ethylene glycol (TEG)"
  modified_base (1)..(1): bicyclic nucleic acid (BNA)
  modified_base (2)..(2): bicyclic nucleic acid (BNA)
gguaaguucuguccaagccc

SEQ ID NO: 8431 - RNA, 19 nt, Artificial Sequence
  source: /note="Description of Artificial Sequence: Synthetic oligonucleotide"
  source: /note="RNA"
  source: /note="5' tri-ethylene glycol (TEG)"
  modified_base (1)..(1): bicyclic nucleic acid (BNA)
  modified_base (2)..(2): bicyclic nucleic acid (BNA)
gguaaguucuguccaagcc

SEQ ID NO: 8432 - RNA, 17 nt, Artificial Sequence
  source: /note="Description of Artificial Sequence: Synthetic oligonucleotide"
  source: /note="RNA"
  source: /note="5' tri-ethylene glycol (TEG)"
  modified_base (1)..(1): bicyclic nucleic acid (BNA)
  modified_base (2)..(2): bicyclic nucleic acid (BNA)
gguaaguucuguccaag

SEQ ID NO: 8433 - RNA, 16 nt, Artificial Sequence
  source: /note="Description of Artificial Sequence: Synthetic oligonucleotide"
  source: /note="RNA"
  source: /note="5' tri-ethylene glycol (TEG)"
  modified_base (1)..(1): bicyclic nucleic acid (BNA)
  modified_base (2)..(2): bicyclic nucleic acid (BNA)
gguaaguucuguccaa

SEQ ID NO: 8434 - RNA, 15 nt, Artificial Sequence
  source: /note="Description of Artificial Sequence: Synthetic oligonucleotide"
  source: /note="RNA"
  source: /note="5' tri-ethylene glycol (TEG)"
  modified_base (1)..(1): bicyclic nucleic acid (BNA)
  modified_base (2)..(2): bicyclic nucleic acid (BNA)
gguaaguucugucca

SEQ ID NO: 8435 - RNA, 14 nt, Artificial Sequence
  source: /note="Description of Artificial Sequence: Synthetic oligonucleotide"
  source: /note="RNA"
  source: /note="5' tri-ethylene glycol (TEG)"
  modified_base (1)..(1): bicyclic nucleic acid (BNA)
  modified_base (2)..(2): bicyclic nucleic acid (BNA)
gguaaguucugucc

SEQ ID NO: 8436 - RNA, 13 nt, Artificial Sequence
  source: /note="Description of Artificial Sequence: Synthetic oligonucleotide"
  source: /note="RNA"
  source: /note="5' tri-ethylene glycol (TEG)"
  modified_base (1)..(1): bicyclic nucleic acid (BNA)
  modified_base (2)..(2): bicyclic nucleic acid (BNA)
gguaaguucuguc

SEQ ID NO: 8437 - RNA, 12 nt, Artificial Sequence
  source: /note="Description of Artificial Sequence: Synthetic oligonucleotide"
  source: /note="RNA"
  source: /note="5' tri-ethylene glycol (TEG)"
  modified_base (1)..(1): bicyclic nucleic acid (BNA)
  modified_base (2)..(2): bicyclic nucleic acid (BNA)
gguaaguucugu

SEQ ID NO: 8438 - RNA, 11 nt, Artificial Sequence
  source: /note="Description of Artificial Sequence: Synthetic oligonucleotide"
  source: /note="RNA"
  source: /note="5' tri-ethylene glycol (TEG)"
  modified_base (1)..(1): bicyclic nucleic acid (BNA)
  modified_base (2)..(2): bicyclic nucleic acid (BNA)
gguaaguucug

SEQ ID NO: 8439 - RNA, 10 nt, Artificial Sequence
  source: /note="Description of Artificial Sequence: Synthetic oligonucleotide"
  source: /note="RNA"
  source: /note="5' tri-ethylene glycol (TEG)"
  modified_base (1)..(1): bicyclic nucleic acid (BNA)
  modified_base (2)..(2): bicyclic nucleic acid (BNA)
gguaaguucu

SEQ ID NO: 8440 - RNA, 9 nt, Artificial Sequence
  source: /note="Description of Artificial Sequence: Synthetic oligonucleotide"
  source: /note="RNA"
  source: /note="5' tri-ethylene glycol (TEG)"
  modified_base (1)..(1): bicyclic nucleic acid (BNA)
  modified_base (2)..(2): bicyclic nucleic acid (BNA)
gguaaguuc

SEQ ID NO: 8441 - RNA, 8 nt, Artificial Sequence
  source: /note="Description of Artificial Sequence: Synthetic oligonucleotide"
  source: /note="RNA"
  source: /note="5' tri-ethylene glycol (TEG)"
  modified_base (1)..(1): bicyclic nucleic acid (BNA)
  modified_base (2)..(2): bicyclic nucleic acid (BNA)
gguaaguu

SEQ ID NO: 8442 - RNA, 20 nt, Artificial Sequence
  source: /note="Description of Artificial Sequence: Synthetic oligonucleotide"
  source: /note="RNA"
  source: /note="5' tri-ethylene glycol (TEG)"
  modified_base (1)..(1): bicyclic nucleic acid (BNA)
  modified_base (2)..(2): bicyclic nucleic acid (BNA)
cgguaaguucuguccaagcc

SEQ ID NO: 8443 - RNA, 19 nt, Artificial Sequence
  source: /note="Description of Artificial Sequence: Synthetic oligonucleotide"
  source: /note="RNA"
  source: /note="5' tri-ethylene glycol (TEG)"
  modified_base (1)..(1): bicyclic nucleic acid (BNA)
  modified_base (2)..(2): bicyclic nucleic acid (BNA)
cgguaaguucuguccaagc

SEQ ID NO: 8444 - RNA, 18 nt, Artificial Sequence
  source: /note="Description of Artificial Sequence: Synthetic oligonucleotide"
  source: /note="RNA"
  source: /note="5' tri-ethylene glycol (TEG)"
  modified_base (1)..(1): bicyclic nucleic acid (BNA)
  modified_base (2)..(2): bicyclic nucleic acid (BNA)
cgguaaguucuguccaag

SEQ ID NO: 8445 - RNA, 17 nt, Artificial Sequence
  source: /note="Description of Artificial Sequence: Synthetic oligonucleotide"
  source: /note="RNA"
  source: /note="5' tri-ethylene glycol (TEG)"
  modified_base (1)..(1): bicyclic nucleic acid (BNA)
  modified_base (2)..(2): bicyclic nucleic acid (BNA)
cgguaaguucuguccaa

SEQ ID NO: 8446 - RNA, 16 nt, Artificial Sequence
  source: /note="Description of Artificial Sequence: Synthetic oligonucleotide"
  source: /note="RNA"
  source: /note="5' tri-ethylene glycol (TEG)"
  modified_base (1)..(1): bicyclic nucleic acid (BNA)
  modified_base (2)..(2): bicyclic nucleic acid (BNA)
cgguaaguucugucca

SEQ ID NO: 8447 - RNA, 15 nt, Artificial Sequence
  source: /note="Description of Artificial Sequence: Synthetic oligonucleotide"
  source: /note="RNA"
  source: /note="5' tri-ethylene glycol (TEG)"
  modified_base (1)..(1): bicyclic nucleic acid (BNA)
  modified_base (2)..(2): bicyclic nucleic acid (BNA)
cgguaaguucugucc

SEQ ID NO: 8448 - RNA, 14 nt, Artificial Sequence
  source: /note="Description of Artificial Sequence: Synthetic oligonucleotide"
  source: /note="RNA"
  source: /note="5' tri-ethylene glycol (TEG)"
  modified_base (1)..(1): bicyclic nucleic acid (BNA)
  modified_base (2)..(2): bicyclic nucleic acid (BNA)
cgguaaguucuguc

SEQ ID NO: 8449 - RNA, 13 nt, Artificial Sequence
  source: /note="Description of Artificial Sequence: Synthetic oligonucleotide"
  source: /note="RNA"
  source: /note="5' tri-ethylene glycol (TEG)"
  modified_base (1)..(1): bicyclic nucleic acid (BNA)
  modified_base (2)..(2): bicyclic nucleic acid (BNA)
cgguaaguucugu

SEQ ID NO: 8450 - RNA, 12 nt, Artificial Sequence
  source: /note="Description of Artificial Sequence: Synthetic oligonucleotide"
  source: /note="RNA"
  source: /note="5' tri-ethylene glycol (TEG)"
  modified_base (1)..(1): bicyclic nucleic acid (BNA)
  modified_base (2)..(2): bicyclic nucleic acid (BNA)
cgguaaguucug

SEQ ID NO: 8451 - RNA, 11 nt, Artificial Sequence
  source: /note="Description of Artificial Sequence: Synthetic oligonucleotide"
  source: /note="RNA"
  source: /note="5' tri-ethylene glycol (TEG)"
  modified_base (1)..(1): bicyclic nucleic acid (BNA)
  modified_base (2)..(2): bicyclic nucleic acid (BNA)
cgguaaguucu

SEQ ID NO: 8452 - RNA, 10 nt, Artificial Sequence
  source: /note="Description of Artificial Sequence: Synthetic oligonucleotide"
  source: /note="RNA"
  source: /note="5' tri-ethylene glycol (TEG)"
  modified_base (1)..(1): bicyclic nucleic acid (BNA)
  modified_base (2)..(2): bicyclic nucleic acid (BNA)
cgguaaguuc

SEQ ID NO: 8453 - RNA, 9 nt, Artificial Sequence
  source: /note="Description of Artificial Sequence: Synthetic oligonucleotide"
  source: /note="RNA"
  source: /note="5' tri-ethylene glycol (TEG)"
  modified_base (1)..(1): bicyclic nucleic acid (BNA)
  modified_base (2)..(2): bicyclic nucleic acid (BNA)
cgguaaguu

SEQ ID NO: 8454 - RNA, 8 nt, Artificial Sequence
  source: /note="Description of Artificial Sequence: Synthetic oligonucleotide"
  source: /note="RNA"
  source: /note="5' tri-ethylene glycol (TEG)"
  modified_base (1)..(1): bicyclic nucleic acid (BNA)
  modified_base (2)..(2): bicyclic nucleic acid (BNA)
cgguaagu

SEQ ID NO: 8455 - DNA, 20 bp, Artificial Sequence
  source: /note="Description of Artificial Sequence: Synthetic oligonucleotide"
  source: /note="Description of Combined DNA/RNA Molecule: Synthetic oligonucleotide"
  source: /note="DNA/RNA"
  source: /note="5' tri-ethylene glycol (TEG)"
  modified_base (1)..(1): bicyclic nucleic acid (BNA)
  modified_base (2)..(2): bicyclic nucleic acid (BNA)
tcgguaaguucuguccaagc

SEQ ID NO: 8456 - DNA, 19 bp, Artificial Sequence
  source: /note="Description of Artificial Sequence: Synthetic oligonucleotide"
  source: /note="Description of Combined DNA/RNA Molecule: Synthetic oligonucleotide"
  source: /note="DNA/RNA"
  source: /note="5' tri-ethylene glycol (TEG)"
  modified_base (1)..(1): bicyclic nucleic acid (BNA)
  modified_base (2)..(2): bicyclic nucleic acid (BNA)
tcgguaaguucuguccaag

SEQ ID NO: 8457 - DNA, 18 bp, Artificial Sequence
  source: /note="Description of Artificial Sequence: Synthetic oligonucleotide"
  source: /note="Description of Combined DNA/RNA Molecule: Synthetic oligonucleotide"
  source: /note="DNA/RNA"
  source: /note="5' tri-ethylene glycol (TEG)"
  modified_base (1)..(1): bicyclic nucleic acid (BNA)
  modified_base (2)..(2): bicyclic nucleic acid (BNA)
tcgguaaguucuguccaa

SEQ ID NO: 8458 - DNA, 17 bp, Artificial Sequence
  source: /note="Description of Artificial Sequence: Synthetic oligonucleotide"
  source: /note="Description of Combined DNA/RNA Molecule: Synthetic oligonucleotide"
  source: /note="DNA/RNA"
  source: /note="5' tri-ethylene glycol (TEG)"
  modified_base (1)..(1): bicyclic nucleic acid (BNA)
  modified_base (2)..(2): bicyclic nucleic acid (BNA)
tcgguaaguucugucca

SEQ ID NO: 8459 - DNA, 16 bp, Artificial Sequence
  source: /note="Description of Artificial Sequence: Synthetic oligonucleotide"
  source: /note="Description of Combined DNA/RNA Molecule: Synthetic oligonucleotide"
  source: /note="DNA/RNA"
  source: /note="5' tri-ethylene glycol (TEG)"
  modified_base (1)..(1): bicyclic nucleic acid (BNA)
  modified_base (2)..(2): bicyclic nucleic acid (BNA)
tcgguaaguucugucc

SEQ ID NO: 8460 - DNA, 15 bp, Artificial Sequence
  source: /note="Description of Artificial Sequence: Synthetic oligonucleotide"
  source: /note="Description of Combined DNA/RNA Molecule: Synthetic oligonucleotide"
  source: /note="DNA/RNA"
  source: /note="5' tri-ethylene glycol (TEG)"
  modified_base (1)..(1): bicyclic nucleic acid (BNA)
  modified_base (2)..(2): bicyclic nucleic acid (BNA)
tcgguaaguucuguc

SEQ ID NO: 8461 - DNA, 14 bp, Artificial Sequence
  source: /note="Description of Artificial Sequence: Synthetic oligonucleotide"
  source: /note="Description of Combined DNA/RNA Molecule: Synthetic oligonucleotide"
  source: /note="DNA/RNA"
  source: /note="5' tri-ethylene glycol (TEG)"
  modified_base (1)..(1): bicyclic nucleic acid (BNA)
  modified_base (2)..(2): bicyclic nucleic acid (BNA)
tcgguaaguucugu

SEQ ID NO: 8462 - DNA, 13 bp, Artificial Sequence
  source: /note="Description of Artificial Sequence: Synthetic oligonucleotide"
  source: /note="Description of Combined DNA/RNA Molecule: Synthetic oligonucleotide"
  source: /note="DNA/RNA"
  source: /note="5' tri-ethylene glycol (TEG)"
  modified_base (1)..(1): bicyclic nucleic acid (BNA)
  modified_base (2)..(2): bicyclic nucleic acid (BNA)
tcgguaaguucug

SEQ ID NO: 8463 - DNA, 12 bp, Artificial Sequence
  source: /note="Description of Artificial Sequence: Synthetic oligonucleotide"
  source: /note="Description of Combined DNA/RNA Molecule: Synthetic oligonucleotide"
  source: /note="DNA/RNA"
  source: /note="5' tri-ethylene glycol (TEG)"
  modified_base (1)..(1): bicyclic nucleic acid (BNA)
  modified_base (2)..(2): bicyclic nucleic acid (BNA)
tcgguaaguucu

SEQ ID NO: 8464 - DNA, 11 bp, Artificial Sequence
  source: /note="Description of Artificial Sequence: Synthetic oligonucleotide"
  source: /note="Description of Combined DNA/RNA Molecule: Synthetic oligonucleotide"
  source: /note="DNA/RNA"
  source: /note="5' tri-ethylene glycol (TEG)"
  modified_base (1)..(1): bicyclic nucleic acid (BNA)
  modified_base (2)..(2): bicyclic nucleic acid (BNA)
tcgguaaguuc

SEQ ID NO: 8465 - DNA, 10 bp, Artificial Sequence
  source: /note="Description of Artificial Sequence: Synthetic oligonucleotide"
  source: /note="Description of Combined DNA/RNA Molecule: Synthetic oligonucleotide"
  source: /note="DNA/RNA"
  source: /note="5' tri-ethylene glycol (TEG)"
  modified_base (1)..(1): bicyclic nucleic acid (BNA)
  modified_base (2)..(2): bicyclic nucleic acid (BNA)
tcgguaaguu

SEQ ID NO: 8466 - DNA, 9 bp, Artificial Sequence
  source: /note="Description of Artificial Sequence: Synthetic oligonucleotide"
  source: /note="Description of Combined DNA/RNA Molecule: Synthetic oligonucleotide"
  source: /note="DNA/RNA"
  source: /note="5' tri-ethylene glycol (TEG)"
  modified_base (1)..(1): bicyclic nucleic acid (BNA)
  modified_base (2)..(2): bicyclic nucleic acid (BNA)
tcgguaagu

SEQ ID NO: 8467 - DNA, 20 bp, Artificial Sequence
  source: /note="Description of Artificial Sequence: Synthetic oligonucleotide"
  source: /note="Description of Combined DNA/RNA Molecule: Synthetic oligonucleotide"
  source: /note="DNA/RNA"
  source: /note="5' tri-ethylene glycol (TEG)"
  modified_base (1)..(1): bicyclic nucleic acid (BNA)
  modified_base (2)..(2): bicyclic nucleic acid (BNA)
gtcgguaaguucuguccaag

SEQ ID NO: 8468 - DNA, 19 bp, Artificial Sequence
  source: /note="Description of Artificial Sequence: Synthetic oligonucleotide"
  source: /note="Description of Combined DNA/RNA Molecule: Synthetic oligonucleotide"
  source: /note="DNA/RNA"
  source: /note="5' tri-ethylene glycol (TEG)"
  modified_base (1)..(1): bicyclic nucleic acid (BNA)
  modified_base (2)..(2): bicyclic nucleic acid (BNA)
gtcgguaaguucuguccaa

SEQ ID NO: 8469 - DNA, 18 bp, Artificial Sequence
  source: /note="Description of Artificial Sequence: Synthetic oligonucleotide"
  source: /note="Description of Combined DNA/RNA Molecule: Synthetic oligonucleotide"
  source: /note="DNA/RNA"
  source: /note="5' tri-ethylene glycol (TEG)"
  modified_base (1)..(1): bicyclic nucleic acid (BNA)
  modified_base (2)..(2): bicyclic nucleic acid (BNA)
gtcgguaaguucugucca

SEQ ID NO: 8470 - DNA, 17 bp, Artificial Sequence
  source: /note="Description of Artificial Sequence: Synthetic oligonucleotide"
  source: /note="Description of Combined DNA/RNA Molecule: Synthetic oligonucleotide"
  source: /note="DNA/RNA"
  source: /note="5' tri-ethylene glycol (TEG)"
  modified_base (1)..(1): bicyclic nucleic acid (BNA)
  modified_base (2)..(2): bicyclic nucleic acid (BNA)
gtcgguaaguucugucc

SEQ ID NO: 8471 - DNA, 16 bp, Artificial Sequence
  source: /note="Description of Artificial Sequence: Synthetic oligonucleotide"
  source: /note="Description of Combined DNA/RNA Molecule: Synthetic oligonucleotide"
  source: /note="DNA/RNA"
  source: /note="5' tri-ethylene glycol (TEG)"
  modified_base (1)..(1): bicyclic nucleic acid (BNA)
  modified_base (2)..(2): bicyclic nucleic acid (BNA)
gtcgguaaguucuguc

SEQ ID NO: 8472 - DNA, 15 bp, Artificial Sequence
  source: /note="Description of Artificial Sequence: Synthetic oligonucleotide"
  source: /note="Description of Combined DNA/RNA Molecule: Synthetic oligonucleotide"
  source: /note="DNA/RNA"
  source: /note="5' tri-ethylene glycol (TEG)"
  modified_base (1)..(1): bicyclic nucleic acid (BNA)
  modified_base (2)..(2): bicyclic nucleic acid (BNA)
gtcgguaaguucugu

SEQ ID NO: 8473 - DNA, 14 bp, Artificial Sequence
  source: /note="Description of Artificial Sequence: Synthetic oligonucleotide"
  source: /note="Description of Combined DNA/RNA Molecule: Synthetic oligonucleotide"
  source: /note="DNA/RNA"
  source: /note="5' tri-ethylene glycol (TEG)"
  modified_base (1)..(1): bicyclic nucleic acid (BNA)
  modified_base (2)..(2): bicyclic nucleic acid (BNA)
gtcgguaaguucug

SEQ ID NO: 8474 - DNA, 13 bp, Artificial Sequence
  source: /note="Description of Artificial Sequence: Synthetic oligonucleotide"
  source: /note="Description of Combined DNA/RNA Molecule: Synthetic oligonucleotide"
  source: /note="DNA/RNA"
  source: /note="5' tri-ethylene glycol (TEG)"
  modified_base (1)..(1): bicyclic nucleic acid (BNA)
  modified_base (2)..(2): bicyclic nucleic acid (BNA)
gtcgguaaguucu

SEQ ID NO: 8475 - DNA, 12 bp, Artificial Sequence
  source: /note="Description of Artificial Sequence: Synthetic oligonucleotide"
  source: /note="Description of Combined DNA/RNA Molecule: Synthetic oligonucleotide"
  source: /note="DNA/RNA"
  source: /note="5' tri-ethylene glycol (TEG)"
  modified_base (1)..(1): bicyclic nucleic acid (BNA)
  modified_base (2)..(2): bicyclic nucleic acid (BNA)
gtcgguaaguuc

SEQ ID NO: 8476 - DNA, 11 bp, Artificial Sequence
  source: /note="Description of Artificial Sequence: Synthetic oligonucleotide"
  source: /note="Description of Combined DNA/RNA Molecule: Synthetic oligonucleotide"
  source: /note="DNA/RNA"
  source: /note="5' tri-ethylene glycol (TEG)"
  modified_base (1)..(1): bicyclic nucleic acid (BNA)
  modified_base (2)..(2): bicyclic nucleic acid (BNA)
gtcgguaaguu

SEQ ID NO: 8477 - DNA, 10 bp, Artificial Sequence
  source: /note="Description of Artificial Sequence: Synthetic oligonucleotide"
  source: /note="Description of Combined DNA/RNA Molecule: Synthetic oligonucleotide"
  source: /note="DNA/RNA"
  source: /note="5' tri-ethylene glycol (TEG)"
  modified_base (1)..(1): bicyclic nucleic acid (BNA)
  modified_base (2)..(2): bicyclic nucleic acid (BNA)
gtcgguaagu

SEQ ID NO: 8478 - RNA, 20 nt, Artificial Sequence
  source: /note="Description of Artificial Sequence: Synthetic oligonucleotide"
  source: /note="RNA"
  source: /note="5' tri-ethylene glycol (TEG)"
  modified_base (1)..(1): bicyclic nucleic acid (BNA)
  modified_base (2)..(2): bicyclic nucleic acid (BNA)
agucgguaaguucuguccaa

SEQ ID NO: 8479 - RNA, 19 nt, Artificial Sequence
  source: /note="Description of Artificial Sequence: Synthetic oligonucleotide"
  source: /note="RNA"
  source: /note="5' tri-ethylene glycol (TEG)"
  modified_base (1)..(1): bicyclic nucleic acid (BNA)
  modified_base (2)..(2): bicyclic nucleic acid (BNA)
agucgguaaguucugucca

SEQ ID NO: 8480 - RNA, 17 nt, Artificial Sequence
  source: /note="Description of Artificial Sequence: Synthetic oligonucleotide"
  source: /note="RNA"
  source: /note="5' tri-ethylene glycol (TEG)"
  modified_base (1)..(1): bicyclic nucleic acid (BNA)
  modified_base (2)..(2): bicyclic nucleic acid (BNA)
agucgguaaguucuguc

SEQ ID NO: 8481 - RNA, 16 nt, Artificial Sequence
  source: /note="Description of Artificial Sequence: Synthetic oligonucleotide"
  source: /note="RNA"
  source: /note="5' tri-ethylene glycol (TEG)"
  modified_base (1)..(1): bicyclic nucleic acid (BNA)
  modified_base (2)..(2): bicyclic nucleic acid (BNA)
agucgguaaguucugu

SEQ ID NO: 8482 - RNA, 15 nt, Artificial Sequence
  source: /note="Description of Artificial Sequence: Synthetic oligonucleotide"
  source: /note="RNA"
  source: /note="5' tri-ethylene glycol (TEG)"
  modified_base (1)..(1): bicyclic nucleic acid (BNA)
  modified_base (2)..(2): bicyclic nucleic acid (BNA)
agucgguaaguucug

SEQ ID NO: 8483 - RNA, 14 nt, Artificial Sequence
  source: /note="Description of Artificial Sequence: Synthetic oligonucleotide"
  source: /note="RNA"
  source: /note="5' tri-ethylene glycol (TEG)"
  modified_base (1)..(1): bicyclic nucleic acid (BNA)
  modified_base (2)..(2): bicyclic nucleic acid (BNA)
agucgguaaguucu

SEQ ID NO: 8484 - RNA, 13 nt, Artificial Sequence
  source: /note="Description of Artificial Sequence: Synthetic oligonucleotide"
  source: /note="RNA"
  source: /note="5' tri-ethylene glycol (TEG)"
  modified_base (1)..(1): bicyclic nucleic acid (BNA)
  modified_base (2)..(2): bicyclic nucleic acid (BNA)
agucgguaaguuc

SEQ ID NO: 8485 - RNA, 12 nt, Artificial Sequence
  source: /note="Description of Artificial Sequence: Synthetic oligonucleotide"
  source: /note="RNA"
  source: /note="5' tri-ethylene glycol (TEG)"
  modified_base (1)..(1): bicyclic nucleic acid (BNA)
  modified_base (2)..(2): bicyclic nucleic acid (BNA)
agucgguaaguu

SEQ ID NO: 8486 - RNA, 11 nt, Artificial Sequence
  source: /note="Description of Artificial Sequence: Synthetic oligonucleotide"
  source: /note="RNA"
  source: /note="5' tri-ethylene glycol (TEG)"
  modified_base (1)..(1): bicyclic nucleic acid (BNA)
  modified_base (2)..(2): bicyclic nucleic acid (BNA)
agucgguaagu

SEQ ID NO: 8487 - RNA, 20 nt, Artificial Sequence
  source: /note="Description of Artificial Sequence: Synthetic oligonucleotide"
  source: /note="RNA"
  source: /note="5' tri-ethylene glycol (TEG)"
  modified_base (1)..(1): bicyclic nucleic acid (BNA)
  modified_base (2)..(2): bicyclic nucleic acid (BNA)
cagucgguaaguucugucca

SEQ ID NO: 8488 - RNA, 19 nt, Artificial Sequence
  source: /note="Description of Artificial Sequence: Synthetic oligonucleotide"
  source: /note="RNA"
  source: /note="5' tri-ethylene glycol (TEG)"
  modified_base (1)..(1): bicyclic nucleic acid (BNA)
  modified_base (2)..(2): bicyclic nucleic acid (BNA)
cagucgguaaguucugucc

SEQ ID NO: 8489 - RNA, 18 nt, Artificial Sequence
  source: /note="Description of Artificial Sequence: Synthetic oligonucleotide"
  source: /note="RNA"
  source: /note="5' tri-ethylene glycol (TEG)"
  modified_base (1)..(1): bicyclic nucleic acid (BNA)
  modified_base (2)..(2): bicyclic nucleic acid (BNA)
cagucgguaaguucuguc

SEQ ID NO: 8490 - RNA, 17 nt, Artificial Sequence
  source: /note="Description of Artificial Sequence: Synthetic oligonucleotide"
  source: /note="RNA"
  source: /note="5' tri-ethylene glycol (TEG)"
  modified_base (1)..(1): bicyclic nucleic acid (BNA)
  modified_base (2)..(2): bicyclic nucleic acid (BNA)
cagucgguaaguucugu

SEQ ID NO: 8491 - RNA, 16 nt, Artificial Sequence
  source: /note="Description of Artificial Sequence: Synthetic oligonucleotide"
  source: /note="RNA"
  source: /note="5' tri-ethylene glycol (TEG)"
  modified_base (1)..(1): bicyclic nucleic acid (BNA)
  modified_base (2)..(2): bicyclic nucleic acid (BNA)
cagucgguaaguucug

SEQ ID NO: 8492 - RNA, 15 nt, Artificial Sequence
  source: /note="Description of Artificial Sequence: Synthetic oligonucleotide"
  source: /note="RNA"
  source: /note="5' tri-ethylene glycol (TEG)"
  modified_base (1)..(1): bicyclic nucleic acid (BNA)
  modified_base (2)..(2): bicyclic nucleic acid (BNA)
cagucgguaaguucu

SEQ ID NO: 8493 - RNA, 14 nt, Artificial Sequence
  source: /note="Description of Artificial Sequence: Synthetic oligonucleotide"
  source: /note="RNA"
  source: /note="5' tri-ethylene glycol (TEG)"
  modified_base (1)..(1): bicyclic nucleic acid (BNA)
  modified_base (2)..(2): bicyclic nucleic acid (BNA)
cagucgguaaguuc

SEQ ID NO: 8494 - RNA, 13 nt, Artificial Sequence
  source: /note="Description of Artificial Sequence: Synthetic oligonucleotide"
  source: /note="RNA"
  source: /note="5' tri-ethylene glycol (TEG)"
  modified_base (1)..(1): bicyclic nucleic acid (BNA)
  modified_base (2)..(2): bicyclic nucleic acid (BNA)
cagucgguaaguu

SEQ ID NO: 8495 - RNA, 12 nt, Artificial Sequence
  source: /note="Description of Artificial Sequence: Synthetic oligonucleotide"
  source: /note="RNA"
  source: /note="5' tri-ethylene glycol (TEG)"
  modified_base (1)..(1): bicyclic nucleic acid (BNA)
  modified_base (2)..(2): bicyclic nucleic acid (BNA)
cagucgguaagu

SEQ ID NO: 8496 - RNA, 20 nt, Artificial Sequence
  source: /note="Description of Artificial Sequence: Synthetic oligonucleotide"
  source: /note="RNA"
  source: /note="5' tri-ethylene glycol (TEG)"
  modified_base (1)..(1): bicyclic nucleic acid (BNA)
  modified_base (2)..(2): bicyclic nucleic acid (BNA)
ccagucgguaaguucugucc

SEQ ID NO: 8497 - RNA, 19 nt, Artificial Sequence
  source: /note="Description of Artificial Sequence: Synthetic oligonucleotide"
  source: /note="RNA"
  source: /note="5' tri-ethylene glycol (TEG)"
  modified_base (1)..(1): bicyclic nucleic acid (BNA)
  modified_base (2)..(2): bicyclic nucleic acid (BNA)
ccagucgguaaguucuguc

SEQ ID NO: 8498 - RNA, 18 nt, Artificial Sequence
  source: /note="Description of Artificial Sequence: Synthetic oligonucleotide"
  source: /note="RNA"
  source: /note="5' tri-ethylene glycol (TEG)"
  modified_base (1)..(1): bicyclic nucleic acid (BNA)
  modified_base (2)..(2): bicyclic nucleic acid (BNA)
ccagucgguaaguucugu

SEQ ID NO: 8499 - RNA, 17 nt, Artificial Sequence
  source: /note="Description of Artificial Sequence: Synthetic oligonucleotide"
  source: /note="RNA"
  source: /note="5' tri-ethylene glycol (TEG)"
  modified_base (1)..(1): bicyclic nucleic acid (BNA)
  modified_base (2)..(2): bicyclic nucleic acid (BNA)
ccagucgguaaguucug

SEQ ID NO: 8500 - RNA, 16 nt, Artificial Sequence
  source: /note="Description of Artificial Sequence: Synthetic oligonucleotide"
  source: /note="RNA"
  source: /note="5' tri-ethylene glycol (TEG)"
  modified_base (1)..(1): bicyclic nucleic acid (BNA)
  modified_base (2)..(2): bicyclic nucleic acid (BNA)
ccagucgguaaguucu

SEQ ID NO: 8501 - RNA, 15 nt, Artificial Sequence
  source: /note="Description of Artificial Sequence: Synthetic oligonucleotide"
  source: /note="RNA"
  source: /note="5' tri-ethylene glycol (TEG)"
  modified_base (1)..(1): bicyclic nucleic acid (BNA)
  modified_base (2)..(2): bicyclic nucleic acid (BNA)
ccagucgguaaguuc

SEQ ID NO: 8502 - RNA, 14 nt, Artificial Sequence
  source: /note="Description of Artificial Sequence: Synthetic oligonucleotide"
  source: /note="RNA"
  source: /note="5' tri-ethylene glycol (TEG)"
  modified_base (1)..(1): bicyclic nucleic acid (BNA)
  modified_base (2)..(2): bicyclic nucleic acid (BNA)
ccagucgguaaguu

SEQ ID NO: 8503 - RNA, 13 nt, Artificial Sequence
  source: /note="Description of Artificial Sequence: Synthetic oligonucleotide"
  source: /note="RNA"
  source: /note="5' tri-ethylene glycol (TEG)"
  modified_base (1)..(1): bicyclic nucleic acid (BNA)
  modified_base (2)..(2): bicyclic nucleic acid (BNA)
ccagucgguaagu

SEQ ID NO: 8504 - RNA, 20 nt, Artificial Sequence
  source: /note="Description of Artificial Sequence: Synthetic oligonucleotide"
  source: /note="RNA"
  source: /note="5' tri-ethylene glycol (TEG)"
  modified_base (1)..(1): bicyclic nucleic acid (BNA)
  modified_base (2)..(2): bicyclic nucleic acid (BNA)
gccagucgguaaguucuguc

SEQ ID NO: 8505 - RNA, 19 nt, Artificial Sequence
  source: /note="Description of Artificial Sequence: Synthetic oligonucleotide"
  source: /note="RNA"
  source: /note="5' tri-ethylene glycol (TEG)"
  modified_base (1)..(1): bicyclic nucleic acid (BNA)
  modified_base (2)..(2): bicyclic nucleic acid (BNA)
gccagucgguaaguucugu

SEQ ID NO: 8506 - RNA, 18 nt, Artificial Sequence
  source: /note="Description of Artificial Sequence: Synthetic oligonucleotide"
  source: /note="RNA"
  source: /note="5' tri-ethylene glycol (TEG)"
  modified_base (1)..(1): bicyclic nucleic acid (BNA)
  modified_base (2)..(2): bicyclic nucleic acid (BNA)
gccagucgguaaguucug

SEQ ID NO: 8507 - RNA, 17 nt, Artificial Sequence
  source: /note="Description of Artificial Sequence: Synthetic oligonucleotide"
  source: /note="RNA"
  source: /note="5' tri-ethylene glycol (TEG)"
  modified_base (1)..(1): bicyclic nucleic acid (BNA)
  modified_base (2)..(2): bicyclic nucleic acid (BNA)
gccagucgguaaguucu

SEQ ID NO: 8508 - RNA, 16 nt, Artificial Sequence
  source: /note="Description of Artificial Sequence: Synthetic oligonucleotide"
  source: /note="RNA"
  source: /note="5' tri-ethylene glycol (TEG)"
  modified_base (1)..(1): bicyclic nucleic acid (BNA)
  modified_base (2)..(2): bicyclic nucleic acid (BNA)
gccagucgguaaguuc

SEQ ID NO: 8509 - RNA, 15 nt, Artificial Sequence
  source: /note="Description of Artificial Sequence: Synthetic oligonucleotide"
  source: /note="RNA"
  source: /note="5' tri-ethylene glycol (TEG)"
  modified_base (1)..(1): bicyclic nucleic acid (BNA)
  modified_base (2)..(2): bicyclic nucleic acid (BNA)
gccagucgguaaguu

SEQ ID NO: 8510 - RNA, 14 nt, Artificial Sequence
  source: /note="Description of Artificial Sequence: Synthetic oligonucleotide"
  source: /note="RNA"
  source: /note="5' tri-ethylene glycol (TEG)"
  modified_base (1)..(1): bicyclic nucleic acid (BNA)
  modified_base (2)..(2): bicyclic nucleic acid (BNA)
gccagucgguaagu

SEQ ID NO: 8511 - DNA, 20 bp, Artificial Sequence
  source: /note="Description of Artificial Sequence: Synthetic oligonucleotide"
  source: /note="Description of Combined DNA/RNA Molecule: Synthetic oligonucleotide"
  source: /note="DNA/RNA"
  source: /note="5' tri-ethylene glycol (TEG)"
  modified_base (1)..(1): bicyclic nucleic acid (BNA)
  modified_base (2)..(2): bicyclic nucleic acid (BNA)
tcaaggaagauggcauuucu

SEQ ID NO: 8512 - DNA, 22 bp, Artificial Sequence
  source: /note="Description of Artificial Sequence: Synthetic oligonucleotide"
  source: /note="Description of Combined DNA/RNA Molecule: Synthetic oligonucleotide"
  source: /note="DNA/RNA"
  source: /note="5' tri-ethylene glycol (TEG)"
  modified_base (1)..(1): bicyclic nucleic acid (BNA)
  modified_base (2)..(2): bicyclic nucleic acid (BNA)
tcaaggaagauggcauuucuag

SEQ ID NO: 8513 - DNA, 16 bp, Artificial Sequence
  source: /note="Description of Artificial Sequence: Synthetic oligonucleotide"
  source: /note="Description of Combined DNA/RNA Molecule: Synthetic oligonucleotide"
  source: /note="DNA/RNA"
  source: /note="5' tri-ethylene glycol (TEG)"
  modified_base (1)..(1): bicyclic nucleic acid (BNA)
  modified_base (2)..(2): bicyclic nucleic acid (BNA)
tcaaggaagauggcau

SEQ ID NO: 8514 - RNA, 15 nt, Artificial Sequence
  source: /note="Description of Artificial Sequence: Synthetic oligonucleotide"
  source: /note="RNA"
  source: /note="5' tri-ethylene glycol (TEG)"
  modified_base (1)..(1): bicyclic nucleic acid (BNA)
  modified_base (2)..(2): bicyclic nucleic acid (BNA)
gaagauggcauuucu

SEQ ID NO: 8515 - DNA, 21 bp, Artificial Sequence
  source: /note="Description of Artificial Sequence: Synthetic oligonucleotide"
  source: /note="Description of Combined DNA/RNA Molecule: Synthetic oligonucleotide"
  source: /note="DNA/RNA"
  source: /note="5' tri-ethylene glycol (TEG)"
  modified_base (1)..(1): bicyclic nucleic acid (BNA)
  modified_base (2)..(2): bicyclic nucleic acid (BNA)
tcaaggaagauggcauuucua

SEQ ID NO: 8516 - DNA, 19 bp, Artificial Sequence
  source: /note="Description of Artificial Sequence: Synthetic oligonucleotide"
  source: /note="Description of Combined DNA/RNA Molecule: Synthetic oligonucleotide"
  source: /note="DNA/RNA"
  source: /note="5' tri-ethylene glycol (TEG)"
  modified_base (1)..(1): bicyclic nucleic acid (BNA)
  modified_base (2)..(2): bicyclic nucleic acid (BNA)
tcaaggaagauggcauuuc

SEQ ID NO: 8517 - DNA, 18 bp, Artificial Sequence
  source: /note="Description of Artificial Sequence: Synthetic oligonucleotide"
  source: /note="Description of Combined DNA/RNA Molecule: Synthetic oligonucleotide"
  source: /note="DNA/RNA"
  source: /note="5' tri-ethylene glycol (TEG)"
  modified_base (1)..(1): bicyclic nucleic acid (BNA)
  modified_base (2)..(2): bicyclic nucleic acid (BNA)
tcaaggaagauggcauuu

SEQ ID NO: 8518 - DNA, 17 bp, Artificial Sequence
  source: /note="Description of Artificial Sequence: Synthetic oligonucleotide"
  source: /note="Description of Combined DNA/RNA Molecule: Synthetic oligonucleotide"
  source: /note="DNA/RNA"
  source: /note="5' tri-ethylene glycol (TEG)"
  modified_base (1)..(1): bicyclic nucleic acid (BNA)
  modified_base (2)..(2): bicyclic nucleic acid (BNA)
tcaaggaagauggcauu

SEQ ID NO: 8519 - DNA, 15 bp, Artificial Sequence
  source: /note="Description of Artificial Sequence: Synthetic oligonucleotide"
  source: /note="Description of Combined DNA/RNA Molecule: Synthetic oligonucleotide"
  source: /note="DNA/RNA"
  source: /note="5' tri-ethylene glycol (TEG)"
  modified_base (1)..(1): bicyclic nucleic acid (BNA)
  modified_base (2)..(2): bicyclic nucleic acid (BNA)
tcaaggaagauggca

SEQ ID NO: 8520 - DNA, 14 bp, Artificial Sequence
  source: /note="Description of Artificial Sequence: Synthetic oligonucleotide"
  source: /note="Description of Combined DNA/RNA Molecule: Synthetic oligonucleotide"
  source: /note="DNA/RNA"
  source: /note="5' tri-ethylene glycol (TEG)"
  modified_base (1)..(1): bicyclic nucleic acid (BNA)
  modified_base (2)..(2): bicyclic nucleic acid (BNA)
tcaaggaagauggc

SEQ ID NO: 8521 - DNA, 13 bp, Artificial Sequence
  source: /note="Description of Artificial Sequence: Synthetic oligonucleotide"
  source: /note="Description of Combined DNA/RNA Molecule: Synthetic oligonucleotide"
  source: /note="DNA/RNA"
  source: /note="5' tri-ethylene glycol (TEG)"
  modified_base (1)..(1): bicyclic nucleic acid (BNA)
  modified_base (2)..(2): bicyclic nucleic acid (BNA)
tcaaggaagaugg

SEQ ID NO: 8522 - DNA, 12 bp, Artificial Sequence
  source: /note="Description of Artificial Sequence: Synthetic oligonucleotide"
  source: /note="Description of Combined DNA/RNA Molecule: Synthetic oligonucleotide"
  source: /note="DNA/RNA"
  source: /note="5' tri-ethylene glycol (TEG)"
  modified_base (1)..(1): bicyclic nucleic acid (BNA)
  modified_base (2)..(2): bicyclic nucleic acid (BNA)
tcaaggaagaug

SEQ ID NO: 8523 - DNA, 11 bp, Artificial Sequence
  source: /note="Description of Artificial Sequence: Synthetic oligonucleotide"
  source: /note="Description of Combined DNA/RNA Molecule: Synthetic oligonucleotide"
  source: /note="DNA/RNA"
  source: /note="5' tri-ethylene glycol (TEG)"
  modified_base (1)..(1): bicyclic nucleic acid (BNA)
  modified_base (2)..(2): bicyclic nucleic acid (BNA)
tcaaggaagau

SEQ ID NO: 8524 - DNA, 10 bp, Artificial Sequence
  source: /note="Description of Artificial Sequence: Synthetic oligonucleotide"
  source: /note="DNA/RNA"
  source: /note="5' tri-ethylene glycol (TEG)"
  modified_base (1)..(1): bicyclic nucleic acid (BNA)
  modified_base (2)..(2): bicyclic nucleic acid (BNA)
tcaaggaaga

SEQ ID NO: 8525 - DNA, 9 bp, Artificial Sequence
  source: /note="Description of Artificial Sequence: Synthetic oligonucleotide"
  source: /note="DNA/RNA"
  source: /note="5' tri-ethylene glycol (TEG)"
  modified_base (1)..(1): bicyclic nucleic acid (BNA)
  modified_base (2)..(2): bicyclic nucleic acid (BNA)
tcaaggaag

SEQ ID NO: 8526 - RNA, 21 nt, Artificial Sequence
  source: /note="Description of Artificial Sequence: Synthetic oligonucleotide"
  source: /note="RNA"
  source: /note="5' tri-ethylene glycol (TEG)"
  modified_base (1)..(1): bicyclic nucleic acid (BNA)
  modified_base (2)..(2): bicyclic nucleic acid (BNA)
caaggaagauggcauuucuag

SEQ ID NO: 8527 - RNA, 20 nt, Artificial Sequence
  source: /note="Description of Artificial Sequence: Synthetic oligonucleotide"
  source: /note="RNA"
  source: /note="5' tri-ethylene glycol (TEG)"
  modified_base (1)..(1): bicyclic nucleic acid (BNA)
  modified_base (2)..(2): bicyclic nucleic acid (BNA)
caaggaagauggcauuucua

SEQ ID NO: 8528 - RNA, 19 nt, Artificial Sequence
  source: /note="Description of Artificial Sequence: Synthetic oligonucleotide"
  source: /note="RNA"
  source: /note="5' tri-ethylene glycol (TEG)"
  modified_base (1)..(1): bicyclic nucleic acid (BNA)
  modified_base (2)..(2): bicyclic nucleic acid (BNA)
caaggaagauggcauuucu

SEQ ID NO: 8529 - RNA, 18 nt, Artificial Sequence
  source: /note="Description of Artificial Sequence: Synthetic oligonucleotide"
  source: /note="RNA"
  source: /note="5' tri-ethylene glycol (TEG)"
  modified_base (1)..(1): bicyclic nucleic acid (BNA)
  modified_base (2)..(2): bicyclic nucleic acid (BNA)
caaggaagauggcauuuc

SEQ ID NO: 8530 - RNA, 17 nt, Artificial Sequence
  source: /note="Description of Artificial Sequence: Synthetic oligonucleotide"
  source: /note="RNA"
  source: /note="5' tri-ethylene glycol (TEG)"
  modified_base (1)..(1): bicyclic nucleic acid (BNA)
  modified_base (2)..(2): bicyclic nucleic acid (BNA)
caaggaagauggcauuu

SEQ ID NO: 8531 - RNA, 16 nt, Artificial Sequence
  source: /note="Description of Artificial Sequence: Synthetic oligonucleotide"
  source: /note="RNA"
  source: /note="5' tri-ethylene glycol (TEG)"
  modified_base (1)..(1): bicyclic nucleic acid (BNA)
  modified_base (2)..(2): bicyclic nucleic acid (BNA)
caaggaagauggcauu

SEQ ID NO: 8532 - RNA, 15 nt, Artificial Sequence
  source: /note="Description of Artificial Sequence: Synthetic oligonucleotide"
  source: /note="RNA"
  source: /note="5' tri-ethylene glycol (TEG)"
  modified_base (1)..(1): bicyclic nucleic acid (BNA)
  modified_base (2)..(2): bicyclic nucleic acid (BNA)
caaggaagauggcau

SEQ ID NO: 8533 - RNA, 14 nt, Artificial Sequence
  source: /note="Description of Artificial Sequence: Synthetic oligonucleotide"
  source: /note="RNA"
  source: /note="5' tri-ethylene glycol (TEG)"
  modified_base (1)..(1): bicyclic nucleic acid (BNA)
  modified_base (2)..(2): bicyclic nucleic acid (BNA)
caaggaagauggca

SEQ ID NO: 8534 - RNA, 13 nt, Artificial Sequence
  source: /note="Description of Artificial Sequence: Synthetic oligonucleotide"
  source: /note="RNA"
  source: /note="5' tri-ethylene glycol (TEG)"
  modified_base (1)..(1): bicyclic nucleic acid (BNA)
  modified_base (2)..(2): bicyclic nucleic acid (BNA)
caaggaagauggc

SEQ ID NO: 8535 - RNA, 12 nt, Artificial Sequence
  source: /note="Description of Artificial Sequence: Synthetic oligonucleotide"
  source: /note="RNA"
  source: /note="5' tri-ethylene glycol (TEG)"
  modified_base (1)..(1): bicyclic nucleic acid (BNA)
  modified_base (2)..(2): bicyclic nucleic acid (BNA)
caaggaagaugg

SEQ ID NO: 8536 - RNA, 11 nt, Artificial Sequence
  source: /note="Description of Artificial Sequence: Synthetic oligonucleotide"
  source: /note="RNA"
  source: /note="5' tri-ethylene glycol (TEG)"
  modified_base (1)..(1): bicyclic nucleic acid (BNA)
  modified_base (2)..(2): bicyclic nucleic acid (BNA)
caaggaagaug

SEQ ID NO: 8537 - RNA, 10 nt, Artificial Sequence
  source: /note="Description of Artificial Sequence: Synthetic oligonucleotide"
  source: /note="RNA"
  source: /note="5' tri-ethylene glycol (TEG)"
  modified_base (1)..(1): bicyclic nucleic acid (BNA)
  modified_base (2)..(2): bicyclic nucleic acid (BNA)
caaggaagau

SEQ ID NO: 8538 - RNA, 9 nt, Artificial Sequence
  source: /note="Description of Artificial Sequence: Synthetic oligonucleotide"
  source: /note="RNA/Antisense Oligonucleotide"
  source: /note="5' tri-ethylene glycol (TEG)"
  modified_base (1)..(1): bicyclic nucleic acid (BNA)
  modified_base (2)..(2): bicyclic nucleic acid (BNA)
caaggaaga

SEQ ID NO: 8539 - RNA, 8 nt, Artificial Sequence
  source: /note="Description of Artificial Sequence: Synthetic oligonucleotide"
  source: /note="RNA/Antisense Oligonucleotide"
  source: /note="5' tri-ethylene glycol (TEG)"
  modified_base (1)..(1): bicyclic nucleic acid (BNA)
  modified_base (2)..(2): bicyclic nucleic acid (BNA)
caaggaag

SEQ ID NO: 8540 - RNA, 20 nt, Artificial Sequence
  source: /note="Description of Artificial Sequence: Synthetic oligonucleotide"
  source: /note="RNA"
  source: /note="5' tri-ethylene glycol (TEG)"
  modified_base (1)..(1): bicyclic nucleic acid (BNA)
  modified_base (2)..(2): bicyclic nucleic acid (BNA)
aaggaagauggcauuucuag

SEQ ID NO: 8541 - RNA, 19 nt, Artificial Sequence
  source: /note="Description of Artificial Sequence: Synthetic oligonucleotide"
  source: /note="RNA"
  source: /note="5' tri-ethylene glycol (TEG)"
  modified_base (1)..(1): bicyclic nucleic acid (BNA)
  modified_base (2)..(2): bicyclic nucleic acid (BNA)
aaggaagauggcauuucua

SEQ ID NO: 8542 - RNA, 18 nt, Artificial Sequence
  source: /note="Description of Artificial Sequence: Synthetic oligonucleotide"
  source: /note="RNA"
  source: /note="5' tri-ethylene glycol (TEG)"
  modified_base (1)..(1): bicyclic nucleic acid (BNA)
  modified_base (2)..(2): bicyclic nucleic acid (BNA)
aaggaagauggcauuucu

SEQ ID NO: 8543 - RNA, 17 nt, Artificial Sequence
  source: /note="Description of Artificial Sequence: Synthetic oligonucleotide"
  source: /note="RNA"
  source: /note="5' tri-ethylene glycol (TEG)"
  modified_base (1)..(1): bicyclic nucleic acid (BNA)
  modified_base (2)..(2): bicyclic nucleic acid (BNA)
aaggaagauggcauuuc

SEQ ID NO: 8544 - RNA, 16 nt, Artificial Sequence
  source: /note="Description of Artificial Sequence: Synthetic oligonucleotide"
  source: /note="RNA"
  source: /note="5' tri-ethylene glycol (TEG)"
  modified_base (1)..(1): bicyclic nucleic acid (BNA)
  modified_base (2)..(2): bicyclic nucleic acid (BNA)
aaggaagauggcauuu

SEQ ID NO: 8545 - RNA, 15 nt, Artificial Sequence
  source: /note="Description of Artificial Sequence: Synthetic oligonucleotide"
  source: /note="RNA"
  source: /note="5' tri-ethylene glycol (TEG)"
  modified_base (1)..(1): bicyclic nucleic acid (BNA)
  modified_base (2)..(2): bicyclic nucleic acid (BNA)
aaggaagauggcauu

SEQ ID NO: 8546 - RNA, 14 nt, Artificial Sequence
  source: /note="Description of Artificial Sequence: Synthetic oligonucleotide"
  source: /note="RNA"
  source: /note="5' tri-ethylene glycol (TEG)"
  modified_base (1)..(1): bicyclic nucleic acid (BNA)
  modified_base (2)..(2): bicyclic nucleic acid (BNA)
aaggaagauggcau

SEQ ID NO: 8547 - RNA, 13 nt, Artificial Sequence
  source: /note="Description of Artificial Sequence: Synthetic oligonucleotide"
  source: /note="RNA"
  source: /note="5' tri-ethylene glycol (TEG)"
  modified_base (1)..(1): bicyclic nucleic acid (BNA)
  modified_base (2)..(2): bicyclic nucleic acid (BNA)
aaggaagauggca

SEQ ID NO: 8548 - RNA, 12 nt, Artificial Sequence
  source: /note="Description of Artificial Sequence: Synthetic oligonucleotide"
  source: /note="RNA"
  source: /note="5' tri-ethylene glycol (TEG)"
  modified_base (1)..(1): bicyclic nucleic acid (BNA)
  modified_base (2)..(2): bicyclic nucleic acid (BNA)
aaggaagauggc

SEQ ID NO: 8549 - RNA, 11 nt, Artificial Sequence
  source: /note="Description of Artificial Sequence: Synthetic oligonucleotide"
  source: /note="RNA"
  source: /note="5' tri-ethylene glycol (TEG)"
  modified_base (1)..(1): bicyclic nucleic acid (BNA)
  modified_base (2)..(2): bicyclic nucleic acid (BNA)
aaggaagaugg

SEQ ID NO: 8550 - RNA, 10 nt, Artificial Sequence
  source: /note="Description of Artificial Sequence: Synthetic oligonucleotide"
  source: /note="RNA"
  source: /note="5' tri-ethylene glycol (TEG)"
  modified_base (1)..(1): bicyclic nucleic acid (BNA)
  modified_base (2)..(2): bicyclic nucleic acid (BNA)
aaggaagaug

SEQ ID NO: 8551 - RNA, 9 nt, Artificial Sequence
  source: /note="Description of Artificial Sequence: Synthetic oligonucleotide"
  source: /note="RNA"
  source: /note="5' tri-ethylene glycol (TEG)"
  modified_base (1)..(1): bicyclic nucleic acid (BNA)
  modified_base (2)..(2): bicyclic nucleic acid (BNA)
aaggaagau

SEQ ID NO: 8552 - RNA, 8 nt, Artificial Sequence
  source: /note="Description of Artificial Sequence: Synthetic oligonucleotide"
  source: /note="RNA/Antisense Oligonucleotide"
  source: /note="5' tri-ethylene glycol (TEG)"
  modified_base (1)..(1): bicyclic nucleic acid (BNA)
  modified_base (2)..(2): bicyclic nucleic acid (BNA)
aaggaaga

SEQ ID NO: 8553 - RNA, 19 nt, Artificial Sequence
  source: /note="Description of Artificial Sequence: Synthetic oligonucleotide"
  source: /note="RNA"
  source: /note="5' tri-ethylene glycol (TEG)"
  modified_base (1)..(1): bicyclic nucleic acid (BNA)
  modified_base (2)..(2): bicyclic nucleic acid (BNA)
aggaagauggcauuucuag

SEQ ID NO: 8554 - RNA, 18 nt, Artificial Sequence
  source: /note="Description of Artificial Sequence: Synthetic oligonucleotide"
  source: /note="RNA"
  source: /note="5' tri-ethylene glycol (TEG)"
  modified_base (1)..(1): bicyclic nucleic acid (BNA)
  modified_base (2)..(2): bicyclic nucleic acid (BNA)
aggaagauggcauuucua

SEQ ID NO: 8555 - RNA, 17 nt, Artificial Sequence
  source: /note="Description of Artificial Sequence: Synthetic oligonucleotide"
  source: /note="RNA"
  source: /note="5' tri-ethylene glycol (TEG)"
  modified_base (1)..(1): bicyclic nucleic acid (BNA)
  modified_base (2)..(2): bicyclic nucleic acid (BNA)
aggaagauggcauuucu

SEQ ID NO: 8556 - RNA, 16 nt, Artificial Sequence
  source: /note="Description of Artificial Sequence: Synthetic oligonucleotide"
  source: /note="RNA"
  source: /note="5' tri-ethylene glycol (TEG)"
  modified_base (1)..(1): bicyclic nucleic acid (BNA)
  modified_base (2)..(2): bicyclic nucleic acid (BNA)
aggaagauggcauuuc

SEQ ID NO: 8557 - RNA, 15 nt, Artificial Sequence
  source: /note="Description of Artificial Sequence: Synthetic oligonucleotide"
  source: /note="RNA"
  source: /note="5' tri-ethylene glycol (TEG)"
  modified_base (1)..(1): bicyclic nucleic acid (BNA)
  modified_base (2)..(2): bicyclic nucleic acid (BNA)
aggaagauggcauuu

SEQ ID NO: 8558 - RNA, 14 nt, Artificial Sequence
  source: /note="Description of Artificial Sequence: Synthetic oligonucleotide"
  source: /note="RNA"
  source: /note="5' tri-ethylene glycol (TEG)"
  modified_base (1)..(1): bicyclic nucleic acid (BNA)
  modified_base (2)..(2): bicyclic nucleic acid (BNA)
aggaagauggcauu

SEQ ID NO: 8559 - RNA, 13 nt, Artificial Sequence
  source: /note="Description of Artificial Sequence: Synthetic oligonucleotide"
  source: /note="RNA"
  source: /note="5' tri-ethylene glycol (TEG)"
  modified_base (1)..(1): bicyclic nucleic acid (BNA)
  modified_base (2)..(2): bicyclic nucleic acid (BNA)
aggaagauggcau

SEQ ID NO: 8560 - RNA, 12 nt, Artificial Sequence
  source: /note="Description of Artificial Sequence: Synthetic oligonucleotide"
  source: /note="RNA"
  source: /note="5' tri-ethylene glycol (TEG)"
  modified_base (1)..(1): bicyclic nucleic acid (BNA)
  modified_base (2)..(2): bicyclic nucleic acid (BNA)
aggaagauggca

SEQ ID NO: 8561 - RNA, 10 nt, Artificial Sequence
  source: /note="Description of Artificial Sequence: Synthetic oligonucleotide"
  source: /note="RNA"
  source: /note="5' tri-ethylene glycol (TEG)"
  modified_base (1)..(1): bicyclic nucleic acid (BNA)
  modified_base (2)..(2): bicyclic nucleic acid (BNA)
aggaagaugg

SEQ ID NO: 8562 - RNA, 9 nt, Artificial Sequence
  source: /note="Description of Artificial Sequence: Synthetic oligonucleotide"
  source: /note="RNA"
  source: /note="5' tri-ethylene glycol (TEG)"
  modified_base (1)..(1): bicyclic nucleic acid (BNA)
  modified_base (2)..(2): bicyclic nucleic acid (BNA)
aggaagaug

SEQ ID NO: 8563 - RNA, 8 nt, Artificial Sequence
  source: /note="Description of Artificial Sequence: Synthetic oligonucleotide"
  source: /note="RNA"
  source: /note="5' tri-ethylene glycol (TEG)"
  modified_base (1)..(1): bicyclic nucleic acid (BNA)
  modified_base (2)..(2): bicyclic nucleic acid (BNA)
aggaagau

SEQ ID NO: 8564 - RNA, 18 nt, Artificial Sequence
  source: /note="Description of Artificial Sequence: Synthetic oligonucleotide"
  source: /note="RNA"
  source: /note="5' tri-ethylene glycol (TEG)"
  modified_base (1)..(1): bicyclic nucleic acid (BNA)
  modified_base (2)..(2): bicyclic nucleic acid (BNA)
ggaagauggcauuucuag

SEQ ID NO: 8565 - RNA, 17 nt, Artificial Sequence
  source: /note="Description of Artificial Sequence: Synthetic oligonucleotide"
  source: /note="RNA"
  source: /note="5' tri-ethylene glycol (TEG)"
  modified_base (1)..(1): bicyclic nucleic acid (BNA)
  modified_base (2)..(2): bicyclic nucleic acid (BNA)
ggaagauggcauuucua

SEQ ID NO: 8566 - RNA, 16 nt, Artificial Sequence
  source: /note="Description of Artificial Sequence: Synthetic oligonucleotide"
  source: /note="RNA"
  source: /note="5' tri-ethylene glycol (TEG)"
  modified_base (1)..(1): bicyclic nucleic acid (BNA)
  modified_base (2)..(2): bicyclic nucleic acid (BNA)
ggaagauggcauuucu

SEQ ID NO: 8567 - RNA, 15 nt, Artificial Sequence
  source: /note="Description of Artificial Sequence: Synthetic oligonucleotide"
  source: /note="RNA"
  source: /note="5' tri-ethylene glycol (TEG)"
  modified_base (1)..(1): bicyclic nucleic acid (BNA)
  modified_base (2)..(2): bicyclic nucleic acid (BNA)
ggaagauggcauuuc

SEQ ID NO: 8568 - RNA, 14 nt, Artificial Sequence
  source: /note="Description of Artificial Sequence: Synthetic oligonucleotide"
  source: /note="RNA"
  source: /note="5' tri-ethylene glycol (TEG)"
  modified_base (1)..(1): bicyclic nucleic acid (BNA)
  modified_base (2)..(2): bicyclic nucleic acid (BNA)
ggaagauggcauuu

SEQ ID NO: 8569 - RNA, 13 nt, Artificial Sequence
  source: /note="Description of Artificial Sequence: Synthetic oligonucleotide"
  source: /note="RNA"
  source: /note="5' tri-ethylene glycol (TEG)"
  modified_base (1)..(1): bicyclic nucleic acid (BNA)
  modified_base (2)..(2): bicyclic nucleic acid (BNA)
ggaagauggcauu

SEQ ID NO: 8570 - RNA, 12 nt, Artificial Sequence
  source: /note="Description of Artificial Sequence: Synthetic oligonucleotide"
  source: /note="RNA"
  source: /note="5' tri-ethylene glycol (TEG)"
  modified_base (1)..(1): bicyclic nucleic acid (BNA)
  modified_base (2)..(2): bicyclic nucleic acid (BNA)
ggaagauggcau

SEQ ID NO: 8571 - RNA, 11 nt, Artificial Sequence
  source: /note="Description of Artificial Sequence: Synthetic oligonucleotide"
  source: /note="RNA"
  source: /note="5' tri-ethylene glycol (TEG)"
  modified_base (1)..(1): bicyclic nucleic acid (BNA)
  modified_base (2)..(2): bicyclic nucleic acid (BNA)
ggaagauggca

SEQ ID NO: 8572 - RNA, 10 nt, Artificial Sequence
  source: /note="Description of Artificial Sequence: Synthetic oligonucleotide"
  source: /note="RNA"
  source: /note="5' tri-ethylene glycol (TEG)"
  modified_base (1)..(1): bicyclic nucleic acid (BNA)
  modified_base (2)..(2): bicyclic nucleic acid (BNA)
ggaagauggc

SEQ ID NO: 8573 - RNA, 8 nt, Artificial Sequence
  source: /note="Description of Artificial Sequence: Synthetic oligonucleotide"
  source: /note="RNA"
  source: /note="5' tri-ethylene glycol (TEG)"
  modified_base (1)..(1): bicyclic nucleic acid (BNA)
  modified_base (2)..(2): bicyclic nucleic acid (BNA)
ggaagaug

SEQ ID NO: 8574 - RNA, 17 nt, Artificial Sequence
  source: /note="Description of Artificial Sequence: Synthetic oligonucleotide"
  source: /note="RNA"
  source: /note="5' tri-ethylene glycol (TEG)"
  modified_base (1)..(1): bicyclic nucleic acid (BNA)
  modified_base (2)..(2): bicyclic nucleic acid (BNA)
gaagauggcauuucuag

SEQ ID NO: 8575 - RNA, 16 nt, Artificial Sequence
  source: /note="Description of Artificial Sequence: Synthetic oligonucleotide"
  source: /note="RNA"
  source: /note="5' tri-ethylene glycol (TEG)"
  modified_base (1)..(1): bicyclic nucleic acid (BNA)
  modified_base (2)..(2): bicyclic nucleic acid (BNA)
gaagauggcauuucua

SEQ ID NO: 8576 - RNA, 14 nt, Artificial Sequence
  source: /note="Description of Artificial Sequence: Synthetic oligonucleotide"
  source: /note="RNA"
  source: /note="5' tri-ethylene glycol (TEG)"
  modified_base (1)..(1): bicyclic nucleic acid (BNA)
  modified_base (2)..(2): bicyclic nucleic acid (BNA)
gaagauggcauuuc

SEQ ID NO: 8577 - RNA, 13 nt, Artificial Sequence
  source: /note="Description of Artificial Sequence: Synthetic oligonucleotide"
  source: /note="RNA"
  source: /note="5' tri-ethylene glycol (TEG)"
  modified_base (1)..(1): bicyclic nucleic acid (BNA)
  modified_base (2)..(2): bicyclic nucleic acid (BNA)
gaagauggcauuu

SEQ ID NO: 8578 - RNA, 12 nt, Artificial Sequence
  source: /note="Description of Artificial Sequence: Synthetic oligonucleotide"
  source: /note="RNA"
  source: /note="5' tri-ethylene glycol (TEG)"
  modified_base (1)..(1): bicyclic nucleic acid (BNA)
  modified_base (2)..(2): bicyclic nucleic acid (BNA)
gaagauggcauu

SEQ ID NO: 8579 - RNA, 11 nt, Artificial Sequence
  source: /note="Description of Artificial Sequence: Synthetic oligonucleotide"
  source: /note="RNA"
  source: /note="5' tri-ethylene glycol (TEG)"
  modified_base (1)..(1): bicyclic nucleic acid (BNA)
  modified_base (2)..(2): bicyclic nucleic acid (BNA)
gaagauggcau

SEQ ID NO: 8580 - RNA, 10 nt, Artificial Sequence
  source: /note="Description of Artificial Sequence: Synthetic oligonucleotide"
  source: /note="RNA"
  source: /note="5' tri-ethylene glycol (TEG)"
  modified_base (1)..(1): bicyclic nucleic acid (BNA)
  modified_base (2)..(2): bicyclic nucleic acid (BNA)
gaagauggca

SEQ ID NO: 8581 - RNA, 9 nt, Artificial Sequence
  source: /note="Description of Artificial Sequence: Synthetic oligonucleotide"
  source: /note="RNA"
  source: /note="5' tri-ethylene glycol (TEG)"
  modified_base (1)..(1): bicyclic nucleic acid (BNA)
  modified_base (2)..(2): bicyclic nucleic acid (BNA)
gaagauggc

SEQ ID NO: 8582 - RNA, 8 nt, Artificial Sequence
  source: /note="Description of Artificial Sequence: Synthetic oligonucleotide"
  source: /note="RNA"
  source: /note="5' tri-ethylene glycol (TEG)"
  modified_base (1)..(1): bicyclic nucleic acid (BNA)
  modified_base (2)..(2): bicyclic nucleic acid (BNA)
gaagaugg

SEQ ID NO: 8583 - RNA, 16 nt, Artificial Sequence
  source: /note="Description of Artificial Sequence: Synthetic oligonucleotide"
  source: /note="RNA"
  source: /note="5' tri-ethylene glycol (TEG)"
  modified_base (1)..(1): bicyclic nucleic acid (BNA)
  modified_base (2)..(2): bicyclic nucleic acid (BNA)
aagauggcauuucuag

SEQ ID NO: 8584 - RNA, 15 nt, Artificial Sequence
  source: /note="Description of Artificial Sequence: Synthetic oligonucleotide"
  source: /note="RNA"
  source: /note="5' tri-ethylene glycol (TEG)"
  modified_base (1)..(1): bicyclic nucleic acid (BNA)
  modified_base (2)..(2): bicyclic nucleic acid (BNA)
aagauggcauuucua

SEQ ID NO: 8585 - RNA, 14 nt, Artificial Sequence
  source: /note="Description of Artificial Sequence: Synthetic oligonucleotide"
  source: /note="RNA"
  source: /note="5' tri-ethylene glycol (TEG)"
  modified_base (1)..(1): bicyclic nucleic acid (BNA)
  modified_base (2)..(2): bicyclic nucleic acid (BNA)
aagauggcauuucu

SEQ ID NO: 8586 - RNA, 13 nt, Artificial Sequence
  source: /note="Description of Artificial Sequence: Synthetic oligonucleotide"
  source: /note="RNA"
  source: /note="5' tri-ethylene glycol (TEG)"
  modified_base (1)..(1): bicyclic nucleic acid (BNA)
  modified_base (2)..(2): bicyclic nucleic acid (BNA)
aagauggcauuuc

SEQ ID NO: 8587 - RNA, 12 nt, Artificial Sequence
  source: /note="Description of Artificial Sequence: Synthetic oligonucleotide"
  source: /note="RNA"
  source: /note="5' tri-ethylene glycol (TEG)"
  modified_base (1)..(1): bicyclic nucleic acid (BNA)
  modified_base (2)..(2): bicyclic nucleic acid (BNA)
aagauggcauuu

SEQ ID NO: 8588 - RNA, 11 nt, Artificial Sequence
  source: /note="Description of Artificial Sequence: Synthetic oligonucleotide"
  source: /note="RNA"
  source: /note="5' tri-ethylene glycol (TEG)"
  modified_base (1)..(1): bicyclic nucleic acid (BNA)
  modified_base (2)..(2): bicyclic nucleic acid (BNA)
aagauggcauu

SEQ ID NO: 8589 - RNA, 10 nt, Artificial Sequence
  source: /note="Description of Artificial Sequence: Synthetic oligonucleotide"
  source: /note="RNA"
  source: /note="5' tri-ethylene glycol (TEG)"
  modified_base (1)..(1): bicyclic nucleic acid (BNA)
  modified_base (2)..(2): bicyclic nucleic acid (BNA)
aagauggcau

SEQ ID NO: 8590 - RNA, 9 nt, Artificial Sequence
  source: /note="Description of Artificial Sequence: Synthetic oligonucleotide"
  source: /note="RNA"
  source: /note="5' tri-ethylene glycol (TEG)"
  modified_base (1)..(1): bicyclic nucleic acid (BNA)
  modified_base (2)..(2): bicyclic nucleic acid (BNA)
aagauggca

SEQ ID NO: 8591 - RNA, 8 nt, Artificial Sequence
  source: /note="Description of Artificial Sequence: Synthetic oligonucleotide"
  source: /note="RNA"
  source: /note="5' tri-ethylene glycol (TEG)"
  modified_base (1)..(1): bicyclic nucleic acid (BNA)
  modified_base (2)..(2): bicyclic nucleic acid (BNA)
aagauggc

SEQ ID NO: 8592 - RNA, 15 nt, Artificial Sequence
  source: /note="Description of Artificial Sequence: Synthetic oligonucleotide"
  source: /note="RNA"
  source: /note="5' tri-ethylene glycol (TEG)"
  modified_base (1)..(1): bicyclic nucleic acid (BNA)
  modified_base (2)..(2): bicyclic nucleic acid (BNA)
agauggcauuucuag

SEQ ID NO: 8593 - RNA, 14 nt, Artificial Sequence
  source: /note="Description of Artificial Sequence: Synthetic oligonucleotide"
  source: /note="RNA"
  source: /note="5' tri-ethylene glycol (TEG)"
  modified_base (1)..(1): bicyclic nucleic acid (BNA)
  modified_base (2)..(2): bicyclic nucleic acid (BNA)
agauggcauuucua

SEQ ID NO: 8594 - RNA, 13 nt, Artificial Sequence
  source: /note="Description of Artificial Sequence: Synthetic oligonucleotide"
  source: /note="RNA"
  source: /note="5' tri-ethylene glycol (TEG)"
  modified_base (1)..(1): bicyclic nucleic acid (BNA)
  modified_base (2)..(2): bicyclic nucleic acid (BNA)
agauggcauuucu

SEQ ID NO: 8595 - RNA, 12 nt, Artificial Sequence
  source: /note="Description of Artificial Sequence: Synthetic oligonucleotide"
  source: /note="RNA"
  source: /note="5' tri-ethylene glycol (TEG)"
  modified_base (1)..(1): bicyclic nucleic acid (BNA)
  modified_base (2)..(2): bicyclic nucleic acid (BNA)
agauggcauuuc

SEQ ID NO: 8596 - RNA, 11 nt, Artificial Sequence
  source: /note="Description of Artificial Sequence: Synthetic oligonucleotide"
  source: /note="RNA"
  source: /note="5' tri-ethylene glycol (TEG)"
  modified_base (1)..(1): bicyclic nucleic acid (BNA)
  modified_base (2)..(2): bicyclic nucleic acid (BNA)
agauggcauuu

SEQ ID NO: 8597 - RNA, 10 nt, Artificial Sequence
  source: /note="Description of Artificial Sequence: Synthetic oligonucleotide"
  source: /note="RNA"
  source: /note="5' tri-ethylene glycol (TEG)"
  modified_base (1)..(1): bicyclic nucleic acid (BNA)
  modified_base (2)..(2): bicyclic nucleic acid (BNA)
agauggcauu

SEQ ID NO: 8598 - RNA, 9 nt, Artificial Sequence
  source: /note="Description of Artificial Sequence: Synthetic oligonucleotide"
  source: /note="RNA"
  source: /note="5' tri-ethylene glycol (TEG)"
  modified_base (1)..(1): bicyclic nucleic acid (BNA)
  modified_base (2)..(2): bicyclic nucleic acid (BNA)
agauggcau

SEQ ID NO: 8599 - RNA, 8 nt, Artificial Sequence
  source: /note="Description of Artificial Sequence: Synthetic oligonucleotide"
  source: /note="RNA"
  source: /note="5' tri-ethylene glycol (TEG)"
  modified_base (1)..(1): bicyclic nucleic acid (BNA)
  modified_base (2)..(2): bicyclic nucleic acid (BNA)
agauggca

SEQ ID NO: 8600 - DNA, 30 bp, Artificial Sequence; identical to SEQ ID NO: 8204
  source: /note="Description of Artificial Sequence: Synthetic oligonucleotide"
  source: /note="Description of Combined DNA/RNA Molecule: Synthetic oligonucleotide"
  source: /note="DNA/RNA"
  source: /note="5' tri-ethylene glycol (TEG)"
  modified_base (1)..(1): bicyclic nucleic acid (BNA)
  modified_base (2)..(2): bicyclic nucleic acid (BNA)

SEQ ID NO: 8601 - DNA, 29 bp, Artificial Sequence
  source: /note="Description of Artificial Sequence: Synthetic oligonucleotide"
  source: /note="Description of Combined DNA/RNA Molecule: Synthetic oligonucleotide"
  source: /note="DNA/RNA"
  source: /note="5' tri-ethylene glycol (TEG)"
  modified_base (1)..(1): bicyclic nucleic acid (BNA)
  modified_base (2)..(2): bicyclic nucleic acid (BNA)
ctccaacaucaaggaagauggcauuucua

SEQ ID NO: 8602 - DNA, 28 bp, Artificial Sequence
  source: /note="Description of Artificial Sequence: Synthetic oligonucleotide"
  source: /note="Description of Combined DNA/RNA Molecule: Synthetic oligonucleotide"
  source: /note="DNA/RNA"
  source: /note="5' tri-ethylene glycol (TEG)"
  modified_base (1)..(1): bicyclic nucleic acid (BNA)
  modified_base (2)..(2): bicyclic nucleic acid (BNA)
ctccaacaucaaggaagauggcauuucu

SEQ ID NO: 8603 - DNA, 27 bp, Artificial Sequence
  source: /note="Description of Artificial Sequence: Synthetic oligonucleotide"
  source: /note="Description of Combined DNA/RNA Molecule: Synthetic oligonucleotide"
  source: /note="DNA/RNA"
  source: /note="5' tri-ethylene glycol (TEG)"
  modified_base (1)..(1): bicyclic nucleic acid (BNA)
  modified_base (2)..(2): bicyclic nucleic acid (BNA)
ctccaacaucaaggaagauggcauuuc

SEQ ID NO: 8604 - DNA, 26 bp, Artificial Sequence
  source: /note="Description of Artificial Sequence: Synthetic oligonucleotide"
  source: /note="Description of Combined DNA/RNA Molecule: Synthetic oligonucleotide"
  source: /note="DNA/RNA"
  source: /note="5' tri-ethylene glycol (TEG)"
  modified_base (1)..(1): bicyclic nucleic acid (BNA)
  modified_base (2)..(2): bicyclic nucleic acid (BNA)
ctccaacaucaaggaagauggcauuu

SEQ ID NO: 8605 - DNA, 25 bp, Artificial Sequence
  source: /note="Description of Artificial Sequence: Synthetic oligonucleotide"
  source: /note="Description of Combined DNA/RNA Molecule: Synthetic oligonucleotide"
  source: /note="DNA/RNA"
  source: /note="5' tri-ethylene glycol (TEG)"
  modified_base (1)..(1): bicyclic nucleic acid (BNA)
  modified_base (2)..(2): bicyclic nucleic acid (BNA)
ctccaacaucaaggaagauggcauu

SEQ ID NO: 8606 - DNA, 24 bp, Artificial Sequence
  source: /note="Description of Artificial Sequence: Synthetic oligonucleotide"
  source: /note="Description of Combined DNA/RNA Molecule: Synthetic oligonucleotide"
  source: /note="DNA/RNA"
  source: /note="5' tri-ethylene glycol (TEG)"
  modified_base (1)..(1): bicyclic nucleic acid (BNA)
  modified_base (2)..(2): bicyclic nucleic acid (BNA)
ctccaacaucaaggaagauggcau

SEQ ID NO: 8607 - DNA, 23 bp, Artificial Sequence
  source: /note="Description of Artificial Sequence: Synthetic oligonucleotide"
  source: /note="Description of Combined DNA/RNA Molecule: Synthetic oligonucleotide"
  source: /note="DNA/RNA"
  source: /note="5' tri-ethylene glycol (TEG)"
  modified_base (1)..(1): bicyclic nucleic acid (BNA)
  modified_base (2)..(2): bicyclic nucleic acid (BNA)
ctccaacaucaaggaagauggca

SEQ ID NO: 8608 - DNA, 22 bp, Artificial Sequence
  source: /note="Description of Artificial Sequence: Synthetic oligonucleotide"
  source: /note="Description of Combined DNA/RNA Molecule: Synthetic oligonucleotide"
  source: /note="DNA/RNA"
  source: /note="5' tri-ethylene glycol (TEG)"
  modified_base (1)..(1): bicyclic nucleic acid (BNA)
  modified_base (2)..(2): bicyclic nucleic acid (BNA)
ctccaacaucaaggaagauggc

SEQ ID NO: 8609 - DNA, 21 bp, Artificial Sequence
  source: /note="Description of Artificial Sequence: Synthetic oligonucleotide"
  source: /note="Description of Combined DNA/RNA Molecule: Synthetic oligonucleotide"
  source: /note="DNA/RNA"
  source: /note="5' tri-ethylene glycol (TEG)"
  modified_base (1)..(1): bicyclic nucleic acid (BNA)
  modified_base (2)..(2): bicyclic nucleic acid (BNA)
ctccaacaucaaggaagaugg

SEQ ID NO: 8610 - DNA, 20 bp, Artificial Sequence
  source: /note="Description of Artificial Sequence: Synthetic oligonucleotide"
  source: /note="Description of Combined DNA/RNA Molecule: Synthetic oligonucleotide"
  source: /note="DNA/RNA"
  source: /note="5' tri-ethylene glycol (TEG)"
  modified_base (1)..(1): bicyclic nucleic acid (BNA)
  modified_base (2)..(2): bicyclic nucleic acid (BNA)
ctccaacaucaaggaagaug

SEQ ID NO: 8611 - DNA, 19 bp, Artificial Sequence
  source: /note="Description of Artificial Sequence: Synthetic oligonucleotide"
  source: /note="Description of Combined DNA/RNA Molecule: Synthetic oligonucleotide"
  source: /note="DNA/RNA"
  source: /note="5' tri-ethylene glycol (TEG)"
  modified_base (1)..(1): bicyclic nucleic acid (BNA)
  modified_base (2)..(2): bicyclic nucleic acid (BNA)
ctccaacaucaaggaagau

SEQ ID NO: 8612 - DNA, 18 bp, Artificial Sequence
  source: /note="Description of Artificial Sequence: Synthetic oligonucleotide"
  source: /note="Description of Combined DNA/RNA Molecule: Synthetic oligonucleotide"
  source: /note="DNA/RNA"
  source: /note="5' tri-ethylene glycol (TEG)"
  modified_base (1)..(1): bicyclic nucleic acid (BNA)
  modified_base (2)..(2): bicyclic nucleic acid (BNA)
ctccaacaucaaggaaga

SEQ ID NO: 8613 - DNA, 17 bp, Artificial Sequence
  source: /note="Description of Artificial Sequence: Synthetic oligonucleotide"
  source: /note="Description of Combined DNA/RNA Molecule: Synthetic oligonucleotide"
  source: /note="DNA/RNA"
  source: /note="5' tri-ethylene glycol (TEG)"
  modified_base (1)..(1): bicyclic nucleic acid (BNA)
  modified_base (2)..(2): bicyclic nucleic acid (BNA)
ctccaacaucaaggaag

SEQ ID NO: 8614 - DNA, 29 bp, Artificial Sequence
  source: /note="Description of Artificial Sequence: Synthetic oligonucleotide"
  source: /note="Description of Combined DNA/RNA Molecule: Synthetic oligonucleotide"
  source: /note="DNA/RNA"
  source: /note="5' tri-ethylene glycol (TEG)"
  modified_base (1)..(1): bicyclic nucleic acid (BNA)
  modified_base (2)..(2): bicyclic nucleic acid (BNA)
tccaacaucaaggaagauggcauuucuag

SEQ ID NO: 8615 - DNA, 28 bp, Artificial Sequence
  source: /note="Description of Artificial Sequence: Synthetic oligonucleotide"
  source: /note="Description of Combined DNA/RNA Molecule: Synthetic oligonucleotide"
  source: /note="DNA/RNA"
  source: /note="5' tri-ethylene glycol (TEG)"
  modified_base (1)..(1): bicyclic nucleic acid (BNA)
  modified_base (2)..(2): bicyclic nucleic acid (BNA)
tccaacaucaaggaagauggcauuucua

SEQ ID NO: 8616 - DNA, 27 bp, Artificial Sequence
  source: /note="Description of Artificial Sequence: Synthetic oligonucleotide"
  source: /note="Description of Combined DNA/RNA Molecule: Synthetic oligonucleotide"
  source: /note="DNA/RNA"
  source: /note="5' tri-ethylene glycol (TEG)"
  modified_base (1)..(1): bicyclic nucleic acid (BNA)
  modified_base (2)..(2): bicyclic nucleic acid (BNA)
tccaacaucaaggaagauggcauuucu

SEQ ID NO: 8617 - DNA, 26 bp, Artificial Sequence
  source: /note="Description of Artificial Sequence: Synthetic oligonucleotide"
  source: /note="Description of Combined DNA/RNA Molecule: Synthetic oligonucleotide"
  source: /note="DNA/RNA"
  source: /note="5' tri-ethylene glycol (TEG)"
  modified_base (1)..(1): bicyclic nucleic acid (BNA)
  modified_base (2)..(2): bicyclic nucleic acid (BNA)
tccaacaucaaggaagauggcauuuc

SEQ ID NO: 8618 - DNA, 25 bp, Artificial Sequence
  source: /note="Description of Artificial Sequence: Synthetic oligonucleotide"
  source: /note="Description of Combined DNA/RNA Molecule: Synthetic oligonucleotide"
  source: /note="DNA/RNA"
  source: /note="5' tri-ethylene glycol (TEG)"
  modified_base (1)..(1): bicyclic nucleic acid (BNA)
  modified_base (2)..(2): bicyclic nucleic acid (BNA)
tccaacaucaaggaagauggcauuu

SEQ ID NO: 8619 - DNA, 24 bp, Artificial Sequence
  source: /note="Description of Artificial Sequence: Synthetic oligonucleotide"
  source: /note="Description of Combined DNA/RNA Molecule: Synthetic oligonucleotide"
  source: /note="DNA/RNA"
  source: /note="5' tri-ethylene glycol (TEG)"
  modified_base (1)..(1): bicyclic nucleic acid (BNA)
  modified_base (2)..(2): bicyclic nucleic acid (BNA)
tccaacaucaaggaagauggcauu

SEQ ID NO: 8620 - DNA, 23 bp, Artificial Sequence
  source: /note="Description of Artificial Sequence: Synthetic oligonucleotide"
  source: /note="Description of Combined DNA/RNA Molecule: Synthetic oligonucleotide"
  source: /note="DNA/RNA"
  source: /note="5' tri-ethylene glycol (TEG)"
  modified_base (1)..(1): bicyclic nucleic acid (BNA)
  modified_base (2)..(2): bicyclic nucleic acid (BNA)
tccaacaucaaggaagauggcau

SEQ ID NO: 8621 - DNA, 22 bp, Artificial Sequence
  source: /note="Description of Artificial Sequence: Synthetic oligonucleotide"
  source: /note="Description of Combined DNA/RNA Molecule: Synthetic oligonucleotide"
  source: /note="DNA/RNA"
  source: /note="5' tri-ethylene glycol (TEG)"
  modified_base (1)..(1): bicyclic nucleic acid (BNA)
  modified_base (2)..(2): bicyclic nucleic acid (BNA)
tccaacaucaaggaagauggca

SEQ ID NO: 8622 - DNA, 21 bp, Artificial Sequence
  source: /note="Description of Artificial Sequence: Synthetic oligonucleotide"
  source: /note="Description of Combined DNA/RNA Molecule: Synthetic oligonucleotide"
  source: /note="DNA/RNA"
  source: /note="5' tri-ethylene glycol (TEG)"
  modified_base (1)..(1): bicyclic nucleic acid (BNA)
  modified_base (2)..(2): bicyclic nucleic acid (BNA)
tccaacaucaaggaagauggc

SEQ ID NO: 8623 - DNA, 20 bp, Artificial Sequence
  source: /note="Description of Artificial Sequence: Synthetic oligonucleotide"
  source: /note="Description of Combined DNA/RNA Molecule: Synthetic oligonucleotide"
  source: /note="DNA/RNA"
  source: /note="5' tri-ethylene glycol (TEG)"
  modified_base (1)..(1): bicyclic nucleic acid (BNA)
  modified_base (2)..(2): bicyclic nucleic acid (BNA)
tccaacaucaaggaagaugg

SEQ ID NO: 8624 - DNA, 19 bp, Artificial Sequence
  source: /note="Description of Artificial Sequence: Synthetic oligonucleotide"
  source: /note="Description of Combined DNA/RNA Molecule: Synthetic oligonucleotide"
  source: /note="DNA/RNA"
  source: /note="5' tri-ethylene glycol (TEG)"
  modified_base (1)..(1): bicyclic nucleic acid (BNA)
  modified_base (2)..(2): bicyclic nucleic acid (BNA)
tccaacaucaaggaagaug

SEQ ID NO: 8625 - DNA, 18 bp, Artificial Sequence
  source: /note="Description of Artificial Sequence: Synthetic oligonucleotide"
  source: /note="Description of Combined DNA/RNA Molecule: Synthetic oligonucleotide"
  source: /note="DNA/RNA"
  source: /note="5' tri-ethylene glycol (TEG)"
  modified_base (1)..(1): bicyclic nucleic acid (BNA)
  modified_base (2)..(2): bicyclic nucleic acid (BNA)
tccaacaucaaggaagau

SEQ ID NO: 8626 - DNA, 17 bp, Artificial Sequence
  source: /note="Description of Artificial Sequence: Synthetic oligonucleotide"
  source: /note="Description of Combined DNA/RNA Molecule: Synthetic oligonucleotide"
  source: /note="DNA/RNA"
  source: /note="5' tri-ethylene glycol (TEG)"
  modified_base (1)..(1): bicyclic nucleic acid (BNA)
  modified_base (2)..(2): bicyclic nucleic acid (BNA)
tccaacaucaaggaaga

SEQ ID NO: 8627 - DNA, 16 bp, Artificial Sequence
  source: /note="Description of Artificial Sequence: Synthetic oligonucleotide"
  source: /note="Description of Combined DNA/RNA Molecule: Synthetic oligonucleotide"
  source: /note="DNA/RNA"
  source: /note="5' tri-ethylene glycol (TEG)"
  modified_base (1)..(1): bicyclic nucleic acid (BNA)
  modified_base (2)..(2): bicyclic nucleic acid (BNA)
tccaacaucaaggaag

SEQ ID NO: 8628 - RNA, 28 nt, Artificial Sequence
  source: /note="Description of Artificial Sequence: Synthetic oligonucleotide"
  source: /note="RNA"
  source: /note="5' tri-ethylene glycol (TEG)"
  modified_base (1)..(1): bicyclic nucleic acid (BNA)
  modified_base (2)..(2): bicyclic nucleic acid (BNA)
ccaacaucaaggaagauggcauuucuag

SEQ ID NO: 8629 - RNA, 27 nt, Artificial Sequence
  source: /note="Description of Artificial Sequence: Synthetic oligonucleotide"
  source: /note="RNA"
  source: /note="5' tri-ethylene glycol (TEG)"
  modified_base (1)..(1): bicyclic nucleic acid (BNA)
  modified_base (2)..(2): bicyclic nucleic acid (BNA)
ccaacaucaaggaagauggcauuucua

SEQ ID NO: 8630 - RNA, 26 nt, Artificial Sequence
  source: /note="Description of Artificial Sequence: Synthetic oligonucleotide"
  source: /note="RNA"
  source: /note="5' tri-ethylene glycol (TEG)"
  modified_base (1)..(1): bicyclic nucleic acid (BNA)
  modified_base (2)..(2): bicyclic nucleic acid (BNA)
ccaacaucaaggaagauggcauuucu

SEQ ID NO: 8631 - RNA, 25 nt, Artificial Sequence
  source: /note="Description of Artificial Sequence: Synthetic oligonucleotide"
  source: /note="RNA"
  source: /note="5' tri-ethylene glycol (TEG)"
  modified_base (1)..(1): bicyclic nucleic acid (BNA)
  modified_base (2)..(2): bicyclic nucleic acid (BNA)
ccaacaucaaggaagauggcauuuc

SEQ ID NO: 8632 - RNA, 24 nt, Artificial Sequence
  source: /note="Description of Artificial Sequence: Synthetic oligonucleotide"
  source: /note="RNA"
  source: /note="5' tri-ethylene glycol (TEG)"
  modified_base (1)..(1): bicyclic nucleic acid (BNA)
  modified_base (2)..(2): bicyclic nucleic acid (BNA)
ccaacaucaaggaagauggcauuu

SEQ ID NO: 8633 - RNA, 23 nt, Artificial Sequence
  source: /note="Description of Artificial Sequence: Synthetic oligonucleotide"
  source: /note="RNA"
  source: /note="5' tri-ethylene glycol (TEG)"
  modified_base (1)..(1): bicyclic nucleic acid (BNA)
  modified_base (2)..(2): bicyclic nucleic acid (BNA)
ccaacaucaaggaagauggcauu

SEQ ID NO: 8634 - RNA, 22 nt, Artificial Sequence
  source: /note="Description of Artificial Sequence: Synthetic oligonucleotide"
  source: /note="RNA"
  source: /note="5' tri-ethylene glycol (TEG)"
  modified_base (1)..(1): bicyclic nucleic acid (BNA)
  modified_base (2)..(2): bicyclic nucleic acid (BNA)
ccaacaucaaggaagauggcau

SEQ ID NO: 8635 - RNA, 21 nt, Artificial Sequence
  source: /note="Description of Artificial Sequence: Synthetic oligonucleotide"
  source: /note="RNA"
  source: /note="5' tri-ethylene glycol (TEG)"
  modified_base (1)..(1): bicyclic nucleic acid (BNA)
  modified_base (2)..(2): bicyclic nucleic acid (BNA)
ccaacaucaaggaagauggca

SEQ ID NO: 8636 - RNA, 20 nt, Artificial Sequence
  source: /note="Description of Artificial Sequence: Synthetic oligonucleotide"
  source: /note="RNA"
  source: /note="5' tri-ethylene glycol (TEG)"
  modified_base (1)..(1): bicyclic nucleic acid (BNA)
  modified_base (2)..(2): bicyclic nucleic acid (BNA)
ccaacaucaaggaagauggc

SEQ ID NO: 8637 - RNA, 19 nt, Artificial Sequence
  source: /note="Description of Artificial Sequence: Synthetic oligonucleotide"
  source: /note="RNA"
  source: /note="5' tri-ethylene glycol (TEG)"
  modified_base (1)..(1): bicyclic nucleic acid (BNA)
  modified_base (2)..(2): bicyclic nucleic acid (BNA)
ccaacaucaaggaagaugg

SEQ ID NO: 8638 - RNA, 18 nt, Artificial Sequence
  source: /note="Description of Artificial Sequence: Synthetic oligonucleotide"
  source: /note="RNA"
  source: /note="5' tri-ethylene glycol (TEG)"
  modified_base (1)..(1): bicyclic nucleic acid (BNA)
  modified_base (2)..(2): bicyclic nucleic acid (BNA)
ccaacaucaaggaagaug

SEQ ID NO: 8639 - RNA, 17 nt, Artificial Sequence
  source: /note="Description of Artificial Sequence: Synthetic oligonucleotide"
  source: /note="RNA"
  source: /note="5' tri-ethylene glycol (TEG)"
  modified_base (1)..(1): bicyclic nucleic acid (BNA)
  modified_base (2)..(2): bicyclic nucleic acid (BNA)
ccaacaucaaggaagau

SEQ ID NO: 8640 - RNA, 16 nt, Artificial Sequence
  source: /note="Description of Artificial Sequence: Synthetic oligonucleotide"
  source: /note="RNA"
  source: /note="5' tri-ethylene glycol (TEG)"
  modified_base (1)..(1): bicyclic nucleic acid (BNA)
  modified_base (2)..(2): bicyclic nucleic acid (BNA)
ccaacaucaaggaaga

SEQ ID NO: 8641 - RNA, 15 nt, Artificial Sequence
  source: /note="Description of Artificial Sequence: Synthetic oligonucleotide"
  source: /note="RNA"
  source: /note="5' tri-ethylene glycol (TEG)"
  modified_base (1)..(1): bicyclic nucleic acid (BNA)
  modified_base (2)..(2): bicyclic nucleic acid (BNA)
ccaacaucaaggaag

SEQ ID NO: 8642 - RNA, 27 nt, Artificial Sequence
  source: /note="Description of Artificial Sequence: Synthetic oligonucleotide"
  source: /note="RNA"
  source: /note="5' tri-ethylene glycol (TEG)"
  modified_base (1)..(1): bicyclic nucleic acid (BNA)
  modified_base (2)..(2): bicyclic nucleic acid (BNA)
caacaucaaggaagauggcauuucuag

SEQ ID NO: 8643 - RNA, 26 nt, Artificial Sequence
  source: /note="Description of Artificial Sequence: Synthetic oligonucleotide"
  source: /note="RNA"
  source: /note="5' tri-ethylene glycol (TEG)"
  modified_base (1)..(1): bicyclic nucleic acid (BNA)
  modified_base (2)..(2): bicyclic nucleic acid (BNA)
caacaucaaggaagauggcauuucua

SEQ ID NO: 8644 - RNA, 25 nt, Artificial Sequence
  source: /note="Description of Artificial Sequence: Synthetic oligonucleotide"
  source: /note="RNA"
  source: /note="5' tri-ethylene glycol (TEG)"
  modified_base (1)..(1): bicyclic nucleic acid (BNA)
  modified_base (2)..(2): bicyclic nucleic acid (BNA)
caacaucaaggaagauggcauuucu

SEQ ID NO: 8645 - RNA, 24 nt, Artificial Sequence
  source: /note="Description of Artificial Sequence: Synthetic oligonucleotide"
  source: /note="RNA"
  source: /note="5' tri-ethylene glycol (TEG)"
  modified_base (1)..(1): bicyclic nucleic acid (BNA)
  modified_base (2)..(2): bicyclic nucleic acid (BNA)
caacaucaaggaagauggcauuuc

SEQ ID NO: 8646 - RNA, 23 nt, Artificial Sequence
  source: /note="Description of Artificial Sequence: Synthetic oligonucleotide"
  source: /note="RNA"
  source: /note="5' tri-ethylene glycol (TEG)"
  modified_base (1)..(1): bicyclic nucleic acid (BNA)
  modified_base (2)..(2): bicyclic nucleic acid (BNA)
caacaucaaggaagauggcauuu

SEQ ID NO: 8647 - RNA, 22 nt, Artificial Sequence
  source: /note="Description of Artificial Sequence: Synthetic oligonucleotide"
  source: /note="RNA"
  source: /note="5' tri-ethylene glycol (TEG)"
  modified_base (1)..(1): bicyclic nucleic acid (BNA)
  modified_base (2)..(2): bicyclic nucleic acid (BNA)
caacaucaaggaagauggcauu

SEQ ID NO: 8648 - RNA, 21 nt, Artificial Sequence
  source: /note="Description of Artificial Sequence: Synthetic oligonucleotide"
  source: /note="RNA"
  source: /note="5' tri-ethylene glycol (TEG)"
  modified_base (1)..(1): bicyclic nucleic acid (BNA)
  modified_base (2)..(2): bicyclic nucleic acid (BNA)
caacaucaaggaagauggcau

SEQ ID NO: 8649 - RNA, 20 nt, Artificial Sequence
  source: /note="Description of Artificial Sequence: Synthetic oligonucleotide"
  source: /note="RNA"
  source: /note="5' tri-ethylene glycol (TEG)"
  modified_base (1)..(1): bicyclic nucleic acid (BNA)
  modified_base (2)..(2): bicyclic nucleic acid (BNA)
caacaucaaggaagauggca

SEQ ID NO: 8650 - RNA, 19 nt, Artificial Sequence
  source: /note="Description of Artificial Sequence: Synthetic oligonucleotide"
  source: /note="RNA"
  source: /note="5' tri-ethylene glycol (TEG)"
  modified_base (1)..(1): bicyclic nucleic acid (BNA)
  modified_base (2)..(2): bicyclic nucleic acid (BNA)
caacaucaaggaagauggc

SEQ ID NO: 8651 - RNA, 18 nt, Artificial Sequence
  source: /note="Description of Artificial Sequence: Synthetic oligonucleotide"
  source: /note="RNA"
  source: /note="5' tri-ethylene glycol (TEG)"
  modified_base (1)..(1): bicyclic nucleic acid (BNA)
  modified_base (2)..(2): bicyclic nucleic acid (BNA)
caacaucaaggaagaugg

SEQ ID NO: 8652 - RNA, 17 nt, Artificial Sequence
  source: /note="Description of Artificial Sequence: Synthetic oligonucleotide"
  source: /note="RNA"
  source: /note="5' tri-ethylene glycol (TEG)"
  modified_base (1)..(1): bicyclic nucleic acid (BNA)
  modified_base (2)..(2): bicyclic nucleic acid (BNA)
caacaucaaggaagaug

SEQ ID NO: 8653 - RNA, 16 nt, Artificial Sequence
  source: /note="Description of Artificial Sequence: Synthetic oligonucleotide"
  source: /note="RNA"
  source: /note="5' tri-ethylene glycol (TEG)"
  modified_base (1)..(1): bicyclic nucleic acid (BNA)
  modified_base (2)..(2): bicyclic nucleic acid (BNA)
caacaucaaggaagau

SEQ ID NO: 8654 - RNA, 15 nt, Artificial Sequence
  source: /note="Description of Artificial Sequence: Synthetic oligonucleotide"
  source: /note="RNA"
  source: /note="5' tri-ethylene glycol (TEG)"
  modified_base (1)..(1): bicyclic nucleic acid (BNA)
  modified_base (2)..(2): bicyclic nucleic acid (BNA)
caacaucaaggaaga

SEQ ID NO: 8655 - RNA, 14 nt, Artificial Sequence
  source: /note="Description of Artificial Sequence: Synthetic oligonucleotide"
  source: /note="RNA"
  source: /note="5' tri-ethylene glycol (TEG)"
  modified_base (1)..(1): bicyclic nucleic acid (BNA)
  modified_base (2)..(2): bicyclic nucleic acid (BNA)
caacaucaaggaag

SEQ ID NO: 8656 - RNA, 26 nt, Artificial Sequence
  source: /note="Description of Artificial Sequence: Synthetic oligonucleotide"
  source: /note="RNA"
  source: /note="5' tri-ethylene glycol (TEG)"
  modified_base (1)..(1): bicyclic nucleic acid (BNA)
  modified_base (2)..(2): bicyclic nucleic acid (BNA)
aacaucaaggaagauggcauuucuag

SEQ ID NO: 8657 - RNA, 25 nt, Artificial Sequence
  source: /note="Description of Artificial Sequence: Synthetic oligonucleotide"
  source: /note="RNA"
  source: /note="5' tri-ethylene glycol (TEG)"
  modified_base (1)..(1): bicyclic nucleic acid (BNA)
  modified_base (2)..(2): bicyclic nucleic acid (BNA)
aacaucaaggaagauggcauuucua

SEQ ID NO: 8658 - RNA, 24 nt, Artificial Sequence
  source: /note="Description of Artificial Sequence: Synthetic oligonucleotide"
  source: /note="RNA"
  source: /note="5' tri-ethylene glycol (TEG)"
  modified_base (1)..(1): bicyclic nucleic acid (BNA)
  modified_base (2)..(2): bicyclic nucleic acid (BNA)
aacaucaaggaagauggcauuucu

SEQ ID NO: 8659 - RNA, 23 nt, Artificial Sequence
  source: /note="Description of Artificial Sequence: Synthetic oligonucleotide"
  source: /note="RNA"
  source: /note="5' tri-ethylene glycol (TEG)"
  modified_base (1)..(1): bicyclic nucleic acid (BNA)
  modified_base (2)..(2): bicyclic nucleic acid (BNA)
aacaucaaggaagauggcauuuc

SEQ ID NO: 8660 - RNA, 22 nt, Artificial Sequence
  source: /note="Description of Artificial Sequence: Synthetic oligonucleotide"
  source: /note="RNA"
  source: /note="5' tri-ethylene glycol (TEG)"
  modified_base (1)..(1): bicyclic nucleic acid (BNA)
  modified_base (2)..(2): bicyclic nucleic acid (BNA)
aacaucaaggaagauggcauuu

SEQ ID NO: 8661 - RNA, 21 nt, Artificial Sequence
  source: /note="Description of Artificial Sequence: Synthetic oligonucleotide"
  source: /note="RNA"
  source: /note="5' tri-ethylene glycol (TEG)"
  modified_base (1)..(1): bicyclic nucleic acid (BNA)
  modified_base (2)..(2): bicyclic nucleic acid (BNA)
aacaucaaggaagauggcauu

SEQ ID NO: 8662 - RNA, 20 nt, Artificial Sequence
  source: /note="Description of Artificial Sequence: Synthetic oligonucleotide"
  source: /note="RNA"
  source: /note="5' tri-ethylene glycol (TEG)"
  modified_base (1)..(1): bicyclic nucleic acid (BNA)
  modified_base (2)..(2): bicyclic nucleic acid (BNA)
aacaucaaggaagauggcau

SEQ ID NO: 8663 - RNA, 19 nt, Artificial Sequence
  source: /note="Description of Artificial Sequence: Synthetic oligonucleotide"
  source: /note="RNA"
  source: /note="5' tri-ethylene glycol (TEG)"
  modified_base (1)..(1): bicyclic nucleic acid (BNA)
  modified_base (2)..(2): bicyclic nucleic acid (BNA)
aacaucaaggaagauggca

SEQ ID NO: 8664 - RNA, 18 nt, Artificial Sequence
  source: /note="Description of Artificial Sequence: Synthetic oligonucleotide"
  source: /note="RNA"
  source: /note="5' tri-ethylene glycol (TEG)"
  modified_base (1)..(1): bicyclic nucleic acid (BNA)
  modified_base (2)..(2): bicyclic nucleic acid (BNA)
aacaucaaggaagauggc

SEQ ID NO: 8665 - RNA, 17 nt, Artificial Sequence
  source: /note="Description of Artificial Sequence: Synthetic oligonucleotide"
  source: /note="RNA"
  source: /note="5' tri-ethylene glycol (TEG)"
  modified_base (1)..(1): bicyclic nucleic acid (BNA)
  modified_base (2)..(2): bicyclic nucleic acid (BNA)
aacaucaaggaagaugg

SEQ ID NO: 8666 - RNA, 16 nt, Artificial Sequence
  source: /note="Description of Artificial Sequence: Synthetic oligonucleotide"
  source: /note="RNA"
  source: /note="5' tri-ethylene glycol (TEG)"
  modified_base (1)..(1): bicyclic nucleic acid (BNA)
  modified_base (2)..(2): bicyclic nucleic acid (BNA)
aacaucaaggaagaug

SEQ ID NO: 8667 - RNA, 15 nt, Artificial Sequence
  source: /note="Description of Artificial Sequence: Synthetic oligonucleotide"
  source: /note="RNA"
  source: /note="5' tri-ethylene glycol (TEG)"
  modified_base (1)..(1): bicyclic nucleic acid (BNA)
  modified_base (2)..(2): bicyclic nucleic acid (BNA)
aacaucaaggaagau

SEQ ID NO: 8668 - RNA, 14 nt, Artificial Sequence
  source: /note="Description of Artificial Sequence: Synthetic oligonucleotide"
  source: /note="RNA"
  source: /note="5' tri-ethylene glycol (TEG)"
  modified_base (1)..(1): bicyclic nucleic acid (BNA)
  modified_base (2)..(2): bicyclic nucleic acid (BNA)
aacaucaaggaaga

SEQ ID NO: 8669 - RNA, 13 nt, Artificial Sequence
  source: /note="Description of Artificial Sequence: Synthetic oligonucleotide"
  source: /note="RNA"
  source: /note="5' tri-ethylene glycol (TEG)"
  modified_base (1)..(1): bicyclic nucleic acid (BNA)
  modified_base (2)..(2): bicyclic nucleic acid (BNA)
aacaucaaggaag

SEQ ID NO: 8670 - RNA, 25 nt, Artificial Sequence
  source: /note="Description of Artificial Sequence: Synthetic oligonucleotide"
  source: /note="RNA"
  source: /note="5' tri-ethylene glycol (TEG)"
  modified_base (1)..(1): bicyclic nucleic acid (BNA)
  modified_base (2)..(2): bicyclic nucleic acid (BNA)
acaucaaggaagauggcauuucuag

SEQ ID NO: 8671 - RNA, 24 nt, Artificial Sequence
  source: /note="Description of Artificial Sequence: Synthetic oligonucleotide"
  source: /note="RNA"
  source: /note="5' tri-ethylene glycol (TEG)"
  modified_base (1)..(1): bicyclic nucleic acid (BNA)
  modified_base (2)..(2): bicyclic nucleic acid (BNA)
acaucaaggaagauggcauuucua

SEQ ID NO: 8672 - RNA, 23 nt, Artificial Sequence
  source: /note="Description of Artificial Sequence: Synthetic oligonucleotide"
  source: /note="RNA"
  source: /note="5' tri-ethylene glycol (TEG)"
  modified_base (1)..(1): bicyclic nucleic acid (BNA)
  modified_base (2)..(2): bicyclic nucleic acid (BNA)
acaucaaggaagauggcauuucu

SEQ ID NO: 8673 - RNA, 22 nt, Artificial Sequence
  source: /note="Description of Artificial Sequence: Synthetic oligonucleotide"
  source: /note="RNA"
  source: /note="5' tri-ethylene glycol (TEG)"
  modified_base (1)..(1): bicyclic nucleic acid (BNA)
  modified_base (2)..(2): bicyclic nucleic acid (BNA)
acaucaaggaagauggcauuuc

SEQ ID NO: 8674 - RNA, 21 nt, Artificial Sequence
  source: /note="Description of Artificial Sequence: Synthetic oligonucleotide"
  source: /note="RNA"
  source: /note="5' tri-ethylene glycol (TEG)"
  modified_base (1)..(1): bicyclic nucleic acid (BNA)
  modified_base (2)..(2): bicyclic nucleic acid (BNA)
acaucaaggaagauggcauuu

SEQ ID NO: 8675 - RNA, 20 nt, Artificial Sequence
  source: /note="Description of Artificial Sequence: Synthetic oligonucleotide"
  source: /note="RNA"
  source: /note="5' tri-ethylene glycol (TEG)"
  modified_base (1)..(1): bicyclic nucleic acid (BNA)
  modified_base (2)..(2): bicyclic nucleic acid (BNA)
acaucaaggaagauggcauu

SEQ ID NO: 8676 - RNA, 19 nt, Artificial Sequence
  source: /note="Description of Artificial Sequence: Synthetic oligonucleotide"
  source: /note="RNA"
  source: /note="5' tri-ethylene glycol (TEG)"
  modified_base (1)..(1): bicyclic nucleic acid (BNA)
  modified_base (2)..(2): bicyclic nucleic acid (BNA)
acaucaaggaagauggcau

SEQ ID NO: 8677 - RNA, 18 nt, Artificial Sequence
  source: /note="Description of Artificial Sequence: Synthetic oligonucleotide"
  source: /note="RNA"
  source: /note="5' tri-ethylene glycol (TEG)"
  modified_base (1)..(1): bicyclic nucleic acid (BNA)
  modified_base (2)..(2): bicyclic nucleic acid (BNA)
acaucaaggaagauggca

SEQ ID NO: 8678 - RNA, 17 nt, Artificial Sequence
  source: /note="Description of Artificial Sequence: Synthetic oligonucleotide"
  source: /note="RNA"
  source: /note="5' tri-ethylene glycol (TEG)"
  modified_base (1)..(1): bicyclic nucleic acid (BNA)
  modified_base (2)..(2): bicyclic nucleic acid (BNA)
acaucaaggaagauggc

SEQ ID NO: 8679 - RNA, 16 nt, Artificial Sequence
  source: /note="Description of Artificial Sequence: Synthetic oligonucleotide"
  source: /note="RNA"
  source: /note="5' tri-ethylene glycol (TEG)"
  modified_base (1)..(1): bicyclic nucleic acid (BNA)
  modified_base (2)..(2): bicyclic nucleic acid (BNA)
acaucaaggaagaugg

SEQ ID NO: 8680 - RNA, 15 nt, Artificial Sequence
  source: /note="Description of Artificial Sequence: Synthetic oligonucleotide"
  source: /note="RNA"
  source: /note="5' tri-ethylene glycol (TEG)"
  modified_base (1)..(1): bicyclic nucleic acid (BNA)
  modified_base (2)..(2): bicyclic nucleic acid (BNA)
acaucaaggaagaug

SEQ ID NO: 8681 - RNA, 14 nt, Artificial Sequence
  source: /note="Description of Artificial Sequence: Synthetic oligonucleotide"
  source: /note="RNA"
  source: /note="5' tri-ethylene glycol (TEG)"
  modified_base (1)..(1): bicyclic nucleic acid (BNA)
  modified_base (2)..(2): bicyclic nucleic acid (BNA)
acaucaaggaagau

SEQ ID NO: 8682 - RNA, 13 nt, Artificial Sequence
  source: /note="Description of Artificial Sequence: Synthetic oligonucleotide"
  source: /note="RNA"
  source: /note="5' tri-ethylene glycol (TEG)"
  modified_base (1)..(1): bicyclic nucleic acid (BNA)
  modified_base (2)..(2): bicyclic nucleic acid (BNA)
acaucaaggaaga

SEQ ID NO: 8683 - RNA, 12 nt, Artificial Sequence
  source: /note="Description of Artificial Sequence: Synthetic oligonucleotide"
  source: /note="RNA"
  source: /note="5' tri-ethylene glycol (TEG)"
  modified_base (1)..(1): bicyclic nucleic acid (BNA)
  modified_base (2)..(2): bicyclic nucleic acid (BNA)
acaucaaggaag

SEQ ID NO: 8684 - RNA, 24 nt, Artificial Sequence
  source: /note="Description of Artificial Sequence: Synthetic oligonucleotide"
  source: /note="RNA"
  source: /note="5' tri-ethylene glycol (TEG)"
  modified_base (1)..(1): bicyclic nucleic acid (BNA)
  modified_base (2)..(2): bicyclic nucleic acid (BNA)
caucaaggaagauggcauuucuag

SEQ ID NO: 8685 - RNA, 23 nt, Artificial Sequence
  source: /note="Description of Artificial Sequence: Synthetic oligonucleotide"
  source: /note="RNA"
  source: /note="5' tri-ethylene glycol (TEG)"
  modified_base (1)..(1): bicyclic nucleic acid (BNA)
  modified_base (2)..(2): bicyclic nucleic acid (BNA)
caucaaggaagauggcauuucua

SEQ ID NO: 8686 - RNA, 22 nt, Artificial Sequence
  source: /note="Description of Artificial Sequence: Synthetic oligonucleotide"
  source: /note="RNA"
  source: /note="5' tri-ethylene glycol (TEG)"
  modified_base (1)..(1): bicyclic nucleic acid (BNA)
  modified_base (2)..(2): bicyclic nucleic acid (BNA)
caucaaggaagauggcauuucu

SEQ ID NO: 8687 - RNA, 21 nt, Artificial Sequence
  source: /note="Description of Artificial Sequence: Synthetic oligonucleotide"
  source: /note="RNA"
  source: /note="5' tri-ethylene glycol (TEG)"
  modified_base (1)..(1): bicyclic nucleic acid (BNA)
  modified_base (2)..(2): bicyclic nucleic acid (BNA)
caucaaggaagauggcauuuc

SEQ ID NO: 8688 - RNA, 20 nt, Artificial Sequence
  source: /note="Description of Artificial Sequence: Synthetic oligonucleotide"
  source: /note="RNA"
  source: /note="5' tri-ethylene glycol (TEG)"
  modified_base (1)..(1): bicyclic nucleic acid (BNA)
  modified_base (2)..(2): bicyclic nucleic acid (BNA)
caucaaggaagauggcauuu

SEQ ID NO: 8689 - RNA, 19 nt, Artificial Sequence
  source: /note="Description of Artificial Sequence: Synthetic oligonucleotide"
  source: /note="RNA"
  source: /note="5' tri-ethylene glycol (TEG)"
  modified_base (1)..(1): bicyclic nucleic acid (BNA)
  modified_base (2)..(2): bicyclic nucleic acid (BNA)
caucaaggaagauggcauu

SEQ ID NO: 8690 - RNA, 18 nt, Artificial Sequence
  source: /note="Description of Artificial Sequence: Synthetic oligonucleotide"
  source: /note="RNA"
  source: /note="5' tri-ethylene glycol (TEG)"
  modified_base (1)..(1): bicyclic nucleic acid (BNA)
  modified_base (2)..(2): bicyclic nucleic acid (BNA)
caucaaggaagauggcau

SEQ ID NO: 8691 - RNA, 17 nt, Artificial Sequence
  source: /note="Description of Artificial Sequence: Synthetic oligonucleotide"
  source: /note="RNA"
  source: /note="5' tri-ethylene glycol (TEG)"
  modified_base (1)..(1): bicyclic nucleic acid (BNA)
  modified_base (2)..(2): bicyclic nucleic acid (BNA)
caucaaggaagauggca

SEQ ID NO: 8692 - RNA, 16 nt, Artificial Sequence
  source: /note="Description of Artificial Sequence: Synthetic oligonucleotide"
  source: /note="RNA"
  source: /note="5' tri-ethylene glycol (TEG)"
  modified_base (1)..(1): bicyclic nucleic acid (BNA)
  modified_base (2)..(2): bicyclic nucleic acid (BNA)
caucaaggaagauggc

SEQ ID NO: 8693 - RNA, 15 nt, Artificial Sequence
  source: /note="Description of Artificial Sequence: Synthetic oligonucleotide"
  source: /note="RNA"
  source: /note="5' tri-ethylene glycol (TEG)"
  modified_base (1)..(1): bicyclic nucleic acid (BNA)
  modified_base (2)..(2): bicyclic nucleic acid (BNA)
caucaaggaagaugg

SEQ ID NO: 8694 - RNA, 14 nt, Artificial Sequence
  source: /note="Description of Artificial Sequence: Synthetic oligonucleotide"
  source: /note="RNA"
  source: /note="5' tri-ethylene glycol (TEG)"
  modified_base (1)..(1): bicyclic nucleic acid (BNA)
  modified_base (2)..(2): bicyclic nucleic acid (BNA)
caucaaggaagaug

SEQ ID NO: 8695 - RNA, 13 nt, Artificial Sequence
  source: /note="Description of Artificial Sequence: Synthetic oligonucleotide"
  source: /note="RNA"
  source: /note="5' tri-ethylene glycol (TEG)"
  modified_base (1)..(1): bicyclic nucleic acid (BNA)
  modified_base (2)..(2): bicyclic nucleic acid (BNA)
caucaaggaagau

SEQ ID NO: 8696 - RNA, 12 nt, Artificial Sequence
  source: /note="Description of Artificial Sequence: Synthetic oligonucleotide"
  source: /note="RNA"
  source: /note="5' tri-ethylene glycol (TEG)"
  modified_base (1)..(1): bicyclic nucleic acid (BNA)
  modified_base (2)..(2): bicyclic nucleic acid (BNA)
caucaaggaaga

SEQ ID NO: 8697 - RNA, 11 nt, Artificial Sequence
  source: /note="Description of Artificial Sequence: Synthetic oligonucleotide"
  source: /note="RNA"
  source: /note="5' tri-ethylene glycol (TEG)"
  modified_base (1)..(1): bicyclic nucleic acid (BNA)
  modified_base (2)..(2): bicyclic nucleic acid (BNA)
caucaaggaag

SEQ ID NO: 8698 - DNA, 23 bp, Artificial Sequence
  source: /note="Description of Artificial Sequence: Synthetic oligonucleotide"
  source: /note="Description of Combined DNA/RNA Molecule: Synthetic oligonucleotide"
  source: /note="DNA/RNA"
  source: /note="5' tri-ethylene glycol (TEG)"
  modified_base (1)..(1): bicyclic nucleic acid (BNA)
  modified_base (2)..(2): bicyclic nucleic acid (BNA)
atcaaggaagauggcauuucuag

SEQ ID NO: 8699 - DNA, 22 bp, Artificial Sequence
  source: /note="Description of Artificial Sequence: Synthetic oligonucleotide"
  source: /note="Description of Combined DNA/RNA Molecule: Synthetic oligonucleotide"
  source: /note="DNA/RNA"
  source: /note="5' tri-ethylene glycol (TEG)"
  modified_base (1)..(1): bicyclic nucleic acid (BNA)
  modified_base (2)..(2): bicyclic nucleic acid (BNA)
atcaaggaagauggcauuucua

SEQ ID NO: 8700 - DNA, 21 bp, Artificial Sequence
  source: /note="Description of Artificial Sequence: Synthetic oligonucleotide"
  source: /note="Description of Combined DNA/RNA Molecule: Synthetic oligonucleotide"
  source: /note="DNA/RNA"
  source: /note="5' tri-ethylene glycol (TEG)"
  modified_base (1)..(1): bicyclic nucleic acid (BNA)
  modified_base (2)..(2): bicyclic nucleic acid (BNA)
atcaaggaagauggcauuucu

SEQ ID NO: 8701 - DNA, 20 bp, Artificial Sequence
  source: /note="Description of Artificial Sequence: Synthetic oligonucleotide"
  source: /note="Description of Combined DNA/RNA Molecule: Synthetic oligonucleotide"
  source: /note="DNA/RNA"
  source: /note="5' tri-ethylene glycol (TEG)"
  modified_base (1)..(1): bicyclic nucleic acid (BNA)
  modified_base (2)..(2): bicyclic nucleic acid (BNA)
atcaaggaagauggcauuuc

SEQ ID NO: 8702 - DNA, 19 bp, Artificial Sequence
  source: /note="Description of Artificial Sequence: Synthetic oligonucleotide"
  source: /note="Description of Combined DNA/RNA Molecule: Synthetic oligonucleotide"
  source: /note="DNA/RNA"
  source: /note="5' tri-ethylene glycol (TEG)"
  modified_base (1)..(1): bicyclic nucleic acid (BNA)
  modified_base (2)..(2): bicyclic nucleic acid (BNA)
atcaaggaagauggcauuu

SEQ ID NO: 8703 - DNA, 18 bp, Artificial Sequence
  source: /note="Description of Artificial Sequence: Synthetic oligonucleotide"
  source: /note="Description of Combined DNA/RNA Molecule: Synthetic oligonucleotide"
  source: /note="DNA/RNA"
  source: /note="5' tri-ethylene glycol (TEG)"
  modified_base (1)..(1): bicyclic nucleic acid (BNA)
  modified_base (2)..(2): bicyclic nucleic acid (BNA)
atcaaggaagauggcauu

SEQ ID NO: 8704 - DNA, 17 bp, Artificial Sequence
  source: /note="Description of Artificial Sequence: Synthetic oligonucleotide"
  source: /note="Description of Combined DNA/RNA Molecule: Synthetic oligonucleotide"
  source: /note="DNA/RNA"
  source: /note="5' tri-ethylene glycol (TEG)"
  modified_base (1)..(1): bicyclic nucleic acid (BNA)
  modified_base (2)..(2): bicyclic nucleic acid (BNA)
atcaaggaagauggcau

SEQ ID NO: 8705 - DNA, 16 bp, Artificial Sequence
  source: /note="Description of Artificial Sequence: Synthetic oligonucleotide"
  source: /note="Description of Combined DNA/RNA Molecule: Synthetic oligonucleotide"
  source: /note="DNA/RNA"
  source: /note="5' tri-ethylene glycol (TEG)"
  modified_base (1)..(1): bicyclic nucleic acid (BNA)
  modified_base (2)..(2): bicyclic nucleic acid (BNA)
atcaaggaagauggca

SEQ ID NO: 8706 - DNA, 15 bp, Artificial Sequence
  source: /note="Description of Artificial Sequence: Synthetic oligonucleotide"
  source: /note="Description of Combined DNA/RNA Molecule: Synthetic oligonucleotide"
  source: /note="DNA/RNA"
  source: /note="5' tri-ethylene glycol (TEG)"
  modified_base (1)..(1): bicyclic nucleic acid (BNA)
  modified_base (2)..(2): bicyclic nucleic acid (BNA)
atcaaggaagauggc

SEQ ID NO: 8707 - DNA, 14 bp, Artificial Sequence
  source: /note="Description of Artificial Sequence: Synthetic oligonucleotide"
  source: /note="Description of Combined DNA/RNA Molecule: Synthetic oligonucleotide"
  source: /note="DNA/RNA"
  source: /note="5' tri-ethylene glycol (TEG)"
  modified_base (1)..(1): bicyclic nucleic acid (BNA)
  modified_base (2)..(2): bicyclic nucleic acid (BNA)
atcaaggaagaugg

SEQ ID NO: 8708 - DNA, 13 bp, Artificial Sequence
  source: /note="Description of Artificial Sequence: Synthetic oligonucleotide"
  source: /note="Description of Combined DNA/RNA Molecule: Synthetic oligonucleotide"
  source: /note="DNA/RNA"
  source: /note="5' tri-ethylene glycol (TEG)"
  modified_base (1)..(1): bicyclic nucleic acid (BNA)
  modified_base (2)..(2): bicyclic nucleic acid (BNA)
atcaaggaagaug

SEQ ID NO: 8709 - DNA, 12 bp, Artificial Sequence
  source: /note="Description of Artificial Sequence: Synthetic oligonucleotide"
  source: /note="Description of Combined DNA/RNA Molecule: Synthetic oligonucleotide"
  source: /note="DNA/RNA"
  source: /note="5' tri-ethylene glycol (TEG)"
  modified_base (1)..(1): bicyclic nucleic acid (BNA)
  modified_base (2)..(2): bicyclic nucleic acid (BNA)
atcaaggaagau

SEQ ID NO: 8710 - DNA, 11 bp, Artificial Sequence
  source: /note="Description of Artificial Sequence: Synthetic oligonucleotide"
  source: /note="DNA/RNA"
  source: /note="5' tri-ethylene glycol (TEG)"
  modified_base (1)..(1): bicyclic nucleic acid (BNA)
  modified_base (2)..(2): bicyclic nucleic acid (BNA)
atcaaggaaga

SEQ ID NO: 8711 - DNA, 10 bp, Artificial Sequence
  source: /note="Description of Artificial Sequence: Synthetic oligonucleotide"
  source: /note="DNA/RNA"
  source: /note="5' tri-ethylene glycol (TEG)"
  modified_base (1)..(1): bicyclic nucleic acid (BNA)
  modified_base (2)..(2): bicyclic nucleic acid (BNA)
atcaaggaag

SEQ ID NO: 8712 - RNA, 23 nt, Artificial Sequence
  source: /note="Description of Artificial Sequence: Synthetic oligonucleotide"
  source: /note="RNA"
  source: /note="5' tri-ethylene glycol (TEG)"
  modified_base (1)..(1): bicyclic nucleic acid (BNA)
  modified_base (2)..(2): bicyclic nucleic acid (BNA)
ccagagcagguaccuccaacauc

SEQ ID NO: 8713 - RNA, 18 nt, Artificial Sequence
  source: /note="Description of Artificial Sequence: Synthetic oligonucleotide"
  source: /note="RNA"
  source: /note="5' tri-ethylene glycol (TEG)"
  modified_base (1)..(1): bicyclic nucleic acid (BNA)
  modified_base (2)..(2): bicyclic nucleic acid (BNA)
ccagagcagguaccucca

SEQ ID NO: 8714 - RNA, 23 nt, Artificial Sequence
  source: /note="Description of Artificial Sequence: Synthetic oligonucleotide"
  source: /note="RNA"
  source: /note="5' tri-ethylene glycol (TEG)"
  modified_base (1)..(1): bicyclic nucleic acid (BNA)
  modified_base (2)..(2): bicyclic nucleic acid (BNA)
ccucugugauuuuauaacuugau

SEQ ID NO: 8715 - DNA, 17 bp, Artificial Sequence
  source: /note="Description of Artificial Sequence: Synthetic oligonucleotide"
  source: /note="Description of Combined DNA/RNA Molecule: Synthetic oligonucleotide"
  source: /note="DNA/RNA"
  source: /note="5' tri-ethylene glycol (TEG)"
  modified_base (1)..(1): bicyclic nucleic acid (BNA)
  modified_base (2)..(2): bicyclic nucleic acid (BNA)
tcacccaccaucacccu

SEQ ID NO: 8716 - DNA, 20 bp, Artificial Sequence
  source: /note="Description of Artificial Sequence: Synthetic oligonucleotide"
  source: /note="Description of Combined DNA/RNA Molecule: Synthetic oligonucleotide"
  source: /note="DNA/RNA"
  source: /note="5' tri-ethylene glycol (TEG)"
  modified_base (1)..(1): bicyclic nucleic acid (BNA)
  modified_base (2)..(2): bicyclic nucleic acid (BNA)
tgauauccucaaggucaccc

SEQ ID NO: 8717 - DNA, 22 bp, Artificial Sequence
  source: /note="Description of Artificial Sequence: Synthetic oligonucleotide"
  source: /note="Description of Combined DNA/RNA Molecule: Synthetic oligonucleotide"
  source: /note="DNA/RNA"
  source: /note="5' tri-ethylene glycol (TEG)"
  modified_base (1)..(1): bicyclic nucleic acid (BNA)
  modified_base (2)..(2): bicyclic nucleic acid (BNA)
ctgcuugaugaucaucucguug

SEQ ID NO: 8718 - DNA, 18 bp, Artificial Sequence
  source: /note="Description of Artificial Sequence: Synthetic oligonucleotide"
  source: /note="Description of Combined DNA/RNA Molecule: Synthetic oligonucleotide"
  source: /note="DNA/RNA"
  source: /note="5' tri-ethylene glycol (TEG)"
  modified_base (1)..(1): bicyclic nucleic acid (BNA)
  modified_base (2)..(2): bicyclic nucleic acid (BNA)
ctgcuugaugaucaucuc

SEQ ID NO: 8719 - DNA, 19 bp, Artificial Sequence
  source: /note="Description of Artificial Sequence: Synthetic oligonucleotide"
  source: /note="Description of Combined DNA/RNA Molecule: Synthetic oligonucleotide"
  source: /note="DNA/RNA"
  source: /note="5' tri-ethylene glycol (TEG)"
  modified_base (1)..(1): bicyclic nucleic acid (BNA)
  modified_base (2)..(2): bicyclic nucleic acid (BNA)
gtuuccuuaguaaccacag

SEQ ID NO: 8720 - DNA, 17 bp, Artificial Sequence
  source: /note="Description of Artificial Sequence: Synthetic oligonucleotide"
  source: /note="Description of Combined DNA/RNA Molecule: Synthetic oligonucleotide"
  source: /note="DNA/RNA"
  source: /note="5' tri-ethylene glycol (TEG)"
  modified_base (1)..(1): bicyclic nucleic acid (BNA)
  modified_base (2)..(2): bicyclic nucleic acid (BNA)
gtuuccuuaguaaccac

SEQ ID NO: 8721 - DNA, 20 bp, Artificial Sequence
  source: /note="Description of Artificial Sequence: Synthetic oligonucleotide"
  source: /note="Description of Combined DNA/RNA Molecule: Synthetic oligonucleotide"
  source: /note="DNA/RNA"
  modified_base (1)..(1): bicyclic nucleic acid (BNA)
  modified_base (2)..(2): bicyclic nucleic acid (BNA)
  source: /note="3' tri-ethylene glycol (TEG)"
tcaaggaagauggcauuucu

SEQ ID NO: 8722 - DNA, 22 bp, Artificial Sequence
  source: /note="Description of Artificial Sequence: Synthetic oligonucleotide"
  source: /note="Description of Combined DNA/RNA Molecule: Synthetic oligonucleotide"
  source: /note="DNA/RNA"
  modified_base (1)..(1): bicyclic nucleic acid (BNA)
  modified_base (2)..(2): bicyclic nucleic acid (BNA)
  source: /note="3' tri-ethylene glycol (TEG)"
tcaaggaagauggcauuucuag

SEQ ID NO: 8723 - RNA, 18 nt, Artificial Sequence
  source: /note="Description of Artificial Sequence: Synthetic oligonucleotide"
  source: /note="RNA"
  modified_base (1)..(1): bicyclic nucleic acid (BNA)
  modified_base (2)..(2): bicyclic nucleic acid (BNA)
  source: /note="3' tri-ethylene glycol (TEG)"
gguaaguucuguccaagc

SEQ ID NO: 8724 - DNA, 18 bp, Artificial Sequence
  source: /note="Description of Artificial Sequence: Synthetic oligonucleotide"
  source: /note="Description of Combined DNA/RNA Molecule: Synthetic oligonucleotide"
  source: /note="DNA/RNA"
  modified_base (1)..(1): bicyclic nucleic acid (BNA)
  modified_base (2)..(2): bicyclic nucleic acid (BNA)
  source: /note="3' tri-ethylene glycol (TEG)"
gtaaguucuguccaagcc

SEQ ID NO: 8725 - RNA, 18 nt, Artificial Sequence
  source: /note="Description of Artificial Sequence: Synthetic oligonucleotide"
  source: /note="RNA"
  modified_base (1)..(1): bicyclic nucleic acid (BNA)
  modified_base (2)..(2): bicyclic nucleic acid (BNA)
  source: /note="3' tri-ethylene glycol (TEG)"
agucgguaaguucugucc

SEQ ID NO: 8726 - DNA, 18 bp, Artificial Sequence
  source: /note="Description of Artificial Sequence: Synthetic oligonucleotide"
  source: /note="Description of Combined DNA/RNA Molecule: Synthetic oligonucleotide"
  source: /note="DNA/RNA"
  modified_base (1)..(1): bicyclic nucleic acid (BNA)
  modified_base (2)..(2): bicyclic nucleic acid (BNA)
  source: /note="3' tri-ethylene glycol (TEG)"
ctguccaagcccgguuga

SEQ ID NO: 8727 - DNA, 15 bp, Artificial Sequence
  source: /note="Description of Artificial Sequence: Synthetic oligonucleotide"
  source: /note="Description of Combined DNA/RNA Molecule: Synthetic oligonucleotide"
  source: /note="DNA/RNA"
  modified_base (1)..(1): bicyclic nucleic acid (BNA)
  modified_base (2)..(2): bicyclic nucleic acid (BNA)
  source: /note="3' tri-ethylene glycol (TEG)"
taaguucuguccaag

SEQ ID NO: 8728 - DNA, 20 bp, Artificial Sequence
  source: /note="Description of Artificial Sequence: Synthetic oligonucleotide"
  source: /note="Description of Combined DNA/RNA Molecule: Synthetic oligonucleotide"
  source: /note="DNA/RNA"
  modified_base (1)..(1): bicyclic nucleic acid (BNA)
  modified_base (2)..(2): bicyclic nucleic acid (BNA)
  source: /note="3' tri-ethylene glycol (TEG)"
ttcuguccaagcccgguuga

SEQ ID NO: 8729 - DNA, 19 bp, Artificial Sequence
  source: /note="Description of Artificial Sequence: Synthetic oligonucleotide"
  source: /note="Description of Combined DNA/RNA Molecule: Synthetic oligonucleotide"
  source: /note="DNA/RNA"
  modified_base (1)..(1): bicyclic nucleic acid (BNA)
  modified_base (2)..(2): bicyclic nucleic acid (BNA)
  source: /note="3' tri-ethylene glycol (TEG)"
ttcuguccaagcccgguug

SEQ ID NO: 8730 - DNA, 18 bp, Artificial Sequence
  source: /note="Description of Artificial Sequence: Synthetic oligonucleotide"
  source: /note="Description of Combined DNA/RNA Molecule: Synthetic oligonucleotide"
  source: /note="DNA/RNA"
  modified_base (1)..(1): bicyclic nucleic acid (BNA)
  modified_base (2)..(2): bicyclic nucleic acid (BNA)
  source: /note="3' tri-ethylene glycol (TEG)"
ttcuguccaagcccgguu

SEQ ID NO: 8731 - DNA, 17 bp, Artificial Sequence
  source: /note="Description of Artificial Sequence: Synthetic oligonucleotide"
  source: /note="Description of Combined DNA/RNA Molecule: Synthetic oligonucleotide"
  source: /note="DNA/RNA"
  modified_base (1)..(1): bicyclic nucleic acid (BNA)
  modified_base (2)..(2): bicyclic nucleic acid (BNA)
  source: /note="3' tri-ethylene glycol (TEG)"
ttcuguccaagcccggu

SEQ ID NO: 8732 - DNA, 16 bp, Artificial Sequence
  source: /note="Description of Artificial Sequence: Synthetic oligonucleotide"
  source: /note="Description of Combined DNA/RNA Molecule: Synthetic oligonucleotide"
  source: /note="DNA/RNA"
  modified_base (1)..(1): bicyclic nucleic acid (BNA)
  modified_base (2)..(2): bicyclic nucleic acid (BNA)
  source: /note="3' tri-ethylene glycol (TEG)"
ttcuguccaagcccgg

SEQ ID NO: 8733 - DNA, 15 bp, Artificial Sequence
  source: /note="Description of Artificial Sequence: Synthetic oligonucleotide"
  source: /note="Description of Combined DNA/RNA Molecule: Synthetic oligonucleotide"
  source: /note="DNA/RNA"
  modified_base (1)..(1): bicyclic nucleic acid (BNA)
  modified_base (2)..(2): bicyclic nucleic acid (BNA)
  source: /note="3' tri-ethylene glycol (TEG)"
ttcuguccaagcccg

SEQ ID NO: 8734 - DNA, 14 bp, Artificial Sequence
  source: /note="Description of Artificial Sequence: Synthetic oligonucleotide"
  source: /note="Description of Combined DNA/RNA Molecule: Synthetic oligonucleotide"
  source: /note="DNA/RNA"
  modified_base (1)..(1): bicyclic nucleic acid (BNA)
  modified_base (2)..(2): bicyclic nucleic acid (BNA)
  source: /note="3' tri-ethylene glycol (TEG)"
ttcuguccaagccc

SEQ ID NO: 8735 - DNA, 13 bp, Artificial Sequence
  source: /note="Description of Artificial Sequence: Synthetic oligonucleotide"
  source: /note="Description of Combined DNA/RNA Molecule: Synthetic oligonucleotide"
  source: /note="DNA/RNA"
  modified_base (1)..(1): bicyclic nucleic acid (BNA)
  modified_base (2)..(2): bicyclic nucleic acid (BNA)
  source: /note="3' tri-ethylene glycol (TEG)"
ttcuguccaagcc

SEQ ID NO: 8736 - DNA, 12 bp, Artificial Sequence
  source: /note="Description of Artificial Sequence: Synthetic oligonucleotide"
  source: /note="Description of Combined DNA/RNA Molecule: Synthetic oligonucleotide"
  source: /note="DNA/RNA"
  modified_base (1)..(1): bicyclic nucleic acid (BNA)
  modified_base (2)..(2): bicyclic nucleic acid (BNA)
  source: /note="3' tri-ethylene glycol (TEG)"
ttcuguccaagc

SEQ ID NO: 8737 - DNA, 11 bp, Artificial Sequence
  source: /note="Description of Artificial Sequence: Synthetic oligonucleotide"
  source: /note="Description of Combined DNA/RNA Molecule: Synthetic oligonucleotide"
  source: /note="DNA/RNA"
  modified_base (1)..(1): bicyclic nucleic acid (BNA)
  modified_base (2)..(2): bicyclic nucleic acid (BNA)
  source: /note="3' tri-ethylene glycol (TEG)"
ttcuguccaag

SEQ ID NO: 8738 - DNA, 10 bp, Artificial Sequence
  source: /note="Description of Artificial Sequence: Synthetic oligonucleotide"
  source: /note="Description of Combined DNA/RNA Molecule: Synthetic oligonucleotide"
  source: /note="DNA/RNA"
  modified_base (1)..(1): bicyclic nucleic acid (BNA)
  modified_base (2)..(2): bicyclic nucleic acid (BNA)
  source: /note="3' tri-ethylene glycol (TEG)"
ttcuguccaa

SEQ ID NO: 8739 - DNA, 9 bp, Artificial Sequence
  source: /note="Description of Artificial Sequence: Synthetic oligonucleotide"
  source: /note="Description of Combined DNA/RNA Molecule: Synthetic oligonucleotide"
  source: /note="DNA/RNA"
  modified_base (1)..(1): bicyclic nucleic acid (BNA)
  modified_base (2)..(2): bicyclic nucleic acid (BNA)
  source: /note="3' tri-ethylene glycol (TEG)"
ttcugucca

SEQ ID NO: 8740 - DNA, 8 bp, Artificial Sequence
  source: /note="Description of Artificial Sequence: Synthetic oligonucleotide"
  source: /note="Description of Combined DNA/RNA Molecule: Synthetic oligonucleotide"
  source: /note="DNA/RNA"
  modified_base (1)..(1): bicyclic nucleic acid (BNA)
  modified_base (2)..(2): bicyclic nucleic acid (BNA)
  source: /note="3' tri-ethylene glycol (TEG)"
ttcugucc

SEQ ID NO: 8741 - DNA, 19 bp, Artificial Sequence
  source: /note="Description of Artificial Sequence: Synthetic oligonucleotide"
  source: /note="Description of Combined DNA/RNA Molecule: Synthetic oligonucleotide"
  source: /note="DNA/RNA"
  modified_base (1)..(1): bicyclic nucleic acid (BNA)
  modified_base (2)..(2): bicyclic nucleic acid (BNA)
  source: /note="3' tri-ethylene glycol (TEG)"
tcuguccaagcccgguuga

SEQ ID NO: 8742 - DNA, 18 bp, Artificial Sequence
  source: /note="Description of Artificial Sequence: Synthetic oligonucleotide"
  source: /note="Description of Combined DNA/RNA Molecule: Synthetic oligonucleotide"
  source: /note="DNA/RNA"
  modified_base (1)..(1): bicyclic nucleic acid (BNA)
  modified_base (2)..(2): bicyclic nucleic acid (BNA)
  source: /note="3' tri-ethylene glycol (TEG)"
tcuguccaagcccgguug

SEQ ID NO: 8743 - DNA, 17 bp, Artificial Sequence
  source: /note="Description of Artificial Sequence: Synthetic oligonucleotide"
  source: /note="Description of Combined DNA/RNA Molecule: Synthetic oligonucleotide"
  source: /note="DNA/RNA"
  modified_base (1)..(1): bicyclic nucleic acid (BNA)
  modified_base (2)..(2): bicyclic nucleic acid (BNA)
  source: /note="3' tri-ethylene glycol (TEG)"
tcuguccaagcccgguu

SEQ ID NO: 8744 - DNA, 16 bp, Artificial Sequence
  source: /note="Description of Artificial Sequence: Synthetic oligonucleotide"
  source: /note="Description of Combined DNA/RNA Molecule: Synthetic oligonucleotide"
  source: /note="DNA/RNA"
  modified_base (1)..(1): bicyclic nucleic acid (BNA)
  modified_base (2)..(2): bicyclic nucleic acid (BNA)
  source: /note="3' tri-ethylene glycol (TEG)"
tcuguccaagcccggu

SEQ ID NO: 8745 - DNA, 15 bp, Artificial Sequence
  source: /note="Description of Artificial Sequence: Synthetic oligonucleotide"
  source: /note="Description of Combined DNA/RNA Molecule: Synthetic oligonucleotide"
  source: /note="DNA/RNA"
  modified_base (1)..(1): bicyclic nucleic acid (BNA)
  modified_base (2)..(2): bicyclic nucleic acid (BNA)
  source: /note="3' tri-ethylene glycol (TEG)"
tcuguccaagcccgg

SEQ ID NO: 8746 - DNA, 14 bp, Artificial Sequence
  source: /note="Description of Artificial Sequence: Synthetic oligonucleotide"
  source: /note="Description of Combined DNA/RNA Molecule: Synthetic oligonucleotide"
  source: /note="DNA/RNA"
  modified_base (1)..(1): bicyclic nucleic acid (BNA)
  modified_base (2)..(2): bicyclic nucleic acid (BNA)
  source: /note="3' tri-ethylene glycol (TEG)"
tcuguccaagcccg

SEQ ID NO: 8747 - DNA, 13 bp, Artificial Sequence
  source: /note="Description of Artificial Sequence: Synthetic oligonucleotide"
  source: /note="Description of Combined DNA/RNA Molecule: Synthetic oligonucleotide"
  source: /note="DNA/RNA"
  modified_base (1)..(1): bicyclic nucleic acid (BNA)
  modified_base (2)..(2): bicyclic nucleic acid (BNA)
  source: /note="3' tri-ethylene glycol (TEG)"
tcuguccaagccc

SEQ ID NO: 8748 - DNA, 12 bp, Artificial Sequence
  source: /note="Description of Artificial Sequence: Synthetic oligonucleotide"
  source: /note="Description of Combined DNA/RNA Molecule: Synthetic oligonucleotide"
  source: /note="DNA/RNA"
  modified_base (1)..(1): bicyclic nucleic acid (BNA)
  modified_base (2)..(2): bicyclic nucleic acid (BNA)
  source: /note="3' tri-ethylene glycol (TEG)"
tcuguccaagcc

SEQ ID NO: 8749 - DNA, 11 bp, Artificial Sequence
  source: /note="Description of Artificial Sequence: Synthetic oligonucleotide"
  source: /note="Description of Combined DNA/RNA Molecule: Synthetic oligonucleotide"
  source: /note="DNA/RNA"
  modified_base (1)..(1): bicyclic nucleic acid (BNA)
  modified_base (2)..(2): bicyclic nucleic acid (BNA)
  source: /note="3' tri-ethylene glycol (TEG)"
tcuguccaagc

SEQ ID NO: 8750 - DNA, 10 bp, Artificial Sequence
  source: /note="Description of Artificial Sequence: Synthetic oligonucleotide"
  source: /note="Description of Combined DNA/RNA Molecule: Synthetic oligonucleotide"
  source: /note="DNA/RNA"
  modified_base (1)..(1): bicyclic nucleic acid (BNA)
  modified_base (2)..(2): bicyclic nucleic acid (BNA)
  source: /note="3' tri-ethylene glycol (TEG)"
tcuguccaag

SEQ ID NO: 8751 - DNA, 9 bp, Artificial Sequence
  source: /note="Description of Artificial Sequence: Synthetic oligonucleotide"
  source: /note="Description of Combined DNA/RNA Molecule: Synthetic oligonucleotide"
  source: /note="DNA/RNA"
  modified_base (1)..(1): bicyclic nucleic acid (BNA)
  modified_base (2)..(2): bicyclic nucleic acid (BNA)
  source: /note="3' tri-ethylene glycol (TEG)"
tcuguccaa

SEQ ID NO: 8752 - DNA, 8 bp, Artificial Sequence
  source: /note="Description of Artificial Sequence: Synthetic oligonucleotide"
  source: /note="Description of Combined DNA/RNA Molecule: Synthetic oligonucleotide"
  source: /note="DNA/RNA"
  modified_base (1)..(1): bicyclic nucleic acid (BNA)
  modified_base (2)..(2): bicyclic nucleic acid (BNA)
  source: /note="3' tri-ethylene glycol (TEG)"
tcugucca

SEQ ID NO: 8753 - DNA, 17 bp, Artificial Sequence
  source: /note="Description of Artificial Sequence: Synthetic oligonucleotide"
  source: /note="Description of Combined DNA/RNA Molecule: Synthetic oligonucleotide"
  source: /note="DNA/RNA"
  modified_base (1)..(1): bicyclic nucleic acid (BNA)
  modified_base (2)..(2): bicyclic nucleic acid (BNA)
  source: /note="3' tri-ethylene glycol (TEG)"
ctguccaagcccgguug

SEQ ID NO: 8754 - DNA, 16 bp, Artificial Sequence
  source: /note="Description of Artificial Sequence: Synthetic oligonucleotide"
  source: /note="Description of Combined DNA/RNA Molecule: Synthetic oligonucleotide"
  source: /note="DNA/RNA"
  modified_base (1)..(1): bicyclic nucleic acid (BNA)
  modified_base (2)..(2): bicyclic nucleic acid (BNA)
  source: /note="3' tri-ethylene glycol (TEG)"
ctguccaagcccgguu

SEQ ID NO: 8755 - DNA, 15 bp, Artificial Sequence
  source: /note="Description of Artificial Sequence: Synthetic oligonucleotide"
  source: /note="Description of Combined DNA/RNA Molecule: Synthetic oligonucleotide"
  source: /note="DNA/RNA"
  modified_base (1)..(1): bicyclic nucleic acid (BNA)
  modified_base (2)..(2): bicyclic nucleic acid (BNA)
  source: /note="3' tri-ethylene glycol (TEG)"
ctguccaagcccggu

SEQ ID NO: 8756 - DNA, 14 bp, Artificial Sequence
  source: /note="Description of Artificial Sequence: Synthetic oligonucleotide"
  source: /note="Description of Combined DNA/RNA Molecule: Synthetic oligonucleotide"
  source: /note="DNA/RNA"
  modified_base (1)..(1): bicyclic nucleic acid (BNA)
  modified_base (2)..(2): bicyclic nucleic acid (BNA)
  source: /note="3' tri-ethylene glycol (TEG)"
ctguccaagcccgg

SEQ ID NO: 8757 - DNA, 13 bp, Artificial Sequence
  source: /note="Description of Artificial Sequence: Synthetic oligonucleotide"
  source: /note="Description of Combined DNA/RNA Molecule: Synthetic oligonucleotide"
  source: /note="DNA/RNA"
  modified_base (1)..(1): bicyclic nucleic acid (BNA)
  modified_base (2)..(2): bicyclic nucleic acid (BNA)
  source: /note="3' tri-ethylene glycol (TEG)"
ctguccaagcccg

SEQ ID NO: 8758 - DNA, 12 bp, Artificial Sequence
  source: /note="Description of Artificial Sequence: Synthetic oligonucleotide"
  source: /note="Description of Combined DNA/RNA Molecule: Synthetic oligonucleotide"
  source: /note="DNA/RNA"
  modified_base (1)..(1): bicyclic nucleic acid (BNA)
  modified_base (2)..(2): bicyclic nucleic acid (BNA)
  source: /note="3' tri-ethylene glycol (TEG)"
ctguccaagccc

SEQ ID NO: 8759 - DNA, 11 bp, Artificial Sequence
  source: /note="Description of Artificial Sequence: Synthetic oligonucleotide"
  source: /note="Description of Combined DNA/RNA Molecule: Synthetic oligonucleotide"
  source: /note="DNA/RNA"
  modified_base (1)..(1): bicyclic nucleic acid (BNA)
  modified_base (2)..(2): bicyclic nucleic acid (BNA)
  source: /note="3' tri-ethylene glycol (TEG)"
ctguccaagcc

SEQ ID NO: 8760 - DNA, 10 bp, Artificial Sequence
  source: /note="Description of Artificial Sequence: Synthetic oligonucleotide"
  source: /note="Description of Combined DNA/RNA Molecule: Synthetic oligonucleotide"
  source: /note="DNA/RNA"
  modified_base (1)..(1): bicyclic nucleic acid (BNA)
  modified_base (2)..(2): bicyclic nucleic acid (BNA)
  source: /note="3' tri-ethylene glycol (TEG)"
ctguccaagc

SEQ ID NO: 8761 - DNA, 9 bp, Artificial Sequence
  source: /note="Description of Artificial Sequence: Synthetic oligonucleotide"
  source: /note="Description of Combined DNA/RNA Molecule: Synthetic oligonucleotide"
  source: /note="DNA/RNA"
  modified_base (1)..(1): bicyclic nucleic acid (BNA)
  modified_base (2)..(2): bicyclic nucleic acid (BNA)
  source: /note="3' tri-ethylene glycol (TEG)"
ctguccaag

SEQ ID NO: 8762 - DNA, 8 bp, Artificial Sequence
  source: /note="Description of Artificial Sequence: Synthetic oligonucleotide"
  source: /note="Description of Combined DNA/RNA Molecule: Synthetic oligonucleotide"
  source: /note="DNA/RNA"
  modified_base (1)..(1): bicyclic nucleic acid (BNA)
  modified_base (2)..(2): bicyclic nucleic acid (BNA)
  source: /note="3' tri-ethylene glycol (TEG)"
ctguccaa

SEQ ID NO: 8763 - DNA, 20 bp, Artificial Sequence
  source: /note="Description of Artificial Sequence: Synthetic oligonucleotide"
  source: /note="Description of Combined DNA/RNA Molecule: Synthetic oligonucleotide"
  source: /note="DNA/RNA"
  modified_base (1)..(1): bicyclic nucleic acid (BNA)
  modified_base (2)..(2): bicyclic nucleic acid (BNA)
  source: /note="3' tri-ethylene glycol (TEG)"
gtucuguccaagcccgguug

SEQ ID NO: 8764 - DNA, 19 bp, Artificial Sequence
  source: /note="Description of Artificial Sequence: Synthetic oligonucleotide"
  source: /note="Description of Combined DNA/RNA Molecule: Synthetic oligonucleotide"
  source: /note="DNA/RNA"
  modified_base (1)..(1): bicyclic nucleic acid (BNA)
  modified_base (2)..(2): bicyclic nucleic acid (BNA)
  source: /note="3' tri-ethylene glycol (TEG)"
gtucuguccaagcccgguu

SEQ ID NO: 8765 - DNA, 18 bp, Artificial Sequence
  source: /note="Description of Artificial Sequence: Synthetic oligonucleotide"
  source: /note="Description of Combined DNA/RNA Molecule: Synthetic oligonucleotide"
  source: /note="DNA/RNA"
  modified_base (1)..(1): bicyclic nucleic acid (BNA)
  modified_base (2)..(2): bicyclic nucleic acid (BNA)
  source: /note="3' tri-ethylene glycol (TEG)"
gtucuguccaagcccggu

SEQ ID NO: 8766 - DNA, 17 bp, Artificial Sequence
  source: /note="Description of Artificial Sequence: Synthetic oligonucleotide"
  source: /note="Description of Combined DNA/RNA Molecule: Synthetic oligonucleotide"
  source: /note="DNA/RNA"
  modified_base (1)..(1): bicyclic nucleic acid (BNA)
  modified_base (2)..(2): bicyclic nucleic acid (BNA)
  source: /note="3' tri-ethylene glycol (TEG)"
gtucuguccaagcccgg

SEQ ID NO: 8767 - DNA, 16 bp, Artificial Sequence
  source: /note="Description of Artificial Sequence: Synthetic oligonucleotide"
  source: /note="Description of Combined DNA/RNA Molecule: Synthetic oligonucleotide"
  source: /note="DNA/RNA"
  modified_base (1)..(1): bicyclic nucleic acid (BNA)
  modified_base (2)..(2): bicyclic nucleic acid (BNA)
  source: /note="3' tri-ethylene glycol (TEG)"
gtucuguccaagcccg

SEQ ID NO: 8768 - DNA, 15 bp, Artificial Sequence
  source: /note="Description of Artificial Sequence: Synthetic oligonucleotide"
  source: /note="Description of Combined DNA/RNA Molecule: Synthetic oligonucleotide"
  source: /note="DNA/RNA"
  modified_base (1)..(1): bicyclic nucleic acid (BNA)
  modified_base (2)..(2): bicyclic nucleic acid (BNA)
  source: /note="3' tri-ethylene glycol (TEG)"
gtucuguccaagccc

SEQ ID NO: 8769 - DNA, 14 bp, Artificial Sequence
  source: /note="Description of Artificial Sequence: Synthetic oligonucleotide"
  source: /note="Description of Combined DNA/RNA Molecule: Synthetic oligonucleotide"
  source: /note="DNA/RNA"
  modified_base (1)..(1): bicyclic nucleic acid (BNA)
  modified_base (2)..(2): bicyclic nucleic acid (BNA)
  source: /note="3' tri-ethylene glycol (TEG)"
gtucuguccaagcc

SEQ ID NO: 8770 - DNA, 13 bp, Artificial Sequence
  source: /note="Description of Artificial Sequence: Synthetic oligonucleotide"
  source: /note="Description of Combined DNA/RNA Molecule: Synthetic oligonucleotide"
  source: /note="DNA/RNA"
  modified_base (1)..(1): bicyclic nucleic acid (BNA)
  modified_base (2)..(2): bicyclic nucleic acid (BNA)
  source: /note="3' tri-ethylene glycol (TEG)"
gtucuguccaagc

SEQ ID NO: 8771 - DNA, 12 bp, Artificial Sequence
  source: /note="Description of Artificial Sequence: Synthetic oligonucleotide"
  source: /note="Description of Combined DNA/RNA Molecule: Synthetic oligonucleotide"
  source: /note="DNA/RNA"
  modified_base (1)..(1): bicyclic nucleic acid (BNA)
  modified_base (2)..(2): bicyclic nucleic acid (BNA)
  source: /note="3' tri-ethylene glycol (TEG)"
gtucuguccaag

SEQ ID NO: 8772 - DNA, 11 bp, Artificial Sequence
  source: /note="Description of Artificial Sequence: Synthetic oligonucleotide"
  source: /note="Description of Combined DNA/RNA Molecule: Synthetic oligonucleotide"
  source: /note="DNA/RNA"
  modified_base (1)..(1): bicyclic nucleic acid (BNA)
  modified_base (2)..(2): bicyclic nucleic acid (BNA)
  source: /note="3' tri-ethylene glycol (TEG)"
gtucuguccaa

SEQ ID NO: 8773 - DNA, 10 bp, Artificial Sequence
  source: /note="Description of Artificial Sequence: Synthetic oligonucleotide"
  source: /note="Description of Combined DNA/RNA Molecule: Synthetic oligonucleotide"
  source: /note="DNA/RNA"
  modified_base (1)..(1): bicyclic nucleic acid (BNA)
  modified_base (2)..(2): bicyclic nucleic acid (BNA)
  source: /note="3' tri-ethylene glycol (TEG)"
gtucugucca

SEQ ID NO: 8774 - DNA, 9 bp, Artificial Sequence
  source: /note="Description of Artificial Sequence: Synthetic oligonucleotide"
  source: /note="Description of Combined DNA/RNA Molecule: Synthetic oligonucleotide"
  source: /note="DNA/RNA"
  modified_base (1)..(1): bicyclic nucleic acid (BNA)
  modified_base (2)..(2): bicyclic nucleic acid (BNA)
  source: /note="3' tri-ethylene glycol (TEG)"
gtucugucc

SEQ ID NO: 8775 - DNA, 8 bp, Artificial Sequence
  source: /note="Description of Artificial Sequence: Synthetic oligonucleotide"
  source: /note="Description of Combined DNA/RNA Molecule: Synthetic oligonucleotide"
  source: /note="DNA/RNA"
  modified_base (1)..(1): bicyclic nucleic acid (BNA)
  modified_base (2)..(2): bicyclic nucleic acid (BNA)
  source: /note="3' tri-ethylene glycol (TEG)"
gtucuguc

SEQ ID NO: 8776 - RNA, 20 nt, Artificial Sequence
  source: /note="Description of Artificial Sequence: Synthetic oligonucleotide"
  source: /note="RNA"
  modified_base (1)..(1): bicyclic nucleic acid (BNA)
  modified_base (2)..(2): bicyclic nucleic acid (BNA)
  source: /note="3' tri-ethylene glycol (TEG)"
aguucuguccaagcccgguu

SEQ ID NO: 8777 - RNA, 19 nt, Artificial Sequence
  source: /note="Description of Artificial Sequence: Synthetic oligonucleotide"
  source: /note="RNA"
  modified_base (1)..(1): bicyclic nucleic acid (BNA)
  modified_base (2)..(2): bicyclic nucleic acid (BNA)
  source: /note="3' tri-ethylene glycol (TEG)"
aguucuguccaagcccggu

SEQ ID NO: 8778 - RNA, 18 nt, Artificial Sequence
  source: /note="Description of Artificial Sequence: Synthetic oligonucleotide"
  source: /note="RNA"
  modified_base (1)..(1): bicyclic nucleic acid (BNA)
  modified_base (2)..(2): bicyclic nucleic acid (BNA)
  source: /note="3' tri-ethylene glycol (TEG)"
aguucuguccaagcccgg

SEQ ID NO: 8779 - RNA, 17 nt, Artificial Sequence
  source: /note="Description of Artificial Sequence: Synthetic oligonucleotide"
  source: /note="RNA"
  modified_base (1)..(1): bicyclic nucleic acid (BNA)
  modified_base (2)..(2): bicyclic nucleic acid (BNA)
  source: /note="3' tri-ethylene glycol (TEG)"
aguucuguccaagcccg

SEQ ID NO: 8780 - RNA, 16 nt, Artificial Sequence
  source: /note="Description of Artificial Sequence: Synthetic oligonucleotide"
  source: /note="RNA"
  modified_base (1)..(1): bicyclic nucleic acid (BNA)
  modified_base (2)..(2): bicyclic nucleic acid (BNA)
  source: /note="3' tri-ethylene glycol (TEG)"
aguucuguccaagccc

SEQ ID NO: 8781 - RNA, 15 nt, Artificial Sequence
  source: /note="Description of Artificial Sequence: Synthetic oligonucleotide"
  source: /note="RNA"
  modified_base (1)..(1): bicyclic nucleic acid (BNA)
  modified_base (2)..(2): bicyclic nucleic acid (BNA)
  source: /note="3' tri-ethylene glycol (TEG)"
aguucuguccaagcc

SEQ ID NO: 8782 - RNA, 14 nt, Artificial Sequence
  source: /note="Description of Artificial Sequence: Synthetic oligonucleotide"
  source: /note="RNA"
  modified_base (1)..(1): bicyclic nucleic acid (BNA)
  modified_base (2)..(2): bicyclic nucleic acid (BNA)
  source: /note="3' tri-ethylene glycol (TEG)"
aguucuguccaagc

SEQ ID NO: 8783 - RNA, 13 nt, Artificial Sequence
  source: /note="Description of Artificial Sequence: Synthetic oligonucleotide"
  source: /note="RNA"
  modified_base (1)..(1): bicyclic nucleic acid (BNA)
  modified_base (2)..(2): bicyclic nucleic acid (BNA)
  source: /note="3' tri-ethylene glycol (TEG)"
aguucuguccaag

SEQ ID NO: 8784 - RNA, 12 nt, Artificial Sequence
  source: /note="Description of Artificial Sequence: Synthetic oligonucleotide"
  source: /note="RNA"
  modified_base (1)..(1): bicyclic nucleic acid (BNA)
  modified_base (2)..(2): bicyclic nucleic acid (BNA)
  source: /note="3' tri-ethylene glycol (TEG)"
aguucuguccaa

SEQ ID NO: 8785 - RNA, 11 nt, Artificial Sequence
  source: /note="Description of Artificial Sequence: Synthetic oligonucleotide"
  source: /note="RNA"
  modified_base (1)..(1): bicyclic nucleic acid (BNA)
  modified_base (2)..(2): bicyclic nucleic acid (BNA)
  source: /note="3' tri-ethylene glycol (TEG)"
aguucugucca

SEQ ID NO: 8786 - RNA, 10 nt, Artificial Sequence
  source: /note="Description of Artificial Sequence: Synthetic oligonucleotide"
  source: /note="RNA"
  modified_base (1)..(1): bicyclic nucleic acid (BNA)
  modified_base (2)..(2): bicyclic nucleic acid (BNA)
  source: /note="3' tri-ethylene glycol (TEG)"
aguucugucc

SEQ ID NO: 8787 - RNA, 9 nt, Artificial Sequence
  source: /note="Description of Artificial Sequence: Synthetic oligonucleotide"
  source: /note="RNA"
  modified_base (1)..(1): bicyclic nucleic acid (BNA)
  modified_base (2)..(2): bicyclic nucleic acid (BNA)
  source: /note="3' tri-ethylene glycol (TEG)"
aguucuguc

SEQ ID NO: 8788 - RNA, 8 nt, Artificial Sequence
  source: /note="Description of Artificial Sequence: Synthetic oligonucleotide"
  source: /note="RNA"
  modified_base (1)..(1): bicyclic nucleic acid (BNA)
  modified_base (2)..(2): bicyclic nucleic acid (BNA)
  source: /note="3' tri-ethylene glycol (TEG)"
aguucugu

SEQ ID NO: 8789 - RNA, 20 nt, Artificial Sequence
  source: /note="Description of Artificial Sequence: Synthetic oligonucleotide"
  source: /note="RNA"
  modified_base (1)..(1): bicyclic nucleic acid (BNA)
  modified_base (2)..(2): bicyclic nucleic acid (BNA)
  source: /note="3' tri-ethylene glycol (TEG)"
aaguucuguccaagcccggu

SEQ ID NO: 8790 - RNA, 19 nt, Artificial Sequence
  source: /note="Description of Artificial Sequence: Synthetic oligonucleotide"
  source: /note="RNA"
  modified_base (1)..(1): bicyclic nucleic acid (BNA)
  modified_base (2)..(2): bicyclic nucleic acid (BNA)
  source: /note="3' tri-ethylene glycol (TEG)"
aaguucuguccaagcccgg

SEQ ID NO: 8791 - RNA, 18 nt, Artificial Sequence
  source: /note="Description of Artificial Sequence: Synthetic oligonucleotide"
  source: /note="RNA"
  modified_base (1)..(1): bicyclic nucleic acid (BNA)
  modified_base (2)..(2): bicyclic nucleic acid (BNA)
  source: /note="3' tri-ethylene glycol (TEG)"
aaguucuguccaagcccg

SEQ ID NO: 8792 - RNA, 17 nt, Artificial Sequence
  source: /note="Description of Artificial Sequence: Synthetic oligonucleotide"
  source: /note="RNA"
  modified_base (1)..(1): bicyclic nucleic acid (BNA)
  modified_base (2)..(2): bicyclic nucleic acid (BNA)
  source: /note="3' tri-ethylene glycol (TEG)"
aaguucuguccaagccc

SEQ ID NO: 8793 - RNA, 16 nt, Artificial Sequence
  source: /note="Description of Artificial Sequence: Synthetic oligonucleotide"
  source: /note="RNA"
  modified_base (1)..(1): bicyclic nucleic acid (BNA)
  modified_base (2)..(2): bicyclic nucleic acid (BNA)
  source: /note="3' tri-ethylene glycol (TEG)"
aaguucuguccaagcc

SEQ ID NO: 8794 - RNA, 15 nt, Artificial Sequence
  source: /note="Description of Artificial Sequence: Synthetic oligonucleotide"
  source: /note="RNA"
  modified_base (1)..(1): bicyclic nucleic acid (BNA)
  modified_base (2)..(2): bicyclic nucleic acid (BNA)
  source: /note="3' tri-ethylene glycol (TEG)"
aaguucuguccaagc

SEQ ID NO: 8795 - RNA, 14 nt, Artificial Sequence
  source: /note="Description of Artificial Sequence: Synthetic oligonucleotide"
  source: /note="RNA"
  modified_base (1)..(1): bicyclic nucleic acid (BNA)
  modified_base (2)..(2): bicyclic nucleic acid (BNA)
  source: /note="3' tri-ethylene glycol (TEG)"
aaguucuguccaag

SEQ ID NO: 8796 - RNA, 13 nt, Artificial Sequence
  source: /note="Description of Artificial Sequence: Synthetic oligonucleotide"
  source: /note="RNA"
  modified_base (1)..(1): bicyclic nucleic acid (BNA)
  modified_base (2)..(2): bicyclic nucleic acid (BNA)
  source: /note="3' tri-ethylene glycol (TEG)"
aaguucuguccaa

SEQ ID NO: 8797 - RNA, 12 nt, Artificial Sequence
  source: /note="Description of Artificial Sequence: Synthetic oligonucleotide"
  source: /note="RNA"
  modified_base (1)..(1): bicyclic nucleic acid (BNA)
  modified_base (2)..(2): bicyclic nucleic acid (BNA)
  source: /note="3' tri-ethylene glycol (TEG)"
aaguucugucca

SEQ ID NO: 8798 - RNA, 11 nt, Artificial Sequence
  source: /note="Description of Artificial Sequence: Synthetic oligonucleotide"
  source: /note="RNA"
  modified_base (1)..(1): bicyclic nucleic acid (BNA)
  modified_base (2)..(2): bicyclic nucleic acid (BNA)
  source: /note="3' tri-ethylene glycol (TEG)"
aaguucugucc

SEQ ID NO: 8799 - RNA, 10 nt, Artificial Sequence
  source: /note="Description of Artificial Sequence: Synthetic oligonucleotide"
  source: /note="RNA"
  modified_base (1)..(1): bicyclic nucleic acid (BNA)
  modified_base (2)..(2): bicyclic nucleic acid (BNA)
  source: /note="3' tri-ethylene glycol (TEG)"
aaguucuguc

SEQ ID NO: 8800 - RNA, 9 nt, Artificial Sequence
  source: /note="Description of Artificial Sequence: Synthetic oligonucleotide"
  source: /note="RNA"
  modified_base (1)..(1): bicyclic nucleic acid (BNA)
  modified_base (2)..(2): bicyclic nucleic acid (BNA)
  source: /note="3' tri-ethylene glycol (TEG)"
aaguucugu

SEQ ID NO: 8801 - RNA, 8 nt, Artificial Sequence
  source: /note="Description of Artificial Sequence: Synthetic oligonucleotide"
  source: /note="RNA"
  modified_base (1)..(1): bicyclic nucleic acid (BNA)
  modified_base (2)..(2): bicyclic nucleic acid (BNA)
  source: /note="3' tri-ethylene glycol (TEG)"
aaguucug

SEQ ID NO: 8802 - DNA, 20 bp, Artificial Sequence
  source: /note="Description of Artificial Sequence: Synthetic oligonucleotide"
  source: /note="Description of Combined DNA/RNA Molecule: Synthetic oligonucleotide"
  source: /note="DNA/RNA"
  modified_base (1)..(1): bicyclic nucleic acid (BNA)
  modified_base (2)..(2): bicyclic nucleic acid (BNA)
  source: /note="3' tri-ethylene glycol (TEG)"
taaguucuguccaagcccgg

SEQ ID NO: 8803 - DNA, 19 bp, Artificial Sequence
  source: /note="Description of Artificial Sequence: Synthetic oligonucleotide"
  source: /note="Description of Combined DNA/RNA Molecule: Synthetic oligonucleotide"
  source: /note="DNA/RNA"
  modified_base (1)..(1): bicyclic nucleic acid (BNA)
  modified_base (2)..(2): bicyclic nucleic acid (BNA)
  source: /note="3' tri-ethylene glycol (TEG)"
taaguucuguccaagcccg

SEQ ID NO: 8804 - DNA, 18 bp, Artificial Sequence
  source: /note="Description of Artificial Sequence: Synthetic oligonucleotide"
  source: /note="Description of Combined DNA/RNA Molecule: Synthetic oligonucleotide"
  source: /note="DNA/RNA"
  modified_base (1)..(1): bicyclic nucleic acid (BNA)
  modified_base (2)..(2): bicyclic nucleic acid (BNA)
  source: /note="3' tri-ethylene glycol (TEG)"
taaguucuguccaagccc

SEQ ID NO: 8805 - DNA, 17 bp, Artificial Sequence
  source: /note="Description of Artificial Sequence: Synthetic oligonucleotide"
  source: /note="Description of Combined DNA/RNA Molecule: Synthetic oligonucleotide"
  source: /note="DNA/RNA"
  modified_base (1)..(1): bicyclic nucleic acid (BNA)
  modified_base (2)..(2): bicyclic nucleic acid (BNA)
  source: /note="3' tri-ethylene glycol (TEG)"
taaguucuguccaagcc

SEQ ID NO: 8806 - DNA, 16 bp, Artificial Sequence
  source: /note="Description of Artificial Sequence: Synthetic oligonucleotide"
  source: /note="Description of Combined DNA/RNA Molecule: Synthetic oligonucleotide"
  source: /note="DNA/RNA"
  modified_base (1)..(1): bicyclic nucleic acid (BNA)
  modified_base (2)..(2): bicyclic nucleic acid (BNA)
  source: /note="3' tri-ethylene glycol (TEG)"
taaguucuguccaagc

SEQ ID NO: 8807 - DNA, 14 bp, Artificial Sequence
  source: /note="Description of Artificial Sequence: Synthetic oligonucleotide"
  source: /note="Description of Combined DNA/RNA Molecule: Synthetic oligonucleotide"
  source: /note="DNA/RNA"
  modified_base (1)..(1): bicyclic nucleic acid (BNA)
  modified_base (2)..(2): bicyclic nucleic acid (BNA)
  source: /note="3' tri-ethylene glycol (TEG)"
taaguucuguccaa

SEQ ID NO: 8808 - DNA, 13 bp, Artificial Sequence
  source: /note="Description of Artificial Sequence: Synthetic oligonucleotide"
  source: /note="Description of Combined DNA/RNA Molecule: Synthetic oligonucleotide"
  source: /note="DNA/RNA"
  modified_base (1)..(1): bicyclic nucleic acid (BNA)
  modified_base (2)..(2): bicyclic nucleic acid (BNA)
  source: /note="3' tri-ethylene glycol (TEG)"
taaguucugucca

SEQ ID NO: 8809 - DNA, 12 bp, Artificial Sequence
  source: /note="Description of Artificial Sequence: Synthetic oligonucleotide"
  source: /note="Description of Combined DNA/RNA Molecule: Synthetic oligonucleotide"
  source: /note="DNA/RNA"
  modified_base (1)..(1): bicyclic nucleic acid (BNA)
  modified_base (2)..(2): bicyclic nucleic acid (BNA)
  source: /note="3' tri-ethylene glycol (TEG)"
taaguucugucc

SEQ ID NO: 8810 - DNA, 11 bp, Artificial Sequence
  source: /note="Description of Artificial Sequence: Synthetic oligonucleotide"
  source: /note="Description of Combined DNA/RNA Molecule: Synthetic oligonucleotide"
  source: /note="DNA/RNA"
  modified_base (1)..(1): bicyclic nucleic acid (BNA)
  modified_base (2)..(2): bicyclic nucleic acid (BNA)
  source: /note="3' tri-ethylene glycol (TEG)"
taaguucuguc

SEQ ID NO: 8811 - DNA, 10 bp, Artificial Sequence
  source: /note="Description of Artificial Sequence: Synthetic oligonucleotide"
  source: /note="Description of Combined DNA/RNA Molecule: Synthetic oligonucleotide"
  source: /note="DNA/RNA"
  modified_base (1)..(1): bicyclic nucleic acid (BNA)
  modified_base (2)..(2): bicyclic nucleic acid (BNA)
  source: /note="3' tri-ethylene glycol (TEG)"
taaguucugu

SEQ ID NO: 8812 - DNA, 9 bp, Artificial Sequence
  source: /note="Description of Artificial Sequence: Synthetic oligonucleotide"
  source: /note="Description of Combined DNA/RNA Molecule: Synthetic oligonucleotide"
  source: /note="DNA/RNA"
  modified_base (1)..(1): bicyclic nucleic acid (BNA)
  modified_base (2)..(2): bicyclic nucleic acid (BNA)
  source: /note="3' tri-ethylene glycol (TEG)"
taaguucug

SEQ ID NO: 8813 - DNA, 8 bp, Artificial Sequence
  source: /note="Description of Artificial Sequence: Synthetic oligonucleotide"
  source: /note="Description of Combined DNA/RNA Molecule: Synthetic oligonucleotide"
  source: /note="DNA/RNA"
  modified_base (1)..(1): bicyclic nucleic acid (BNA)
  modified_base (2)..(2): bicyclic nucleic acid (BNA)
  source: /note="3' tri-ethylene glycol (TEG)"
taaguucu

SEQ ID NO: 8814 - DNA, 20 bp, Artificial Sequence
  source: /note="Description of Artificial Sequence: Synthetic oligonucleotide"
  source: /note="Description of Combined DNA/RNA Molecule: Synthetic oligonucleotide"
  source: /note="DNA/RNA"
  modified_base (1)..(1): bicyclic nucleic acid (BNA)
  modified_base (2)..(2): bicyclic nucleic acid (BNA)
  source: /note="3' tri-ethylene glycol (TEG)"
gtaaguucuguccaagcccg

SEQ ID NO: 8815 - DNA, 19 bp, Artificial Sequence
  source: /note="Description of Artificial Sequence: Synthetic oligonucleotide"
  source: /note="Description of Combined DNA/RNA Molecule: Synthetic oligonucleotide"
  source: /note="DNA/RNA"
  modified_base (1)..(1): bicyclic nucleic acid (BNA)
  modified_base (2)..(2): bicyclic nucleic acid (BNA)
  source: /note="3' tri-ethylene glycol (TEG)"
gtaaguucuguccaagccc

SEQ ID NO: 8816 - DNA, 17 bp, Artificial Sequence
  source: /note="Description of Artificial Sequence: Synthetic oligonucleotide"
  source: /note="Description of Combined DNA/RNA Molecule: Synthetic oligonucleotide"
  source: /note="DNA/RNA"
  modified_base (1)..(1): bicyclic nucleic acid (BNA)
  modified_base (2)..(2): bicyclic nucleic acid (BNA)
  source: /note="3' tri-ethylene glycol (TEG)"
gtaaguucuguccaagc

SEQ ID NO: 8817 - DNA, 16 bp, Artificial Sequence
  source: /note="Description of Artificial Sequence: Synthetic oligonucleotide"
  source: /note="Description of Combined DNA/RNA Molecule: Synthetic oligonucleotide"
  source: /note="DNA/RNA"
  modified_base (1)..(1): bicyclic nucleic acid (BNA)
  modified_base (2)..(2): bicyclic nucleic acid (BNA)
  source: /note="3' tri-ethylene glycol (TEG)"
gtaaguucuguccaag

SEQ ID NO: 8818 - DNA, 15 bp, Artificial Sequence
  source: /note="Description of Artificial Sequence: Synthetic oligonucleotide"
  source: /note="Description of Combined DNA/RNA Molecule: Synthetic oligonucleotide"
  source: /note="DNA/RNA"
  modified_base (1)..(1): bicyclic nucleic acid (BNA)
  modified_base (2)..(2): bicyclic nucleic acid (BNA)
  source: /note="3' tri-ethylene glycol (TEG)"
gtaaguucuguccaa

SEQ ID NO: 8819 - DNA, 14 bp, Artificial Sequence
  source: /note="Description of Artificial Sequence: Synthetic oligonucleotide"
  source: /note="Description of Combined DNA/RNA Molecule: Synthetic oligonucleotide"
  source: /note="DNA/RNA"
  modified_base (1)..(1): bicyclic nucleic acid (BNA)
  modified_base (2)..(2): bicyclic nucleic acid (BNA)
  source: /note="3' tri-ethylene glycol (TEG)"
gtaaguucugucca

SEQ ID NO: 8820 - DNA, 13 bp, Artificial Sequence
  source: /note="Description of Artificial Sequence: Synthetic oligonucleotide"
  source: /note="Description of Combined DNA/RNA Molecule: Synthetic oligonucleotide"
  source: /note="DNA/RNA"
  modified_base (1)..(1): bicyclic nucleic acid (BNA)
  modified_base (2)..(2): bicyclic nucleic acid (BNA)
  source: /note="3' tri-ethylene glycol (TEG)"
gtaaguucugucc

SEQ ID NO: 8821 - DNA, 12 bp, Artificial Sequence
  source: /note="Description of Artificial Sequence: Synthetic oligonucleotide"
  source: /note="Description of Combined DNA/RNA Molecule: Synthetic oligonucleotide"
  source: /note="DNA/RNA"
  modified_base (1)..(1): bicyclic nucleic acid (BNA)
  modified_base (2)..(2): bicyclic nucleic acid (BNA)
  source: /note="3' tri-ethylene glycol (TEG)"
gtaaguucuguc

SEQ ID NO: 8822 - DNA, 11 bp, Artificial Sequence
  source: /note="Description of Artificial Sequence: Synthetic oligonucleotide"
  source: /note="Description of Combined DNA/RNA Molecule: Synthetic oligonucleotide"
  source: /note="DNA/RNA"
  modified_base (1)..(1): bicyclic nucleic acid (BNA)
  modified_base (2)..(2): bicyclic nucleic acid (BNA)
  source: /note="3' tri-ethylene glycol (TEG)"
gtaaguucugu

SEQ ID NO: 8823 - DNA, 10 bp, Artificial Sequence
  source: /note="Description of Artificial Sequence: Synthetic oligonucleotide"
  source: /note="Description of Combined DNA/RNA Molecule: Synthetic oligonucleotide"
  source: /note="DNA/RNA"
  modified_base (1)..(1): bicyclic nucleic acid (BNA)
  modified_base (2)..(2): bicyclic nucleic acid (BNA)
  source: /note="3' tri-ethylene glycol (TEG)"
gtaaguucug

SEQ ID NO: 8824 - DNA, 9 bp, Artificial Sequence
  source: /note="Description of Artificial Sequence: Synthetic oligonucleotide"
  source: /note="Description of Combined DNA/RNA Molecule: Synthetic oligonucleotide"
  source: /note="DNA/RNA"
  modified_base (1)..(1): bicyclic nucleic acid (BNA)
  modified_base (2)..(2): bicyclic nucleic acid (BNA)
  source: /note="3' tri-ethylene glycol (TEG)"
gtaaguucu

SEQ ID NO: 8825 - DNA, 8 bp, Artificial Sequence
  source: /note="Description of Artificial Sequence: Synthetic oligonucleotide"
  source: /note="Description of Combined DNA/RNA Molecule: Synthetic oligonucleotide"
  source: /note="DNA/RNA"
  modified_base (1)..(1): bicyclic nucleic acid (BNA)
  modified_base (2)..(2): bicyclic nucleic acid (BNA)
  source: /note="3' tri-ethylene glycol (TEG)"
gtaaguuc

SEQ ID NO: 8826 - RNA, 20 nt, Artificial Sequence
  source: /note="Description of Artificial Sequence: Synthetic oligonucleotide"
  source: /note="RNA"
  modified_base (1)..(1): bicyclic nucleic acid (BNA)
  modified_base (2)..(2): bicyclic nucleic acid (BNA)
  source: /note="3' tri-ethylene glycol (TEG)"
gguaaguucuguccaagccc

SEQ ID NO: 8827 - RNA, 19 nt, Artificial Sequence
  source: /note="Description of Artificial Sequence: Synthetic oligonucleotide"
  source: /note="RNA"
  modified_base (1)..(1): bicyclic nucleic acid (BNA)
  modified_base (2)..(2): bicyclic nucleic acid (BNA)
  source: /note="3' tri-ethylene glycol (TEG)"
gguaaguucuguccaagcc

SEQ ID NO: 8828 - RNA, 17 nt, Artificial Sequence
  source: /note="Description of Artificial Sequence: Synthetic oligonucleotide"
  source: /note="RNA"
  modified_base (1)..(1): bicyclic nucleic acid (BNA)
  modified_base (2)..(2): bicyclic nucleic acid (BNA)
  source: /note="3' tri-ethylene glycol (TEG)"
gguaaguucuguccaag

SEQ ID NO: 8829 - RNA, 16 nt, Artificial Sequence
  source: /note="Description of Artificial Sequence: Synthetic oligonucleotide"
  source: /note="RNA"
  modified_base (1)..(1): bicyclic nucleic acid (BNA)
  modified_base (2)..(2): bicyclic nucleic acid (BNA)
  source: /note="3' tri-ethylene glycol (TEG)"
gguaaguucuguccaa

SEQ ID NO: 8830 - RNA, 15 nt, Artificial Sequence
  source: /note="Description of Artificial Sequence: Synthetic oligonucleotide"
  source: /note="RNA"
  modified_base (1)..(1): bicyclic nucleic acid (BNA)
  modified_base (2)..(2): bicyclic nucleic acid (BNA)
  source: /note="3' tri-ethylene glycol (TEG)"
gguaaguucugucca

SEQ ID NO: 8831 - RNA, 14 nt, Artificial Sequence
  source: /note="Description of Artificial Sequence: Synthetic oligonucleotide"
  source: /note="RNA"
  modified_base (1)..(1): bicyclic nucleic acid (BNA)
  modified_base (2)..(2): bicyclic nucleic acid (BNA)
  source: /note="3' tri-ethylene glycol (TEG)"
gguaaguucugucc

SEQ ID NO: 8832 - RNA, 13 nt, Artificial Sequence
  source: /note="Description of Artificial Sequence: Synthetic oligonucleotide"
  source: /note="RNA"
  modified_base (1)..(1): bicyclic nucleic acid (BNA)
  modified_base (2)..(2): bicyclic nucleic acid (BNA)
  source: /note="3' tri-ethylene glycol (TEG)"
gguaaguucuguc

SEQ ID NO: 8833 - RNA, 12 nt, Artificial Sequence
  source: /note="Description of Artificial Sequence: Synthetic oligonucleotide"
  source: /note="RNA"
  modified_base (1)..(1): bicyclic nucleic acid (BNA)
  modified_base (2)..(2): bicyclic nucleic acid (BNA)
  source: /note="3' tri-ethylene glycol (TEG)"
gguaaguucugu

SEQ ID NO: 8834 - RNA, 11 nt, Artificial Sequence
  source: /note="Description of Artificial Sequence: Synthetic oligonucleotide"
  source: /note="RNA"
  modified_base (1)..(1): bicyclic nucleic acid (BNA)
  modified_base (2)..(2): bicyclic nucleic acid (BNA)
  source: /note="3' tri-ethylene glycol (TEG)"
gguaaguucug

SEQ ID NO: 8835 - RNA, 10 nt, Artificial Sequence
  source: /note="Description of Artificial Sequence: Synthetic oligonucleotide"
  source: /note="RNA"
  modified_base (1)..(1): bicyclic nucleic acid (BNA)
  modified_base (2)..(2): bicyclic nucleic acid (BNA)
  source: /note="3' tri-ethylene glycol (TEG)"
gguaaguucu

SEQ ID NO: 8836 - RNA, 9 nt, Artificial Sequence
  source: /note="Description of Artificial Sequence: Synthetic oligonucleotide"
  source: /note="RNA"
  modified_base (1)..(1): bicyclic nucleic acid (BNA)
  modified_base (2)..(2): bicyclic nucleic acid (BNA)
  source: /note="3' tri-ethylene glycol (TEG)"
gguaaguuc

SEQ ID NO: 8837 - RNA, 8 nt, Artificial Sequence
  source: /note="Description of Artificial Sequence: Synthetic oligonucleotide"
  source: /note="RNA"
  modified_base (1)..(1): bicyclic nucleic acid (BNA)
  modified_base (2)..(2): bicyclic nucleic acid (BNA)
  source: /note="3' tri-ethylene glycol (TEG)"
gguaaguu

SEQ ID NO: 8838 - RNA, 20 nt, Artificial Sequence
  source: /note="Description of Artificial Sequence: Synthetic oligonucleotide"
  source: /note="RNA"
  modified_base (1)..(1): bicyclic nucleic acid (BNA)
  modified_base (2)..(2): bicyclic nucleic acid (BNA)
  source: /note="3' tri-ethylene glycol (TEG)"
cgguaaguucuguccaagcc

SEQ ID NO: 8839 - RNA, 19 nt, Artificial Sequence
  source: /note="Description of Artificial Sequence: Synthetic oligonucleotide"
  source: /note="RNA"
  modified_base (1)..(1): bicyclic nucleic acid (BNA)
  modified_base (2)..(2): bicyclic nucleic acid (BNA)
  source: /note="3' tri-ethylene glycol (TEG)"
cgguaaguucuguccaagc

SEQ ID NO: 8840 - RNA, 18 nt, Artificial Sequence
  source: /note="Description of Artificial Sequence: Synthetic oligonucleotide"
  source: /note="RNA"
  modified_base (1)..(1): bicyclic nucleic acid (BNA)
  modified_base (2)..(2): bicyclic nucleic acid (BNA)
  source: /note="3' tri-ethylene glycol (TEG)"
cgguaaguucuguccaag

SEQ ID NO: 8841 - RNA, 17 nt, Artificial Sequence
  source: /note="Description of Artificial Sequence: Synthetic oligonucleotide"
  source: /note="RNA"
  modified_base (1)..(1): bicyclic nucleic acid (BNA)
  modified_base (2)..(2): bicyclic nucleic acid (BNA)
  source: /note="3' tri-ethylene glycol (TEG)"
cgguaaguucuguccaa

SEQ ID NO: 8842 - RNA, 16 nt, Artificial Sequence
  source: /note="Description of Artificial Sequence: Synthetic oligonucleotide"
  source: /note="RNA"
  modified_base (1)..(1): bicyclic nucleic acid (BNA)
  modified_base (2)..(2): bicyclic nucleic acid (BNA)
  source: /note="3' tri-ethylene glycol (TEG)"
cgguaaguucugucca

SEQ ID NO: 8843 - RNA, 15 nt, Artificial Sequence
  source: /note="Description of Artificial Sequence: Synthetic oligonucleotide"
  source: /note="RNA"
  modified_base (1)..(1): bicyclic nucleic acid (BNA)
  modified_base (2)..(2): bicyclic nucleic acid (BNA)
  source: /note="3' tri-ethylene glycol (TEG)"
cgguaaguucugucc

SEQ ID NO: 8844 - RNA, 14 nt, Artificial Sequence
  source: /note="Description of Artificial Sequence: Synthetic oligonucleotide"
  source: /note="RNA"
  modified_base (1)..(1): bicyclic nucleic acid (BNA)
  modified_base (2)..(2): bicyclic nucleic acid (BNA)
  source: /note="3' tri-ethylene glycol (TEG)"
cgguaaguucuguc

SEQ ID NO: 8845 - RNA, 13 nt, Artificial Sequence
  source: /note="Description of Artificial Sequence: Synthetic oligonucleotide"
  source: /note="RNA"
  modified_base (1)..(1): bicyclic nucleic acid (BNA)
  modified_base (2)..(2): bicyclic nucleic acid (BNA)
  source: /note="3' tri-ethylene glycol (TEG)"
cgguaaguucugu

SEQ ID NO: 8846 - RNA, 12 nt, Artificial Sequence
  source: /note="Description of Artificial Sequence: Synthetic oligonucleotide"
  source: /note="RNA"
  modified_base (1)..(1): bicyclic nucleic acid (BNA)
  modified_base (2)..(2): bicyclic nucleic acid (BNA)
  source: /note="3' tri-ethylene glycol (TEG)"
cgguaaguucug

SEQ ID NO: 8847 - RNA, 11 nt, Artificial Sequence
  source: /note="Description of Artificial Sequence: Synthetic oligonucleotide"
  source: /note="RNA"
  modified_base (1)..(1): bicyclic nucleic acid (BNA)
  modified_base (2)..(2): bicyclic nucleic acid (BNA)
  source: /note="3' tri-ethylene glycol (TEG)"
cgguaaguucu

SEQ ID NO: 8848 - RNA, 10 nt, Artificial Sequence
  source: /note="Description of Artificial Sequence: Synthetic oligonucleotide"
  source: /note="RNA"
  modified_base (1)..(1): bicyclic nucleic acid (BNA)
  modified_base (2)..(2): bicyclic nucleic acid (BNA)
  source: /note="3' tri-ethylene glycol (TEG)"
cgguaaguuc

SEQ ID NO: 8849 - RNA, 9 nt, Artificial Sequence
  source: /note="Description of Artificial Sequence: Synthetic oligonucleotide"
  source: /note="RNA"
  modified_base (1)..(1): bicyclic nucleic acid (BNA)
  modified_base (2)..(2): bicyclic nucleic acid (BNA)
  source: /note="3' tri-ethylene glycol (TEG)"
cgguaaguu

SEQ ID NO: 8850 - RNA, 8 nt, Artificial Sequence
  source: /note="Description of Artificial Sequence: Synthetic oligonucleotide"
  source: /note="RNA"
  modified_base (1)..(1): bicyclic nucleic acid (BNA)
  modified_base (2)..(2): bicyclic nucleic acid (BNA)
  source: /note="3' tri-ethylene glycol (TEG)"
cgguaagu

SEQ ID NO: 8851 - DNA, 20 bp, Artificial Sequence
  source: /note="Description of Artificial Sequence: Synthetic oligonucleotide"
  source: /note="Description of Combined DNA/RNA Molecule: Synthetic oligonucleotide"
  source: /note="DNA/RNA"
  modified_base (1)..(1): bicyclic nucleic acid (BNA)
  modified_base (2)..(2): bicyclic nucleic acid (BNA)
  source: /note="3' tri-ethylene glycol (TEG)"
tcgguaaguucuguccaagc

SEQ ID NO: 8852 - DNA, 19 bp, Artificial Sequence
  source: /note="Description of Artificial Sequence: Synthetic oligonucleotide"
  source: /note="Description of Combined DNA/RNA Molecule: Synthetic oligonucleotide"
  source: /note="DNA/RNA"
  modified_base (1)..(1): bicyclic nucleic acid (BNA)
  modified_base (2)..(2): bicyclic nucleic acid (BNA)
  source: /note="3' tri-ethylene glycol (TEG)"
tcgguaaguucuguccaag

SEQ ID NO: 8853 - DNA, 18 bp, Artificial Sequence
  source: /note="Description of Artificial Sequence: Synthetic oligonucleotide"
  source: /note="Description of Combined DNA/RNA Molecule: Synthetic oligonucleotide"
  source: /note="DNA/RNA"
  modified_base (1)..(1): bicyclic nucleic acid (BNA)
  modified_base (2)..(2): bicyclic nucleic acid (BNA)
  source: /note="3' tri-ethylene glycol (TEG)"
tcgguaaguucuguccaa

SEQ ID NO: 8854 - DNA, 17 bp, Artificial Sequence
  source: /note="Description of Artificial Sequence: Synthetic oligonucleotide"
  source: /note="Description of Combined DNA/RNA Molecule: Synthetic oligonucleotide"
  source: /note="DNA/RNA"
  modified_base (1)..(1): bicyclic nucleic acid (BNA)
  modified_base (2)..(2): bicyclic nucleic acid (BNA)
  source: /note="3' tri-ethylene glycol (TEG)"
tcgguaaguucugucca

SEQ ID NO: 8855 - DNA, 16 bp, Artificial Sequence
  source: /note="Description of Artificial Sequence: Synthetic oligonucleotide"
  source: /note="Description of Combined DNA/RNA Molecule: Synthetic oligonucleotide"
  source: /note="DNA/RNA"
  modified_base (1)..(1): bicyclic nucleic acid (BNA)
  modified_base (2)..(2): bicyclic nucleic acid (BNA)
  source: /note="3' tri-ethylene glycol (TEG)"
tcgguaaguucugucc

SEQ ID NO: 8856 - DNA, 15 bp, Artificial Sequence
  source: /note="Description of Artificial Sequence: Synthetic oligonucleotide"
  source: /note="Description of Combined DNA/RNA Molecule: Synthetic oligonucleotide"
  source: /note="DNA/RNA"
  modified_base (1)..(1): bicyclic nucleic acid (BNA)
  modified_base (2)..(2): bicyclic nucleic acid (BNA)
  source: /note="3' tri-ethylene glycol (TEG)"
tcgguaaguucuguc

SEQ ID NO: 8857 - DNA, 14 bp, Artificial Sequence
  source: /note="Description of Artificial Sequence: Synthetic oligonucleotide"
  source: /note="Description of Combined DNA/RNA Molecule: Synthetic oligonucleotide"
  source: /note="DNA/RNA"
  modified_base (1)..(1): bicyclic nucleic acid (BNA)
  modified_base (2)..(2): bicyclic nucleic acid (BNA)
  source: /note="3' tri-ethylene glycol (TEG)"
tcgguaaguucugu

SEQ ID NO: 8858 - DNA, 13 bp, Artificial Sequence
  source: /note="Description of Artificial Sequence: Synthetic oligonucleotide"
  source: /note="Description of Combined DNA/RNA Molecule: Synthetic oligonucleotide"
  source: /note="DNA/RNA"
  modified_base (1)..(1): bicyclic nucleic acid (BNA)
  modified_base (2)..(2): bicyclic nucleic acid (BNA)
  source: /note="3' tri-ethylene glycol (TEG)"
tcgguaaguucug

SEQ ID NO: 8859 - DNA, 12 bp, Artificial Sequence
  source: /note="Description of Artificial Sequence: Synthetic oligonucleotide"
  source: /note="Description of Combined DNA/RNA Molecule: Synthetic oligonucleotide"
  source: /note="DNA/RNA"
  modified_base (1)..(1): bicyclic nucleic acid (BNA)
  modified_base (2)..(2): bicyclic nucleic acid (BNA)
  source: /note="3' tri-ethylene glycol (TEG)"
tcgguaaguucu

SEQ ID NO: 8860 - DNA, 11 bp, Artificial Sequence
  source: /note="Description of Artificial Sequence: Synthetic oligonucleotide"
  source: /note="Description of Combined DNA/RNA Molecule: Synthetic oligonucleotide"
  source: /note="DNA/RNA"
  modified_base (1)..(1): bicyclic nucleic acid (BNA)
  modified_base (2)..(2): bicyclic nucleic acid (BNA)
  source: /note="3' tri-ethylene glycol (TEG)"
tcgguaaguuc

SEQ ID NO: 8861 - DNA, 10 bp, Artificial Sequence
  source: /note="Description of Artificial Sequence: Synthetic oligonucleotide"
  source: /note="Description of Combined DNA/RNA Molecule: Synthetic oligonucleotide"
  source: /note="DNA/RNA"
  modified_base (1)..(1): bicyclic nucleic acid (BNA)
  modified_base (2)..(2): bicyclic nucleic acid (BNA)
  source: /note="3' tri-ethylene glycol (TEG)"
tcgguaaguu

SEQ ID NO: 8862 - DNA, 9 bp, Artificial Sequence
  source: /note="Description of Artificial Sequence: Synthetic oligonucleotide"
  source: /note="Description of Combined DNA/RNA Molecule: Synthetic oligonucleotide"
  source: /note="DNA/RNA"
  modified_base (1)..(1): bicyclic nucleic acid (BNA)
  modified_base (2)..(2): bicyclic nucleic acid (BNA)
  source: /note="3' tri-ethylene glycol (TEG)"
tcgguaagu

SEQ ID NO: 8863 - DNA, 20 bp, Artificial Sequence
  source: /note="Description of Artificial Sequence: Synthetic oligonucleotide"
  source: /note="Description of Combined DNA/RNA Molecule: Synthetic oligonucleotide"
  source: /note="DNA/RNA"
  modified_base (1)..(1): bicyclic nucleic acid (BNA)
  modified_base (2)..(2): bicyclic nucleic acid (BNA)
  source: /note="3' tri-ethylene glycol (TEG)"
gtcgguaaguucuguccaag

SEQ ID NO: 8864 - DNA, 19 bp, Artificial Sequence
  source: /note="Description of Artificial Sequence: Synthetic oligonucleotide"
  source: /note="Description of Combined DNA/RNA Molecule: Synthetic oligonucleotide"
  source: /note="DNA/RNA"
  modified_base (1)..(1): bicyclic nucleic acid (BNA)
  modified_base (2)..(2): bicyclic nucleic acid (BNA)
  source: /note="3' tri-ethylene glycol (TEG)"
gtcgguaaguucuguccaa

SEQ ID NO: 8865 - DNA, 18 bp, Artificial Sequence
  source: /note="Description of Artificial Sequence: Synthetic oligonucleotide"
  source: /note="Description of Combined DNA/RNA Molecule: Synthetic oligonucleotide"
  source: /note="DNA/RNA"
  modified_base (1)..(1): bicyclic nucleic acid (BNA)
  modified_base (2)..(2): bicyclic nucleic acid (BNA)
  source: /note="3' tri-ethylene glycol (TEG)"
gtcgguaaguucugucca

SEQ ID NO: 8866 - DNA, 17 bp, Artificial Sequence
  source: /note="Description of Artificial Sequence: Synthetic oligonucleotide"
  source: /note="Description of Combined DNA/RNA Molecule: Synthetic oligonucleotide"
  source: /note="DNA/RNA"
  modified_base (1)..(1): bicyclic nucleic acid (BNA)
  modified_base (2)..(2): bicyclic nucleic acid (BNA)
  source: /note="3' tri-ethylene glycol (TEG)"
gtcgguaaguucugucc

SEQ ID NO: 8867 - DNA, 16 bp, Artificial Sequence
  source: /note="Description of Artificial Sequence: Synthetic oligonucleotide"
  source: /note="Description of Combined DNA/RNA Molecule: Synthetic oligonucleotide"
  source: /note="DNA/RNA"
  modified_base (1)..(1): bicyclic nucleic acid (BNA)
  modified_base (2)..(2): bicyclic nucleic acid (BNA)
  source: /note="3' tri-ethylene glycol (TEG)"
gtcgguaaguucuguc

SEQ ID NO: 8868 - DNA, 15 bp, Artificial Sequence
  source: /note="Description of Artificial Sequence: Synthetic oligonucleotide"
  source: /note="Description of Combined DNA/RNA Molecule: Synthetic oligonucleotide"
  source: /note="DNA/RNA"
  modified_base (1)..(1): bicyclic nucleic acid (BNA)
  modified_base (2)..(2): bicyclic nucleic acid (BNA)
  source: /note="3' tri-ethylene glycol (TEG)"
gtcgguaaguucugu

SEQ ID NO: 8869 - DNA, 14 bp, Artificial Sequence
  source: /note="Description of Artificial Sequence: Synthetic oligonucleotide"
  source: /note="Description of Combined DNA/RNA Molecule: Synthetic oligonucleotide"
  source: /note="DNA/RNA"
  modified_base (1)..(1): bicyclic nucleic acid (BNA)
  modified_base (2)..(2): bicyclic nucleic acid (BNA)
  source: /note="3' tri-ethylene glycol (TEG)"
gtcgguaaguucug

SEQ ID NO: 8870 - DNA, 13 bp, Artificial Sequence
  source: /note="Description of Artificial Sequence: Synthetic oligonucleotide"
  source: /note="Description of Combined DNA/RNA Molecule: Synthetic oligonucleotide"
  source: /note="DNA/RNA"
  modified_base (1)..(1): bicyclic nucleic acid (BNA)
  modified_base (2)..(2): bicyclic nucleic acid (BNA)
  source: /note="3' tri-ethylene glycol (TEG)"
gtcgguaaguucu

SEQ ID NO: 8871 - DNA, 12 bp, Artificial Sequence
  source: /note="Description of Artificial Sequence: Synthetic oligonucleotide"
  source: /note="Description of Combined DNA/RNA Molecule: Synthetic oligonucleotide"
  source: /note="DNA/RNA"
  modified_base (1)..(1): bicyclic nucleic acid (BNA)
  modified_base (2)..(2): bicyclic nucleic acid (BNA)
  source: /note="3' tri-ethylene glycol (TEG)"
gtcgguaaguuc

SEQ ID NO: 8872 - DNA, 11 bp, Artificial Sequence
  source: /note="Description of Artificial Sequence: Synthetic oligonucleotide"
  source: /note="Description of Combined DNA/RNA Molecule: Synthetic oligonucleotide"
  source: /note="DNA/RNA"
  modified_base (1)..(1): bicyclic nucleic acid (BNA)
  modified_base (2)..(2): bicyclic nucleic acid (BNA)
  source: /note="3' tri-ethylene glycol (TEG)"
gtcgguaaguu

SEQ ID NO: 8873 - DNA, 10 bp, Artificial Sequence
  source: /note="Description of Artificial Sequence: Synthetic oligonucleotide"
  source: /note="Description of Combined DNA/RNA Molecule: Synthetic oligonucleotide"
  source: /note="DNA/RNA"
  modified_base (1)..(1): bicyclic nucleic acid (BNA)
  modified_base (2)..(2): bicyclic nucleic acid (BNA)
  source: /note="3' tri-ethylene glycol (TEG)"
gtcgguaagu

SEQ ID NO: 8874 - RNA, 20 nt, Artificial Sequence
  source: /note="Description of Artificial Sequence: Synthetic oligonucleotide"
  source: /note="RNA"
  modified_base (1)..(1): bicyclic nucleic acid (BNA)
  modified_base (2)..(2): bicyclic nucleic acid (BNA)
  source: /note="3' tri-ethylene glycol (TEG)"
agucgguaaguucuguccaa

SEQ ID NO: 8875 - RNA, 19 nt, Artificial Sequence
  source: /note="Description of Artificial Sequence: Synthetic oligonucleotide"
  source: /note="RNA"
  modified_base (1)..(1): bicyclic nucleic acid (BNA)
  modified_base (2)..(2): bicyclic nucleic acid (BNA)
  source: /note="3' tri-ethylene glycol (TEG)"
agucgguaaguucugucca

SEQ ID NO: 8876 - RNA, 17 nt, Artificial Sequence
  source: /note="Description of Artificial Sequence: Synthetic oligonucleotide"
  source: /note="RNA"
  modified_base (1)..(1): bicyclic nucleic acid (BNA)
  modified_base (2)..(2): bicyclic nucleic acid (BNA)
  source: /note="3' tri-ethylene glycol (TEG)"
agucgguaaguucuguc

SEQ ID NO: 8877 - RNA, 16 nt, Artificial Sequence
  source: /note="Description of Artificial Sequence: Synthetic oligonucleotide"
  source: /note="RNA"
  modified_base (1)..(1): bicyclic nucleic acid (BNA)
  modified_base (2)..(2): bicyclic nucleic acid (BNA)
  source: /note="3' tri-ethylene glycol (TEG)"
agucgguaaguucugu

SEQ ID NO: 8878 - RNA, 15 nt, Artificial Sequence
  source: /note="Description of Artificial Sequence: Synthetic oligonucleotide"
  source: /note="RNA"
  modified_base (1)..(1): bicyclic nucleic acid (BNA)
  modified_base (2)..(2): bicyclic nucleic acid (BNA)
  source: /note="3' tri-ethylene glycol (TEG)"
agucgguaaguucug

SEQ ID NO: 8879 - RNA, 14 nt, Artificial Sequence
  source: /note="Description of Artificial Sequence: Synthetic oligonucleotide"
  source: /note="RNA"
  modified_base (1)..(1): bicyclic nucleic acid (BNA)
  modified_base (2)..(2): bicyclic nucleic acid (BNA)
  source: /note="3' tri-ethylene glycol (TEG)"
agucgguaaguucu

SEQ ID NO: 8880 - RNA, 13 nt, Artificial Sequence
  source: /note="Description of Artificial Sequence: Synthetic oligonucleotide"
  source: /note="RNA"
  modified_base (1)..(1): bicyclic nucleic acid (BNA)
  modified_base (2)..(2): bicyclic nucleic acid (BNA)
  source: /note="3' tri-ethylene glycol (TEG)"
agucgguaaguuc

SEQ ID NO: 8881 - RNA, 12 nt, Artificial Sequence
  source: /note="Description of Artificial Sequence: Synthetic oligonucleotide"
  source: /note="RNA"
  modified_base (1)..(1): bicyclic nucleic acid (BNA)
  modified_base (2)..(2): bicyclic nucleic acid (BNA)
  source: /note="3' tri-ethylene glycol (TEG)"
agucgguaaguu

SEQ ID NO: 8882 - RNA, 11 nt, Artificial Sequence
  source: /note="Description of Artificial Sequence: Synthetic oligonucleotide"
  source: /note="RNA"
  modified_base (1)..(1): bicyclic nucleic acid (BNA)
  modified_base (2)..(2): bicyclic nucleic acid (BNA)
  source: /note="3' tri-ethylene glycol (TEG)"
agucgguaagu

SEQ ID NO: 8883 - RNA, 20 nt, Artificial Sequence
  source: /note="Description of Artificial Sequence: Synthetic oligonucleotide"
  source: /note="RNA"
  modified_base (1)..(1): bicyclic nucleic acid (BNA)
  modified_base (2)..(2): bicyclic nucleic acid (BNA)
  source: /note="3' tri-ethylene glycol (TEG)"
cagucgguaaguucugucca

SEQ ID NO: 8884 - RNA, 19 nt, Artificial Sequence
  source: /note="Description of Artificial Sequence: Synthetic oligonucleotide"
  source: /note="RNA"
  modified_base (1)..(1): bicyclic nucleic acid (BNA)
  modified_base (2)..(2): bicyclic nucleic acid (BNA)
  source: /note="3' tri-ethylene glycol (TEG)"
cagucgguaaguucugucc

SEQ ID NO: 8885 - RNA, 18 nt, Artificial Sequence
  source: /note="Description of Artificial Sequence: Synthetic oligonucleotide"
  source: /note="RNA"
  modified_base (1)..(1): bicyclic nucleic acid (BNA)
  modified_base (2)..(2): bicyclic nucleic acid (BNA)
  source: /note="3' tri-ethylene glycol (TEG)"
cagucgguaaguucuguc

SEQ ID NO: 8886 - RNA, 17 nt, Artificial Sequence
  source: /note="Description of Artificial Sequence: Synthetic oligonucleotide"
  source: /note="RNA"
  modified_base (1)..(1): bicyclic nucleic acid (BNA)
  modified_base (2)..(2): bicyclic nucleic acid (BNA)
  source: /note="3' tri-ethylene glycol (TEG)"
cagucgguaaguucugu

SEQ ID NO: 8887 - RNA, 16 nt, Artificial Sequence
  source: /note="Description of Artificial Sequence: Synthetic oligonucleotide"
  source: /note="RNA"
  modified_base (1)..(1): bicyclic nucleic acid (BNA)
  modified_base (2)..(2): bicyclic nucleic acid (BNA)
  source: /note="3' tri-ethylene glycol (TEG)"
cagucgguaaguucug

SEQ ID NO: 8888 - RNA, 15 nt, Artificial Sequence
  source: /note="Description of Artificial Sequence: Synthetic oligonucleotide"
  source: /note="RNA"
  modified_base (1)..(1): bicyclic nucleic acid (BNA)
  modified_base (2)..(2): bicyclic nucleic acid (BNA)
  source: /note="3' tri-ethylene glycol (TEG)"
cagucgguaaguucu

SEQ ID NO: 8889 - RNA, 14 nt, Artificial Sequence
  source: /note="Description of Artificial Sequence: Synthetic oligonucleotide"
  source: /note="RNA"
  modified_base (1)..(1): bicyclic nucleic acid (BNA)
  modified_base (2)..(2): bicyclic nucleic acid (BNA)
  source: /note="3' tri-ethylene glycol (TEG)"
cagucgguaaguuc

SEQ ID NO: 8890 - RNA, 13 nt, Artificial Sequence
  source: /note="Description of Artificial Sequence: Synthetic oligonucleotide"
  source: /note="RNA"
  modified_base (1)..(1): bicyclic nucleic acid (BNA)
  modified_base (2)..(2): bicyclic nucleic acid (BNA)
  source: /note="3' tri-ethylene glycol (TEG)"
cagucgguaaguu

SEQ ID NO: 8891 - RNA, 12 nt, Artificial Sequence
  source: /note="Description of Artificial Sequence: Synthetic oligonucleotide"
  source: /note="RNA"
  modified_base (1)..(1): bicyclic nucleic acid (BNA)
  modified_base (2)..(2): bicyclic nucleic acid (BNA)
  source: /note="3' tri-ethylene glycol (TEG)"
cagucgguaagu

SEQ ID NO: 8892 - RNA, 20 nt, Artificial Sequence
  source: /note="Description of Artificial Sequence: Synthetic oligonucleotide"
  source: /note="RNA"
  modified_base (1)..(1): bicyclic nucleic acid (BNA)
  modified_base (2)..(2): bicyclic nucleic acid (BNA)
  source: /note="3' tri-ethylene glycol (TEG)"
ccagucgguaaguucugucc

SEQ ID NO: 8893 - RNA, 19 nt, Artificial Sequence
  source: /note="Description of Artificial Sequence: Synthetic oligonucleotide"
  source: /note="RNA"
  modified_base (1)..(1): bicyclic nucleic acid (BNA)
  modified_base (2)..(2): bicyclic nucleic acid (BNA)
  source: /note="3' tri-ethylene glycol (TEG)"
ccagucgguaaguucuguc

SEQ ID NO: 8894 - RNA, 18 nt, Artificial Sequence
  source: /note="Description of Artificial Sequence: Synthetic oligonucleotide"
  source: /note="RNA"
  modified_base (1)..(1): bicyclic nucleic acid (BNA)
  modified_base (2)..(2): bicyclic nucleic acid (BNA)
  source: /note="3' tri-ethylene glycol (TEG)"
ccagucgguaaguucugu

SEQ ID NO: 8895 - RNA, 17 nt, Artificial Sequence
  source: /note="Description of Artificial Sequence: Synthetic oligonucleotide"
  source: /note="RNA"
  modified_base (1)..(1): bicyclic nucleic acid (BNA)
  modified_base (2)..(2): bicyclic nucleic acid (BNA)
  source: /note="3' tri-ethylene glycol (TEG)"
ccagucgguaaguucug

SEQ ID NO: 8896 - RNA, 16 nt, Artificial Sequence
  source: /note="Description of Artificial Sequence: Synthetic oligonucleotide"
  source: /note="RNA"
  modified_base (1)..(1): bicyclic nucleic acid (BNA)
  modified_base (2)..(2): bicyclic nucleic acid (BNA)
  source: /note="3' tri-ethylene glycol (TEG)"
ccagucgguaaguucu

SEQ ID NO: 8897 - RNA, 15 nt, Artificial Sequence
  source: /note="Description of Artificial Sequence: Synthetic oligonucleotide"
  source: /note="RNA"
  modified_base (1)..(1): bicyclic nucleic acid (BNA)
  modified_base (2)..(2): bicyclic nucleic acid (BNA)
  source: /note="3' tri-ethylene glycol (TEG)"
ccagucgguaaguuc

SEQ ID NO: 8898 - RNA, 14 nt, Artificial Sequence
  source: /note="Description of Artificial Sequence: Synthetic oligonucleotide"
  source: /note="RNA"
  modified_base (1)..(1): bicyclic nucleic acid (BNA)
  modified_base (2)..(2): bicyclic nucleic acid (BNA)
  source: /note="3' tri-ethylene glycol (TEG)"
ccagucgguaaguu

SEQ ID NO: 8899 - RNA, 13 nt, Artificial Sequence
  source: /note="Description of Artificial Sequence: Synthetic oligonucleotide"
  source: /note="RNA"
  modified_base (1)..(1): bicyclic nucleic acid (BNA)
  modified_base (2)..(2): bicyclic nucleic acid (BNA)
  source: /note="3' tri-ethylene glycol (TEG)"
ccagucgguaagu

SEQ ID NO: 8900 - RNA, 20 nt, Artificial Sequence
  source: /note="Description of Artificial Sequence: Synthetic oligonucleotide"
  source: /note="RNA"
  modified_base (1)..(1): bicyclic nucleic acid (BNA)
  modified_base (2)..(2): bicyclic nucleic acid (BNA)
  source: /note="3' tri-ethylene glycol (TEG)"
gccagucgguaaguucuguc

SEQ ID NO: 8901 - RNA, 19 nt, Artificial Sequence
  source: /note="Description of Artificial Sequence: Synthetic oligonucleotide"
  source: /note="RNA"
  modified_base (1)..(1): bicyclic nucleic acid (BNA)
  modified_base (2)..(2): bicyclic nucleic acid (BNA)
  source: /note="3' tri-ethylene glycol (TEG)"
gccagucgguaaguucugu

SEQ ID NO: 8902 - RNA, 18 nt, Artificial Sequence
  source: /note="Description of Artificial Sequence: Synthetic oligonucleotide"
  source: /note="RNA"
  modified_base (1)..(1): bicyclic nucleic acid (BNA)
  modified_base (2)..(2): bicyclic nucleic acid (BNA)
  source: /note="3' tri-ethylene glycol (TEG)"
gccagucgguaaguucug

SEQ ID NO: 8903 - RNA, 17 nt, Artificial Sequence
  source: /note="Description of Artificial Sequence: Synthetic oligonucleotide"
  source: /note="RNA"
  modified_base (1)..(1): bicyclic nucleic acid (BNA)
  modified_base (2)..(2): bicyclic nucleic acid (BNA)
  source: /note="3' tri-ethylene glycol (TEG)"
gccagucgguaaguucu

SEQ ID NO: 8904 - RNA, 16 nt, Artificial Sequence
  source: /note="Description of Artificial Sequence: Synthetic oligonucleotide"
  source: /note="RNA"
  modified_base (1)..(1): bicyclic nucleic acid (BNA)
  modified_base (2)..(2): bicyclic nucleic acid (BNA)
  source: /note="3' tri-ethylene glycol (TEG)"
gccagucgguaaguuc

SEQ ID NO: 8905 - RNA, 15 nt, Artificial Sequence
  source: /note="Description of Artificial Sequence: Synthetic oligonucleotide"
  source: /note="RNA"
  modified_base (1)..(1): bicyclic nucleic acid (BNA)
  modified_base (2)..(2): bicyclic nucleic acid (BNA)
  source: /note="3' tri-ethylene glycol (TEG)"
gccagucgguaaguu

SEQ ID NO: 8906 - RNA, 14 nt, Artificial Sequence
  source: /note="Description of Artificial Sequence: Synthetic oligonucleotide"
  source: /note="RNA"
  modified_base (1)..(1): bicyclic nucleic acid (BNA)
  modified_base (2)..(2): bicyclic nucleic acid (BNA)
  source: /note="3' tri-ethylene glycol (TEG)"
gccagucgguaagu

SEQ ID NO: 8907 - DNA, 20 bp, Artificial Sequence
  source: /note="Description of Artificial Sequence: Synthetic oligonucleotide"
  source: /note="Description of Combined DNA/RNA Molecule: Synthetic oligonucleotide"
  source: /note="DNA/RNA"
  modified_base (1)..(1): bicyclic nucleic acid (BNA)
  modified_base (2)..(2): bicyclic nucleic acid (BNA)
  source: /note="3' tri-ethylene glycol (TEG)"
tcaaggaagauggcauuucu

SEQ ID NO: 8908 - DNA, 22 bp, Artificial Sequence
  source: /note="Description of Artificial Sequence: Synthetic oligonucleotide"
  source: /note="Description of Combined DNA/RNA Molecule: Synthetic oligonucleotide"
  source: /note="DNA/RNA"
  modified_base (1)..(1): bicyclic nucleic acid (BNA)
  modified_base (2)..(2): bicyclic nucleic acid (BNA)
  source: /note="3' tri-ethylene glycol (TEG)"
tcaaggaagauggcauuucuag

SEQ ID NO: 8909 - DNA, 16 bp, Artificial Sequence
  source: /note="Description of Artificial Sequence: Synthetic oligonucleotide"
  source: /note="Description of Combined DNA/RNA Molecule: Synthetic oligonucleotide"
  source: /note="DNA/RNA"
  modified_base (1)..(1): bicyclic nucleic acid (BNA)
  modified_base (2)..(2): bicyclic nucleic acid (BNA)
  source: /note="3' tri-ethylene glycol (TEG)"
tcaaggaagauggcau

SEQ ID NO: 8910 - RNA, 15 nt, Artificial Sequence
  source: /note="Description of Artificial Sequence: Synthetic oligonucleotide"
  source: /note="RNA"
  modified_base (1)..(1): bicyclic nucleic acid (BNA)
  modified_base (2)..(2): bicyclic nucleic acid (BNA)
  source: /note="3' tri-ethylene glycol (TEG)"
gaagauggcauuucu

SEQ ID NO: 8911 - DNA, 21 bp, Artificial Sequence
  source: /note="Description of Artificial Sequence: Synthetic oligonucleotide"
  source: /note="Description of Combined DNA/RNA Molecule: Synthetic oligonucleotide"
  source: /note="DNA/RNA"
  modified_base (1)..(1): bicyclic nucleic acid (BNA)
  modified_base (2)..(2): bicyclic nucleic acid (BNA)
  source: /note="3' tri-ethylene glycol (TEG)"
tcaaggaagauggcauuucua

SEQ ID NO: 8912 - DNA, 19 bp, Artificial Sequence
  source: /note="Description of Artificial Sequence: Synthetic oligonucleotide"
  source: /note="Description of Combined DNA/RNA Molecule: Synthetic oligonucleotide"
  source: /note="DNA/RNA"
  modified_base (1)..(1): bicyclic nucleic acid (BNA)
  modified_base (2)..(2): bicyclic nucleic acid (BNA)
  source: /note="3' tri-ethylene glycol (TEG)"
tcaaggaagauggcauuuc

SEQ ID NO: 8913 - DNA, 18 bp, Artificial Sequence
  source: /note="Description of Artificial Sequence: Synthetic oligonucleotide"
  source: /note="Description of Combined DNA/RNA Molecule: Synthetic oligonucleotide"
  source: /note="DNA/RNA"
  modified_base (1)..(1): bicyclic nucleic acid (BNA)
  modified_base (2)..(2): bicyclic nucleic acid (BNA)
  source: /note="3' tri-ethylene glycol (TEG)"
tcaaggaagauggcauuu

SEQ ID NO: 8914 - DNA, 17 bp, Artificial Sequence
  source: /note="Description of Artificial Sequence: Synthetic oligonucleotide"
  source: /note="Description of Combined DNA/RNA Molecule: Synthetic oligonucleotide"
  source: /note="DNA/RNA"
  modified_base (1)..(1): bicyclic nucleic acid (BNA)
  modified_base (2)..(2): bicyclic nucleic acid (BNA)
  source: /note="3' tri-ethylene glycol (TEG)"
tcaaggaagauggcauu

SEQ ID NO: 8915 - DNA, 15 bp, Artificial Sequence
  source: /note="Description of Artificial Sequence: Synthetic oligonucleotide"
  source: /note="Description of Combined DNA/RNA Molecule: Synthetic oligonucleotide"
  source: /note="DNA/RNA"
  modified_base (1)..(1): bicyclic nucleic acid (BNA)
  modified_base (2)..(2): bicyclic nucleic acid (BNA)
  source: /note="3' tri-ethylene glycol (TEG)"
tcaaggaagauggca

SEQ ID NO: 8916 - DNA, 14 bp, Artificial Sequence
  source: /note="Description of Artificial Sequence: Synthetic oligonucleotide"
  source: /note="Description of Combined DNA/RNA Molecule: Synthetic oligonucleotide"
  source: /note="DNA/RNA"
  modified_base (1)..(1): bicyclic nucleic acid (BNA)
  modified_base (2)..(2): bicyclic nucleic acid (BNA)
  source: /note="3' tri-ethylene glycol (TEG)"
tcaaggaagauggc

SEQ ID NO: 8917 - DNA, 13 bp, Artificial Sequence
  source: /note="Description of Artificial Sequence: Synthetic oligonucleotide"
  source: /note="Description of Combined DNA/RNA Molecule: Synthetic oligonucleotide"
  source: /note="DNA/RNA"
  modified_base (1)..(1): bicyclic nucleic acid (BNA)
  modified_base (2)..(2): bicyclic nucleic acid (BNA)
  source: /note="3' tri-ethylene glycol (TEG)"
tcaaggaagaugg

SEQ ID NO: 8918 - DNA, 12 bp, Artificial Sequence
  source: /note="Description of Artificial Sequence: Synthetic oligonucleotide"
  source: /note="Description of Combined DNA/RNA Molecule: Synthetic oligonucleotide"
  source: /note="DNA/RNA"
  modified_base (1)..(1): bicyclic nucleic acid (BNA)
  modified_base (2)..(2): bicyclic nucleic acid (BNA)
  source: /note="3' tri-ethylene glycol (TEG)"
tcaaggaagaug

SEQ ID NO: 8919 - DNA, 11 bp, Artificial Sequence
  source: /note="Description of Artificial Sequence: Synthetic oligonucleotide"
  source: /note="Description of Combined DNA/RNA Molecule: Synthetic oligonucleotide"
  source: /note="DNA/RNA"
  modified_base (1)..(1): bicyclic nucleic acid (BNA)
  modified_base (2)..(2): bicyclic nucleic acid (BNA)
  source: /note="3' tri-ethylene glycol (TEG)"
tcaaggaagau

SEQ ID NO: 8920 - DNA, 10 bp, Artificial Sequence
  source: /note="Description of Artificial Sequence: Synthetic oligonucleotide"
  source: /note="DNA/RNA"
  modified_base (1)..(1): bicyclic nucleic acid (BNA)
  modified_base (2)..(2): bicyclic nucleic acid (BNA)
  source: /note="3' tri-ethylene glycol (TEG)"
tcaaggaaga

SEQ ID NO: 8921 - DNA, 9 bp, Artificial Sequence
  source: /note="Description of Artificial Sequence: Synthetic oligonucleotide"
  source: /note="DNA/RNA"
  modified_base (1)..(1): bicyclic nucleic acid (BNA)
  modified_base (2)..(2): bicyclic nucleic acid (BNA)
  source: /note="3' tri-ethylene glycol (TEG)"
tcaaggaag

SEQ ID NO: 8922 - RNA, 21 nt, Artificial Sequence
  source: /note="Description of Artificial Sequence: Synthetic oligonucleotide"
  source: /note="RNA"
  modified_base (1)..(1): bicyclic nucleic acid (BNA)
  modified_base (2)..(2): bicyclic nucleic acid (BNA)
  source: /note="3' tri-ethylene glycol (TEG)"
caaggaagauggcauuucuag

SEQ ID NO: 8923 - RNA, 20 nt, Artificial Sequence
  source: /note="Description of Artificial Sequence: Synthetic oligonucleotide"
  source: /note="RNA"
  modified_base (1)..(1): bicyclic nucleic acid (BNA)
  modified_base (2)..(2): bicyclic nucleic acid (BNA)
  source: /note="3' tri-ethylene glycol (TEG)"
caaggaagauggcauuucua

SEQ ID NO: 8924 - RNA, 19 nt, Artificial Sequence
  source: /note="Description of Artificial Sequence: Synthetic oligonucleotide"
  source: /note="RNA"
  modified_base (1)..(1): bicyclic nucleic acid (BNA)
  modified_base (2)..(2): bicyclic nucleic acid (BNA)
  source: /note="3' tri-ethylene glycol (TEG)"
caaggaagauggcauuucu

SEQ ID NO: 8925 - RNA, 18 nt, Artificial Sequence
  source: /note="Description of Artificial Sequence: Synthetic oligonucleotide"
  source: /note="RNA"
  modified_base (1)..(1): bicyclic nucleic acid (BNA)
  modified_base (2)..(2): bicyclic nucleic acid (BNA)
  source: /note="3' tri-ethylene glycol (TEG)"
caaggaagauggcauuuc

SEQ ID NO: 8926 - RNA, 17 nt, Artificial Sequence
  source: /note="Description of Artificial Sequence: Synthetic oligonucleotide"
  source: /note="RNA"
  modified_base (1)..(1): bicyclic nucleic acid (BNA)
  modified_base (2)..(2): bicyclic nucleic acid (BNA)
  source: /note="3' tri-ethylene glycol (TEG)"
caaggaagauggcauuu

SEQ ID NO: 8927 - RNA, 16 nt, Artificial Sequence
  source: /note="Description of Artificial Sequence: Synthetic oligonucleotide"
  source: /note="RNA"
  modified_base (1)..(1): bicyclic nucleic acid (BNA)
  modified_base (2)..(2): bicyclic nucleic acid (BNA)
  source: /note="3' tri-ethylene glycol (TEG)"
caaggaagauggcauu

SEQ ID NO: 8928 - RNA, 15 nt, Artificial Sequence
  source: /note="Description of Artificial Sequence: Synthetic oligonucleotide"
  source: /note="RNA"
  modified_base (1)..(1): bicyclic nucleic acid (BNA)
  modified_base (2)..(2): bicyclic nucleic acid (BNA)
  source: /note="3' tri-ethylene glycol (TEG)"
caaggaagauggcau

SEQ ID NO: 8929 - RNA, 14 nt, Artificial Sequence
  source: /note="Description of Artificial Sequence: Synthetic oligonucleotide"
  source: /note="RNA"
  modified_base (1)..(1): bicyclic nucleic acid (BNA)
  modified_base (2)..(2): bicyclic nucleic acid (BNA)
  source: /note="3' tri-ethylene glycol (TEG)"
caaggaagauggca

SEQ ID NO: 8930 - RNA, 13 nt, Artificial Sequence
  source: /note="Description of Artificial Sequence: Synthetic oligonucleotide"
  source: /note="RNA"
  modified_base (1)..(1): bicyclic nucleic acid (BNA)
  modified_base (2)..(2): bicyclic nucleic acid (BNA)
  source: /note="3' tri-ethylene glycol (TEG)"
caaggaagauggc

SEQ ID NO: 8931 - RNA, 12 nt, Artificial Sequence
  source: /note="Description of Artificial Sequence: Synthetic oligonucleotide"
  source: /note="RNA"
  modified_base (1)..(1): bicyclic nucleic acid (BNA)
  modified_base (2)..(2): bicyclic nucleic acid (BNA)
  source: /note="3' tri-ethylene glycol (TEG)"
caaggaagaugg

SEQ ID NO: 8932 - RNA, 11 nt, Artificial Sequence
  source: /note="Description of Artificial Sequence: Synthetic oligonucleotide"
  source: /note="RNA"
  modified_base (1)..(1): bicyclic nucleic acid (BNA)
  modified_base (2)..(2): bicyclic nucleic acid (BNA)
  source: /note="3' tri-ethylene glycol (TEG)"
caaggaagaug

SEQ ID NO: 8933 - RNA, 10 nt, Artificial Sequence
  source: /note="Description of Artificial Sequence: Synthetic oligonucleotide"
  source: /note="RNA"
  modified_base (1)..(1): bicyclic nucleic acid (BNA)
  modified_base (2)..(2): bicyclic nucleic acid (BNA)
  source: /note="3' tri-ethylene glycol (TEG)"
caaggaagau

SEQ ID NO: 8934 - RNA, 9 nt, Artificial Sequence
  source: /note="Description of Artificial Sequence: Synthetic oligonucleotide"
  source: /note="RNA/Antisense Oligonucleotide"
  modified_base (1)..(1): bicyclic nucleic acid (BNA)
  modified_base (2)..(2): bicyclic nucleic acid (BNA)
  source: /note="3' tri-ethylene glycol (TEG)"
caaggaaga

SEQ ID NO: 8935 - RNA, 8 nt, Artificial Sequence
  source: /note="Description of Artificial Sequence: Synthetic oligonucleotide"
  source: /note="RNA/Antisense Oligonucleotide"
  modified_base (1)..(1): bicyclic nucleic acid (BNA)
  modified_base (2)..(2): bicyclic nucleic acid (BNA)
  source: /note="3' tri-ethylene glycol (TEG)"
caaggaag

SEQ ID NO: 8936 - RNA, 20 nt, Artificial Sequence
  source: /note="Description of Artificial Sequence: Synthetic oligonucleotide"
  source: /note="RNA"
  modified_base (1)..(1): bicyclic nucleic acid (BNA)
  modified_base (2)..(2): bicyclic nucleic acid (BNA)
  source: /note="3' tri-ethylene glycol (TEG)"
aaggaagauggcauuucuag

SEQ ID NO: 8937 - RNA, 19 nt, Artificial Sequence
  source: /note="Description of Artificial Sequence: Synthetic oligonucleotide"
  source: /note="RNA"
  modified_base (1)..(1): bicyclic nucleic acid (BNA)
  modified_base (2)..(2): bicyclic nucleic acid (BNA)
  source: /note="3' tri-ethylene glycol (TEG)"
aaggaagauggcauuucua

SEQ ID NO: 8938 - RNA, 18 nt, Artificial Sequence
  source: /note="Description of Artificial Sequence: Synthetic oligonucleotide"
  source: /note="RNA"
  modified_base (1)..(1): bicyclic nucleic acid (BNA)
  modified_base (2)..(2): bicyclic nucleic acid (BNA)
  source: /note="3' tri-ethylene glycol (TEG)"
aaggaagauggcauuucu

SEQ ID NO: 8939 - RNA, 17 nt, Artificial Sequence
  source: /note="Description of Artificial Sequence: Synthetic oligonucleotide"
  source: /note="RNA"
  modified_base (1)..(1): bicyclic nucleic acid (BNA)
  modified_base (2)..(2): bicyclic nucleic acid (BNA)
  source: /note="3' tri-ethylene glycol (TEG)"
aaggaagauggcauuuc

SEQ ID NO: 8940 - RNA, 16 nt, Artificial Sequence
  source: /note="Description of Artificial Sequence: Synthetic oligonucleotide"
  source: /note="RNA"
  modified_base (1)..(1): bicyclic nucleic acid (BNA)
  modified_base (2)..(2): bicyclic nucleic acid (BNA)
  source: /note="3' tri-ethylene glycol (TEG)"
aaggaagauggcauuu

SEQ ID NO: 8941 - RNA, 15 nt, Artificial Sequence
  source: /note="Description of Artificial Sequence: Synthetic oligonucleotide"
  source: /note="RNA"
  modified_base (1)..(1): bicyclic nucleic acid (BNA)
  modified_base (2)..(2): bicyclic nucleic acid (BNA)
  source: /note="3' tri-ethylene glycol (TEG)"
aaggaagauggcauu

SEQ ID NO: 8942 - RNA, 14 nt, Artificial Sequence
  source: /note="Description of Artificial Sequence: Synthetic oligonucleotide"
  source: /note="RNA"
  modified_base (1)..(1): bicyclic nucleic acid (BNA)
  modified_base (2)..(2): bicyclic nucleic acid (BNA)
  source: /note="3' tri-ethylene glycol (TEG)"
aaggaagauggcau

SEQ ID NO: 8943 - RNA, 13 nt, Artificial Sequence
  source: /note="Description of Artificial Sequence: Synthetic oligonucleotide"
  source: /note="RNA"
  modified_base (1)..(1): bicyclic nucleic acid (BNA)
  modified_base (2)..(2): bicyclic nucleic acid (BNA)
  source: /note="3' tri-ethylene glycol (TEG)"
aaggaagauggca

SEQ ID NO: 8944 - RNA, 12 nt, Artificial Sequence
  source: /note="Description of Artificial Sequence: Synthetic oligonucleotide"
  source: /note="RNA"
  modified_base (1)..(1): bicyclic nucleic acid (BNA)
  modified_base (2)..(2): bicyclic nucleic acid (BNA)
  source: /note="3' tri-ethylene glycol (TEG)"
aaggaagauggc

SEQ ID NO: 8945 - RNA, 11 nt, Artificial Sequence
  source: /note="Description of Artificial Sequence: Synthetic oligonucleotide"
  source: /note="RNA"
  modified_base (1)..(1): bicyclic nucleic acid (BNA)
  modified_base (2)..(2): bicyclic nucleic acid (BNA)
  source: /note="3' tri-ethylene glycol (TEG)"
aaggaagaugg

SEQ ID NO: 8946 - RNA, 10 nt, Artificial Sequence
  source: /note="Description of Artificial Sequence: Synthetic oligonucleotide"
  source: /note="RNA"
  modified_base (1)..(1): bicyclic nucleic acid (BNA)
  modified_base (2)..(2): bicyclic nucleic acid (BNA)
  source: /note="3' tri-ethylene glycol (TEG)"
aaggaagaug

SEQ ID NO: 8947 - RNA, 9 nt, Artificial Sequence
  source: /note="Description of Artificial Sequence: Synthetic oligonucleotide"
  source: /note="RNA"
  modified_base (1)..(1): bicyclic nucleic acid (BNA)
  modified_base (2)..(2): bicyclic nucleic acid (BNA)
  source: /note="3' tri-ethylene glycol (TEG)"
aaggaagau

SEQ ID NO: 8948 - RNA, 8 nt, Artificial Sequence
  source: /note="Description of Artificial Sequence: Synthetic oligonucleotide"
  source: /note="RNA/Antisense Oligonucleotide"
  modified_base (1)..(1): bicyclic nucleic acid (BNA)
  modified_base (2)..(2): bicyclic nucleic acid (BNA)
  source: /note="3' tri-ethylene glycol (TEG)"
aaggaaga

SEQ ID NO: 8949 - RNA, 19 nt, Artificial Sequence
  source: /note="Description of Artificial Sequence: Synthetic oligonucleotide"
  source: /note="RNA"
  modified_base (1)..(1): bicyclic nucleic acid (BNA)
  modified_base (2)..(2): bicyclic nucleic acid (BNA)
  source: /note="3' tri-ethylene glycol (TEG)"
aggaagauggcauuucuag

SEQ ID NO: 8950 - RNA, 18 nt, Artificial Sequence
  source: /note="Description of Artificial Sequence: Synthetic oligonucleotide"
  source: /note="RNA"
  modified_base (1)..(1): bicyclic nucleic acid (BNA)
  modified_base (2)..(2): bicyclic nucleic acid (BNA)
  source: /note="3' tri-ethylene glycol (TEG)"
aggaagauggcauuucua

SEQ ID NO: 8951 - RNA, 17 nt, Artificial Sequence
  source: /note="Description of Artificial Sequence: Synthetic oligonucleotide"
  source: /note="RNA"
  modified_base (1)..(1): bicyclic nucleic acid (BNA)
  modified_base (2)..(2): bicyclic nucleic acid (BNA)
  source: /note="3' tri-ethylene glycol (TEG)"
aggaagauggcauuucu

SEQ ID NO: 8952 - RNA, 16 nt, Artificial Sequence
  source: /note="Description of Artificial Sequence: Synthetic oligonucleotide"
  source: /note="RNA"
  modified_base (1)..(1): bicyclic nucleic acid (BNA)
  modified_base (2)..(2): bicyclic nucleic acid (BNA)
  source: /note="3' tri-ethylene glycol (TEG)"
aggaagauggcauuuc

SEQ ID NO: 8953 - RNA, 15 nt, Artificial Sequence
  source: /note="Description of Artificial Sequence: Synthetic oligonucleotide"
  source: /note="RNA"
  modified_base (1)..(1): bicyclic nucleic acid (BNA)
  modified_base (2)..(2): bicyclic nucleic acid (BNA)
  source: /note="3' tri-ethylene glycol (TEG)"
aggaagauggcauuu

SEQ ID NO: 8954 - RNA, 14 nt, Artificial Sequence
  source: /note="Description of Artificial Sequence: Synthetic oligonucleotide"
  source: /note="RNA"
  modified_base (1)..(1): bicyclic nucleic acid (BNA)
  modified_base (2)..(2): bicyclic nucleic acid (BNA)
  source: /note="3' tri-ethylene glycol (TEG)"
aggaagauggcauu

SEQ ID NO: 8955 - RNA, 13 nt, Artificial Sequence
  source: /note="Description of Artificial Sequence: Synthetic oligonucleotide"
  source: /note="RNA"
  modified_base (1)..(1): bicyclic nucleic acid (BNA)
  modified_base (2)..(2): bicyclic nucleic acid (BNA)
  source: /note="3' tri-ethylene glycol (TEG)"
aggaagauggcau

SEQ ID NO: 8956 - RNA, 12 nt, Artificial Sequence
  source: /note="Description of Artificial Sequence: Synthetic oligonucleotide"
  source: /note="RNA"
  modified_base (1)..(1): bicyclic nucleic acid (BNA)
  modified_base (2)..(2): bicyclic nucleic acid (BNA)
  source: /note="3' tri-ethylene glycol (TEG)"
aggaagauggca

SEQ ID NO: 8957 - RNA, 10 nt, Artificial Sequence
  source: /note="Description of Artificial Sequence: Synthetic oligonucleotide"
  source: /note="RNA"
  modified_base (1)..(1): bicyclic nucleic acid (BNA)
  modified_base (2)..(2): bicyclic nucleic acid (BNA)
  source: /note="3' tri-ethylene glycol (TEG)"
aggaagaugg

SEQ ID NO: 8958 - RNA, 9 nt, Artificial Sequence
  source: /note="Description of Artificial Sequence: Synthetic oligonucleotide"
  source: /note="RNA"
  modified_base (1)..(1): bicyclic nucleic acid (BNA)
  modified_base (2)..(2): bicyclic nucleic acid (BNA)
  source: /note="3' tri-ethylene glycol (TEG)"
aggaagaug

SEQ ID NO: 8959 - RNA, 8 nt, Artificial Sequence
  source: /note="Description of Artificial Sequence: Synthetic oligonucleotide"
  source: /note="RNA"
  modified_base (1)..(1): bicyclic nucleic acid (BNA)
  modified_base (2)..(2): bicyclic nucleic acid (BNA)
  source: /note="3' tri-ethylene glycol (TEG)"
aggaagau

SEQ ID NO: 8960 - RNA, 18 nt, Artificial Sequence
  source: /note="Description of Artificial Sequence: Synthetic oligonucleotide"
  source: /note="RNA"
  modified_base (1)..(1): bicyclic nucleic acid (BNA)
  modified_base (2)..(2): bicyclic nucleic acid (BNA)
  source: /note="3' tri-ethylene glycol (TEG)"
ggaagauggcauuucuag

SEQ ID NO: 8961 - RNA, 17 nt, Artificial Sequence
  source: /note="Description of Artificial Sequence: Synthetic oligonucleotide"
  source: /note="RNA"
  modified_base (1)..(1): bicyclic nucleic acid (BNA)
  modified_base (2)..(2): bicyclic nucleic acid (BNA)
  source: /note="3' tri-ethylene glycol (TEG)"
ggaagauggcauuucua

SEQ ID NO: 8962 - RNA, 16 nt, Artificial Sequence
  source: /note="Description of Artificial Sequence: Synthetic oligonucleotide"
  source: /note="RNA"
  modified_base (1)..(1): bicyclic nucleic acid (BNA)
  modified_base (2)..(2): bicyclic nucleic acid (BNA)
  source: /note="3' tri-ethylene glycol (TEG)"
ggaagauggcauuucu

SEQ ID NO: 8963 - RNA, 15 nt, Artificial Sequence
  source: /note="Description of Artificial Sequence: Synthetic oligonucleotide"
  source: /note="RNA"
  modified_base (1)..(1): bicyclic nucleic acid (BNA)
  modified_base (2)..(2): bicyclic nucleic acid (BNA)
  source: /note="3' tri-ethylene glycol (TEG)"
ggaagauggcauuuc

SEQ ID NO: 8964 - RNA, 14 nt, Artificial Sequence
  source: /note="Description of Artificial Sequence: Synthetic oligonucleotide"
  source: /note="RNA"
  modified_base (1)..(1): bicyclic nucleic acid (BNA)
  modified_base (2)..(2): bicyclic nucleic acid (BNA)
  source: /note="3' tri-ethylene glycol (TEG)"
ggaagauggcauuu

SEQ ID NO: 8965 - RNA, 13 nt, Artificial Sequence
  source: /note="Description of Artificial Sequence: Synthetic oligonucleotide"
  source: /note="RNA"
  modified_base (1)..(1): bicyclic nucleic acid (BNA)
  modified_base (2)..(2): bicyclic nucleic acid (BNA)
  source: /note="3' tri-ethylene glycol (TEG)"
ggaagauggcauu

SEQ ID NO: 8966 - RNA, 12 nt, Artificial Sequence
  source: /note="Description of Artificial Sequence: Synthetic oligonucleotide"
  source: /note="RNA"
  modified_base (1)..(1): bicyclic nucleic acid (BNA)
  modified_base (2)..(2): bicyclic nucleic acid (BNA)
  source: /note="3' tri-ethylene glycol (TEG)"
ggaagauggcau

SEQ ID NO: 8967 - RNA, 11 nt, Artificial Sequence
  source: /note="Description of Artificial Sequence: Synthetic oligonucleotide"
  source: /note="RNA"
  modified_base (1)..(1): bicyclic nucleic acid (BNA)
  modified_base (2)..(2): bicyclic nucleic acid (BNA)
  source: /note="3' tri-ethylene glycol (TEG)"
ggaagauggca

SEQ ID NO: 8968 - RNA, 10 nt, Artificial Sequence
  source: /note="Description of Artificial Sequence: Synthetic oligonucleotide"
  source: /note="RNA"
  modified_base (1)..(1): bicyclic nucleic acid (BNA)
  modified_base (2)..(2): bicyclic nucleic acid (BNA)
  source: /note="3' tri-ethylene glycol (TEG)"
ggaagauggc

SEQ ID NO: 8969 - RNA, 8 nt, Artificial Sequence
  source: /note="Description of Artificial Sequence: Synthetic oligonucleotide"
  source: /note="RNA"
  modified_base (1)..(1): bicyclic nucleic acid (BNA)
  modified_base (2)..(2): bicyclic nucleic acid (BNA)
  source: /note="3' tri-ethylene glycol (TEG)"
ggaagaug

SEQ ID NO: 8970 - RNA, 17 nt, Artificial Sequence
  source: /note="Description of Artificial Sequence: Synthetic oligonucleotide"
  source: /note="RNA"
  modified_base (1)..(1): bicyclic nucleic acid (BNA)
  modified_base (2)..(2): bicyclic nucleic acid (BNA)
  source: /note="3' tri-ethylene glycol (TEG)"
gaagauggcauuucuag

SEQ ID NO: 8971 - RNA, 16 nt, Artificial Sequence
  source: /note="Description of Artificial Sequence: Synthetic oligonucleotide"
  source: /note="RNA"
  modified_base (1)..(1): bicyclic nucleic acid (BNA)
  modified_base (2)..(2): bicyclic nucleic acid (BNA)
  source: /note="3' tri-ethylene glycol (TEG)"
gaagauggcauuucua

SEQ ID NO: 8972 - RNA, 14 nt, Artificial Sequence
  source: /note="Description of Artificial Sequence: Synthetic oligonucleotide"
  source: /note="RNA"
  modified_base (1)..(1): bicyclic nucleic acid (BNA)
  modified_base (2)..(2): bicyclic nucleic acid (BNA)
  source: /note="3' tri-ethylene glycol (TEG)"
gaagauggcauuuc

SEQ ID NO: 8973 - RNA, 13 nt, Artificial Sequence
  source: /note="Description of Artificial Sequence: Synthetic oligonucleotide"
  source: /note="RNA"
  modified_base (1)..(1): bicyclic nucleic acid (BNA)
  modified_base (2)..(2): bicyclic nucleic acid (BNA)
  source: /note="3' tri-ethylene glycol (TEG)"
gaagauggcauuu

SEQ ID NO: 8974 - RNA, 12 nt, Artificial Sequence
  source: /note="Description of Artificial Sequence: Synthetic oligonucleotide"
  source: /note="RNA"
  modified_base (1)..(1): bicyclic nucleic acid (BNA)
  modified_base (2)..(2): bicyclic nucleic acid (BNA)
  source: /note="3' tri-ethylene glycol (TEG)"
gaagauggcauu

SEQ ID NO: 8975 - RNA, 11 nt, Artificial Sequence
  source: /note="Description of Artificial Sequence: Synthetic oligonucleotide"
  source: /note="RNA"
  modified_base (1)..(1): bicyclic nucleic acid (BNA)
  modified_base (2)..(2): bicyclic nucleic acid (BNA)
  source: /note="3' tri-ethylene glycol (TEG)"
gaagauggcau

SEQ ID NO: 8976 - RNA, 10 nt, Artificial Sequence
  source: /note="Description of Artificial Sequence: Synthetic oligonucleotide"
  source: /note="RNA"
  modified_base (1)..(1): bicyclic nucleic acid (BNA)
  modified_base (2)..(2): bicyclic nucleic acid (BNA)
  source: /note="3' tri-ethylene glycol (TEG)"
gaagauggca

SEQ ID NO: 8977 - RNA, 9 nt, Artificial Sequence
  source: /note="Description of Artificial Sequence: Synthetic oligonucleotide"
  source: /note="RNA"
  modified_base (1)..(1): bicyclic nucleic acid (BNA)
  modified_base (2)..(2): bicyclic nucleic acid (BNA)
  source: /note="3' tri-ethylene glycol (TEG)"
gaagauggc

SEQ ID NO: 8978 - RNA, 8 nt, Artificial Sequence
  source: /note="Description of Artificial Sequence: Synthetic oligonucleotide"
  source: /note="RNA"
  modified_base (1)..(1): bicyclic nucleic acid (BNA)
  modified_base (2)..(2): bicyclic nucleic acid (BNA)
  source: /note="3' tri-ethylene glycol (TEG)"
gaagaugg

SEQ ID NO: 8979 - RNA, 16 nt, Artificial Sequence
  source: /note="Description of Artificial Sequence: Synthetic oligonucleotide"
  source: /note="RNA"
  modified_base (1)..(1): bicyclic nucleic acid (BNA)
  modified_base (2)..(2): bicyclic nucleic acid (BNA)
  source: /note="3' tri-ethylene glycol (TEG)"
aagauggcauuucuag

SEQ ID NO: 8980 - RNA, 15 nt, Artificial Sequence
  source: /note="Description of Artificial Sequence: Synthetic oligonucleotide"
  source: /note="RNA"
  modified_base (1)..(1): bicyclic nucleic acid (BNA)
  modified_base (2)..(2): bicyclic nucleic acid (BNA)
  source: /note="3' tri-ethylene glycol (TEG)"
aagauggcauuucua

SEQ ID NO: 8981 - RNA, 14 nt, Artificial Sequence
  source: /note="Description of Artificial Sequence: Synthetic oligonucleotide"
  source: /note="RNA"
  modified_base (1)..(1): bicyclic nucleic acid (BNA)
  modified_base (2)..(2): bicyclic nucleic acid (BNA)
  source: /note="3' tri-ethylene glycol (TEG)"
aagauggcauuucu

SEQ ID NO: 8982 - RNA, 13 nt, Artificial Sequence
  source: /note="Description of Artificial Sequence: Synthetic oligonucleotide"
  source: /note="RNA"
  modified_base (1)..(1): bicyclic nucleic acid (BNA)
  modified_base (2)..(2): bicyclic nucleic acid (BNA)
  source: /note="3' tri-ethylene glycol (TEG)"
aagauggcauuuc

SEQ ID NO: 8983 - RNA, 12 nt, Artificial Sequence
  source: /note="Description of Artificial Sequence: Synthetic oligonucleotide"
  source: /note="RNA"
  modified_base (1)..(1): bicyclic nucleic acid (BNA)
  modified_base (2)..(2): bicyclic nucleic acid (BNA)
  source: /note="3' tri-ethylene glycol (TEG)"
aagauggcauuu

SEQ ID NO: 8984 - RNA, 11 nt, Artificial Sequence
  source: /note="Description of Artificial Sequence: Synthetic oligonucleotide"
  source: /note="RNA"
  modified_base (1)..(1): bicyclic nucleic acid (BNA)
  modified_base (2)..(2): bicyclic nucleic acid (BNA)
  source: /note="3' tri-ethylene glycol (TEG)"
aagauggcauu

SEQ ID NO: 8985 - RNA, 10 nt, Artificial Sequence
  source: /note="Description of Artificial Sequence: Synthetic oligonucleotide"
  source: /note="RNA"
  modified_base (1)..(1): bicyclic nucleic acid (BNA)
  modified_base (2)..(2): bicyclic nucleic acid (BNA)
  source: /note="3' tri-ethylene glycol (TEG)"
aagauggcau

SEQ ID NO: 8986 - RNA, 9 nt, Artificial Sequence
  source: /note="Description of Artificial Sequence: Synthetic oligonucleotide"
  source: /note="RNA"
  modified_base (1)..(1): bicyclic nucleic acid (BNA)
  modified_base (2)..(2): bicyclic nucleic acid (BNA)
  source: /note="3' tri-ethylene glycol (TEG)"
aagauggca

SEQ ID NO: 8987 - RNA, 8 nt, Artificial Sequence
  source: /note="Description of Artificial Sequence: Synthetic oligonucleotide"
  source: /note="RNA"
  modified_base (1)..(1): bicyclic nucleic acid (BNA)
  modified_base (2)..(2): bicyclic nucleic acid (BNA)
  source: /note="3' tri-ethylene glycol (TEG)"
aagauggc

SEQ ID NO: 8988 - RNA, 15 nt, Artificial Sequence
  source: /note="Description of Artificial Sequence: Synthetic oligonucleotide"
  source: /note="RNA"
  modified_base (1)..(1): bicyclic nucleic acid (BNA)
  modified_base (2)..(2): bicyclic nucleic acid (BNA)
  source: /note="3' tri-ethylene glycol (TEG)"
agauggcauuucuag

SEQ ID NO: 8989 - RNA, 14 nt, Artificial Sequence
  source: /note="Description of Artificial Sequence: Synthetic oligonucleotide"
  source: /note="RNA"
  modified_base (1)..(1): bicyclic nucleic acid (BNA)
  modified_base (2)..(2): bicyclic nucleic acid (BNA)
  source: /note="3' tri-ethylene glycol (TEG)"
agauggcauuucua

SEQ ID NO: 8990 - RNA, 13 nt, Artificial Sequence
  source: /note="Description of Artificial Sequence: Synthetic oligonucleotide"
  source: /note="RNA"
  modified_base (1)..(1): bicyclic nucleic acid (BNA)
  modified_base (2)..(2): bicyclic nucleic acid (BNA)
  source: /note="3' tri-ethylene glycol (TEG)"
agauggcauuucu

SEQ ID NO: 8991 - RNA, 12 nt, Artificial Sequence
  source: /note="Description of Artificial Sequence: Synthetic oligonucleotide"
  source: /note="RNA"
  modified_base (1)..(1): bicyclic nucleic acid (BNA)
  modified_base (2)..(2): bicyclic nucleic acid (BNA)
  source: /note="3' tri-ethylene glycol (TEG)"
agauggcauuuc

SEQ ID NO: 8992 - RNA, 11 nt, Artificial Sequence
  source: /note="Description of Artificial Sequence: Synthetic oligonucleotide"
  source: /note="RNA"
  modified_base (1)..(1): bicyclic nucleic acid (BNA)
  modified_base (2)..(2): bicyclic nucleic acid (BNA)
  source: /note="3' tri-ethylene glycol (TEG)"
agauggcauuu

SEQ ID NO: 8993 - RNA, 10 nt, Artificial Sequence
  source: /note="Description of Artificial Sequence: Synthetic oligonucleotide"
  source: /note="RNA"
  modified_base (1)..(1): bicyclic nucleic acid (BNA)
  modified_base (2)..(2): bicyclic nucleic acid (BNA)
  source: /note="3' tri-ethylene glycol (TEG)"
agauggcauu

SEQ ID NO: 8994 - RNA, 9 nt, Artificial Sequence
  source: /note="Description of Artificial Sequence: Synthetic oligonucleotide"
  source: /note="RNA"
  modified_base (1)..(1): bicyclic nucleic acid (BNA)
  modified_base (2)..(2): bicyclic nucleic acid (BNA)
  source: /note="3' tri-ethylene glycol (TEG)"
agauggcau

SEQ ID NO: 8995 - RNA, 8 nt, Artificial Sequence
  source: /note="Description of Artificial Sequence: Synthetic oligonucleotide"
  source: /note="RNA"
  modified_base (1)..(1): bicyclic nucleic acid (BNA)
  modified_base (2)..(2): bicyclic nucleic acid (BNA)
  source: /note="3' tri-ethylene glycol (TEG)"
agauggca

SEQ ID NO: 8996 - DNA, 30 bp, Artificial Sequence; identical to SEQ ID NO: 8204
  source: /note="Description of Artificial Sequence: Synthetic oligonucleotide"
  source: /note="Description of Combined DNA/RNA Molecule: Synthetic oligonucleotide"
  source: /note="DNA/RNA"
  modified_base (1)..(1): bicyclic nucleic acid (BNA)
  modified_base (2)..(2): bicyclic nucleic acid (BNA)
  source: /note="3' tri-ethylene glycol (TEG)"

SEQ ID NO: 8997 - DNA, 29 bp, Artificial Sequence
  source: /note="Description of Artificial Sequence: Synthetic oligonucleotide"
  source: /note="Description of Combined DNA/RNA Molecule: Synthetic oligonucleotide"
  source: /note="DNA/RNA"
  modified_base (1)..(1): bicyclic nucleic acid (BNA)
  modified_base (2)..(2): bicyclic nucleic acid (BNA)
  source: /note="3' tri-ethylene glycol (TEG)"
ctccaacaucaaggaagauggcauuucua

SEQ ID NO: 8998 - DNA, 28 bp, Artificial Sequence
  source: /note="Description of Artificial Sequence: Synthetic oligonucleotide"
  source: /note="Description of Combined DNA/RNA Molecule: Synthetic oligonucleotide"
  source: /note="DNA/RNA"
  modified_base (1)..(1): bicyclic nucleic acid (BNA)
  modified_base (2)..(2): bicyclic nucleic acid (BNA)
  source: /note="3' tri-ethylene glycol (TEG)"
ctccaacaucaaggaagauggcauuucu

SEQ ID NO: 8999 - DNA, 27 bp, Artificial Sequence
  source: /note="Description of Artificial Sequence: Synthetic oligonucleotide"
  source: /note="Description of Combined DNA/RNA Molecule: Synthetic oligonucleotide"
  source: /note="DNA/RNA"
  modified_base (1)..(1): bicyclic nucleic acid (BNA)
  modified_base (2)..(2): bicyclic nucleic acid (BNA)
  source: /note="3' tri-ethylene glycol (TEG)"
ctccaacaucaaggaagauggcauuuc

SEQ ID NO: 9000 - DNA, 26 bp, Artificial Sequence
  source: /note="Description of Artificial Sequence: Synthetic oligonucleotide"
  source: /note="Description of Combined DNA/RNA Molecule: Synthetic oligonucleotide"
  source: /note="DNA/RNA"
  modified_base (1)..(1): bicyclic nucleic acid (BNA)
  modified_base (2)..(2): bicyclic nucleic acid (BNA)
  source: /note="3' tri-ethylene glycol (TEG)"
ctccaacaucaaggaagauggcauuu

SEQ ID NO: 9001 - DNA, 25 bp, Artificial Sequence
  source: /note="Description of Artificial Sequence: Synthetic oligonucleotide"
  source: /note="Description of Combined DNA/RNA Molecule: Synthetic oligonucleotide"
  source: /note="DNA/RNA"
  modified_base (1)..(1): bicyclic nucleic acid (BNA)
  modified_base (2)..(2): bicyclic nucleic acid (BNA)
  source: /note="3' tri-ethylene glycol (TEG)"
ctccaacaucaaggaagauggcauu

SEQ ID NO: 9002 - DNA, 24 bp, Artificial Sequence
  source: /note="Description of Artificial Sequence: Synthetic oligonucleotide"
  source: /note="Description of Combined DNA/RNA Molecule: Synthetic oligonucleotide"
  source: /note="DNA/RNA"
  modified_base (1)..(1): bicyclic nucleic acid (BNA)
  modified_base (2)..(2): bicyclic nucleic acid (BNA)
  source: /note="3' tri-ethylene glycol (TEG)"
ctccaacaucaaggaagauggcau

SEQ ID NO: 9003 - DNA, 23 bp, Artificial Sequence
  source: /note="Description of Artificial Sequence: Synthetic oligonucleotide"
  source: /note="Description of Combined DNA/RNA Molecule: Synthetic oligonucleotide"
  source: /note="DNA/RNA"
  modified_base (1)..(1): bicyclic nucleic acid (BNA)
  modified_base (2)..(2): bicyclic nucleic acid (BNA)
  source: /note="3' tri-ethylene glycol (TEG)"
ctccaacaucaaggaagauggca

SEQ ID NO: 9004 - DNA, 22 bp, Artificial Sequence
  source: /note="Description of Artificial Sequence: Synthetic oligonucleotide"
  source: /note="Description of Combined DNA/RNA Molecule: Synthetic oligonucleotide"
  source: /note="DNA/RNA"
  modified_base (1)..(1): bicyclic nucleic acid (BNA)
  modified_base (2)..(2): bicyclic nucleic acid (BNA)
  source: /note="3' tri-ethylene glycol (TEG)"
ctccaacaucaaggaagauggc

SEQ ID NO: 9005 - DNA, 21 bp, Artificial Sequence
  source: /note="Description of Artificial Sequence: Synthetic oligonucleotide"
  source: /note="Description of Combined DNA/RNA Molecule: Synthetic oligonucleotide"
  source: /note="DNA/RNA"
  modified_base (1)..(1): bicyclic nucleic acid (BNA)
  modified_base (2)..(2): bicyclic nucleic acid (BNA)
  source: /note="3' tri-ethylene glycol (TEG)"
ctccaacaucaaggaagaugg

SEQ ID NO: 9006 - DNA, 20 bp, Artificial Sequence
  source: /note="Description of Artificial Sequence: Synthetic oligonucleotide"
  source: /note="Description of Combined DNA/RNA Molecule: Synthetic oligonucleotide"
  source: /note="DNA/RNA"
  modified_base (1)..(1): bicyclic nucleic acid (BNA)
  modified_base (2)..(2): bicyclic nucleic acid (BNA)
  source: /note="3' tri-ethylene glycol (TEG)"
ctccaacaucaaggaagaug

SEQ ID NO: 9007 - DNA, 19 bp, Artificial Sequence
  source: /note="Description of Artificial Sequence: Synthetic oligonucleotide"
  source: /note="Description of Combined DNA/RNA Molecule: Synthetic oligonucleotide"
  source: /note="DNA/RNA"
  modified_base (1)..(1): bicyclic nucleic acid (BNA)
  modified_base (2)..(2): bicyclic nucleic acid (BNA)
  source: /note="3' tri-ethylene glycol (TEG)"
ctccaacaucaaggaagau

SEQ ID NO: 9008 - DNA, 18 bp, Artificial Sequence
  source: /note="Description of Artificial Sequence: Synthetic oligonucleotide"
  source: /note="Description of Combined DNA/RNA Molecule: Synthetic oligonucleotide"
  source: /note="DNA/RNA"
  modified_base (1)..(1): bicyclic nucleic acid (BNA)
  modified_base (2)..(2): bicyclic nucleic acid (BNA)
  source: /note="3' tri-ethylene glycol (TEG)"
ctccaacaucaaggaaga

SEQ ID NO: 9009 - DNA, 17 bp, Artificial Sequence
  source: /note="Description of Artificial Sequence: Synthetic oligonucleotide"
  source: /note="Description of Combined DNA/RNA Molecule: Synthetic oligonucleotide"
  source: /note="DNA/RNA"
  modified_base (1)..(1): bicyclic nucleic acid (BNA)
  modified_base (2)..(2): bicyclic nucleic acid (BNA)
  source: /note="3' tri-ethylene glycol (TEG)"
ctccaacaucaaggaag

SEQ ID NO: 9010 - DNA, 29 bp, Artificial Sequence
  source: /note="Description of Artificial Sequence: Synthetic oligonucleotide"
  source: /note="Description of Combined DNA/RNA Molecule: Synthetic oligonucleotide"
  source: /note="DNA/RNA"
  modified_base (1)..(1): bicyclic nucleic acid (BNA)
  modified_base (2)..(2): bicyclic nucleic acid (BNA)
  source: /note="3' tri-ethylene glycol (TEG)"
tccaacaucaaggaagauggcauuucuag

SEQ ID NO: 9011 - DNA, 28 bp, Artificial Sequence
  source: /note="Description of Artificial Sequence: Synthetic oligonucleotide"
  source: /note="Description of Combined DNA/RNA Molecule: Synthetic oligonucleotide"
  source: /note="DNA/RNA"
  modified_base (1)..(1): bicyclic nucleic acid (BNA)
  modified_base (2)..(2): bicyclic nucleic acid (BNA)
  source: /note="3' tri-ethylene glycol (TEG)"
tccaacaucaaggaagauggcauuucua

SEQ ID NO: 9012 - DNA, 27 bp, Artificial Sequence
  source: /note="Description of Artificial Sequence: Synthetic oligonucleotide"
  source: /note="Description of Combined DNA/RNA Molecule: Synthetic oligonucleotide"
  source: /note="DNA/RNA"
  modified_base (1)..(1): bicyclic nucleic acid (BNA)
  modified_base (2)..(2): bicyclic nucleic acid (BNA)
  source: /note="3' tri-ethylene glycol (TEG)"
tccaacaucaaggaagauggcauuucu

SEQ ID NO: 9013 - DNA, 26 bp, Artificial Sequence
  source: /note="Description of Artificial Sequence: Synthetic oligonucleotide"
  source: /note="Description of Combined DNA/RNA Molecule: Synthetic oligonucleotide"
  source: /note="DNA/RNA"
  modified_base (1)..(1): bicyclic nucleic acid (BNA)
  modified_base (2)..(2): bicyclic nucleic acid (BNA)
  source: /note="3' tri-ethylene glycol (TEG)"
tccaacaucaaggaagauggcauuuc

SEQ ID NO: 9014 - DNA, 25 bp, Artificial Sequence
  source: /note="Description of Artificial Sequence: Synthetic oligonucleotide"
  source: /note="Description of Combined DNA/RNA Molecule: Synthetic oligonucleotide"
  source: /note="DNA/RNA"
  modified_base (1)..(1): bicyclic nucleic acid (BNA)
  modified_base (2)..(2): bicyclic nucleic acid (BNA)
  source: /note="3' tri-ethylene glycol (TEG)"
tccaacaucaaggaagauggcauuu

SEQ ID NO: 9015 - DNA, 24 bp, Artificial Sequence
  source: /note="Description of Artificial Sequence: Synthetic oligonucleotide"
  source: /note="Description of Combined DNA/RNA Molecule: Synthetic oligonucleotide"
  source: /note="DNA/RNA"
  modified_base (1)..(1): bicyclic nucleic acid (BNA)
  modified_base (2)..(2): bicyclic nucleic acid (BNA)
  source: /note="3' tri-ethylene glycol (TEG)"
tccaacaucaaggaagauggcauu

SEQ ID NO: 9016 - DNA, 23 bp, Artificial Sequence
  source: /note="Description of Artificial Sequence: Synthetic oligonucleotide"
  source: /note="Description of Combined DNA/RNA Molecule: Synthetic oligonucleotide"
  source: /note="DNA/RNA"
  modified_base (1)..(1): bicyclic nucleic acid (BNA)
  modified_base (2)..(2): bicyclic nucleic acid (BNA)
  source: /note="3' tri-ethylene glycol (TEG)"
tccaacaucaaggaagauggcau

SEQ ID NO: 9017 - DNA, 22 bp, Artificial Sequence
  source: /note="Description of Artificial Sequence: Synthetic oligonucleotide"
  source: /note="Description of Combined DNA/RNA Molecule: Synthetic oligonucleotide"
  source: /note="DNA/RNA"
  modified_base (1)..(1): bicyclic nucleic acid (BNA)
  modified_base (2)..(2): bicyclic nucleic acid (BNA)
  source: /note="3' tri-ethylene glycol (TEG)"
tccaacaucaaggaagauggca

SEQ ID NO: 9018 - DNA, 21 bp, Artificial Sequence
  source: /note="Description of Artificial Sequence: Synthetic oligonucleotide"
  source: /note="Description of Combined DNA/RNA Molecule: Synthetic oligonucleotide"
  source: /note="DNA/RNA"
  modified_base (1)..(1): bicyclic nucleic acid (BNA)
  modified_base (2)..(2): bicyclic nucleic acid (BNA)
  source: /note="3' tri-ethylene glycol (TEG)"
tccaacaucaaggaagauggc

SEQ ID NO: 9019 - DNA, 20 bp, Artificial Sequence
  source: /note="Description of Artificial Sequence: Synthetic oligonucleotide"
  source: /note="Description of Combined DNA/RNA Molecule: Synthetic oligonucleotide"
  source: /note="DNA/RNA"
  modified_base (1)..(1): bicyclic nucleic acid (BNA)
  modified_base (2)..(2): bicyclic nucleic acid (BNA)
  source: /note="3' tri-ethylene glycol (TEG)"
tccaacaucaaggaagaugg

SEQ ID NO: 9020 - DNA, 19 bp, Artificial Sequence
  source: /note="Description of Artificial Sequence: Synthetic oligonucleotide"
  source: /note="Description of Combined DNA/RNA Molecule: Synthetic oligonucleotide"
  source: /note="DNA/RNA"
  modified_base (1)..(1): bicyclic nucleic acid (BNA)
  modified_base (2)..(2): bicyclic nucleic acid (BNA)
  source: /note="3' tri-ethylene glycol (TEG)"
tccaacaucaaggaagaug

SEQ ID NO: 9021 - DNA, 18 bp, Artificial Sequence
  source: /note="Description of Artificial Sequence: Synthetic oligonucleotide"
  source: /note="Description of Combined DNA/RNA Molecule: Synthetic oligonucleotide"
  source: /note="DNA/RNA"
  modified_base (1)..(1): bicyclic nucleic acid (BNA)
  modified_base (2)..(2): bicyclic nucleic acid (BNA)
  source: /note="3' tri-ethylene glycol (TEG)"
tccaacaucaaggaagau

SEQ ID NO: 9022 - DNA, 17 bp, Artificial Sequence
  source: /note="Description of Artificial Sequence: Synthetic oligonucleotide"
  source: /note="Description of Combined DNA/RNA Molecule: Synthetic oligonucleotide"
  source: /note="DNA/RNA"
  modified_base (1)..(1): bicyclic nucleic acid (BNA)
  modified_base (2)..(2): bicyclic nucleic acid (BNA)
  source: /note="3' tri-ethylene glycol (TEG)"
tccaacaucaaggaaga

SEQ ID NO: 9023 - DNA, 16 bp, Artificial Sequence
  source: /note="Description of Artificial Sequence: Synthetic oligonucleotide"
  source: /note="Description of Combined DNA/RNA Molecule: Synthetic oligonucleotide"
  source: /note="DNA/RNA"
  modified_base (1)..(1): bicyclic nucleic acid (BNA)
  modified_base (2)..(2): bicyclic nucleic acid (BNA)
  source: /note="3' tri-ethylene glycol (TEG)"
tccaacaucaaggaag

SEQ ID NO: 9024 - RNA, 28 nt, Artificial Sequence
  source: /note="Description of Artificial Sequence: Synthetic oligonucleotide"
  source: /note="RNA"
  modified_base (1)..(1): bicyclic nucleic acid (BNA)
  modified_base (2)..(2): bicyclic nucleic acid (BNA)
  source: /note="3' tri-ethylene glycol (TEG)"
ccaacaucaaggaagauggcauuucuag

SEQ ID NO: 9025 - RNA, 27 nt, Artificial Sequence
  source: /note="Description of Artificial Sequence: Synthetic oligonucleotide"
  source: /note="RNA"
  modified_base (1)..(1): bicyclic nucleic acid (BNA)
  modified_base (2)..(2): bicyclic nucleic acid (BNA)
  source: /note="3' tri-ethylene glycol (TEG)"
ccaacaucaaggaagauggcauuucua

SEQ ID NO: 9026 - RNA, 26 nt, Artificial Sequence
  source: /note="Description of Artificial Sequence: Synthetic oligonucleotide"
  source: /note="RNA"
  modified_base (1)..(1): bicyclic nucleic acid (BNA)
  modified_base (2)..(2): bicyclic nucleic acid (BNA)
  source: /note="3' tri-ethylene glycol (TEG)"
ccaacaucaaggaagauggcauuucu

SEQ ID NO: 9027 - RNA, 25 nt, Artificial Sequence
  source: /note="Description of Artificial Sequence: Synthetic oligonucleotide"
  source: /note="RNA"
  modified_base (1)..(1): bicyclic nucleic acid (BNA)
  modified_base (2)..(2): bicyclic nucleic acid (BNA)
  source: /note="3' tri-ethylene glycol (TEG)"
ccaacaucaaggaagauggcauuuc

SEQ ID NO: 9028 - RNA, 24 nt, Artificial Sequence
  source: /note="Description of Artificial Sequence: Synthetic oligonucleotide"
  source: /note="RNA"
  modified_base (1)..(1): bicyclic nucleic acid (BNA)
  modified_base (2)..(2): bicyclic nucleic acid (BNA)
  source: /note="3' tri-ethylene glycol (TEG)"
ccaacaucaaggaagauggcauuu

SEQ ID NO: 9029 - RNA, 23 nt, Artificial Sequence
  source: /note="Description of Artificial Sequence: Synthetic oligonucleotide"
  source: /note="RNA"
  modified_base (1)..(1): bicyclic nucleic acid (BNA)
  modified_base (2)..(2): bicyclic nucleic acid (BNA)
  source: /note="3' tri-ethylene glycol (TEG)"
ccaacaucaaggaagauggcauu

SEQ ID NO: 9030 - RNA, 22 nt, Artificial Sequence
  source: /note="Description of Artificial Sequence: Synthetic oligonucleotide"
  source: /note="RNA"
  modified_base (1)..(1): bicyclic nucleic acid (BNA)
  modified_base (2)..(2): bicyclic nucleic acid (BNA)
  source: /note="3' tri-ethylene glycol (TEG)"
ccaacaucaaggaagauggcau

SEQ ID NO: 9031 - RNA, 21 nt, Artificial Sequence
  source: /note="Description of Artificial Sequence: Synthetic oligonucleotide"
  source: /note="RNA"
  modified_base (1)..(1): bicyclic nucleic acid (BNA)
  modified_base (2)..(2): bicyclic nucleic acid (BNA)
  source: /note="3' tri-ethylene glycol (TEG)"
ccaacaucaaggaagauggca

SEQ ID NO: 9032 - RNA, 20 nt, Artificial Sequence
  source: /note="Description of Artificial Sequence: Synthetic oligonucleotide"
  source: /note="RNA"
  modified_base (1)..(1): bicyclic nucleic acid (BNA)
  modified_base (2)..(2): bicyclic nucleic acid (BNA)
  source: /note="3' tri-ethylene glycol (TEG)"
ccaacaucaaggaagauggc

SEQ ID NO: 9033 - RNA, 19 nt, Artificial Sequence
  source: /note="Description of Artificial Sequence: Synthetic oligonucleotide"
  source: /note="RNA"
  modified_base (1)..(1): bicyclic nucleic acid (BNA)
  modified_base (2)..(2): bicyclic nucleic acid (BNA)
  source: /note="3' tri-ethylene glycol (TEG)"
ccaacaucaaggaagaugg

SEQ ID NO: 9034 - RNA, 18 nt, Artificial Sequence
  source: /note="Description of Artificial Sequence: Synthetic oligonucleotide"
  source: /note="RNA"
  modified_base (1)..(1): bicyclic nucleic acid (BNA)
  modified_base (2)..(2): bicyclic nucleic acid (BNA)
  source: /note="3' tri-ethylene glycol (TEG)"
ccaacaucaaggaagaug

SEQ ID NO: 9035 - RNA, 17 nt, Artificial Sequence
  source: /note="Description of Artificial Sequence: Synthetic oligonucleotide"
  source: /note="RNA"
  modified_base (1)..(1): bicyclic nucleic acid (BNA)
  modified_base (2)..(2): bicyclic nucleic acid (BNA)
  source: /note="3' tri-ethylene glycol (TEG)"
ccaacaucaaggaagau

SEQ ID NO: 9036 - RNA, 16 nt, Artificial Sequence
  source: /note="Description of Artificial Sequence: Synthetic oligonucleotide"
  source: /note="RNA"
  modified_base (1)..(1): bicyclic nucleic acid (BNA)
  modified_base (2)..(2): bicyclic nucleic acid (BNA)
  source: /note="3' tri-ethylene glycol (TEG)"
ccaacaucaaggaaga

SEQ ID NO: 9037 - RNA, 15 nt, Artificial Sequence
  source: /note="Description of Artificial Sequence: Synthetic oligonucleotide"
  source: /note="RNA"
  modified_base (1)..(1): bicyclic nucleic acid (BNA)
  modified_base (2)..(2): bicyclic nucleic acid (BNA)
  source: /note="3' tri-ethylene glycol (TEG)"
ccaacaucaaggaag

SEQ ID NO: 9038 - RNA, 27 nt, Artificial Sequence
  source: /note="Description of Artificial Sequence: Synthetic oligonucleotide"
  source: /note="RNA"
  modified_base (1)..(1): bicyclic nucleic acid (BNA)
  modified_base (2)..(2): bicyclic nucleic acid (BNA)
  source: /note="3' tri-ethylene glycol (TEG)"
caacaucaaggaagauggcauuucuag

SEQ ID NO: 9039 - RNA, 26 nt, Artificial Sequence
  source: /note="Description of Artificial Sequence: Synthetic oligonucleotide"
  source: /note="RNA"
  modified_base (1)..(1): bicyclic nucleic acid (BNA)
  modified_base (2)..(2): bicyclic nucleic acid (BNA)
  source: /note="3' tri-ethylene glycol (TEG)"
caacaucaaggaagauggcauuucua

SEQ ID NO: 9040 - RNA, 25 nt, Artificial Sequence
  source: /note="Description of Artificial Sequence: Synthetic oligonucleotide"
  source: /note="RNA"
  modified_base (1)..(1): bicyclic nucleic acid (BNA)
  modified_base (2)..(2): bicyclic nucleic acid (BNA)
  source: /note="3' tri-ethylene glycol (TEG)"
caacaucaaggaagauggcauuucu

SEQ ID NO: 9041 - RNA, 24 nt, Artificial Sequence
  source: /note="Description of Artificial Sequence: Synthetic oligonucleotide"
  source: /note="RNA"
  modified_base (1)..(1): bicyclic nucleic acid (BNA)
  modified_base (2)..(2): bicyclic nucleic acid (BNA)
  source: /note="3' tri-ethylene glycol (TEG)"
caacaucaaggaagauggcauuuc

SEQ ID NO: 9042 - RNA, 23 nt, Artificial Sequence
  source: /note="Description of Artificial Sequence: Synthetic oligonucleotide"
  source: /note="RNA"
  modified_base (1)..(1): bicyclic nucleic acid (BNA)
  modified_base (2)..(2): bicyclic nucleic acid (BNA)
  source: /note="3' tri-ethylene glycol (TEG)"
caacaucaaggaagauggcauuu

SEQ ID NO: 9043 - RNA, 22 nt, Artificial Sequence
  source: /note="Description of Artificial Sequence: Synthetic oligonucleotide"
  source: /note="RNA"
  modified_base (1)..(1): bicyclic nucleic acid (BNA)
  modified_base (2)..(2): bicyclic nucleic acid (BNA)
  source: /note="3' tri-ethylene glycol (TEG)"
caacaucaaggaagauggcauu

SEQ ID NO: 9044 - RNA, 21 nt, Artificial Sequence
  source: /note="Description of Artificial Sequence: Synthetic oligonucleotide"
  source: /note="RNA"
  modified_base (1)..(1): bicyclic nucleic acid (BNA)
  modified_base (2)..(2): bicyclic nucleic acid (BNA)
  source: /note="3' tri-ethylene glycol (TEG)"
caacaucaaggaagauggcau

SEQ ID NO: 9045 - RNA, 20 nt, Artificial Sequence
  source: /note="Description of Artificial Sequence: Synthetic oligonucleotide"
  source: /note="RNA"
  modified_base (1)..(1): bicyclic nucleic acid (BNA)
  modified_base (2)..(2): bicyclic nucleic acid (BNA)
  source: /note="3' tri-ethylene glycol (TEG)"
caacaucaaggaagauggca

SEQ ID NO: 9046 - RNA, 19 nt, Artificial Sequence
  source: /note="Description of Artificial Sequence: Synthetic oligonucleotide"
  source: /note="RNA"
  modified_base (1)..(1): bicyclic nucleic acid (BNA)
  modified_base (2)..(2): bicyclic nucleic acid (BNA)
  source: /note="3' tri-ethylene glycol (TEG)"
caacaucaaggaagauggc

SEQ ID NO: 9047 - RNA, 18 nt, Artificial Sequence
  source: /note="Description of Artificial Sequence: Synthetic oligonucleotide"
  source: /note="RNA"
  modified_base (1)..(1): bicyclic nucleic acid (BNA)
  modified_base (2)..(2): bicyclic nucleic acid (BNA)
  source: /note="3' tri-ethylene glycol (TEG)"
caacaucaaggaagaugg

SEQ ID NO: 9048 - RNA, 17 nt, Artificial Sequence
  source: /note="Description of Artificial Sequence: Synthetic oligonucleotide"
  source: /note="RNA"
  modified_base (1)..(1): bicyclic nucleic acid (BNA)
  modified_base (2)..(2): bicyclic nucleic acid (BNA)
  source: /note="3' tri-ethylene glycol (TEG)"
caacaucaaggaagaug

SEQ ID NO: 9049 - RNA, 16 nt, Artificial Sequence
  source: /note="Description of Artificial Sequence: Synthetic oligonucleotide"
  source: /note="RNA"
  modified_base (1)..(1): bicyclic nucleic acid (BNA)
  modified_base (2)..(2): bicyclic nucleic acid (BNA)
  source: /note="3' tri-ethylene glycol (TEG)"
caacaucaaggaagau

SEQ ID NO: 9050 - RNA, 15 nt, Artificial Sequence
  source: /note="Description of Artificial Sequence: Synthetic oligonucleotide"
  source: /note="RNA"
  modified_base (1)..(1): bicyclic nucleic acid (BNA)
  modified_base (2)..(2): bicyclic nucleic acid (BNA)
  source: /note="3' tri-ethylene glycol (TEG)"
caacaucaaggaaga

SEQ ID NO: 9051 - RNA, 14 nt, Artificial Sequence
  source: /note="Description of Artificial Sequence: Synthetic oligonucleotide"
  source: /note="RNA"
  modified_base (1)..(1): bicyclic nucleic acid (BNA)
  modified_base (2)..(2): bicyclic nucleic acid (BNA)
  source: /note="3' tri-ethylene glycol (TEG)"
caacaucaaggaag

SEQ ID NO: 9052 - RNA, 26 nt, Artificial Sequence
  source: /note="Description of Artificial Sequence: Synthetic oligonucleotide"
  source: /note="RNA"
  modified_base (1)..(1): bicyclic nucleic acid (BNA)
  modified_base (2)..(2): bicyclic nucleic acid (BNA)
  source: /note="3' tri-ethylene glycol (TEG)"
aacaucaaggaagauggcauuucuag

SEQ ID NO: 9053 - RNA, 25 nt, Artificial Sequence
  source: /note="Description of Artificial Sequence: Synthetic oligonucleotide"
  source: /note="RNA"
  modified_base (1)..(1): bicyclic nucleic acid (BNA)
  modified_base (2)..(2): bicyclic nucleic acid (BNA)
  source: /note="3' tri-ethylene glycol (TEG)"
aacaucaaggaagauggcauuucua

SEQ ID NO: 9054 - RNA, 24 nt, Artificial Sequence
  source: /note="Description of Artificial Sequence: Synthetic oligonucleotide"
  source: /note="RNA"
  modified_base (1)..(1): bicyclic nucleic acid (BNA)
  modified_base (2)..(2): bicyclic nucleic acid (BNA)
  source: /note="3' tri-ethylene glycol (TEG)"
aacaucaaggaagauggcauuucu

SEQ ID NO: 9055 - RNA, 23 nt, Artificial Sequence
  source: /note="Description of Artificial Sequence: Synthetic oligonucleotide"
  source: /note="RNA"
  modified_base (1)..(1): bicyclic nucleic acid (BNA)
  modified_base (2)..(2): bicyclic nucleic acid (BNA)
  source: /note="3' tri-ethylene glycol (TEG)"
aacaucaaggaagauggcauuuc

SEQ ID NO: 9056 - RNA, 22 nt, Artificial Sequence
  source: /note="Description of Artificial Sequence: Synthetic oligonucleotide"
  source: /note="RNA"
  modified_base (1)..(1): bicyclic nucleic acid (BNA)
  modified_base (2)..(2): bicyclic nucleic acid (BNA)
  source: /note="3' tri-ethylene glycol (TEG)"
aacaucaaggaagauggcauuu

SEQ ID NO: 9057 - RNA, 21 nt, Artificial Sequence
  source: /note="Description of Artificial Sequence: Synthetic oligonucleotide"
  source: /note="RNA"
  modified_base (1)..(1): bicyclic nucleic acid (BNA)
  modified_base (2)..(2): bicyclic nucleic acid (BNA)
  source: /note="3' tri-ethylene glycol (TEG)"
aacaucaaggaagauggcauu

SEQ ID NO: 9058 - RNA, 20 nt, Artificial Sequence
  source: /note="Description of Artificial Sequence: Synthetic oligonucleotide"
  source: /note="RNA"
  modified_base (1)..(1): bicyclic nucleic acid (BNA)
  modified_base (2)..(2): bicyclic nucleic acid (BNA)
  source: /note="3' tri-ethylene glycol (TEG)"
aacaucaaggaagauggcau

SEQ ID NO: 9059 - RNA, 19 nt, Artificial Sequence
  source: /note="Description of Artificial Sequence: Synthetic oligonucleotide"
  source: /note="RNA"
  modified_base (1)..(1): bicyclic nucleic acid (BNA)
  modified_base (2)..(2): bicyclic nucleic acid (BNA)
  source: /note="3' tri-ethylene glycol (TEG)"
aacaucaaggaagauggca

SEQ ID NO: 9060 - RNA, 18 nt, Artificial Sequence
  source: /note="Description of Artificial Sequence: Synthetic oligonucleotide"
  source: /note="RNA"
  modified_base (1)..(1): bicyclic nucleic acid (BNA)
  modified_base (2)..(2): bicyclic nucleic acid (BNA)
  source: /note="3' tri-ethylene glycol (TEG)"
aacaucaaggaagauggc

SEQ ID NO: 9061 - RNA, 17 nt, Artificial Sequence
  source: /note="Description of Artificial Sequence: Synthetic oligonucleotide"
  source: /note="RNA"
  modified_base (1)..(1): bicyclic nucleic acid (BNA)
  modified_base (2)..(2): bicyclic nucleic acid (BNA)
  source: /note="3' tri-ethylene glycol (TEG)"
aacaucaaggaagaugg

SEQ ID NO: 9062 - RNA, 16 nt, Artificial Sequence
  source: /note="Description of Artificial Sequence: Synthetic oligonucleotide"
  source: /note="RNA"
  modified_base (1)..(1): bicyclic nucleic acid (BNA)
  modified_base (2)..(2): bicyclic nucleic acid (BNA)
  source: /note="3' tri-ethylene glycol (TEG)"
aacaucaaggaagaug

SEQ ID NO: 9063 - RNA, 15 nt, Artificial Sequence
  source: /note="Description of Artificial Sequence: Synthetic oligonucleotide"
  source: /note="RNA"
  modified_base (1)..(1): bicyclic nucleic acid (BNA)
  modified_base (2)..(2): bicyclic nucleic acid (BNA)
  source: /note="3' tri-ethylene glycol (TEG)"
aacaucaaggaagau

SEQ ID NO: 9064 - RNA, 14 nt, Artificial Sequence
  source: /note="Description of Artificial Sequence: Synthetic oligonucleotide"
  source: /note="RNA"
  modified_base (1)..(1): bicyclic nucleic acid (BNA)
  modified_base (2)..(2): bicyclic nucleic acid (BNA)
  source: /note="3' tri-ethylene glycol (TEG)"
aacaucaaggaaga

SEQ ID NO: 9065 - RNA, 13 nt, Artificial Sequence
  source: /note="Description of Artificial Sequence: Synthetic oligonucleotide"
  source: /note="RNA"
  modified_base (1)..(1): bicyclic nucleic acid (BNA)
  modified_base (2)..(2): bicyclic nucleic acid (BNA)
  source: /note="3' tri-ethylene glycol (TEG)"
aacaucaaggaag

SEQ ID NO: 9066 - RNA, 25 nt, Artificial Sequence
  source: /note="Description of Artificial Sequence: Synthetic oligonucleotide"
  source: /note="RNA"
  modified_base (1)..(1): bicyclic nucleic acid (BNA)
  modified_base (2)..(2): bicyclic nucleic acid (BNA)
  source: /note="3' tri-ethylene glycol (TEG)"
acaucaaggaagauggcauuucuag

SEQ ID NO: 9067 - RNA, 24 nt, Artificial Sequence
  source: /note="Description of Artificial Sequence: Synthetic oligonucleotide"
  source: /note="RNA"
  modified_base (1)..(1): bicyclic nucleic acid (BNA)
  modified_base (2)..(2): bicyclic nucleic acid (BNA)
  source: /note="3' tri-ethylene glycol (TEG)"
acaucaaggaagauggcauuucua

SEQ ID NO: 9068 - RNA, 23 nt, Artificial Sequence
  source: /note="Description of Artificial Sequence: Synthetic oligonucleotide"
  source: /note="RNA"
  modified_base (1)..(1): bicyclic nucleic acid (BNA)
  modified_base (2)..(2): bicyclic nucleic acid (BNA)
  source: /note="3' tri-ethylene glycol (TEG)"
acaucaaggaagauggcauuucu

SEQ ID NO: 9069 - RNA, 22 nt, Artificial Sequence
  source: /note="Description of Artificial Sequence: Synthetic oligonucleotide"
  source: /note="RNA"
  modified_base (1)..(1): bicyclic nucleic acid (BNA)
  modified_base (2)..(2): bicyclic nucleic acid (BNA)
  source: /note="3' tri-ethylene glycol (TEG)"
acaucaaggaagauggcauuuc

SEQ ID NO: 9070 - RNA, 21 nt, Artificial Sequence
  source: /note="Description of Artificial Sequence: Synthetic oligonucleotide"
  source: /note="RNA"
  modified_base (1)..(1): bicyclic nucleic acid (BNA)
  modified_base (2)..(2): bicyclic nucleic acid (BNA)
  source: /note="3' tri-ethylene glycol (TEG)"
acaucaaggaagauggcauuu

SEQ ID NO: 9071 - RNA, 20 nt, Artificial Sequence
  source: /note="Description of Artificial Sequence: Synthetic oligonucleotide"
  source: /note="RNA"
  modified_base (1)..(1): bicyclic nucleic acid (BNA)
  modified_base (2)..(2): bicyclic nucleic acid (BNA)
  source: /note="3' tri-ethylene glycol (TEG)"
acaucaaggaagauggcauu

SEQ ID NO: 9072 - RNA, 19 nt, Artificial Sequence
  source: /note="Description of Artificial Sequence: Synthetic oligonucleotide"
  source: /note="RNA"
  modified_base (1)..(1): bicyclic nucleic acid (BNA)
  modified_base (2)..(2): bicyclic nucleic acid (BNA)
  source: /note="3' tri-ethylene glycol (TEG)"
acaucaaggaagauggcau

SEQ ID NO: 9073 - RNA, 18 nt, Artificial Sequence
  source: /note="Description of Artificial Sequence: Synthetic oligonucleotide"
  source: /note="RNA"
  modified_base (1)..(1): bicyclic nucleic acid (BNA)
  modified_base (2)..(2): bicyclic nucleic acid (BNA)
  source: /note="3' tri-ethylene glycol (TEG)"
acaucaaggaagauggca

SEQ ID NO: 9074 - RNA, 17 nt, Artificial Sequence
  source: /note="Description of Artificial Sequence: Synthetic oligonucleotide"
  source: /note="RNA"
  modified_base (1)..(1): bicyclic nucleic acid (BNA)
  modified_base (2)..(2): bicyclic nucleic acid (BNA)
  source: /note="3' tri-ethylene glycol (TEG)"
acaucaaggaagauggc

SEQ ID NO: 9075 - RNA, 16 nt, Artificial Sequence
  source: /note="Description of Artificial Sequence: Synthetic oligonucleotide"
  source: /note="RNA"
  modified_base (1)..(1): bicyclic nucleic acid (BNA)
  modified_base (2)..(2): bicyclic nucleic acid (BNA)
  source: /note="3' tri-ethylene glycol (TEG)"
acaucaaggaagaugg

SEQ ID NO: 9076 - RNA, 15 nt, Artificial Sequence
  source: /note="Description of Artificial Sequence: Synthetic oligonucleotide"
  source: /note="RNA"
  modified_base (1)..(1): bicyclic nucleic acid (BNA)
  modified_base (2)..(2): bicyclic nucleic acid (BNA)
  source: /note="3' tri-ethylene glycol (TEG)"
acaucaaggaagaug

SEQ ID NO: 9077 - RNA, 14 nt, Artificial Sequence
  source: /note="Description of Artificial Sequence: Synthetic oligonucleotide"
  source: /note="RNA"
  modified_base (1)..(1): bicyclic nucleic acid (BNA)
  modified_base (2)..(2): bicyclic nucleic acid (BNA)
  source: /note="3' tri-ethylene glycol (TEG)"
acaucaaggaagau

SEQ ID NO: 9078 - RNA, 13 nt, Artificial Sequence
  source: /note="Description of Artificial Sequence: Synthetic oligonucleotide"
  source: /note="RNA"
  modified_base (1)..(1): bicyclic nucleic acid (BNA)
  modified_base (2)..(2): bicyclic nucleic acid (BNA)
  source: /note="3' tri-ethylene glycol (TEG)"
acaucaaggaaga

SEQ ID NO: 9079 - RNA, 12 nt, Artificial Sequence
  source: /note="Description of Artificial Sequence: Synthetic oligonucleotide"
  source: /note="RNA"
  modified_base (1)..(1): bicyclic nucleic acid (BNA)
  modified_base (2)..(2): bicyclic nucleic acid (BNA)
  source: /note="3' tri-ethylene glycol (TEG)"
acaucaaggaag

SEQ ID NO: 9080 - RNA, 24 nt, Artificial Sequence
  source: /note="Description of Artificial Sequence: Synthetic oligonucleotide"
  source: /note="RNA"
  modified_base (1)..(1): bicyclic nucleic acid (BNA)
  modified_base (2)..(2): bicyclic nucleic acid (BNA)
  source: /note="3' tri-ethylene glycol (TEG)"
caucaaggaagauggcauuucuag

SEQ ID NO: 9081 - RNA, 23 nt, Artificial Sequence
  source: /note="Description of Artificial Sequence: Synthetic oligonucleotide"
  source: /note="RNA"
  modified_base (1)..(1): bicyclic nucleic acid (BNA)
  modified_base (2)..(2): bicyclic nucleic acid (BNA)
  source: /note="3' tri-ethylene glycol (TEG)"
caucaaggaagauggcauuucua

SEQ ID NO: 9082 - RNA, 22 nt, Artificial Sequence
  source: /note="Description of Artificial Sequence: Synthetic oligonucleotide"
  source: /note="RNA"
  modified_base (1)..(1): bicyclic nucleic acid (BNA)
  modified_base (2)..(2): bicyclic nucleic acid (BNA)
  source: /note="3' tri-ethylene glycol (TEG)"
caucaaggaagauggcauuucu

SEQ ID NO: 9083 - RNA, 21 nt, Artificial Sequence
  source: /note="Description of Artificial Sequence: Synthetic oligonucleotide"
  source: /note="RNA"
  modified_base (1)..(1): bicyclic nucleic acid (BNA)
  modified_base (2)..(2): bicyclic nucleic acid (BNA)
  source: /note="3' tri-ethylene glycol (TEG)"
caucaaggaagauggcauuuc

SEQ ID NO: 9084 - RNA, 20 nt, Artificial Sequence
  source: /note="Description of Artificial Sequence: Synthetic oligonucleotide"
  source: /note="RNA"
  modified_base (1)..(1): bicyclic nucleic acid (BNA)
  modified_base (2)..(2): bicyclic nucleic acid (BNA)
  source: /note="3' tri-ethylene glycol (TEG)"
caucaaggaagauggcauuu

SEQ ID NO: 9085 - RNA, 19 nt, Artificial Sequence
  source: /note="Description of Artificial Sequence: Synthetic oligonucleotide"
  source: /note="RNA"
  modified_base (1)..(1): bicyclic nucleic acid (BNA)
  modified_base (2)..(2): bicyclic nucleic acid (BNA)
  source: /note="3' tri-ethylene glycol (TEG)"
caucaaggaagauggcauu

SEQ ID NO: 9086 - RNA, 18 nt, Artificial Sequence
  source: /note="Description of Artificial Sequence: Synthetic oligonucleotide"
  source: /note="RNA"
  modified_base (1)..(1): bicyclic nucleic acid (BNA)
  modified_base (2)..(2): bicyclic nucleic acid (BNA)
  source: /note="3' tri-ethylene glycol (TEG)"
caucaaggaagauggcau

SEQ ID NO: 9087 - RNA, 17 nt, Artificial Sequence
  source: /note="Description of Artificial Sequence: Synthetic oligonucleotide"
  source: /note="RNA"
  modified_base (1)..(1): bicyclic nucleic acid (BNA)
  modified_base (2)..(2): bicyclic nucleic acid (BNA)
  source: /note="3' tri-ethylene glycol (TEG)"
caucaaggaagauggca

SEQ ID NO: 9088 - RNA, 16 nt, Artificial Sequence
  source: /note="Description of Artificial Sequence: Synthetic oligonucleotide"
  source: /note="RNA"
  modified_base (1)..(1): bicyclic nucleic acid (BNA)
  modified_base (2)..(2): bicyclic nucleic acid (BNA)
  source: /note="3' tri-ethylene glycol (TEG)"
caucaaggaagauggc

SEQ ID NO: 9089 - RNA, 15 nt, Artificial Sequence
  source: /note="Description of Artificial Sequence: Synthetic oligonucleotide"
  source: /note="RNA"
  modified_base (1)..(1): bicyclic nucleic acid (BNA)
  modified_base (2)..(2): bicyclic nucleic acid (BNA)
  source: /note="3' tri-ethylene glycol (TEG)"
caucaaggaagaugg

SEQ ID NO: 9090 - RNA, 14 nt, Artificial Sequence
  source: /note="Description of Artificial Sequence: Synthetic oligonucleotide"
  source: /note="RNA"
  modified_base (1)..(1): bicyclic nucleic acid (BNA)
  modified_base (2)..(2): bicyclic nucleic acid (BNA)
  source: /note="3' tri-ethylene glycol (TEG)"
caucaaggaagaug

SEQ ID NO: 9091 - RNA, 13 nt, Artificial Sequence
  source: /note="Description of Artificial Sequence: Synthetic oligonucleotide"
  source: /note="RNA"
  modified_base (1)..(1): bicyclic nucleic acid (BNA)
  modified_base (2)..(2): bicyclic nucleic acid (BNA)
  source: /note="3' tri-ethylene glycol (TEG)"
caucaaggaagau

SEQ ID NO: 9092 - RNA, 12 nt, Artificial Sequence
  source: /note="Description of Artificial Sequence: Synthetic oligonucleotide"
  source: /note="RNA"
  modified_base (1)..(1): bicyclic nucleic acid (BNA)
  modified_base (2)..(2): bicyclic nucleic acid (BNA)
  source: /note="3' tri-ethylene glycol (TEG)"
caucaaggaaga

SEQ ID NO: 9093 - RNA, 11 nt, Artificial Sequence
  source: /note="Description of Artificial Sequence: Synthetic oligonucleotide"
  source: /note="RNA"
  modified_base (1)..(1): bicyclic nucleic acid (BNA)
  modified_base (2)..(2): bicyclic nucleic acid (BNA)
  source: /note="3' tri-ethylene glycol (TEG)"
caucaaggaag

SEQ ID NO: 9094 - DNA, 23 bp, Artificial Sequence
  source: /note="Description of Artificial Sequence: Synthetic oligonucleotide"
  source: /note="Description of Combined DNA/RNA Molecule: Synthetic oligonucleotide"
  source: /note="DNA/RNA"
  modified_base (1)..(1): bicyclic nucleic acid (BNA)
  modified_base (2)..(2): bicyclic nucleic acid (BNA)
  source: /note="3' tri-ethylene glycol (TEG)"
atcaaggaagauggcauuucuag

SEQ ID NO: 9095 - DNA, 22 bp, Artificial Sequence
  source: /note="Description of Artificial Sequence: Synthetic oligonucleotide"
  source: /note="Description of Combined DNA/RNA Molecule: Synthetic oligonucleotide"
  source: /note="DNA/RNA"
  modified_base (1)..(1): bicyclic nucleic acid (BNA)
  modified_base (2)..(2): bicyclic nucleic acid (BNA)
  source: /note="3' tri-ethylene glycol (TEG)"
atcaaggaagauggcauuucua

SEQ ID NO: 9096 - DNA, 21 bp, Artificial Sequence
  source: /note="Description of Artificial Sequence: Synthetic oligonucleotide"
  source: /note="Description of Combined DNA/RNA Molecule: Synthetic oligonucleotide"
  source: /note="DNA/RNA"
  modified_base (1)..(1): bicyclic nucleic acid (BNA)
  modified_base (2)..(2): bicyclic nucleic acid (BNA)
  source: /note="3' tri-ethylene glycol (TEG)"
atcaaggaagauggcauuucu

SEQ ID NO: 9097 - DNA, 20 bp, Artificial Sequence
  source: /note="Description of Artificial Sequence: Synthetic oligonucleotide"
  source: /note="Description of Combined DNA/RNA Molecule: Synthetic oligonucleotide"
  source: /note="DNA/RNA"
  modified_base (1)..(1): bicyclic nucleic acid (BNA)
  modified_base (2)..(2): bicyclic nucleic acid (BNA)
  source: /note="3' tri-ethylene glycol (TEG)"
atcaaggaagauggcauuuc

SEQ ID NO: 9098 - DNA, 19 bp, Artificial Sequence
  source: /note="Description of Artificial Sequence: Synthetic oligonucleotide"
  source: /note="Description of Combined DNA/RNA Molecule: Synthetic oligonucleotide"
  source: /note="DNA/RNA"
  modified_base (1)..(1): bicyclic nucleic acid (BNA)
  modified_base (2)..(2): bicyclic nucleic acid (BNA)
  source: /note="3' tri-ethylene glycol (TEG)"
atcaaggaagauggcauuu

SEQ ID NO: 9099 - DNA, 18 bp, Artificial Sequence
  source: /note="Description of Artificial Sequence: Synthetic oligonucleotide"
  source: /note="Description of Combined DNA/RNA Molecule: Synthetic oligonucleotide"
  source: /note="DNA/RNA"
  modified_base (1)..(1): bicyclic nucleic acid (BNA)
  modified_base (2)..(2): bicyclic nucleic acid (BNA)
  source: /note="3' tri-ethylene glycol (TEG)"
atcaaggaagauggcauu

SEQ ID NO: 9100 - DNA, 17 bp, Artificial Sequence
  source: /note="Description of Artificial Sequence: Synthetic oligonucleotide"
  source: /note="Description of Combined DNA/RNA Molecule: Synthetic oligonucleotide"
  source: /note="DNA/RNA"
  modified_base (1)..(1): bicyclic nucleic acid (BNA)
  modified_base (2)..(2): bicyclic nucleic acid (BNA)
  source: /note="3' tri-ethylene glycol (TEG)"
atcaaggaagauggcau

SEQ ID NO: 9101 - DNA, 16 bp, Artificial Sequence
  source: /note="Description of Artificial Sequence: Synthetic oligonucleotide"
  source: /note="Description of Combined DNA/RNA Molecule: Synthetic oligonucleotide"
  source: /note="DNA/RNA"
  modified_base (1)..(1): bicyclic nucleic acid (BNA)
  modified_base (2)..(2): bicyclic nucleic acid (BNA)
  source: /note="3' tri-ethylene glycol (TEG)"
atcaaggaagauggca

SEQ ID NO: 9102 - DNA, 15 bp, Artificial Sequence
  source: /note="Description of Artificial Sequence: Synthetic oligonucleotide"
  source: /note="Description of Combined DNA/RNA Molecule: Synthetic oligonucleotide"
  source: /note="DNA/RNA"
  modified_base (1)..(1): bicyclic nucleic acid (BNA)
  modified_base (2)..(2): bicyclic nucleic acid (BNA)
  source: /note="3' tri-ethylene glycol (TEG)"
atcaaggaagauggc

SEQ ID NO: 9103 - DNA, 14 bp, Artificial Sequence
  source: /note="Description of Artificial Sequence: Synthetic oligonucleotide"
  source: /note="Description of Combined DNA/RNA Molecule: Synthetic oligonucleotide"
  source: /note="DNA/RNA"
  modified_base (1)..(1): bicyclic nucleic acid (BNA)
  modified_base (2)..(2): bicyclic nucleic acid (BNA)
  source: /note="3' tri-ethylene glycol (TEG)"
atcaaggaagaugg

SEQ ID NO: 9104 - DNA, 13 bp, Artificial Sequence
  source: /note="Description of Artificial Sequence: Synthetic oligonucleotide"
  source: /note="Description of Combined DNA/RNA Molecule: Synthetic oligonucleotide"
  source: /note="DNA/RNA"
  modified_base (1)..(1): bicyclic nucleic acid (BNA)
  modified_base (2)..(2): bicyclic nucleic acid (BNA)
  source: /note="3' tri-ethylene glycol (TEG)"
atcaaggaagaug

SEQ ID NO: 9105 - DNA, 12 bp, Artificial Sequence
  source: /note="Description of Artificial Sequence: Synthetic oligonucleotide"
  source: /note="Description of Combined DNA/RNA Molecule: Synthetic oligonucleotide"
  source: /note="DNA/RNA"
  modified_base (1)..(1): bicyclic nucleic acid (BNA)
  modified_base (2)..(2): bicyclic nucleic acid (BNA)
  source: /note="3' tri-ethylene glycol (TEG)"
atcaaggaagau

SEQ ID NO: 9106 - DNA, 11 bp, Artificial Sequence
  source: /note="Description of Artificial Sequence: Synthetic oligonucleotide"
  source: /note="DNA/RNA"
  modified_base (1)..(1): bicyclic nucleic acid (BNA)
  modified_base (2)..(2): bicyclic nucleic acid (BNA)
  source: /note="3' tri-ethylene glycol (TEG)"
atcaaggaaga

SEQ ID NO: 9107 - DNA, 10 bp, Artificial Sequence
  source: /note="Description of Artificial Sequence: Synthetic oligonucleotide"
  source: /note="DNA/RNA"
  modified_base (1)..(1): bicyclic nucleic acid (BNA)
  modified_base (2)..(2): bicyclic nucleic acid (BNA)
  source: /note="3' tri-ethylene glycol (TEG)"
atcaaggaag

SEQ ID NO: 9108 - RNA, 23 nt, Artificial Sequence
  source: /note="Description of Artificial Sequence: Synthetic oligonucleotide"
  source: /note="RNA"
  modified_base (1)..(1): bicyclic nucleic acid (BNA)
  modified_base (2)..(2): bicyclic nucleic acid (BNA)
  source: /note="3' tri-ethylene glycol (TEG)"
ccagagcagguaccuccaacauc

SEQ ID NO: 9109 - RNA, 18 nt, Artificial Sequence
  source: /note="Description of Artificial Sequence: Synthetic oligonucleotide"
  source: /note="RNA"
  modified_base (1)..(1): bicyclic nucleic acid (BNA)
  modified_base (2)..(2): bicyclic nucleic acid (BNA)
  source: /note="3' tri-ethylene glycol (TEG)"
ccagagcagguaccucca

SEQ ID NO: 9110 - RNA, 23 nt, Artificial Sequence
  source: /note="Description of Artificial Sequence: Synthetic oligonucleotide"
  source: /note="RNA"
  modified_base (1)..(1): bicyclic nucleic acid (BNA)
  modified_base (2)..(2): bicyclic nucleic acid (BNA)
  source: /note="3' tri-ethylene glycol (TEG)"
ccucugugauuuuauaacuugau

SEQ ID NO: 9111 - DNA, 17 bp, Artificial Sequence
  source: /note="Description of Artificial Sequence: Synthetic oligonucleotide"
  source: /note="Description of Combined DNA/RNA Molecule: Synthetic oligonucleotide"
  source: /note="DNA/RNA"
  modified_base (1)..(1): bicyclic nucleic acid (BNA)
  modified_base (2)..(2): bicyclic nucleic acid (BNA)
  source: /note="3' tri-ethylene glycol (TEG)"
tcacccaccaucacccu

SEQ ID NO: 9112 - DNA, 20 bp, Artificial Sequence
  source: /note="Description of Artificial Sequence: Synthetic oligonucleotide"
  source: /note="Description of Combined DNA/RNA Molecule: Synthetic oligonucleotide"
  source: /note="DNA/RNA"
  modified_base (1)..(1): bicyclic nucleic acid (BNA)
  modified_base (2)..(2): bicyclic nucleic acid (BNA)
  source: /note="3' tri-ethylene glycol (TEG)"
tgauauccucaaggucaccc

SEQ ID NO: 9113 - DNA, 22 bp, Artificial Sequence
  source: /note="Description of Artificial Sequence: Synthetic oligonucleotide"
  source: /note="Description of Combined DNA/RNA Molecule: Synthetic oligonucleotide"
  source: /note="DNA/RNA"
  modified_base (1)..(1): bicyclic nucleic acid (BNA)
  modified_base (2)..(2): bicyclic nucleic acid (BNA)
  source: /note="3' tri-ethylene glycol (TEG)"
ctgcuugaugaucaucucguug

SEQ ID NO: 9114 - DNA, 18 bp, Artificial Sequence
  source: /note="Description of Artificial Sequence: Synthetic oligonucleotide"
  source: /note="Description of Combined DNA/RNA Molecule: Synthetic oligonucleotide"
  source: /note="DNA/RNA"
  modified_base (1)..(1): bicyclic nucleic acid (BNA)
  modified_base (2)..(2): bicyclic nucleic acid (BNA)
  source: /note="3' tri-ethylene glycol (TEG)"
ctgcuugaugaucaucuc

SEQ ID NO: 9115 - DNA, 19 bp, Artificial Sequence
  source: /note="Description of Artificial Sequence: Synthetic oligonucleotide"
  source: /note="Description of Combined DNA/RNA Molecule: Synthetic oligonucleotide"
  source: /note="DNA/RNA"
  modified_base (1)..(1): bicyclic nucleic acid (BNA)
  modified_base (2)..(2): bicyclic nucleic acid (BNA)
  source: /note="3' tri-ethylene glycol (TEG)"
gtuuccuuaguaaccacag

SEQ ID NO: 9116 - DNA, 17 bp, Artificial Sequence
  source: /note="Description of Artificial Sequence: Synthetic oligonucleotide"
  source: /note="Description of Combined DNA/RNA Molecule: Synthetic oligonucleotide"
  source: /note="DNA/RNA"
  modified_base (1)..(1): bicyclic nucleic acid (BNA)
  modified_base (2)..(2): bicyclic nucleic acid (BNA)
  source: /note="3' tri-ethylene glycol (TEG)"
gtuuccuuaguaaccac

SEQ ID NO: 9117 - DNA, 20 bp, Artificial Sequence
  source: /note="Description of Artificial Sequence: Synthetic oligonucleotide"
  source: /note="Description of Combined DNA/RNA Molecule: Synthetic oligonucleotide"
  source: /note="DNA/RNA"
  source: /note="5' tri-ethylene glycol (TEG)"
  modified_base (1)..(1): bicyclic nucleic acid (BNA)
  modified_base (2)..(2): bicyclic nucleic acid (BNA)
  source: /note="3' tri-ethylene glycol (TEG)"
tcaaggaagauggcauuucu

SEQ ID NO: 9118 - DNA, 22 bp, Artificial Sequence
  source: /note="Description of Artificial Sequence: Synthetic oligonucleotide"
  source: /note="Description of Combined DNA/RNA Molecule: Synthetic oligonucleotide"
  source: /note="DNA/RNA"
  source: /note="5' tri-ethylene glycol (TEG)"
  modified_base (1)..(1): bicyclic nucleic acid (BNA)
  modified_base (2)..(2): bicyclic nucleic acid (BNA)
  source: /note="3' tri-ethylene glycol (TEG)"
tcaaggaagauggcauuucuag

SEQ ID NO: 9119 - RNA, 18 nt, Artificial Sequence
  source: /note="Description of Artificial Sequence: Synthetic oligonucleotide"
  source: /note="RNA"
  source: /note="5' tri-ethylene glycol (TEG)"
  modified_base (1)..(1): bicyclic nucleic acid (BNA)
  modified_base (2)..(2): bicyclic nucleic acid (BNA)
  source: /note="3' tri-ethylene glycol (TEG)"
gguaaguucuguccaagc

SEQ ID NO: 9120 - DNA, 18 bp, Artificial Sequence
  source: /note="Description of Artificial Sequence: Synthetic oligonucleotide"
  source: /note="Description of Combined DNA/RNA Molecule: Synthetic oligonucleotide"
  source: /note="DNA/RNA"
  source: /note="5' tri-ethylene glycol (TEG)"
  modified_base (1)..(1): bicyclic nucleic acid (BNA)
  modified_base (2)..(2): bicyclic nucleic acid (BNA)
  source: /note="3' tri-ethylene glycol (TEG)"
gtaaguucuguccaagcc

SEQ ID NO: 9121 - RNA, 18 nt, Artificial Sequence
  source: /note="Description of Artificial Sequence: Synthetic oligonucleotide"
  source: /note="RNA"
  source: /note="5' tri-ethylene glycol (TEG)"
  modified_base (1)..(1): bicyclic nucleic acid (BNA)
  modified_base (2)..(2): bicyclic nucleic acid (BNA)
  source: /note="3' tri-ethylene glycol (TEG)"
agucgguaaguucugucc

SEQ ID NO: 9122 - DNA, 18 bp, Artificial Sequence
  source: /note="Description of Artificial Sequence: Synthetic oligonucleotide"
  source: /note="Description of Combined DNA/RNA Molecule: Synthetic oligonucleotide"
  source: /note="DNA/RNA"
  source: /note="5' tri-ethylene glycol (TEG)"
  modified_base (1)..(1): bicyclic nucleic acid (BNA)
  modified_base (2)..(2): bicyclic nucleic acid (BNA)
  source: /note="3' tri-ethylene glycol (TEG)"
ctguccaagcccgguuga

SEQ ID NO: 9123 - DNA, 15 bp, Artificial Sequence
  source: /note="Description of Artificial Sequence: Synthetic oligonucleotide"
  source: /note="Description of Combined DNA/RNA Molecule: Synthetic oligonucleotide"
  source: /note="DNA/RNA"
  source: /note="5' tri-ethylene glycol (TEG)"
  modified_base (1)..(1): bicyclic nucleic acid (BNA)
  modified_base (2)..(2): bicyclic nucleic acid (BNA)
  source: /note="3' tri-ethylene glycol (TEG)"
taaguucuguccaag

SEQ ID NO: 9124 - DNA, 20 bp, Artificial Sequence
  source: /note="Description of Artificial Sequence: Synthetic oligonucleotide"
  source: /note="Description of Combined DNA/RNA Molecule: Synthetic oligonucleotide"
  source: /note="DNA/RNA"
  source: /note="5' tri-ethylene glycol (TEG)"
  modified_base (1)..(1): bicyclic nucleic acid (BNA)
  modified_base (2)..(2): bicyclic nucleic acid (BNA)
  source: /note="3' tri-ethylene glycol (TEG)"
ttcuguccaagcccgguuga

SEQ ID NO: 9125 - DNA, 19 bp, Artificial Sequence
  source: /note="Description of Artificial Sequence: Synthetic oligonucleotide"
  source: /note="Description of Combined DNA/RNA Molecule: Synthetic oligonucleotide"
  source: /note="DNA/RNA"
  source: /note="5' tri-ethylene glycol (TEG)"
  modified_base (1)..(1): bicyclic nucleic acid (BNA)
  modified_base (2)..(2): bicyclic nucleic acid (BNA)
  source: /note="3' tri-ethylene glycol (TEG)"
ttcuguccaagcccgguug

SEQ ID NO: 9126 - DNA, 18 bp, Artificial Sequence
  source: /note="Description of Artificial Sequence: Synthetic oligonucleotide"
  source: /note="Description of Combined DNA/RNA Molecule: Synthetic oligonucleotide"
  source: /note="DNA/RNA"
  source: /note="5' tri-ethylene glycol (TEG)"
  modified_base (1)..(1): bicyclic nucleic acid (BNA)
  modified_base (2)..(2): bicyclic nucleic acid (BNA)
  source: /note="3' tri-ethylene glycol (TEG)"
ttcuguccaagcccgguu

SEQ ID NO: 9127 - DNA, 17 bp, Artificial Sequence
  source: /note="Description of Artificial Sequence: Synthetic oligonucleotide"
  source: /note="Description of Combined DNA/RNA Molecule: Synthetic oligonucleotide"
  source: /note="DNA/RNA"
  source: /note="5' tri-ethylene glycol (TEG)"
  modified_base (1)..(1): bicyclic nucleic acid (BNA)
  modified_base (2)..(2): bicyclic nucleic acid (BNA)
  source: /note="3' tri-ethylene glycol (TEG)"
ttcuguccaagcccggu

SEQ ID NO: 9128 - DNA, 16 bp, Artificial Sequence
  source: /note="Description of Artificial Sequence: Synthetic oligonucleotide"
  source: /note="Description of Combined DNA/RNA Molecule: Synthetic oligonucleotide"
  source: /note="DNA/RNA"
  source: /note="5' tri-ethylene glycol (TEG)"
  modified_base (1)..(1): bicyclic nucleic acid (BNA)
  modified_base (2)..(2): bicyclic nucleic acid (BNA)
  source: /note="3' tri-ethylene glycol (TEG)"
ttcuguccaagcccgg

SEQ ID NO: 9129 - DNA, 15 bp, Artificial Sequence
  source: /note="Description of Artificial Sequence: Synthetic oligonucleotide"
  source: /note="Description of Combined DNA/RNA Molecule: Synthetic oligonucleotide"
  source: /note="DNA/RNA"
  source: /note="5' tri-ethylene glycol (TEG)"
  modified_base (1)..(1): bicyclic nucleic acid (BNA)
  modified_base (2)..(2): bicyclic nucleic acid (BNA)
  source: /note="3' tri-ethylene glycol (TEG)"
ttcuguccaagcccg

SEQ ID NO: 9130 - DNA, 14 bp, Artificial Sequence
  source: /note="Description of Artificial Sequence: Synthetic oligonucleotide"
  source: /note="Description of Combined DNA/RNA Molecule: Synthetic oligonucleotide"
  source: /note="DNA/RNA"
  source: /note="5' tri-ethylene glycol (TEG)"
  modified_base (1)..(1): bicyclic nucleic acid (BNA)
  modified_base (2)..(2): bicyclic nucleic acid (BNA)
  source: /note="3' tri-ethylene glycol (TEG)"
ttcuguccaagccc

SEQ ID NO: 9131 - DNA, 13 bp, Artificial Sequence
  source: /note="Description of Artificial Sequence: Synthetic oligonucleotide"
  source: /note="Description of Combined DNA/RNA Molecule: Synthetic oligonucleotide"
  source: /note="DNA/RNA"
  source: /note="5' tri-ethylene glycol (TEG)"
  modified_base (1)..(1): bicyclic nucleic acid (BNA)
  modified_base (2)..(2): bicyclic nucleic acid (BNA)
  source: /note="3' tri-ethylene glycol (TEG)"
ttcuguccaagcc

SEQ ID NO: 9132 - DNA, 12 bp, Artificial Sequence
  source: /note="Description of Artificial Sequence: Synthetic oligonucleotide"
  source: /note="Description of Combined DNA/RNA Molecule: Synthetic oligonucleotide"
  source: /note="DNA/RNA"
  source: /note="5' tri-ethylene glycol (TEG)"
  modified_base (1)..(1): bicyclic nucleic acid (BNA)
  modified_base (2)..(2): bicyclic nucleic acid (BNA)
  source: /note="3' tri-ethylene glycol (TEG)"
ttcuguccaagc

SEQ ID NO: 9133 - DNA, 11 bp, Artificial Sequence
  source: /note="Description of Artificial Sequence: Synthetic oligonucleotide"
  source: /note="Description of Combined DNA/RNA Molecule: Synthetic oligonucleotide"
  source: /note="DNA/RNA"
  source: /note="5' tri-ethylene glycol (TEG)"
  modified_base (1)..(1): bicyclic nucleic acid (BNA)
  modified_base (2)..(2): bicyclic nucleic acid (BNA)
  source: /note="3' tri-ethylene glycol (TEG)"
ttcuguccaag

SEQ ID NO: 9134 - DNA, 10 bp, Artificial Sequence
  source: /note="Description of Artificial Sequence: Synthetic oligonucleotide"
  source: /note="Description of Combined DNA/RNA Molecule: Synthetic oligonucleotide"
  source: /note="DNA/RNA"
  source: /note="5' tri-ethylene glycol (TEG)"
  modified_base (1)..(1): bicyclic nucleic acid (BNA)
  modified_base (2)..(2): bicyclic nucleic acid (BNA)
  source: /note="3' tri-ethylene glycol (TEG)"
ttcuguccaa

SEQ ID NO: 9135 - DNA, 9 bp, Artificial Sequence
  source: /note="Description of Artificial Sequence: Synthetic oligonucleotide"
  source: /note="Description of Combined DNA/RNA Molecule: Synthetic oligonucleotide"
  source: /note="DNA/RNA"
  source: /note="5' tri-ethylene glycol (TEG)"
  modified_base (1)..(1): bicyclic nucleic acid (BNA)
  modified_base (2)..(2): bicyclic nucleic acid (BNA)
  source: /note="3' tri-ethylene glycol (TEG)"
ttcugucca

SEQ ID NO: 9136 - DNA, 8 bp, Artificial Sequence
  source: /note="Description of Artificial Sequence: Synthetic oligonucleotide"
  source: /note="Description of Combined DNA/RNA Molecule: Synthetic oligonucleotide"
  source: /note="DNA/RNA"
  source: /note="5' tri-ethylene glycol (TEG)"
  modified_base (1)..(1): bicyclic nucleic acid (BNA)
  modified_base (2)..(2): bicyclic nucleic acid (BNA)
  source: /note="3' tri-ethylene glycol (TEG)"
ttcugucc

SEQ ID NO: 9137 - DNA, 19 bp, Artificial Sequence
  source: /note="Description of Artificial Sequence: Synthetic oligonucleotide"
  source: /note="Description of Combined DNA/RNA Molecule: Synthetic oligonucleotide"
  source: /note="DNA/RNA"
  source: /note="5' tri-ethylene glycol (TEG)"
  modified_base (1)..(1): bicyclic nucleic acid (BNA)
  modified_base (2)..(2): bicyclic nucleic acid (BNA)
  source: /note="3' tri-ethylene glycol (TEG)"
tcuguccaagcccgguuga

SEQ ID NO: 9138 - DNA, 18 bp, Artificial Sequence
  source: /note="Description of Artificial Sequence: Synthetic oligonucleotide"
  source: /note="Description of Combined DNA/RNA Molecule: Synthetic oligonucleotide"
  source: /note="DNA/RNA"
  source: /note="5' tri-ethylene glycol (TEG)"
  modified_base (1)..(1): bicyclic nucleic acid (BNA)
  modified_base (2)..(2): bicyclic nucleic acid (BNA)
  source: /note="3' tri-ethylene glycol (TEG)"
tcuguccaagcccgguug

SEQ ID NO: 9139 - DNA, 17 bp, Artificial Sequence
  source: /note="Description of Artificial Sequence: Synthetic oligonucleotide"
  source: /note="Description of Combined DNA/RNA Molecule: Synthetic oligonucleotide"
  source: /note="DNA/RNA"
  source: /note="5' tri-ethylene glycol (TEG)"
  modified_base (1)..(1): bicyclic nucleic acid (BNA)
  modified_base (2)..(2): bicyclic nucleic acid (BNA)
  source: /note="3' tri-ethylene glycol (TEG)"
tcuguccaagcccgguu

SEQ ID NO: 9140 - DNA, 16 bp, Artificial Sequence
  source: /note="Description of Artificial Sequence: Synthetic oligonucleotide"
  source: /note="Description of Combined DNA/RNA Molecule: Synthetic oligonucleotide"
  source: /note="DNA/RNA"
  source: /note="5' tri-ethylene glycol (TEG)"
  modified_base (1)..(1): bicyclic nucleic acid (BNA)
  modified_base (2)..(2): bicyclic nucleic acid (BNA)
  source: /note="3' tri-ethylene glycol (TEG)"
tcuguccaagcccggu

SEQ ID NO: 9141 - DNA, 15 bp, Artificial Sequence
  source: /note="Description of Artificial Sequence: Synthetic oligonucleotide"
  source: /note="Description of Combined DNA/RNA Molecule: Synthetic oligonucleotide"
  source: /note="DNA/RNA"
  source: /note="5' tri-ethylene glycol (TEG)"
  modified_base (1)..(1): bicyclic nucleic acid (BNA)
  modified_base (2)..(2): bicyclic nucleic acid (BNA)
  source: /note="3' tri-ethylene glycol (TEG)"
tcuguccaagcccgg

SEQ ID NO: 9142 - DNA, 14 bp, Artificial Sequence
  source: /note="Description of Artificial Sequence: Synthetic oligonucleotide"
  source: /note="Description of Combined DNA/RNA Molecule: Synthetic oligonucleotide"
  source: /note="DNA/RNA"
  source: /note="5' tri-ethylene glycol (TEG)"
  modified_base (1)..(1): bicyclic nucleic acid (BNA)
  modified_base (2)..(2): bicyclic nucleic acid (BNA)
  source: /note="3' tri-ethylene glycol (TEG)"
tcuguccaagcccg

SEQ ID NO: 9143 - DNA, 13 bp, Artificial Sequence
  source: /note="Description of Artificial Sequence: Synthetic oligonucleotide"
  source: /note="Description of Combined DNA/RNA Molecule: Synthetic oligonucleotide"
  source: /note="DNA/RNA"
  source: /note="5' tri-ethylene glycol (TEG)"
  modified_base (1)..(1): bicyclic nucleic acid (BNA)
  modified_base (2)..(2): bicyclic nucleic acid (BNA)
  source: /note="3' tri-ethylene glycol (TEG)"
tcuguccaagccc

SEQ ID NO: 9144 - DNA, 12 bp, Artificial Sequence
  source: /note="Description of Artificial Sequence: Synthetic oligonucleotide"
  source: /note="Description of Combined DNA/RNA Molecule: Synthetic oligonucleotide"
  source: /note="DNA/RNA"
  source: /note="5' tri-ethylene glycol (TEG)"
  modified_base (1)..(1): bicyclic nucleic acid (BNA)
  modified_base (2)..(2): bicyclic nucleic acid (BNA)
  source: /note="3' tri-ethylene glycol (TEG)"
tcuguccaagcc

SEQ ID NO: 9145 - DNA, 11 bp, Artificial Sequence
  source: /note="Description of Artificial Sequence: Synthetic oligonucleotide"
  source: /note="Description of Combined DNA/RNA Molecule: Synthetic oligonucleotide"
  source: /note="DNA/RNA"
  source: /note="5' tri-ethylene glycol (TEG)"
  modified_base (1)..(1): bicyclic nucleic acid (BNA)
  modified_base (2)..(2): bicyclic nucleic acid (BNA)
  source: /note="3' tri-ethylene glycol (TEG)"
tcuguccaagc

SEQ ID NO: 9146 - DNA, 10 bp, Artificial Sequence
  source: /note="Description of Artificial Sequence: Synthetic oligonucleotide"
  source: /note="Description of Combined DNA/RNA Molecule: Synthetic oligonucleotide"
  source: /note="DNA/RNA"
  source: /note="5' tri-ethylene glycol (TEG)"
  modified_base (1)..(1): bicyclic nucleic acid (BNA)
  modified_base (2)..(2): bicyclic nucleic acid (BNA)
  source: /note="3' tri-ethylene glycol (TEG)"
tcuguccaag

SEQ ID NO: 9147 - DNA, 9 bp, Artificial Sequence
  source: /note="Description of Artificial Sequence: Synthetic oligonucleotide"
  source: /note="Description of Combined DNA/RNA Molecule: Synthetic oligonucleotide"
  source: /note="DNA/RNA"
  source: /note="5' tri-ethylene glycol (TEG)"
  modified_base (1)..(1): bicyclic nucleic acid (BNA)
  modified_base (2)..(2): bicyclic nucleic acid (BNA)
  source: /note="3' tri-ethylene glycol (TEG)"
tcuguccaa

SEQ ID NO: 9148 - DNA, 8 bp, Artificial Sequence
  source: /note="Description of Artificial Sequence: Synthetic oligonucleotide"
  source: /note="Description of Combined DNA/RNA Molecule: Synthetic oligonucleotide"
  source: /note="DNA/RNA"
  source: /note="5' tri-ethylene glycol (TEG)"
  modified_base (1)..(1): bicyclic nucleic acid (BNA)
  modified_base (2)..(2): bicyclic nucleic acid (BNA)
  source: /note="3' tri-ethylene glycol (TEG)"
tcugucca

SEQ ID NO: 9149 - DNA, 17 bp, Artificial Sequence
  source: /note="Description of Artificial Sequence: Synthetic oligonucleotide"
  source: /note="Description of Combined DNA/RNA Molecule: Synthetic oligonucleotide"
  source: /note="DNA/RNA"
  source: /note="5' tri-ethylene glycol (TEG)"
  modified_base (1)..(1): bicyclic nucleic acid (BNA)
  modified_base (2)..(2): bicyclic nucleic acid (BNA)
  source: /note="3' tri-ethylene glycol (TEG)"
ctguccaagcccgguug

SEQ ID NO: 9150 - DNA, 16 bp, Artificial Sequence
  source: /note="Description of Artificial Sequence: Synthetic oligonucleotide"
  source: /note="Description of Combined DNA/RNA Molecule: Synthetic oligonucleotide"
  source: /note="DNA/RNA"
  source: /note="5' tri-ethylene glycol (TEG)"
  modified_base (1)..(1): bicyclic nucleic acid (BNA)
  modified_base (2)..(2): bicyclic nucleic acid (BNA)
  source: /note="3' tri-ethylene glycol (TEG)"
ctguccaagcccgguu

SEQ ID NO: 9151 - DNA, 15 bp, Artificial Sequence
  source: /note="Description of Artificial Sequence: Synthetic oligonucleotide"
  source: /note="Description of Combined DNA/RNA Molecule: Synthetic oligonucleotide"
  source: /note="DNA/RNA"
  source: /note="5' tri-ethylene glycol (TEG)"
  modified_base (1)..(1): bicyclic nucleic acid (BNA)
  modified_base (2)..(2): bicyclic nucleic acid (BNA)
  source: /note="3' tri-ethylene glycol (TEG)"
ctguccaagcccggu

SEQ ID NO: 9152 - DNA, 14 bp, Artificial Sequence
  source: /note="Description of Artificial Sequence: Synthetic oligonucleotide"
  source: /note="Description of Combined DNA/RNA Molecule: Synthetic oligonucleotide"
  source: /note="DNA/RNA"
  source: /note="5' tri-ethylene glycol (TEG)"
  modified_base (1)..(1): bicyclic nucleic acid (BNA)
  modified_base (2)..(2): bicyclic nucleic acid (BNA)
  source: /note="3' tri-ethylene glycol (TEG)"
ctguccaagcccgg

SEQ ID NO: 9153 - DNA, 13 bp, Artificial Sequence
  source: /note="Description of Artificial Sequence: Synthetic oligonucleotide"
  source: /note="Description of Combined DNA/RNA Molecule: Synthetic oligonucleotide"
  source: /note="DNA/RNA"
  source: /note="5' tri-ethylene glycol (TEG)"
  modified_base (1)..(1): bicyclic nucleic acid (BNA)
  modified_base (2)..(2): bicyclic nucleic acid (BNA)
  source: /note="3' tri-ethylene glycol (TEG)"
ctguccaagcccg

SEQ ID NO: 9154 - DNA, 12 bp, Artificial Sequence
  source: /note="Description of Artificial Sequence: Synthetic oligonucleotide"
  source: /note="Description of Combined DNA/RNA Molecule: Synthetic oligonucleotide"
  source: /note="DNA/RNA"
  source: /note="5' tri-ethylene glycol (TEG)"
  modified_base (1)..(1): bicyclic nucleic acid (BNA)
  modified_base (2)..(2): bicyclic nucleic acid (BNA)
  source: /note="3' tri-ethylene glycol (TEG)"
ctguccaagccc

SEQ ID NO: 9155 - DNA, 11 bp, Artificial Sequence
  source: /note="Description of Artificial Sequence: Synthetic oligonucleotide"
  source: /note="Description of Combined DNA/RNA Molecule: Synthetic oligonucleotide"
  source: /note="DNA/RNA"
  source: /note="5' tri-ethylene glycol (TEG)"
  modified_base (1)..(1): bicyclic nucleic acid (BNA)
  modified_base (2)..(2): bicyclic nucleic acid (BNA)
  source: /note="3' tri-ethylene glycol (TEG)"
ctguccaagcc

SEQ ID NO: 9156 - DNA, 10 bp, Artificial Sequence
  source: /note="Description of Artificial Sequence: Synthetic oligonucleotide"
  source: /note="Description of Combined DNA/RNA Molecule: Synthetic oligonucleotide"
  source: /note="DNA/RNA"
  source: /note="5' tri-ethylene glycol (TEG)"
  modified_base (1)..(1): bicyclic nucleic acid (BNA)
  modified_base (2)..(2): bicyclic nucleic acid (BNA)
  source: /note="3' tri-ethylene glycol (TEG)"
ctguccaagc

SEQ ID NO: 9157 - DNA, 9 bp, Artificial Sequence
  source: /note="Description of Artificial Sequence: Synthetic oligonucleotide"
  source: /note="Description of Combined DNA/RNA Molecule: Synthetic oligonucleotide"
  source: /note="DNA/RNA"
  source: /note="5' tri-ethylene glycol (TEG)"
  modified_base (1)..(1): bicyclic nucleic acid (BNA)
  modified_base (2)..(2): bicyclic nucleic acid (BNA)
  source: /note="3' tri-ethylene glycol (TEG)"
ctguccaag

SEQ ID NO: 9158 - DNA, 8 bp, Artificial Sequence
  source: /note="Description of Artificial Sequence: Synthetic oligonucleotide"
  source: /note="Description of Combined DNA/RNA Molecule: Synthetic oligonucleotide"
  source: /note="DNA/RNA"
  source: /note="5' tri-ethylene glycol (TEG)"
  modified_base (1)..(1): bicyclic nucleic acid (BNA)
  modified_base (2)..(2): bicyclic nucleic acid (BNA)
  source: /note="3' tri-ethylene glycol (TEG)"
ctguccaa

SEQ ID NO: 9159 - DNA, 20 bp, Artificial Sequence
  source: /note="Description of Artificial Sequence: Synthetic oligonucleotide"
  source: /note="Description of Combined DNA/RNA Molecule: Synthetic oligonucleotide"
  source: /note="DNA/RNA"
  source: /note="5' tri-ethylene glycol (TEG)"
  modified_base (1)..(1): bicyclic nucleic acid (BNA)
  modified_base (2)..(2): bicyclic nucleic acid (BNA)
  source: /note="3' tri-ethylene glycol (TEG)"
gtucuguccaagcccgguug

SEQ ID NO: 9160 - DNA, 19 bp, Artificial Sequence
  source: /note="Description of Artificial Sequence: Synthetic oligonucleotide"
  source: /note="Description of Combined DNA/RNA Molecule: Synthetic oligonucleotide"
  source: /note="DNA/RNA"
  source: /note="5' tri-ethylene glycol (TEG)"
  modified_base (1)..(1): bicyclic nucleic acid (BNA)
  modified_base (2)..(2): bicyclic nucleic acid (BNA)
  source: /note="3' tri-ethylene glycol (TEG)"
gtucuguccaagcccgguu

SEQ ID NO: 9161 - DNA, 18 bp, Artificial Sequence
  source: /note="Description of Artificial Sequence: Synthetic oligonucleotide"
  source: /note="Description of Combined DNA/RNA Molecule: Synthetic oligonucleotide"
  source: /note="DNA/RNA"
  source: /note="5' tri-ethylene glycol (TEG)"
  modified_base (1)..(1): bicyclic nucleic acid (BNA)
  modified_base (2)..(2): bicyclic nucleic acid (BNA)
  source: /note="3' tri-ethylene glycol (TEG)"
gtucuguccaagcccggu

SEQ ID NO: 9162 - DNA, 17 bp, Artificial Sequence
  source: /note="Description of Artificial Sequence: Synthetic oligonucleotide"
  source: /note="Description of Combined DNA/RNA Molecule: Synthetic oligonucleotide"
  source: /note="DNA/RNA"
  source: /note="5' tri-ethylene glycol (TEG)"
  modified_base (1)..(1): bicyclic nucleic acid (BNA)
  modified_base (2)..(2): bicyclic nucleic acid (BNA)
  source: /note="3' tri-ethylene glycol (TEG)"
gtucuguccaagcccgg

SEQ ID NO: 9163 - DNA, 16 bp, Artificial Sequence
  source: /note="Description of Artificial Sequence: Synthetic oligonucleotide"
  source: /note="Description of Combined DNA/RNA Molecule: Synthetic oligonucleotide"
  source: /note="DNA/RNA"
  source: /note="5' tri-ethylene glycol (TEG)"
  modified_base (1)..(1): bicyclic nucleic acid (BNA)
  modified_base (2)..(2): bicyclic nucleic acid (BNA)
  source: /note="3' tri-ethylene glycol (TEG)"
gtucuguccaagcccg

SEQ ID NO: 9164 - DNA, 15 bp, Artificial Sequence
  source: /note="Description of Artificial Sequence: Synthetic oligonucleotide"
  source: /note="Description of Combined DNA/RNA Molecule: Synthetic oligonucleotide"
  source: /note="DNA/RNA"
  source: /note="5' tri-ethylene glycol (TEG)"
  modified_base (1)..(1): bicyclic nucleic acid (BNA)
  modified_base (2)..(2): bicyclic nucleic acid (BNA)
  source: /note="3' tri-ethylene glycol (TEG)"
gtucuguccaagccc

SEQ ID NO: 9165 - DNA, 14 bp, Artificial Sequence
  source: /note="Description of Artificial Sequence: Synthetic oligonucleotide"
  source: /note="Description of Combined DNA/RNA Molecule: Synthetic oligonucleotide"
  source: /note="DNA/RNA"
  source: /note="5' tri-ethylene glycol (TEG)"
  modified_base (1)..(1): bicyclic nucleic acid (BNA)
  modified_base (2)..(2): bicyclic nucleic acid (BNA)
  source: /note="3' tri-ethylene glycol (TEG)"
gtucuguccaagcc

SEQ ID NO: 9166 - DNA, 13 bp, Artificial Sequence
  source: /note="Description of Artificial Sequence: Synthetic oligonucleotide"
  source: /note="Description of Combined DNA/RNA Molecule: Synthetic oligonucleotide"
  source: /note="DNA/RNA"
  source: /note="5' tri-ethylene glycol (TEG)"
  modified_base (1)..(1): bicyclic nucleic acid (BNA)
  modified_base (2)..(2): bicyclic nucleic acid (BNA)
  source: /note="3' tri-ethylene glycol (TEG)"
gtucuguccaagc

SEQ ID NO: 9167 - DNA, 12 bp, Artificial Sequence
  source: /note="Description of Artificial Sequence: Synthetic oligonucleotide"
  source: /note="Description of Combined DNA/RNA Molecule: Synthetic oligonucleotide"
  source: /note="DNA/RNA"
  source: /note="5' tri-ethylene glycol (TEG)"
  modified_base (1)..(1): bicyclic nucleic acid (BNA)
  modified_base (2)..(2): bicyclic nucleic acid (BNA)
  source: /note="3' tri-ethylene glycol (TEG)"
gtucuguccaag

SEQ ID NO: 9168 - DNA, 11 bp, Artificial Sequence
  source: /note="Description of Artificial Sequence: Synthetic oligonucleotide"
  source: /note="Description of Combined DNA/RNA Molecule: Synthetic oligonucleotide"
  source: /note="DNA/RNA"
  source: /note="5' tri-ethylene glycol (TEG)"
  modified_base (1)..(1): bicyclic nucleic acid (BNA)
  modified_base (2)..(2): bicyclic nucleic acid (BNA)
  source: /note="3' tri-ethylene glycol (TEG)"
gtucuguccaa

SEQ ID NO: 9169 - DNA, 10 bp, Artificial Sequence
  source: /note="Description of Artificial Sequence: Synthetic oligonucleotide"
  source: /note="Description of Combined DNA/RNA Molecule: Synthetic oligonucleotide"
  source: /note="DNA/RNA"
  source: /note="5' tri-ethylene glycol (TEG)"
  modified_base (1)..(1): bicyclic nucleic acid (BNA)
  modified_base (2)..(2): bicyclic nucleic acid (BNA)
  source: /note="3' tri-ethylene glycol (TEG)"
gtucugucca

SEQ ID NO: 9170 - DNA, 9 bp, Artificial Sequence
  source: /note="Description of Artificial Sequence: Synthetic oligonucleotide"
  source: /note="Description of Combined DNA/RNA Molecule: Synthetic oligonucleotide"
  source: /note="DNA/RNA"
  source: /note="5' tri-ethylene glycol (TEG)"
  modified_base (1)..(1): bicyclic nucleic acid (BNA)
  modified_base (2)..(2): bicyclic nucleic acid (BNA)
  source: /note="3' tri-ethylene glycol (TEG)"
gtucugucc

SEQ ID NO: 9171 - DNA, 8 bp, Artificial Sequence
  source: /note="Description of Artificial Sequence: Synthetic oligonucleotide"
  source: /note="Description of Combined DNA/RNA Molecule: Synthetic oligonucleotide"
  source: /note="DNA/RNA"
  source: /note="5' tri-ethylene glycol (TEG)"
  modified_base (1)..(1): bicyclic nucleic acid (BNA)
  modified_base (2)..(2): bicyclic nucleic acid (BNA)
  source: /note="3' tri-ethylene glycol (TEG)"
gtucuguc

SEQ ID NO: 9172 - RNA, 20 nt, Artificial Sequence
  source: /note="Description of Artificial Sequence: Synthetic oligonucleotide"
  source: /note="RNA"
  source: /note="5' tri-ethylene glycol (TEG)"
  modified_base (1)..(1): bicyclic nucleic acid (BNA)
  modified_base (2)..(2): bicyclic nucleic acid (BNA)
  source: /note="3' tri-ethylene glycol (TEG)"
aguucuguccaagcccgguu

SEQ ID NO: 9173 - RNA, 19 nt, Artificial Sequence
  source: /note="Description of Artificial Sequence: Synthetic oligonucleotide"
  source: /note="RNA"
  source: /note="5' tri-ethylene glycol (TEG)"
  modified_base (1)..(1): bicyclic nucleic acid (BNA)
  modified_base (2)..(2): bicyclic nucleic acid (BNA)
  source: /note="3' tri-ethylene glycol (TEG)"
aguucuguccaagcccggu

SEQ ID NO: 9174 - RNA, 18 nt, Artificial Sequence
  source: /note="Description of Artificial Sequence: Synthetic oligonucleotide"
  source: /note="RNA"
  source: /note="5' tri-ethylene glycol (TEG)"
  modified_base (1)..(1): bicyclic nucleic acid (BNA)
  modified_base (2)..(2): bicyclic nucleic acid (BNA)
  source: /note="3' tri-ethylene glycol (TEG)"
aguucuguccaagcccgg

SEQ ID NO: 9175 - RNA, 17 nt, Artificial Sequence
  source: /note="Description of Artificial Sequence: Synthetic oligonucleotide"
  source: /note="RNA"
  source: /note="5' tri-ethylene glycol (TEG)"
  modified_base (1)..(1): bicyclic nucleic acid (BNA)
  modified_base (2)..(2): bicyclic nucleic acid (BNA)
  source: /note="3' tri-ethylene glycol (TEG)"
aguucuguccaagcccg

SEQ ID NO: 9176 - RNA, 16 nt, Artificial Sequence
  source: /note="Description of Artificial Sequence: Synthetic oligonucleotide"
  source: /note="RNA"
  source: /note="5' tri-ethylene glycol (TEG)"
  modified_base (1)..(1): bicyclic nucleic acid (BNA)
  modified_base (2)..(2): bicyclic nucleic acid (BNA)
  source: /note="3' tri-ethylene glycol (TEG)"
aguucuguccaagccc

SEQ ID NO: 9177 - RNA, 15 nt, Artificial Sequence
  source: /note="Description of Artificial Sequence: Synthetic oligonucleotide"
  source: /note="RNA"
  source: /note="5' tri-ethylene glycol (TEG)"
  modified_base (1)..(1): bicyclic nucleic acid (BNA)
  modified_base (2)..(2): bicyclic nucleic acid (BNA)
  source: /note="3' tri-ethylene glycol (TEG)"
aguucuguccaagcc

SEQ ID NO: 9178 - RNA, 14 nt, Artificial Sequence
  source: /note="Description of Artificial Sequence: Synthetic oligonucleotide"
  source: /note="RNA"
  source: /note="5' tri-ethylene glycol (TEG)"
  modified_base (1)..(1): bicyclic nucleic acid (BNA)
  modified_base (2)..(2): bicyclic nucleic acid (BNA)
  source: /note="3' tri-ethylene glycol (TEG)"
aguucuguccaagc

SEQ ID NO: 9179 - RNA, 13 nt, Artificial Sequence
  source: /note="Description of Artificial Sequence: Synthetic oligonucleotide"
  source: /note="RNA"
  source: /note="5' tri-ethylene glycol (TEG)"
  modified_base (1)..(1): bicyclic nucleic acid (BNA)
  modified_base (2)..(2): bicyclic nucleic acid (BNA)
  source: /note="3' tri-ethylene glycol (TEG)"
aguucuguccaag

SEQ ID NO: 9180 - RNA, 12 nt, Artificial Sequence
  source: /note="Description of Artificial Sequence: Synthetic oligonucleotide"
  source: /note="RNA"
  source: /note="5' tri-ethylene glycol (TEG)"
  modified_base (1)..(1): bicyclic nucleic acid (BNA)
  modified_base (2)..(2): bicyclic nucleic acid (BNA)
  source: /note="3' tri-ethylene glycol (TEG)"
aguucuguccaa

SEQ ID NO: 9181 - RNA, 11 nt, Artificial Sequence
  source: /note="Description of Artificial Sequence: Synthetic oligonucleotide"
  source: /note="RNA"
  source: /note="5' tri-ethylene glycol (TEG)"
  modified_base (1)..(1): bicyclic nucleic acid (BNA)
  modified_base (2)..(2): bicyclic nucleic acid (BNA)
  source: /note="3' tri-ethylene glycol (TEG)"
aguucugucca

SEQ ID NO: 9182 - RNA, 10 nt, Artificial Sequence
  source: /note="Description of Artificial Sequence: Synthetic oligonucleotide"
  source: /note="RNA"
  source: /note="5' tri-ethylene glycol (TEG)"
  modified_base (1)..(1): bicyclic nucleic acid (BNA)
  modified_base (2)..(2): bicyclic nucleic acid (BNA)
  source: /note="3' tri-ethylene glycol (TEG)"
aguucugucc

SEQ ID NO: 9183 - RNA, 9 nt, Artificial Sequence
  source: /note="Description of Artificial Sequence: Synthetic oligonucleotide"
  source: /note="RNA"
  source: /note="5' tri-ethylene glycol (TEG)"
  modified_base (1)..(1): bicyclic nucleic acid (BNA)
  modified_base (2)..(2): bicyclic nucleic acid (BNA)
  source: /note="3' tri-ethylene glycol (TEG)"
aguucuguc

SEQ ID NO: 9184 - RNA, 8 nt, Artificial Sequence
  source: /note="Description of Artificial Sequence: Synthetic oligonucleotide"
  source: /note="RNA"
  source: /note="5' tri-ethylene glycol (TEG)"
  modified_base (1)..(1): bicyclic nucleic acid (BNA)
  modified_base (2)..(2): bicyclic nucleic acid (BNA)
  source: /note="3' tri-ethylene glycol (TEG)"
aguucugu

SEQ ID NO: 9185 - RNA, 20 nt, Artificial Sequence
  source: /note="Description of Artificial Sequence: Synthetic oligonucleotide"
  source: /note="RNA"
  source: /note="5' tri-ethylene glycol (TEG)"
  modified_base (1)..(1): bicyclic nucleic acid (BNA)
  modified_base (2)..(2): bicyclic nucleic acid (BNA)
  source: /note="3' tri-ethylene glycol (TEG)"
aaguucuguccaagcccggu

SEQ ID NO: 9186 - RNA, 19 nt, Artificial Sequence
  source: /note="Description of Artificial Sequence: Synthetic oligonucleotide"
  source: /note="RNA"
  source: /note="5' tri-ethylene glycol (TEG)"
  modified_base (1)..(1): bicyclic nucleic acid (BNA)
  modified_base (2)..(2): bicyclic nucleic acid (BNA)
  source: /note="3' tri-ethylene glycol (TEG)"
aaguucuguccaagcccgg

SEQ ID NO: 9187 - RNA, 18 nt, Artificial Sequence
  source: /note="Description of Artificial Sequence: Synthetic oligonucleotide"
  source: /note="RNA"
  source: /note="5' tri-ethylene glycol (TEG)"
  modified_base (1)..(1): bicyclic nucleic acid (BNA)
  modified_base (2)..(2): bicyclic nucleic acid (BNA)
  source: /note="3' tri-ethylene glycol (TEG)"
aaguucuguccaagcccg

SEQ ID NO: 9188 - RNA, 17 nt, Artificial Sequence
  source: /note="Description of Artificial Sequence: Synthetic oligonucleotide"
  source: /note="RNA"
  source: /note="5' tri-ethylene glycol (TEG)"
  modified_base (1)..(1): bicyclic nucleic acid (BNA)
  modified_base (2)..(2): bicyclic nucleic acid (BNA)
  source: /note="3' tri-ethylene glycol (TEG)"
aaguucuguccaagccc

SEQ ID NO: 9189 - RNA, 16 nt, Artificial Sequence
  source: /note="Description of Artificial Sequence: Synthetic oligonucleotide"
  source: /note="RNA"
  source: /note="5' tri-ethylene glycol (TEG)"
  modified_base (1)..(1): bicyclic nucleic acid (BNA)
  modified_base (2)..(2): bicyclic nucleic acid (BNA)
  source: /note="3' tri-ethylene glycol (TEG)"
aaguucuguccaagcc

SEQ ID NO: 9190 - RNA, 15 nt, Artificial Sequence
  source: /note="Description of Artificial Sequence: Synthetic oligonucleotide"
  source: /note="RNA"
  source: /note="5' tri-ethylene glycol (TEG)"
  modified_base (1)..(1): bicyclic nucleic acid (BNA)
  modified_base (2)..(2): bicyclic nucleic acid (BNA)
  source: /note="3' tri-ethylene glycol (TEG)"
aaguucuguccaagc

SEQ ID NO: 9191 - RNA, 14 nt, Artificial Sequence
  source: /note="Description of Artificial Sequence: Synthetic oligonucleotide"
  source: /note="RNA"
  source: /note="5' tri-ethylene glycol (TEG)"
  modified_base (1)..(1): bicyclic nucleic acid (BNA)
  modified_base (2)..(2): bicyclic nucleic acid (BNA)
  source: /note="3' tri-ethylene glycol (TEG)"
aaguucuguccaag

SEQ ID NO: 9192 - RNA, 13 nt, Artificial Sequence
  source: /note="Description of Artificial Sequence: Synthetic oligonucleotide"
  source: /note="RNA"
  source: /note="5' tri-ethylene glycol (TEG)"
  modified_base (1)..(1): bicyclic nucleic acid (BNA)
  modified_base (2)..(2): bicyclic nucleic acid (BNA)
  source: /note="3' tri-ethylene glycol (TEG)"
aaguucuguccaa

SEQ ID NO: 9193 - RNA, 12 nt, Artificial Sequence
  source: /note="Description of Artificial Sequence: Synthetic oligonucleotide"
  source: /note="RNA"
  source: /note="5' tri-ethylene glycol (TEG)"
  modified_base (1)..(1): bicyclic nucleic acid (BNA)
  modified_base (2)..(2): bicyclic nucleic acid (BNA)
  source: /note="3' tri-ethylene glycol (TEG)"
aaguucugucca

SEQ ID NO: 9194 - RNA, 11 nt, Artificial Sequence
  source: /note="Description of Artificial Sequence: Synthetic oligonucleotide"
  source: /note="RNA"
  source: /note="5' tri-ethylene glycol (TEG)"
  modified_base (1)..(1): bicyclic nucleic acid (BNA)
  modified_base (2)..(2): bicyclic nucleic acid (BNA)
  source: /note="3' tri-ethylene glycol (TEG)"
aaguucugucc

SEQ ID NO: 9195 - RNA, 10 nt, Artificial Sequence
  source: /note="Description of Artificial Sequence: Synthetic oligonucleotide"
  source: /note="RNA"
  source: /note="5' tri-ethylene glycol (TEG)"
  modified_base (1)..(1): bicyclic nucleic acid (BNA)
  modified_base (2)..(2): bicyclic nucleic acid (BNA)
  source: /note="3' tri-ethylene glycol (TEG)"
aaguucuguc

SEQ ID NO: 9196 - RNA, 9 nt, Artificial Sequence
  source: /note="Description of Artificial Sequence: Synthetic oligonucleotide"
  source: /note="RNA"
  source: /note="5' tri-ethylene glycol (TEG)"
  modified_base (1)..(1): bicyclic nucleic acid (BNA)
  modified_base (2)..(2): bicyclic nucleic acid (BNA)
  source: /note="3' tri-ethylene glycol (TEG)"
aaguucugu

SEQ ID NO: 9197 - RNA, 8 nt, Artificial Sequence
  source: /note="Description of Artificial Sequence: Synthetic oligonucleotide"
  source: /note="RNA"
  source: /note="5' tri-ethylene glycol (TEG)"
  modified_base (1)..(1): bicyclic nucleic acid (BNA)
  modified_base (2)..(2): bicyclic nucleic acid (BNA)
  source: /note="3' tri-ethylene glycol (TEG)"
aaguucug

SEQ ID NO: 9198 - DNA, 20 bp, Artificial Sequence
  source: /note="Description of Artificial Sequence: Synthetic oligonucleotide"
  source: /note="Description of Combined DNA/RNA Molecule: Synthetic oligonucleotide"
  source: /note="DNA/RNA"
  source: /note="5' tri-ethylene glycol (TEG)"
  modified_base (1)..(1): bicyclic nucleic acid (BNA)
  modified_base (2)..(2): bicyclic nucleic acid (BNA)
  source: /note="3' tri-ethylene glycol (TEG)"
taaguucuguccaagcccgg

SEQ ID NO: 9199 - DNA, 19 bp, Artificial Sequence
  source: /note="Description of Artificial Sequence: Synthetic oligonucleotide"
  source: /note="Description of Combined DNA/RNA Molecule: Synthetic oligonucleotide"
  source: /note="DNA/RNA"
  source: /note="5' tri-ethylene glycol (TEG)"
  modified_base (1)..(1): bicyclic nucleic acid (BNA)
  modified_base (2)..(2): bicyclic nucleic acid (BNA)
  source: /note="3' tri-ethylene glycol (TEG)"
taaguucuguccaagcccg

SEQ ID NO: 9200 - DNA, 18 bp, Artificial Sequence
  source: /note="Description of Artificial Sequence: Synthetic oligonucleotide"
  source: /note="Description of Combined DNA/RNA Molecule: Synthetic oligonucleotide"
  source: /note="DNA/RNA"
  source: /note="5' tri-ethylene glycol (TEG)"
  modified_base (1)..(1): bicyclic nucleic acid (BNA)
  modified_base (2)..(2): bicyclic nucleic acid (BNA)
  source: /note="3' tri-ethylene glycol (TEG)"
taaguucuguccaagccc

SEQ ID NO: 9201 - DNA, 17 bp, Artificial Sequence
  source: /note="Description of Artificial Sequence: Synthetic oligonucleotide"
  source: /note="Description of Combined DNA/RNA Molecule: Synthetic oligonucleotide"
  source: /note="DNA/RNA"
  source: /note="5' tri-ethylene glycol (TEG)"
  modified_base (1)..(1): bicyclic nucleic acid (BNA)
  modified_base (2)..(2): bicyclic nucleic acid (BNA)
  source: /note="3' tri-ethylene glycol (TEG)"
taaguucuguccaagcc

SEQ ID NO: 9202 - DNA, 16 bp, Artificial Sequence
  source: /note="Description of Artificial Sequence: Synthetic oligonucleotide"
  source: /note="Description of Combined DNA/RNA Molecule: Synthetic oligonucleotide"
  source: /note="DNA/RNA"
  source: /note="5' tri-ethylene glycol (TEG)"
  modified_base (1)..(1): bicyclic nucleic acid (BNA)
  modified_base (2)..(2): bicyclic nucleic acid (BNA)
  source: /note="3' tri-ethylene glycol (TEG)"
taaguucuguccaagc

SEQ ID NO: 9203 - DNA, 14 bp, Artificial Sequence
  source: /note="Description of Artificial Sequence: Synthetic oligonucleotide"
  source: /note="Description of Combined DNA/RNA Molecule: Synthetic oligonucleotide"
  source: /note="DNA/RNA"
  source: /note="5' tri-ethylene glycol (TEG)"
  modified_base (1)..(1): bicyclic nucleic acid (BNA)
  modified_base (2)..(2): bicyclic nucleic acid (BNA)
  source: /note="3' tri-ethylene glycol (TEG)"
taaguucuguccaa

SEQ ID NO: 9204 - DNA, 13 bp, Artificial Sequence
  source: /note="Description of Artificial Sequence: Synthetic oligonucleotide"
  source: /note="Description of Combined DNA/RNA Molecule: Synthetic oligonucleotide"
  source: /note="DNA/RNA"
  source: /note="5' tri-ethylene glycol (TEG)"
  modified_base (1)..(1): bicyclic nucleic acid (BNA)
  modified_base (2)..(2): bicyclic nucleic acid (BNA)
  source: /note="3' tri-ethylene glycol (TEG)"
taaguucugucca

SEQ ID NO: 9205 - DNA, 12 bp, Artificial Sequence
  source: /note="Description of Artificial Sequence: Synthetic oligonucleotide"
  source: /note="Description of Combined DNA/RNA Molecule: Synthetic oligonucleotide"
  source: /note="DNA/RNA"
  source: /note="5' tri-ethylene glycol (TEG)"
  modified_base (1)..(1): bicyclic nucleic acid (BNA)
  modified_base (2)..(2): bicyclic nucleic acid (BNA)
  source: /note="3' tri-ethylene glycol (TEG)"
taaguucugucc

SEQ ID NO: 9206 - DNA, 11 bp, Artificial Sequence
  source: /note="Description of Artificial Sequence: Synthetic oligonucleotide"
  source: /note="Description of Combined DNA/RNA Molecule: Synthetic oligonucleotide"
  source: /note="DNA/RNA"
  source: /note="5' tri-ethylene glycol (TEG)"
  modified_base (1)..(1): bicyclic nucleic acid (BNA)
  modified_base (2)..(2): bicyclic nucleic acid (BNA)
  source: /note="3' tri-ethylene glycol (TEG)"
taaguucuguc

SEQ ID NO: 9207 - DNA, 10 bp, Artificial Sequence
  source: /note="Description of Artificial Sequence: Synthetic oligonucleotide"
  source: /note="Description of Combined DNA/RNA Molecule: Synthetic oligonucleotide"
  source: /note="DNA/RNA"
  source: /note="5' tri-ethylene glycol (TEG)"
  modified_base (1)..(1): bicyclic nucleic acid (BNA)
  modified_base (2)..(2): bicyclic nucleic acid (BNA)
  source: /note="3' tri-ethylene glycol (TEG)"
taaguucugu

SEQ ID NO: 9208 - DNA, 9 bp, Artificial Sequence
  source: /note="Description of Artificial Sequence: Synthetic oligonucleotide"
  source: /note="Description of Combined DNA/RNA Molecule: Synthetic oligonucleotide"
  source: /note="DNA/RNA"
  source: /note="5' tri-ethylene glycol (TEG)"
  modified_base (1)..(1): bicyclic nucleic acid (BNA)
  modified_base (2)..(2): bicyclic nucleic acid (BNA)
  source: /note="3' tri-ethylene glycol (TEG)"
taaguucug

SEQ ID NO: 9209 - DNA, 8 bp, Artificial Sequence
  source: /note="Description of Artificial Sequence: Synthetic oligonucleotide"
  source: /note="Description of Combined DNA/RNA Molecule: Synthetic oligonucleotide"
  source: /note="DNA/RNA"
  source: /note="5' tri-ethylene glycol (TEG)"
  modified_base (1)..(1): bicyclic nucleic acid (BNA)
  modified_base (2)..(2): bicyclic nucleic acid (BNA)
  source: /note="3' tri-ethylene glycol (TEG)"
taaguucu

SEQ ID NO: 9210 - DNA, 20 bp, Artificial Sequence
  source: /note="Description of Artificial Sequence: Synthetic oligonucleotide"
  source: /note="Description of Combined DNA/RNA Molecule: Synthetic oligonucleotide"
  source: /note="DNA/RNA"
  source: /note="5' tri-ethylene glycol (TEG)"
  modified_base (1)..(1): bicyclic nucleic acid (BNA)
  modified_base (2)..(2): bicyclic nucleic acid (BNA)
  source: /note="3' tri-ethylene glycol (TEG)"
gtaaguucuguccaagcccg

SEQ ID NO: 9211 - DNA, 19 bp, Artificial Sequence
  source: /note="Description of Artificial Sequence: Synthetic oligonucleotide"
  source: /note="Description of Combined DNA/RNA Molecule: Synthetic oligonucleotide"
  source: /note="DNA/RNA"
  source: /note="5' tri-ethylene glycol (TEG)"
  modified_base (1)..(1): bicyclic nucleic acid (BNA)
  modified_base (2)..(2): bicyclic nucleic acid (BNA)
  source: /note="3' tri-ethylene glycol (TEG)"
gtaaguucuguccaagccc

SEQ ID NO: 9212 - DNA, 17 bp, Artificial Sequence
  source: /note="Description of Artificial Sequence: Synthetic oligonucleotide"
  source: /note="Description of Combined DNA/RNA Molecule: Synthetic oligonucleotide"
  source: /note="DNA/RNA"
  source: /note="5' tri-ethylene glycol (TEG)"
  modified_base (1)..(1): bicyclic nucleic acid (BNA)
  modified_base (2)..(2): bicyclic nucleic acid (BNA)
  source: /note="3' tri-ethylene glycol (TEG)"
gtaaguucuguccaagc

SEQ ID NO: 9213 - DNA, 16 bp, Artificial Sequence
  source: /note="Description of Artificial Sequence: Synthetic oligonucleotide"
  source: /note="Description of Combined DNA/RNA Molecule: Synthetic oligonucleotide"
  source: /note="DNA/RNA"
  source: /note="5' tri-ethylene glycol (TEG)"
  modified_base (1)..(1): bicyclic nucleic acid (BNA)
  modified_base (2)..(2): bicyclic nucleic acid (BNA)
  source: /note="3' tri-ethylene glycol (TEG)"
gtaaguucuguccaag

SEQ ID NO: 9214 - DNA, 15 bp, Artificial Sequence
  source: /note="Description of Artificial Sequence: Synthetic oligonucleotide"
  source: /note="Description of Combined DNA/RNA Molecule: Synthetic oligonucleotide"
  source: /note="DNA/RNA"
  source: /note="5' tri-ethylene glycol (TEG)"
  modified_base (1)..(1): bicyclic nucleic acid (BNA)
  modified_base (2)..(2): bicyclic nucleic acid (BNA)
  source: /note="3' tri-ethylene glycol (TEG)"
gtaaguucuguccaa

SEQ ID NO: 9215 - DNA, 14 bp, Artificial Sequence
  source: /note="Description of Artificial Sequence: Synthetic oligonucleotide"
  source: /note="Description of Combined DNA/RNA Molecule: Synthetic oligonucleotide"
  source: /note="DNA/RNA"
  source: /note="5' tri-ethylene glycol (TEG)"
  modified_base (1)..(1): bicyclic nucleic acid (BNA)
  modified_base (2)..(2): bicyclic nucleic acid (BNA)
  source: /note="3' tri-ethylene glycol (TEG)"
gtaaguucugucca

SEQ ID NO: 9216 - DNA, 13 bp, Artificial Sequence
  source: /note="Description of Artificial Sequence: Synthetic oligonucleotide"
  source: /note="Description of Combined DNA/RNA Molecule: Synthetic oligonucleotide"
  source: /note="DNA/RNA"
  source: /note="5' tri-ethylene glycol (TEG)"
  modified_base (1)..(1): bicyclic nucleic acid (BNA)
  modified_base (2)..(2): bicyclic nucleic acid (BNA)
  source: /note="3' tri-ethylene glycol (TEG)"
gtaaguucugucc

SEQ ID NO: 9217 - DNA, 12 bp, Artificial Sequence
  source: /note="Description of Artificial Sequence: Synthetic oligonucleotide"
  source: /note="Description of Combined DNA/RNA Molecule: Synthetic oligonucleotide"
  source: /note="DNA/RNA"
  source: /note="5' tri-ethylene glycol (TEG)"
  modified_base (1)..(1): bicyclic nucleic acid (BNA)
  modified_base (2)..(2): bicyclic nucleic acid (BNA)
  source: /note="3' tri-ethylene glycol (TEG)"
gtaaguucuguc

SEQ ID NO: 9218 - DNA, 11 bp, Artificial Sequence
  source: /note="Description of Artificial Sequence: Synthetic oligonucleotide"
  source: /note="Description of Combined DNA/RNA Molecule: Synthetic oligonucleotide"
  source: /note="DNA/RNA"
  source: /note="5' tri-ethylene glycol (TEG)"
  modified_base (1)..(1): bicyclic nucleic acid (BNA)
  modified_base (2)..(2): bicyclic nucleic acid (BNA)
  source: /note="3' tri-ethylene glycol (TEG)"
gtaaguucugu

SEQ ID NO: 9219 - DNA, 10 bp, Artificial Sequence
  source: /note="Description of Artificial Sequence: Synthetic oligonucleotide"
  source: /note="Description of Combined DNA/RNA Molecule: Synthetic oligonucleotide"
  source: /note="DNA/RNA"
  source: /note="5' tri-ethylene glycol (TEG)"
  modified_base (1)..(1): bicyclic nucleic acid (BNA)
  modified_base (2)..(2): bicyclic nucleic acid (BNA)
  source: /note="3' tri-ethylene glycol (TEG)"
gtaaguucug

SEQ ID NO: 9220 - DNA, 9 bp, Artificial Sequence
  source: /note="Description of Artificial Sequence: Synthetic oligonucleotide"
  source: /note="Description of Combined DNA/RNA Molecule: Synthetic oligonucleotide"
  source: /note="DNA/RNA"
  source: /note="5' tri-ethylene glycol (TEG)"
  modified_base (1)..(1): bicyclic nucleic acid (BNA)
  modified_base (2)..(2): bicyclic nucleic acid (BNA)
  source: /note="3' tri-ethylene glycol (TEG)"
gtaaguucu

SEQ ID NO: 9221 - DNA, 8 bp, Artificial Sequence
  source: /note="Description of Artificial Sequence: Synthetic oligonucleotide"
  source: /note="Description of Combined DNA/RNA Molecule: Synthetic oligonucleotide"
  source: /note="DNA/RNA"
  source: /note="5' tri-ethylene glycol (TEG)"
  modified_base (1)..(1): bicyclic nucleic acid (BNA)
  modified_base (2)..(2): bicyclic nucleic acid (BNA)
  source: /note="3' tri-ethylene glycol (TEG)"
gtaaguuc

SEQ ID NO: 9222 - RNA, 20 nt, Artificial Sequence
  source: /note="Description of Artificial Sequence: Synthetic oligonucleotide"
  source: /note="RNA"
  source: /note="5' tri-ethylene glycol (TEG)"
  modified_base (1)..(1): bicyclic nucleic acid (BNA)
  modified_base (2)..(2): bicyclic nucleic acid (BNA)
  source: /note="3' tri-ethylene glycol (TEG)"
gguaaguucuguccaagccc

SEQ ID NO: 9223 - RNA, 19 nt, Artificial Sequence
  source: /note="Description of Artificial Sequence: Synthetic oligonucleotide"
  source: /note="RNA"
  source: /note="5' tri-ethylene glycol (TEG)"
  modified_base (1)..(1): bicyclic nucleic acid (BNA)
  modified_base (2)..(2): bicyclic nucleic acid (BNA)
  source: /note="3' tri-ethylene glycol (TEG)"
gguaaguucuguccaagcc

SEQ ID NO: 9224 - RNA, 17 nt, Artificial Sequence
  source: /note="Description of Artificial Sequence: Synthetic oligonucleotide"
  source: /note="RNA"
  source: /note="5' tri-ethylene glycol (TEG)"
  modified_base (1)..(1): bicyclic nucleic acid (BNA)
  modified_base (2)..(2): bicyclic nucleic acid (BNA)
  source: /note="3' tri-ethylene glycol (TEG)"
gguaaguucuguccaag

SEQ ID NO: 9225 - RNA, 16 nt, Artificial Sequence
  source: /note="Description of Artificial Sequence: Synthetic oligonucleotide"
  source: /note="RNA"
  source: /note="5' tri-ethylene glycol (TEG)"
  modified_base (1)..(1): bicyclic nucleic acid (BNA)
  modified_base (2)..(2): bicyclic nucleic acid (BNA)
  source: /note="3' tri-ethylene glycol (TEG)"
gguaaguucuguccaa

SEQ ID NO: 9226 - RNA, 15 nt, Artificial Sequence
  source: /note="Description of Artificial Sequence: Synthetic oligonucleotide"
  source: /note="RNA"
  source: /note="5' tri-ethylene glycol (TEG)"
  modified_base (1)..(1): bicyclic nucleic acid (BNA)
  modified_base (2)..(2): bicyclic nucleic acid (BNA)
  source: /note="3' tri-ethylene glycol (TEG)"
gguaaguucugucca

SEQ ID NO: 9227 - RNA, 14 nt, Artificial Sequence
  source: /note="Description of Artificial Sequence: Synthetic oligonucleotide"
  source: /note="RNA"
  source: /note="5' tri-ethylene glycol (TEG)"
  modified_base (1)..(1): bicyclic nucleic acid (BNA)
  modified_base (2)..(2): bicyclic nucleic acid (BNA)
  source: /note="3' tri-ethylene glycol (TEG)"
gguaaguucugucc

SEQ ID NO: 9228 - RNA, 13 nt, Artificial Sequence
  source: /note="Description of Artificial Sequence: Synthetic oligonucleotide"
  source: /note="RNA"
  source: /note="5' tri-ethylene glycol (TEG)"
  modified_base (1)..(1): bicyclic nucleic acid (BNA)
  modified_base (2)..(2): bicyclic nucleic acid (BNA)
  source: /note="3' tri-ethylene glycol (TEG)"
gguaaguucuguc

SEQ ID NO: 9229 - RNA, 12 nt, Artificial Sequence
  source: /note="Description of Artificial Sequence: Synthetic oligonucleotide"
  source: /note="RNA"
  source: /note="5' tri-ethylene glycol (TEG)"
  modified_base (1)..(1): bicyclic nucleic acid (BNA)
  modified_base (2)..(2): bicyclic nucleic acid (BNA)
  source: /note="3' tri-ethylene glycol (TEG)"
gguaaguucugu

SEQ ID NO: 9230 - RNA, 11 nt, Artificial Sequence
  source: /note="Description of Artificial Sequence: Synthetic oligonucleotide"
  source: /note="RNA"
  source: /note="5' tri-ethylene glycol (TEG)"
  modified_base (1)..(1): bicyclic nucleic acid (BNA)
  modified_base (2)..(2): bicyclic nucleic acid (BNA)
  source: /note="3' tri-ethylene glycol (TEG)"
gguaaguucug

SEQ ID NO: 9231 - RNA, 10 nt, Artificial Sequence
  source: /note="Description of Artificial Sequence: Synthetic oligonucleotide"
  source: /note="RNA"
  source: /note="5' tri-ethylene glycol (TEG)"
  modified_base (1)..(1): bicyclic nucleic acid (BNA)
  modified_base (2)..(2): bicyclic nucleic acid (BNA)
  source: /note="3' tri-ethylene glycol (TEG)"
gguaaguucu

SEQ ID NO: 9232 - RNA, 9 nt, Artificial Sequence
  source: /note="Description of Artificial Sequence: Synthetic oligonucleotide"
  source: /note="RNA"
  source: /note="5' tri-ethylene glycol (TEG)"
  modified_base (1)..(1): bicyclic nucleic acid (BNA)
  modified_base (2)..(2): bicyclic nucleic acid (BNA)
  source: /note="3' tri-ethylene glycol (TEG)"
gguaaguuc

SEQ ID NO: 9233 - RNA, 8 nt, Artificial Sequence
  source: /note="Description of Artificial Sequence: Synthetic oligonucleotide"
  source: /note="RNA"
  source: /note="5' tri-ethylene glycol (TEG)"
  modified_base (1)..(1): bicyclic nucleic acid (BNA)
  modified_base (2)..(2): bicyclic nucleic acid (BNA)
  source: /note="3' tri-ethylene glycol (TEG)"
gguaaguu

SEQ ID NO: 9234 - RNA, 20 nt, Artificial Sequence
  source: /note="Description of Artificial Sequence: Synthetic oligonucleotide"
  source: /note="RNA"
  source: /note="5' tri-ethylene glycol (TEG)"
  modified_base (1)..(1): bicyclic nucleic acid (BNA)
  modified_base (2)..(2): bicyclic nucleic acid (BNA)
  source: /note="3' tri-ethylene glycol (TEG)"
cgguaaguucuguccaagcc

SEQ ID NO: 9235 - RNA, 19 nt, Artificial Sequence
  source: /note="Description of Artificial Sequence: Synthetic oligonucleotide"
  source: /note="RNA"
  source: /note="5' tri-ethylene glycol (TEG)"
  modified_base (1)..(1): bicyclic nucleic acid (BNA)
  modified_base (2)..(2): bicyclic nucleic acid (BNA)
  source: /note="3' tri-ethylene glycol (TEG)"
cgguaaguucuguccaagc

SEQ ID NO: 9236 - RNA, 18 nt, Artificial Sequence
  source: /note="Description of Artificial Sequence: Synthetic oligonucleotide"
  source: /note="RNA"
  source: /note="5' tri-ethylene glycol (TEG)"
  modified_base (1)..(1): bicyclic nucleic acid (BNA)
  modified_base (2)..(2): bicyclic nucleic acid (BNA)
  source: /note="3' tri-ethylene glycol (TEG)"
cgguaaguucuguccaag

SEQ ID NO: 9237 - RNA, 17 nt, Artificial Sequence
  source: /note="Description of Artificial Sequence: Synthetic oligonucleotide"
  source: /note="RNA"
  source: /note="5' tri-ethylene glycol (TEG)"
  modified_base (1)..(1): bicyclic nucleic acid (BNA)
  modified_base (2)..(2): bicyclic nucleic acid (BNA)
  source: /note="3' tri-ethylene glycol (TEG)"
cgguaaguucuguccaa

SEQ ID NO: 9238 - RNA, 16 nt, Artificial Sequence
  source: /note="Description of Artificial Sequence: Synthetic oligonucleotide"
  source: /note="RNA"
  source: /note="5' tri-ethylene glycol (TEG)"
  modified_base (1)..(1): bicyclic nucleic acid (BNA)
  modified_base (2)..(2): bicyclic nucleic acid (BNA)
  source: /note="3' tri-ethylene glycol (TEG)"
cgguaaguucugucca

SEQ ID NO: 9239 - RNA, 15 nt, Artificial Sequence
  source: /note="Description of Artificial Sequence: Synthetic oligonucleotide"
  source: /note="RNA"
  source: /note="5' tri-ethylene glycol (TEG)"
  modified_base (1)..(1): bicyclic nucleic acid (BNA)
  modified_base (2)..(2): bicyclic nucleic acid (BNA)
  source: /note="3' tri-ethylene glycol (TEG)"
cgguaaguucugucc

SEQ ID NO: 9240 - RNA, 14 nt, Artificial Sequence
  source: /note="Description of Artificial Sequence: Synthetic oligonucleotide"
  source: /note="RNA"
  source: /note="5' tri-ethylene glycol (TEG)"
  modified_base (1)..(1): bicyclic nucleic acid (BNA)
  modified_base (2)..(2): bicyclic nucleic acid (BNA)
  source: /note="3' tri-ethylene glycol (TEG)"
cgguaaguucuguc

SEQ ID NO: 9241 - RNA, 13 nt, Artificial Sequence
  source: /note="Description of Artificial Sequence: Synthetic oligonucleotide"
  source: /note="RNA"
  source: /note="5' tri-ethylene glycol (TEG)"
  modified_base (1)..(1): bicyclic nucleic acid (BNA)
  modified_base (2)..(2): bicyclic nucleic acid (BNA)
  source: /note="3' tri-ethylene glycol (TEG)"
cgguaaguucugu

SEQ ID NO: 9242 - RNA, 12 nt, Artificial Sequence
  source: /note="Description of Artificial Sequence: Synthetic oligonucleotide"
  source: /note="RNA"
  source: /note="5' tri-ethylene glycol (TEG)"
  modified_base (1)..(1): bicyclic nucleic acid (BNA)
  modified_base (2)..(2): bicyclic nucleic acid (BNA)
  source: /note="3' tri-ethylene glycol (TEG)"
cgguaaguucug

SEQ ID NO: 9243 - RNA, 11 nt, Artificial Sequence
  source: /note="Description of Artificial Sequence: Synthetic oligonucleotide"
  source: /note="RNA"
  source: /note="5' tri-ethylene glycol (TEG)"
  modified_base (1)..(1): bicyclic nucleic acid (BNA)
  modified_base (2)..(2): bicyclic nucleic acid (BNA)
  source: /note="3' tri-ethylene glycol (TEG)"
cgguaaguucu

SEQ ID NO: 9244 - RNA, 10 nt, Artificial Sequence
  source: /note="Description of Artificial Sequence: Synthetic oligonucleotide"
  source: /note="RNA"
  source: /note="5' tri-ethylene glycol (TEG)"
  modified_base (1)..(1): bicyclic nucleic acid (BNA)
  modified_base (2)..(2): bicyclic nucleic acid (BNA)
  source: /note="3' tri-ethylene glycol (TEG)"
cgguaaguuc

SEQ ID NO: 9245 - RNA, 9 nt, Artificial Sequence
  source: /note="Description of Artificial Sequence: Synthetic oligonucleotide"
  source: /note="RNA"
  source: /note="5' tri-ethylene glycol (TEG)"
  modified_base (1)..(1): bicyclic nucleic acid (BNA)
  modified_base (2)..(2): bicyclic nucleic acid (BNA)
  source: /note="3' tri-ethylene glycol (TEG)"
cgguaaguu

SEQ ID NO: 9246 - RNA, 8 nt, Artificial Sequence
  source: /note="Description of Artificial Sequence: Synthetic oligonucleotide"
  source: /note="RNA"
  source: /note="5' tri-ethylene glycol (TEG)"
  modified_base (1)..(1): bicyclic nucleic acid (BNA)
  modified_base (2)..(2): bicyclic nucleic acid (BNA)
  source: /note="3' tri-ethylene glycol (TEG)"
cgguaagu

SEQ ID NO: 9247 - DNA, 20 bp, Artificial Sequence
  source: /note="Description of Artificial Sequence: Synthetic oligonucleotide"
  source: /note="Description of Combined DNA/RNA Molecule: Synthetic oligonucleotide"
  source: /note="DNA/RNA"
  source: /note="5' tri-ethylene glycol (TEG)"
  modified_base (1)..(1): bicyclic nucleic acid (BNA)
  modified_base (2)..(2): bicyclic nucleic acid (BNA)
  source: /note="3' tri-ethylene glycol (TEG)"
tcgguaaguucuguccaagc

SEQ ID NO: 9248 - DNA, 19 bp, Artificial Sequence
  source: /note="Description of Artificial Sequence: Synthetic oligonucleotide"
  source: /note="Description of Combined DNA/RNA Molecule: Synthetic oligonucleotide"
  source: /note="DNA/RNA"
  source: /note="5' tri-ethylene glycol (TEG)"
  modified_base (1)..(1): bicyclic nucleic acid (BNA)
  modified_base (2)..(2): bicyclic nucleic acid (BNA)
  source: /note="3' tri-ethylene glycol (TEG)"
tcgguaaguucuguccaag

SEQ ID NO: 9249 - DNA, 18 bp, Artificial Sequence
  source: /note="Description of Artificial Sequence: Synthetic oligonucleotide"
  source: /note="Description of Combined DNA/RNA Molecule: Synthetic oligonucleotide"
  source: /note="DNA/RNA"
  source: /note="5' tri-ethylene glycol (TEG)"
  modified_base (1)..(1): bicyclic nucleic acid (BNA)
  modified_base (2)..(2): bicyclic nucleic acid (BNA)
  source: /note="3' tri-ethylene glycol (TEG)"
tcgguaaguucuguccaa

SEQ ID NO: 9250 - DNA, 17 bp, Artificial Sequence
  source: /note="Description of Artificial Sequence: Synthetic oligonucleotide"
  source: /note="Description of Combined DNA/RNA Molecule: Synthetic oligonucleotide"
  source: /note="DNA/RNA"
  source: /note="5' tri-ethylene glycol (TEG)"
  modified_base (1)..(1): bicyclic nucleic acid (BNA)
  modified_base (2)..(2): bicyclic nucleic acid (BNA)
  source: /note="3' tri-ethylene glycol (TEG)"
tcgguaaguucugucca

SEQ ID NO: 9251 - DNA, 16 bp, Artificial Sequence
  source: /note="Description of Artificial Sequence: Synthetic oligonucleotide"
  source: /note="Description of Combined DNA/RNA Molecule: Synthetic oligonucleotide"
  source: /note="DNA/RNA"
  source: /note="5' tri-ethylene glycol (TEG)"
  modified_base (1)..(1): bicyclic nucleic acid (BNA)
  modified_base (2)..(2): bicyclic nucleic acid (BNA)
  source: /note="3' tri-ethylene glycol (TEG)"
tcgguaaguucugucc

SEQ ID NO: 9252 - DNA, 15 bp, Artificial Sequence
  source: /note="Description of Artificial Sequence: Synthetic oligonucleotide"
  source: /note="Description of Combined DNA/RNA Molecule: Synthetic oligonucleotide"
  source: /note="DNA/RNA"
  source: /note="5' tri-ethylene glycol (TEG)"
  modified_base (1)..(1): bicyclic nucleic acid (BNA)
  modified_base (2)..(2): bicyclic nucleic acid (BNA)
  source: /note="3' tri-ethylene glycol (TEG)"
tcgguaaguucuguc

SEQ ID NO: 9253 - DNA, 14 bp, Artificial Sequence
  source: /note="Description of Artificial Sequence: Synthetic oligonucleotide"
  source: /note="Description of Combined DNA/RNA Molecule: Synthetic oligonucleotide"
  source: /note="DNA/RNA"
  source: /note="5' tri-ethylene glycol (TEG)"
  modified_base (1)..(1): bicyclic nucleic acid (BNA)
  modified_base (2)..(2): bicyclic nucleic acid (BNA)
  source: /note="3' tri-ethylene glycol (TEG)"
tcgguaaguucugu

SEQ ID NO: 9254 - DNA, 13 bp, Artificial Sequence
  source: /note="Description of Artificial Sequence: Synthetic oligonucleotide"
  source: /note="Description of Combined DNA/RNA Molecule: Synthetic oligonucleotide"
  source: /note="DNA/RNA"
  source: /note="5' tri-ethylene glycol (TEG)"
  modified_base (1)..(1): bicyclic nucleic acid (BNA)
  modified_base (2)..(2): bicyclic nucleic acid (BNA)
  source: /note="3' tri-ethylene glycol (TEG)"
tcgguaaguucug

SEQ ID NO: 9255 - DNA, 12 bp, Artificial Sequence
  source: /note="Description of Artificial Sequence: Synthetic oligonucleotide"
  source: /note="Description of Combined DNA/RNA Molecule: Synthetic oligonucleotide"
  source: /note="DNA/RNA"
  source: /note="5' tri-ethylene glycol (TEG)"
  modified_base (1)..(1): bicyclic nucleic acid (BNA)
  modified_base (2)..(2): bicyclic nucleic acid (BNA)
  source: /note="3' tri-ethylene glycol (TEG)"
tcgguaaguucu

SEQ ID NO: 9256 - DNA, 11 bp, Artificial Sequence
  source: /note="Description of Artificial Sequence: Synthetic oligonucleotide"
  source: /note="Description of Combined DNA/RNA Molecule: Synthetic oligonucleotide"
  source: /note="DNA/RNA"
  source: /note="5' tri-ethylene glycol (TEG)"
  modified_base (1)..(1): bicyclic nucleic acid (BNA)
  modified_base (2)..(2): bicyclic nucleic acid (BNA)
  source: /note="3' tri-ethylene glycol (TEG)"
tcgguaaguuc

SEQ ID NO: 9257 - DNA, 10 bp, Artificial Sequence
  source: /note="Description of Artificial Sequence: Synthetic oligonucleotide"
  source: /note="Description of Combined DNA/RNA Molecule: Synthetic oligonucleotide"
  source: /note="DNA/RNA"
  source: /note="5' tri-ethylene glycol (TEG)"
  modified_base (1)..(1): bicyclic nucleic acid (BNA)
  modified_base (2)..(2): bicyclic nucleic acid (BNA)
  source: /note="3' tri-ethylene glycol (TEG)"
tcgguaaguu

SEQ ID NO: 9258 - DNA, 9 bp, Artificial Sequence
  source: /note="Description of Artificial Sequence: Synthetic oligonucleotide"
  source: /note="Description of Combined DNA/RNA Molecule: Synthetic oligonucleotide"
  source: /note="DNA/RNA"
  source: /note="5' tri-ethylene glycol (TEG)"
  modified_base (1)..(1): bicyclic nucleic acid (BNA)
  modified_base (2)..(2): bicyclic nucleic acid (BNA)
  source: /note="3' tri-ethylene glycol (TEG)"
tcgguaagu

SEQ ID NO: 9259 - DNA, 20 bp, Artificial Sequence
  source: /note="Description of Artificial Sequence: Synthetic oligonucleotide"
  source: /note="Description of Combined DNA/RNA Molecule: Synthetic oligonucleotide"
  source: /note="DNA/RNA"
  source: /note="5' tri-ethylene glycol (TEG)"
  modified_base (1)..(1): bicyclic nucleic acid (BNA)
  modified_base (2)..(2): bicyclic nucleic acid (BNA)
  source: /note="3' tri-ethylene glycol (TEG)"
gtcgguaaguucuguccaag

SEQ ID NO: 9260 - DNA, 19 bp, Artificial Sequence
  source: /note="Description of Artificial Sequence: Synthetic oligonucleotide"
  source: /note="Description of Combined DNA/RNA Molecule: Synthetic oligonucleotide"
  source: /note="DNA/RNA"
  source: /note="5' tri-ethylene glycol (TEG)"
  modified_base (1)..(1): bicyclic nucleic acid (BNA)
  modified_base (2)..(2): bicyclic nucleic acid (BNA)
  source: /note="3' tri-ethylene glycol (TEG)"
gtcgguaaguucuguccaa

SEQ ID NO: 9261 - DNA, 18 bp, Artificial Sequence
  source: /note="Description of Artificial Sequence: Synthetic oligonucleotide"
  source: /note="Description of Combined DNA/RNA Molecule: Synthetic oligonucleotide"
  source: /note="DNA/RNA"
  source: /note="5' tri-ethylene glycol (TEG)"
  modified_base (1)..(1): bicyclic nucleic acid (BNA)
  modified_base (2)..(2): bicyclic nucleic acid (BNA)
  source: /note="3' tri-ethylene glycol (TEG)"
gtcgguaaguucugucca

SEQ ID NO: 9262 - DNA, 17 bp, Artificial Sequence
  source: /note="Description of Artificial Sequence: Synthetic oligonucleotide"
  source: /note="Description of Combined DNA/RNA Molecule: Synthetic oligonucleotide"
  source: /note="DNA/RNA"
  source: /note="5' tri-ethylene glycol (TEG)"
  modified_base (1)..(1): bicyclic nucleic acid (BNA)
  modified_base (2)..(2): bicyclic nucleic acid (BNA)
  source: /note="3' tri-ethylene glycol (TEG)"
gtcgguaaguucugucc

SEQ ID NO: 9263 - DNA, 16 bp, Artificial Sequence
  source: /note="Description of Artificial Sequence: Synthetic oligonucleotide"
  source: /note="Description of Combined DNA/RNA Molecule: Synthetic oligonucleotide"
  source: /note="DNA/RNA"
  source: /note="5' tri-ethylene glycol (TEG)"
  modified_base (1)..(1): bicyclic nucleic acid (BNA)
  modified_base (2)..(2): bicyclic nucleic acid (BNA)
  source: /note="3' tri-ethylene glycol (TEG)"
gtcgguaaguucuguc

SEQ ID NO: 9264 - DNA, 15 bp, Artificial Sequence
  source: /note="Description of Artificial Sequence: Synthetic oligonucleotide"
  source: /note="Description of Combined DNA/RNA Molecule: Synthetic oligonucleotide"
  source: /note="DNA/RNA"
  source: /note="5' tri-ethylene glycol (TEG)"
  modified_base (1)..(1): bicyclic nucleic acid (BNA)
  modified_base (2)..(2): bicyclic nucleic acid (BNA)
  source: /note="3' tri-ethylene glycol (TEG)"
gtcgguaaguucugu

SEQ ID NO: 9265 - DNA, 14 bp, Artificial Sequence
  source: /note="Description of Artificial Sequence: Synthetic oligonucleotide"
  source: /note="Description of Combined DNA/RNA Molecule: Synthetic oligonucleotide"
  source: /note="DNA/RNA"
  source: /note="5' tri-ethylene glycol (TEG)"
  modified_base (1)..(1): bicyclic nucleic acid (BNA)
  modified_base (2)..(2): bicyclic nucleic acid (BNA)
  source: /note="3' tri-ethylene glycol (TEG)"
gtcgguaaguucug

SEQ ID NO: 9266 - DNA, 13 bp, Artificial Sequence
  source: /note="Description of Artificial Sequence: Synthetic oligonucleotide"
  source: /note="Description of Combined DNA/RNA Molecule: Synthetic oligonucleotide"
  source: /note="DNA/RNA"
  source: /note="5' tri-ethylene glycol (TEG)"
  modified_base (1)..(1): bicyclic nucleic acid (BNA)
  modified_base (2)..(2): bicyclic nucleic acid (BNA)
  source: /note="3' tri-ethylene glycol (TEG)"
gtcgguaaguucu

SEQ ID NO: 9267 - DNA, 12 bp, Artificial Sequence
  source: /note="Description of Artificial Sequence: Synthetic oligonucleotide"
  source: /note="Description of Combined DNA/RNA Molecule: Synthetic oligonucleotide"
  source: /note="DNA/RNA"
  source: /note="5' tri-ethylene glycol (TEG)"
  modified_base (1)..(1): bicyclic nucleic acid (BNA)
  modified_base (2)..(2): bicyclic nucleic acid (BNA)
  source: /note="3' tri-ethylene glycol (TEG)"
gtcgguaaguuc

SEQ ID NO: 9268 - DNA, 11 bp, Artificial Sequence
  source: /note="Description of Artificial Sequence: Synthetic oligonucleotide"
  source: /note="Description of Combined DNA/RNA Molecule: Synthetic oligonucleotide"
  source: /note="DNA/RNA"
  source: /note="5' tri-ethylene glycol (TEG)"
  modified_base (1)..(1): bicyclic nucleic acid (BNA)
  modified_base (2)..(2): bicyclic nucleic acid (BNA)
  source: /note="3' tri-ethylene glycol (TEG)"
gtcgguaaguu

SEQ ID NO: 9269 - DNA, 10 bp, Artificial Sequence
  source: /note="Description of Artificial Sequence: Synthetic oligonucleotide"
  source: /note="Description of Combined DNA/RNA Molecule: Synthetic oligonucleotide"
  source: /note="DNA/RNA"
  source: /note="5' tri-ethylene glycol (TEG)"
  modified_base (1)..(1): bicyclic nucleic acid (BNA)
  modified_base (2)..(2): bicyclic nucleic acid (BNA)
  source: /note="3' tri-ethylene glycol (TEG)"
gtcgguaagu

SEQ ID NO: 9270 - RNA, 20 nt, Artificial Sequence
  source: /note="Description of Artificial Sequence: Synthetic oligonucleotide"
  source: /note="RNA"
  source: /note="5' tri-ethylene glycol (TEG)"
  modified_base (1)..(1): bicyclic nucleic acid (BNA)
  modified_base (2)..(2): bicyclic nucleic acid (BNA)
  source: /note="3' tri-ethylene glycol (TEG)"
agucgguaaguucuguccaa

SEQ ID NO: 9271 - RNA, 19 nt, Artificial Sequence
  source: /note="Description of Artificial Sequence: Synthetic oligonucleotide"
  source: /note="RNA"
  source: /note="5' tri-ethylene glycol (TEG)"
  modified_base (1)..(1): bicyclic nucleic acid (BNA)
  modified_base (2)..(2): bicyclic nucleic acid (BNA)
  source: /note="3' tri-ethylene glycol (TEG)"
agucgguaaguucugucca

SEQ ID NO: 9272 - RNA, 17 nt, Artificial Sequence
  source: /note="Description of Artificial Sequence: Synthetic oligonucleotide"
  source: /note="RNA"
  source: /note="5' tri-ethylene glycol (TEG)"
  modified_base (1)..(1): bicyclic nucleic acid (BNA)
  modified_base (2)..(2): bicyclic nucleic acid (BNA)
  source: /note="3' tri-ethylene glycol (TEG)"
agucgguaaguucuguc

SEQ ID NO: 9273 - RNA, 16 nt, Artificial Sequence
  source: /note="Description of Artificial Sequence: Synthetic oligonucleotide"
  source: /note="RNA"
  source: /note="5' tri-ethylene glycol (TEG)"
  modified_base (1)..(1): bicyclic nucleic acid (BNA)
  modified_base (2)..(2): bicyclic nucleic acid (BNA)
  source: /note="3' tri-ethylene glycol (TEG)"
agucgguaaguucugu

SEQ ID NO: 9274 - RNA, 15 nt, Artificial Sequence
  source: /note="Description of Artificial Sequence: Synthetic oligonucleotide"
  source: /note="RNA"
  source: /note="5' tri-ethylene glycol (TEG)"
  modified_base (1)..(1): bicyclic nucleic acid (BNA)
  modified_base (2)..(2): bicyclic nucleic acid (BNA)
  source: /note="3' tri-ethylene glycol (TEG)"
agucgguaaguucug

SEQ ID NO: 9275 - RNA, 14 nt, Artificial Sequence
  source: /note="Description of Artificial Sequence: Synthetic oligonucleotide"
  source: /note="RNA"
  source: /note="5' tri-ethylene glycol (TEG)"
  modified_base (1)..(1): bicyclic nucleic acid (BNA)
  modified_base (2)..(2): bicyclic nucleic acid (BNA)
  source: /note="3' tri-ethylene glycol (TEG)"
agucgguaaguucu

SEQ ID NO: 9276 - RNA, 13 nt, Artificial Sequence
  source: /note="Description of Artificial Sequence: Synthetic oligonucleotide"
  source: /note="RNA"
  source: /note="5' tri-ethylene glycol (TEG)"
  modified_base (1)..(1): bicyclic nucleic acid (BNA)
  modified_base (2)..(2): bicyclic nucleic acid (BNA)
  source: /note="3' tri-ethylene glycol (TEG)"
agucgguaaguuc

SEQ ID NO: 9277 - RNA, 12 nt, Artificial Sequence
  source: /note="Description of Artificial Sequence: Synthetic oligonucleotide"
  source: /note="RNA"
  source: /note="5' tri-ethylene glycol (TEG)"
  modified_base (1)..(1): bicyclic nucleic acid (BNA)
  modified_base (2)..(2): bicyclic nucleic acid (BNA)
  source: /note="3' tri-ethylene glycol (TEG)"
agucgguaaguu

SEQ ID NO: 9278 - RNA, 11 nt, Artificial Sequence
  source: /note="Description of Artificial Sequence: Synthetic oligonucleotide"
  source: /note="RNA"
  source: /note="5' tri-ethylene glycol (TEG)"
  modified_base (1)..(1): bicyclic nucleic acid (BNA)
  modified_base (2)..(2): bicyclic nucleic acid (BNA)
  source: /note="3' tri-ethylene glycol (TEG)"
agucgguaagu

SEQ ID NO: 9279 - RNA, 20 nt, Artificial Sequence
  source: /note="Description of Artificial Sequence: Synthetic oligonucleotide"
  source: /note="RNA"
  source: /note="5' tri-ethylene glycol (TEG)"
  modified_base (1)..(1): bicyclic nucleic acid (BNA)
  modified_base (2)..(2): bicyclic nucleic acid (BNA)
  source: /note="3' tri-ethylene glycol (TEG)"
cagucgguaaguucugucca

SEQ ID NO: 9280 - RNA, 19 nt, Artificial Sequence
  source: /note="Description of Artificial Sequence: Synthetic oligonucleotide"
  source: /note="RNA"
  source: /note="5' tri-ethylene glycol (TEG)"
  modified_base (1)..(1): bicyclic nucleic acid (BNA)
  modified_base (2)..(2): bicyclic nucleic acid (BNA)
  source: /note="3' tri-ethylene glycol (TEG)"
cagucgguaaguucugucc

SEQ ID NO: 9281 - RNA, 18 nt, Artificial Sequence
  source: /note="Description of Artificial Sequence: Synthetic oligonucleotide"
  source: /note="RNA"
  source: /note="5' tri-ethylene glycol (TEG)"
  modified_base (1)..(1): bicyclic nucleic acid (BNA)
  modified_base (2)..(2): bicyclic nucleic acid (BNA)
  source: /note="3' tri-ethylene glycol (TEG)"
cagucgguaaguucuguc

SEQ ID NO: 9282 - RNA, 17 nt, Artificial Sequence
  source: /note="Description of Artificial Sequence: Synthetic oligonucleotide"
  source: /note="RNA"
  source: /note="5' tri-ethylene glycol (TEG)"
  modified_base (1)..(1): bicyclic nucleic acid (BNA)
  modified_base (2)..(2): bicyclic nucleic acid (BNA)
  source: /note="3' tri-ethylene glycol (TEG)"
cagucgguaaguucugu

SEQ ID NO: 9283 - RNA, 16 nt, Artificial Sequence
  source: /note="Description of Artificial Sequence: Synthetic oligonucleotide"
  source: /note="RNA"
  source: /note="5' tri-ethylene glycol (TEG)"
  modified_base (1)..(1): bicyclic nucleic acid (BNA)
  modified_base (2)..(2): bicyclic nucleic acid (BNA)
  source: /note="3' tri-ethylene glycol (TEG)"
cagucgguaaguucug

SEQ ID NO: 9284 - RNA, 15 nt, Artificial Sequence
  source: /note="Description of Artificial Sequence: Synthetic oligonucleotide"
  source: /note="RNA"
  source: /note="5' tri-ethylene glycol (TEG)"
  modified_base (1)..(1): bicyclic nucleic acid (BNA)
  modified_base (2)..(2): bicyclic nucleic acid (BNA)
  source: /note="3' tri-ethylene glycol (TEG)"
cagucgguaaguucu

SEQ ID NO: 9285 - RNA, 14 nt, Artificial Sequence
  source: /note="Description of Artificial Sequence: Synthetic oligonucleotide"
  source: /note="RNA"
  source: /note="5' tri-ethylene glycol (TEG)"
  modified_base (1)..(1): bicyclic nucleic acid (BNA)
  modified_base (2)..(2): bicyclic nucleic acid (BNA)
  source: /note="3' tri-ethylene glycol (TEG)"
cagucgguaaguuc

SEQ ID NO: 9286 - RNA, 13 nt, Artificial Sequence
  source: /note="Description of Artificial Sequence: Synthetic oligonucleotide"
  source: /note="RNA"
  source: /note="5' tri-ethylene glycol (TEG)"
  modified_base (1)..(1): bicyclic nucleic acid (BNA)
  modified_base (2)..(2): bicyclic nucleic acid (BNA)
  source: /note="3' tri-ethylene glycol (TEG)"
cagucgguaaguu

SEQ ID NO: 9287 - RNA, 12 nt, Artificial Sequence
  source: /note="Description of Artificial Sequence: Synthetic oligonucleotide"
  source: /note="RNA"
  source: /note="5' tri-ethylene glycol (TEG)"
  modified_base (1)..(1): bicyclic nucleic acid (BNA)
  modified_base (2)..(2): bicyclic nucleic acid (BNA)
  source: /note="3' tri-ethylene glycol (TEG)"
cagucgguaagu

SEQ ID NO: 9288 - RNA, 20 nt, Artificial Sequence
  source: /note="Description of Artificial Sequence: Synthetic oligonucleotide"
  source: /note="RNA"
  source: /note="5' tri-ethylene glycol (TEG)"
  modified_base (1)..(1): bicyclic nucleic acid (BNA)
  modified_base (2)..(2): bicyclic nucleic acid (BNA)
  source: /note="3' tri-ethylene glycol (TEG)"
ccagucgguaaguucugucc

SEQ ID NO: 9289 - RNA, 19 nt, Artificial Sequence
  source: /note="Description of Artificial Sequence: Synthetic oligonucleotide"
  source: /note="RNA"
  source: /note="5' tri-ethylene glycol (TEG)"
  modified_base (1)..(1): bicyclic nucleic acid (BNA)
  modified_base (2)..(2): bicyclic nucleic acid (BNA)
  source: /note="3' tri-ethylene glycol (TEG)"
ccagucgguaaguucuguc

SEQ ID NO: 9290 - RNA, 18 nt, Artificial Sequence
  source: /note="Description of Artificial Sequence: Synthetic oligonucleotide"
  source: /note="RNA"
  source: /note="5' tri-ethylene glycol (TEG)"
  modified_base (1)..(1): bicyclic nucleic acid (BNA)
  modified_base (2)..(2): bicyclic nucleic acid (BNA)
  source: /note="3' tri-ethylene glycol (TEG)"
ccagucgguaaguucugu

SEQ ID NO: 9291 - RNA, 17 nt, Artificial Sequence
  source: /note="Description of Artificial Sequence: Synthetic oligonucleotide"
  source: /note="RNA"
  source: /note="5' tri-ethylene glycol (TEG)"
  modified_base (1)..(1): bicyclic nucleic acid (BNA)
  modified_base (2)..(2): bicyclic nucleic acid (BNA)
  source: /note="3' tri-ethylene glycol (TEG)"
ccagucgguaaguucug

SEQ ID NO: 9292 - RNA, 16 nt, Artificial Sequence
  source: /note="Description of Artificial Sequence: Synthetic oligonucleotide"
  source: /note="RNA"
  source: /note="5' tri-ethylene glycol (TEG)"
  modified_base (1)..(1): bicyclic nucleic acid (BNA)
  modified_base (2)..(2): bicyclic nucleic acid (BNA)
  source: /note="3' tri-ethylene glycol (TEG)"
ccagucgguaaguucu

SEQ ID NO: 9293 - RNA, 15 nt, Artificial Sequence
  source: /note="Description of Artificial Sequence: Synthetic oligonucleotide"
  source: /note="RNA"
  source: /note="5' tri-ethylene glycol (TEG)"
  modified_base (1)..(1): bicyclic nucleic acid (BNA)
  modified_base (2)..(2): bicyclic nucleic acid (BNA)
  source: /note="3' tri-ethylene glycol (TEG)"
ccagucgguaaguuc

SEQ ID NO: 9294 - RNA, 14 nt, Artificial Sequence
  source: /note="Description of Artificial Sequence: Synthetic oligonucleotide"
  source: /note="RNA"
  source: /note="5' tri-ethylene glycol (TEG)"
  modified_base (1)..(1): bicyclic nucleic acid (BNA)
  modified_base (2)..(2): bicyclic nucleic acid (BNA)
  source: /note="3' tri-ethylene glycol (TEG)"
ccagucgguaaguu

SEQ ID NO: 9295 - RNA, 13 nt, Artificial Sequence
  source: /note="Description of Artificial Sequence: Synthetic oligonucleotide"
  source: /note="RNA"
  source: /note="5' tri-ethylene glycol (TEG)"
  modified_base (1)..(1): bicyclic nucleic acid (BNA)
  modified_base (2)..(2): bicyclic nucleic acid (BNA)
  source: /note="3' tri-ethylene glycol (TEG)"
ccagucgguaagu

SEQ ID NO: 9296 - RNA, 20 nt, Artificial Sequence
  source: /note="Description of Artificial Sequence: Synthetic oligonucleotide"
  source: /note="RNA"
  source: /note="5' tri-ethylene glycol (TEG)"
  modified_base (1)..(1): bicyclic nucleic acid (BNA)
  modified_base (2)..(2): bicyclic nucleic acid (BNA)
  source: /note="3' tri-ethylene glycol (TEG)"
gccagucgguaaguucuguc

SEQ ID NO: 9297 - RNA, 19 nt, Artificial Sequence
  source: /note="Description of Artificial Sequence: Synthetic oligonucleotide"
  source: /note="RNA"
  source: /note="5' tri-ethylene glycol (TEG)"
  modified_base (1)..(1): bicyclic nucleic acid (BNA)
  modified_base (2)..(2): bicyclic nucleic acid (BNA)
  source: /note="3' tri-ethylene glycol (TEG)"
gccagucgguaaguucugu

SEQ ID NO: 9298 - RNA, 18 nt, Artificial Sequence
  source: /note="Description of Artificial Sequence: Synthetic oligonucleotide"
  source: /note="RNA"
  source: /note="5' tri-ethylene glycol (TEG)"
  modified_base (1)..(1): bicyclic nucleic acid (BNA)
  modified_base (2)..(2): bicyclic nucleic acid (BNA)
  source: /note="3' tri-ethylene glycol (TEG)"
gccagucgguaaguucug

SEQ ID NO: 9299 - RNA, 17 nt, Artificial Sequence
  source: /note="Description of Artificial Sequence: Synthetic oligonucleotide"
  source: /note="RNA"
  source: /note="5' tri-ethylene glycol (TEG)"
  modified_base (1)..(1): bicyclic nucleic acid (BNA)
  modified_base (2)..(2): bicyclic nucleic acid (BNA)
  source: /note="3' tri-ethylene glycol (TEG)"
gccagucgguaaguucu

SEQ ID NO: 9300 - RNA, 16 nt, Artificial Sequence
  source: /note="Description of Artificial Sequence: Synthetic oligonucleotide"
  source: /note="RNA"
  source: /note="5' tri-ethylene glycol (TEG)"
  modified_base (1)..(1): bicyclic nucleic acid (BNA)
  modified_base (2)..(2): bicyclic nucleic acid (BNA)
  source: /note="3' tri-ethylene glycol (TEG)"
gccagucgguaaguuc

SEQ ID NO: 9301 - RNA, 15 nt, Artificial Sequence
  source: /note="Description of Artificial Sequence: Synthetic oligonucleotide"
  source: /note="RNA"
  source: /note="5' tri-ethylene glycol (TEG)"
  modified_base (1)..(1): bicyclic nucleic acid (BNA)
  modified_base (2)..(2): bicyclic nucleic acid (BNA)
  source: /note="3' tri-ethylene glycol (TEG)"
gccagucgguaaguu

SEQ ID NO: 9302 - RNA, 14 nt, Artificial Sequence
  source: /note="Description of Artificial Sequence: Synthetic oligonucleotide"
  source: /note="RNA"
  source: /note="5' tri-ethylene glycol (TEG)"
  modified_base (1)..(1): bicyclic nucleic acid (BNA)
  modified_base (2)..(2): bicyclic nucleic acid (BNA)
  source: /note="3' tri-ethylene glycol (TEG)"
gccagucgguaagu

SEQ ID NO: 9303 - DNA, 20 bp, Artificial Sequence
  source: /note="Description of Artificial Sequence: Synthetic oligonucleotide"
  source: /note="Description of Combined DNA/RNA Molecule: Synthetic oligonucleotide"
  source: /note="DNA/RNA"
  source: /note="5' tri-ethylene glycol (TEG)"
  modified_base (1)..(1): bicyclic nucleic acid (BNA)
  modified_base (2)..(2): bicyclic nucleic acid (BNA)
  source: /note="3' tri-ethylene glycol (TEG)"
tcaaggaagauggcauuucu

SEQ ID NO: 9304 - DNA, 22 bp, Artificial Sequence
  source: /note="Description of Artificial Sequence: Synthetic oligonucleotide"
  source: /note="Description of Combined DNA/RNA Molecule: Synthetic oligonucleotide"
  source: /note="DNA/RNA"
  source: /note="5' tri-ethylene glycol (TEG)"
  modified_base (1)..(1): bicyclic nucleic acid (BNA)
  modified_base (2)..(2): bicyclic nucleic acid (BNA)
  source: /note="3' tri-ethylene glycol (TEG)"
tcaaggaagauggcauuucuag

SEQ ID NO: 9305 - DNA, 16 bp, Artificial Sequence
  source: /note="Description of Artificial Sequence: Synthetic oligonucleotide"
  source: /note="Description of Combined DNA/RNA Molecule: Synthetic oligonucleotide"
  source: /note="DNA/RNA"
  source: /note="5' tri-ethylene glycol (TEG)"
  modified_base (1)..(1): bicyclic nucleic acid (BNA)
  modified_base (2)..(2): bicyclic nucleic acid (BNA)
  source: /note="3' tri-ethylene glycol (TEG)"
tcaaggaagauggcau

SEQ ID NO: 9306 - RNA, 15 nt, Artificial Sequence
  source: /note="Description of Artificial Sequence: Synthetic oligonucleotide"
  source: /note="RNA"
  source: /note="5' tri-ethylene glycol (TEG)"
  modified_base (1)..(1): bicyclic nucleic acid (BNA)
  modified_base (2)..(2): bicyclic nucleic acid (BNA)
  source: /note="3' tri-ethylene glycol (TEG)"
gaagauggcauuucu

SEQ ID NO: 9307 - DNA, 21 bp, Artificial Sequence
  source: /note="Description of Artificial Sequence: Synthetic oligonucleotide"
  source: /note="Description of Combined DNA/RNA Molecule: Synthetic oligonucleotide"
  source: /note="DNA/RNA"
  source: /note="5' tri-ethylene glycol (TEG)"
  modified_base (1)..(1): bicyclic nucleic acid (BNA)
  modified_base (2)..(2): bicyclic nucleic acid (BNA)
  source: /note="3' tri-ethylene glycol (TEG)"
tcaaggaagauggcauuucua

SEQ ID NO: 9308 - DNA, 19 bp, Artificial Sequence
  source: /note="Description of Artificial Sequence: Synthetic oligonucleotide"
  source: /note="Description of Combined DNA/RNA Molecule: Synthetic oligonucleotide"
  source: /note="DNA/RNA"
  source: /note="5' tri-ethylene glycol (TEG)"
  modified_base (1)..(1): bicyclic nucleic acid (BNA)
  modified_base (2)..(2): bicyclic nucleic acid (BNA)
  source: /note="3' tri-ethylene glycol (TEG)"
tcaaggaagauggcauuuc

SEQ ID NO: 9309 - DNA, 18 bp, Artificial Sequence
  source: /note="Description of Artificial Sequence: Synthetic oligonucleotide"
  source: /note="Description of Combined DNA/RNA Molecule: Synthetic oligonucleotide"
  source: /note="DNA/RNA"
  source: /note="5' tri-ethylene glycol (TEG)"
  modified_base (1)..(1): bicyclic nucleic acid (BNA)
  modified_base (2)..(2): bicyclic nucleic acid (BNA)
  source: /note="3' tri-ethylene glycol (TEG)"
tcaaggaagauggcauuu

SEQ ID NO: 9310 - DNA, 17 bp, Artificial Sequence
  source: /note="Description of Artificial Sequence: Synthetic oligonucleotide"
  source: /note="Description of Combined DNA/RNA Molecule: Synthetic oligonucleotide"
  source: /note="DNA/RNA"
  source: /note="5' tri-ethylene glycol (TEG)"
  modified_base (1)..(1): bicyclic nucleic acid (BNA)
  modified_base (2)..(2): bicyclic nucleic acid (BNA)
  source: /note="3' tri-ethylene glycol (TEG)"
tcaaggaagauggcauu

SEQ ID NO: 9311 - DNA, 15 bp, Artificial Sequence
  source: /note="Description of Artificial Sequence: Synthetic oligonucleotide"
  source: /note="Description of Combined DNA/RNA Molecule: Synthetic oligonucleotide"
  source: /note="DNA/RNA"
  source: /note="5' tri-ethylene glycol (TEG)"
  modified_base (1)..(1): bicyclic nucleic acid (BNA)
  modified_base (2)..(2): bicyclic nucleic acid (BNA)
  source: /note="3' tri-ethylene glycol (TEG)"
tcaaggaagauggca

SEQ ID NO: 9312 - DNA, 14 bp, Artificial Sequence
  source: /note="Description of Artificial Sequence: Synthetic oligonucleotide"
  source: /note="Description of Combined DNA/RNA Molecule: Synthetic oligonucleotide"
  source: /note="DNA/RNA"
  source: /note="5' tri-ethylene glycol (TEG)"
  modified_base (1)..(1): bicyclic nucleic acid (BNA)
  modified_base (2)..(2): bicyclic nucleic acid (BNA)
  source: /note="3' tri-ethylene glycol (TEG)"
tcaaggaagauggc

SEQ ID NO: 9313 - DNA, 13 bp, Artificial Sequence
  source: /note="Description of Artificial Sequence: Synthetic oligonucleotide"
  source: /note="Description of Combined DNA/RNA Molecule: Synthetic oligonucleotide"
  source: /note="DNA/RNA"
  source: /note="5' tri-ethylene glycol (TEG)"
  modified_base (1)..(1): bicyclic nucleic acid (BNA)
  modified_base (2)..(2): bicyclic nucleic acid (BNA)
  source: /note="3' tri-ethylene glycol (TEG)"
tcaaggaagaugg

SEQ ID NO: 9314 - DNA, 12 bp, Artificial Sequence
  source: /note="Description of Artificial Sequence: Synthetic oligonucleotide"
  source: /note="Description of Combined DNA/RNA Molecule: Synthetic oligonucleotide"
  source: /note="DNA/RNA"
  source: /note="5' tri-ethylene glycol (TEG)"
  modified_base (1)..(1): bicyclic nucleic acid (BNA)
  modified_base (2)..(2): bicyclic nucleic acid (BNA)
  source: /note="3' tri-ethylene glycol (TEG)"
tcaaggaagaug

SEQ ID NO: 9315 - DNA, 11 bp, Artificial Sequence
  source: /note="Description of Artificial Sequence: Synthetic oligonucleotide"
  source: /note="Description of Combined DNA/RNA Molecule: Synthetic oligonucleotide"
  source: /note="DNA/RNA"
  source: /note="5' tri-ethylene glycol (TEG)"
  modified_base (1)..(1): bicyclic nucleic acid (BNA)
  modified_base (2)..(2): bicyclic nucleic acid (BNA)
  source: /note="3' tri-ethylene glycol (TEG)"
tcaaggaagau

SEQ ID NO: 9316 - DNA, 10 bp, Artificial Sequence
  source: /note="Description of Artificial Sequence: Synthetic oligonucleotide"
  source: /note="DNA/RNA"
  source: /note="5' tri-ethylene glycol (TEG)"
  modified_base (1)..(1): bicyclic nucleic acid (BNA)
  modified_base (2)..(2): bicyclic nucleic acid (BNA)
  source: /note="3' tri-ethylene glycol (TEG)"
tcaaggaaga

SEQ ID NO: 9317 - DNA, 9 bp, Artificial Sequence
  source: /note="Description of Artificial Sequence: Synthetic oligonucleotide"
  source: /note="DNA/RNA"
  source: /note="5' tri-ethylene glycol (TEG)"
  modified_base (1)..(1): bicyclic nucleic acid (BNA)
  modified_base (2)..(2): bicyclic nucleic acid (BNA)
  source: /note="3' tri-ethylene glycol (TEG)"
tcaaggaag

SEQ ID NO: 9318 - RNA, 21 nt, Artificial Sequence
  source: /note="Description of Artificial Sequence: Synthetic oligonucleotide"
  source: /note="RNA"
  source: /note="5' tri-ethylene glycol (TEG)"
  modified_base (1)..(1): bicyclic nucleic acid (BNA)
  modified_base (2)..(2): bicyclic nucleic acid (BNA)
  source: /note="3' tri-ethylene glycol (TEG)"
caaggaagauggcauuucuag

SEQ ID NO: 9319 - RNA, 20 nt, Artificial Sequence
  source: /note="Description of Artificial Sequence: Synthetic oligonucleotide"
  source: /note="RNA"
  source: /note="5' tri-ethylene glycol (TEG)"
  modified_base (1)..(1): bicyclic nucleic acid (BNA)
  modified_base (2)..(2): bicyclic nucleic acid (BNA)
  source: /note="3' tri-ethylene glycol (TEG)"
caaggaagauggcauuucua

SEQ ID NO: 9320 - RNA, 19 nt, Artificial Sequence
  source: /note="Description of Artificial Sequence: Synthetic oligonucleotide"
  source: /note="RNA"
  source: /note="5' tri-ethylene glycol (TEG)"
  modified_base (1)..(1): bicyclic nucleic acid (BNA)
  modified_base (2)..(2): bicyclic nucleic acid (BNA)
  source: /note="3' tri-ethylene glycol (TEG)"
caaggaagauggcauuucu

SEQ ID NO: 9321 - RNA, 18 nt, Artificial Sequence
  source: /note="Description of Artificial Sequence: Synthetic oligonucleotide"
  source: /note="RNA"
  source: /note="5' tri-ethylene glycol (TEG)"
  modified_base (1)..(1): bicyclic nucleic acid (BNA)
  modified_base (2)..(2): bicyclic nucleic acid (BNA)
  source: /note="3' tri-ethylene glycol (TEG)"
caaggaagauggcauuuc

SEQ ID NO: 9322 - RNA, 17 nt, Artificial Sequence
  source: /note="Description of Artificial Sequence: Synthetic oligonucleotide"
  source: /note="RNA"
  source: /note="5' tri-ethylene glycol (TEG)"
  modified_base (1)..(1): bicyclic nucleic acid (BNA)
  modified_base (2)..(2): bicyclic nucleic acid (BNA)
  source: /note="3' tri-ethylene glycol (TEG)"
caaggaagauggcauuu

SEQ ID NO: 9323 - RNA, 16 nt, Artificial Sequence
  source: /note="Description of Artificial Sequence: Synthetic oligonucleotide"
  source: /note="RNA"
  source: /note="5' tri-ethylene glycol (TEG)"
  modified_base (1)..(1): bicyclic nucleic acid (BNA)
  modified_base (2)..(2): bicyclic nucleic acid (BNA)
  source: /note="3' tri-ethylene glycol (TEG)"
caaggaagauggcauu

SEQ ID NO: 9324 - RNA, 15 nt, Artificial Sequence
  source: /note="Description of Artificial Sequence: Synthetic oligonucleotide"
  source: /note="RNA"
  source: /note="5' tri-ethylene glycol (TEG)"
  modified_base (1)..(1): bicyclic nucleic acid (BNA)
  modified_base (2)..(2): bicyclic nucleic acid (BNA)
  source: /note="3' tri-ethylene glycol (TEG)"
caaggaagauggcau

SEQ ID NO: 9325 - RNA, 14 nt, Artificial Sequence
  source: /note="Description of Artificial Sequence: Synthetic oligonucleotide"
  source: /note="RNA"
  source: /note="5' tri-ethylene glycol (TEG)"
  modified_base (1)..(1): bicyclic nucleic acid (BNA)
  modified_base (2)..(2): bicyclic nucleic acid (BNA)
  source: /note="3' tri-ethylene glycol (TEG)"
caaggaagauggca

SEQ ID NO: 9326 - RNA, 13 nt, Artificial Sequence
  source: /note="Description of Artificial Sequence: Synthetic oligonucleotide"
  source: /note="RNA"
  source: /note="5' tri-ethylene glycol (TEG)"
  modified_base (1)..(1): bicyclic nucleic acid (BNA)
  modified_base (2)..(2): bicyclic nucleic acid (BNA)
  source: /note="3' tri-ethylene glycol (TEG)"
caaggaagauggc

SEQ ID NO: 9327 - RNA, 12 nt, Artificial Sequence
  source: /note="Description of Artificial Sequence: Synthetic oligonucleotide"
  source: /note="RNA"
  source: /note="5' tri-ethylene glycol (TEG)"
  modified_base (1)..(1): bicyclic nucleic acid (BNA)
  modified_base (2)..(2): bicyclic nucleic acid (BNA)
  source: /note="3' tri-ethylene glycol (TEG)"
caaggaagaugg

SEQ ID NO: 9328 - RNA, 11 nt, Artificial Sequence
  source: /note="Description of Artificial Sequence: Synthetic oligonucleotide"
  source: /note="RNA"
  source: /note="5' tri-ethylene glycol (TEG)"
  modified_base (1)..(1): bicyclic nucleic acid (BNA)
  modified_base (2)..(2): bicyclic nucleic acid (BNA)
  source: /note="3' tri-ethylene glycol (TEG)"
caaggaagaug

SEQ ID NO: 9329 - RNA, 10 nt, Artificial Sequence
  source: /note="Description of Artificial Sequence: Synthetic oligonucleotide"
  source: /note="RNA"
  source: /note="5' tri-ethylene glycol (TEG)"
  modified_base (1)..(1): bicyclic nucleic acid (BNA)
  modified_base (2)..(2): bicyclic nucleic acid (BNA)
  source: /note="3' tri-ethylene glycol (TEG)"
caaggaagau

SEQ ID NO: 9330 - RNA, 9 nt, Artificial Sequence
  source: /note="Description of Artificial Sequence: Synthetic oligonucleotide"
  source: /note="RNA/Antisense Oligonucleotide"
  source: /note="5' tri-ethylene glycol (TEG)"
  modified_base (1)..(1): bicyclic nucleic acid (BNA)
  modified_base (2)..(2): bicyclic nucleic acid (BNA)
  source: /note="3' tri-ethylene glycol (TEG)"
caaggaaga

SEQ ID NO: 9331 - RNA, 8 nt, Artificial Sequence
  source: /note="Description of Artificial Sequence: Synthetic oligonucleotide"
  source: /note="RNA/Antisense Oligonucleotide"
  source: /note="5' tri-ethylene glycol (TEG)"
  modified_base (1)..(1): bicyclic nucleic acid (BNA)
  modified_base (2)..(2): bicyclic nucleic acid (BNA)
  source: /note="3' tri-ethylene glycol (TEG)"
caaggaag

SEQ ID NO: 9332 - RNA, 20 nt, Artificial Sequence
  source: /note="Description of Artificial Sequence: Synthetic oligonucleotide"
  source: /note="RNA"
  source: /note="5' tri-ethylene glycol (TEG)"
  modified_base (1)..(1): bicyclic nucleic acid (BNA)
  modified_base (2)..(2): bicyclic nucleic acid (BNA)
  source: /note="3' tri-ethylene glycol (TEG)"
aaggaagauggcauuucuag

SEQ ID NO: 9333 - RNA, 19 nt, Artificial Sequence
  source: /note="Description of Artificial Sequence: Synthetic oligonucleotide"
  source: /note="RNA"
  source: /note="5' tri-ethylene glycol (TEG)"
  modified_base (1)..(1): bicyclic nucleic acid (BNA)
  modified_base (2)..(2): bicyclic nucleic acid (BNA)
  source: /note="3' tri-ethylene glycol (TEG)"
aaggaagauggcauuucua

SEQ ID NO: 9334 - RNA, 18 nt, Artificial Sequence
  source: /note="Description of Artificial Sequence: Synthetic oligonucleotide"
  source: /note="RNA"
  source: /note="5' tri-ethylene glycol (TEG)"
  modified_base (1)..(1): bicyclic nucleic acid (BNA)
  modified_base (2)..(2): bicyclic nucleic acid (BNA)
  source: /note="3' tri-ethylene glycol (TEG)"
aaggaagauggcauuucu

SEQ ID NO: 9335 - RNA, 17 nt, Artificial Sequence
  source: /note="Description of Artificial Sequence: Synthetic oligonucleotide"
  source: /note="RNA"
  source: /note="5' tri-ethylene glycol (TEG)"
  modified_base (1)..(1): bicyclic nucleic acid (BNA)
  modified_base (2)..(2): bicyclic nucleic acid (BNA)
  source: /note="3' tri-ethylene glycol (TEG)"
aaggaagauggcauuuc

SEQ ID NO: 9336 - RNA, 16 nt, Artificial Sequence
  source: /note="Description of Artificial Sequence: Synthetic oligonucleotide"
  source: /note="RNA"
  source: /note="5' tri-ethylene glycol (TEG)"
  modified_base (1)..(1): bicyclic nucleic acid (BNA)
  modified_base (2)..(2): bicyclic nucleic acid (BNA)
  source: /note="3' tri-ethylene glycol (TEG)"
aaggaagauggcauuu

SEQ ID NO: 9337 - RNA, 15 nt, Artificial Sequence
  source: /note="Description of Artificial Sequence: Synthetic oligonucleotide"
  source: /note="RNA"
  source: /note="5' tri-ethylene glycol (TEG)"
  modified_base (1)..(1): bicyclic nucleic acid (BNA)
  modified_base (2)..(2): bicyclic nucleic acid (BNA)
  source: /note="3' tri-ethylene glycol (TEG)"
aaggaagauggcauu

SEQ ID NO: 9338 - RNA, 14 nt, Artificial Sequence
  source: /note="Description of Artificial Sequence: Synthetic oligonucleotide"
  source: /note="RNA"
  source: /note="5' tri-ethylene glycol (TEG)"
  modified_base (1)..(1): bicyclic nucleic acid (BNA)
  modified_base (2)..(2): bicyclic nucleic acid (BNA)
  source: /note="3' tri-ethylene glycol (TEG)"
aaggaagauggcau

SEQ ID NO: 9339 - RNA, 13 nt, Artificial Sequence
  source: /note="Description of Artificial Sequence: Synthetic oligonucleotide"
  source: /note="RNA"
  source: /note="5' tri-ethylene glycol (TEG)"
  modified_base (1)..(1): bicyclic nucleic acid (BNA)
  modified_base (2)..(2): bicyclic nucleic acid (BNA)
  source: /note="3' tri-ethylene glycol (TEG)"
aaggaagauggca

SEQ ID NO: 9340 - RNA, 12 nt, Artificial Sequence
  source: /note="Description of Artificial Sequence: Synthetic oligonucleotide"
  source: /note="RNA"
  source: /note="5' tri-ethylene glycol (TEG)"
  modified_base (1)..(1): bicyclic nucleic acid (BNA)
  modified_base (2)..(2): bicyclic nucleic acid (BNA)
  source: /note="3' tri-ethylene glycol (TEG)"
aaggaagauggc

SEQ ID NO: 9341 - RNA, 11 nt, Artificial Sequence
  source: /note="Description of Artificial Sequence: Synthetic oligonucleotide"
  source: /note="RNA"
  source: /note="5' tri-ethylene glycol (TEG)"
  modified_base (1)..(1): bicyclic nucleic acid (BNA)
  modified_base (2)..(2): bicyclic nucleic acid (BNA)
  source: /note="3' tri-ethylene glycol (TEG)"
aaggaagaugg

SEQ ID NO: 9342 - RNA, 10 nt, Artificial Sequence
  source: /note="Description of Artificial Sequence: Synthetic oligonucleotide"
  source: /note="RNA"
  source: /note="5' tri-ethylene glycol (TEG)"
  modified_base (1)..(1): bicyclic nucleic acid (BNA)
  modified_base (2)..(2): bicyclic nucleic acid (BNA)
  source: /note="3' tri-ethylene glycol (TEG)"
aaggaagaug

SEQ ID NO: 9343 - RNA, 9 nt, Artificial Sequence
  source: /note="Description of Artificial Sequence: Synthetic oligonucleotide"
  source: /note="RNA"
  source: /note="5' tri-ethylene glycol (TEG)"
  modified_base (1)..(1): bicyclic nucleic acid (BNA)
  modified_base (2)..(2): bicyclic nucleic acid (BNA)
  source: /note="3' tri-ethylene glycol (TEG)"
aaggaagau

SEQ ID NO: 9344 - RNA, 8 nt, Artificial Sequence
  source: /note="Description of Artificial Sequence: Synthetic oligonucleotide"
  source: /note="RNA/Antisense Oligonucleotide"
  source: /note="5' tri-ethylene glycol (TEG)"
  modified_base (1)..(1): bicyclic nucleic acid (BNA)
  modified_base (2)..(2): bicyclic nucleic acid (BNA)
  source: /note="3' tri-ethylene glycol (TEG)"
aaggaaga

SEQ ID NO: 9345 - RNA, 19 nt, Artificial Sequence
  source: /note="Description of Artificial Sequence: Synthetic oligonucleotide"
  source: /note="RNA"
  source: /note="5' tri-ethylene glycol (TEG)"
  modified_base (1)..(1): bicyclic nucleic acid (BNA)
  modified_base (2)..(2): bicyclic nucleic acid (BNA)
  source: /note="3' tri-ethylene glycol (TEG)"
aggaagauggcauuucuag

SEQ ID NO: 9346 - RNA, 18 nt, Artificial Sequence
  source: /note="Description of Artificial Sequence: Synthetic oligonucleotide"
  source: /note="RNA"
  source: /note="5' tri-ethylene glycol (TEG)"
  modified_base (1)..(1): bicyclic nucleic acid (BNA)
  modified_base (2)..(2): bicyclic nucleic acid (BNA)
  source: /note="3' tri-ethylene glycol (TEG)"
aggaagauggcauuucua

SEQ ID NO: 9347 - RNA, 17 nt, Artificial Sequence
  source: /note="Description of Artificial Sequence: Synthetic oligonucleotide"
  source: /note="RNA"
  source: /note="5' tri-ethylene glycol (TEG)"
  modified_base (1)..(1): bicyclic nucleic acid (BNA)
  modified_base (2)..(2): bicyclic nucleic acid (BNA)
  source: /note="3' tri-ethylene glycol (TEG)"
aggaagauggcauuucu

SEQ ID NO: 9348 - RNA, 16 nt, Artificial Sequence
  source: /note="Description of Artificial Sequence: Synthetic oligonucleotide"
  source: /note="RNA"
  source: /note="5' tri-ethylene glycol (TEG)"
  modified_base (1)..(1): bicyclic nucleic acid (BNA)
  modified_base (2)..(2): bicyclic nucleic acid (BNA)
  source: /note="3' tri-ethylene glycol (TEG)"
aggaagauggcauuuc

SEQ ID NO: 9349 - RNA, 15 nt, Artificial Sequence
  source: /note="Description of Artificial Sequence: Synthetic oligonucleotide"
  source: /note="RNA"
  source: /note="5' tri-ethylene glycol (TEG)"
  modified_base (1)..(1): bicyclic nucleic acid (BNA)
  modified_base (2)..(2): bicyclic nucleic acid (BNA)
  source: /note="3' tri-ethylene glycol (TEG)"
aggaagauggcauuu

SEQ ID NO: 9350 - RNA, 14 nt, Artificial Sequence
  source: /note="Description of Artificial Sequence: Synthetic oligonucleotide"
  source: /note="RNA"
  source: /note="5' tri-ethylene glycol (TEG)"
  modified_base (1)..(1): bicyclic nucleic acid (BNA)
  modified_base (2)..(2): bicyclic nucleic acid (BNA)
  source: /note="3' tri-ethylene glycol (TEG)"
aggaagauggcauu

SEQ ID NO: 9351 - RNA, 13 nt, Artificial Sequence
  source: /note="Description of Artificial Sequence: Synthetic oligonucleotide"
  source: /note="RNA"
  source: /note="5' tri-ethylene glycol (TEG)"
  modified_base (1)..(1): bicyclic nucleic acid (BNA)
  modified_base (2)..(2): bicyclic nucleic acid (BNA)
  source: /note="3' tri-ethylene glycol (TEG)"
aggaagauggcau

SEQ ID NO: 9352 - RNA, 12 nt, Artificial Sequence
  source: /note="Description of Artificial Sequence: Synthetic oligonucleotide"
  source: /note="RNA"
  source: /note="5' tri-ethylene glycol (TEG)"
  modified_base (1)..(1): bicyclic nucleic acid (BNA)
  modified_base (2)..(2): bicyclic nucleic acid (BNA)
  source: /note="3' tri-ethylene glycol (TEG)"
aggaagauggca

SEQ ID NO: 9353 - RNA, 10 nt, Artificial Sequence
  source: /note="Description of Artificial Sequence: Synthetic oligonucleotide"
  source: /note="RNA"
  source: /note="5' tri-ethylene glycol (TEG)"
  modified_base (1)..(1): bicyclic nucleic acid (BNA)
  modified_base (2)..(2): bicyclic nucleic acid (BNA)
  source: /note="3' tri-ethylene glycol (TEG)"
aggaagaugg

SEQ ID NO: 9354 - RNA, 9 nt, Artificial Sequence
  source: /note="Description of Artificial Sequence: Synthetic oligonucleotide"
  source: /note="RNA"
  source: /note="5' tri-ethylene glycol (TEG)"
  modified_base (1)..(1): bicyclic nucleic acid (BNA)
  modified_base (2)..(2): bicyclic nucleic acid (BNA)
  source: /note="3' tri-ethylene glycol (TEG)"
aggaagaug

SEQ ID NO: 9355 - RNA, 8 nt, Artificial Sequence
  source: /note="Description of Artificial Sequence: Synthetic oligonucleotide"
  source: /note="RNA"
  source: /note="5' tri-ethylene glycol (TEG)"
  modified_base (1)..(1): bicyclic nucleic acid (BNA)
  modified_base (2)..(2): bicyclic nucleic acid (BNA)
  source: /note="3' tri-ethylene glycol (TEG)"
aggaagau

SEQ ID NO: 9356 - RNA, 18 nt, Artificial Sequence
  source: /note="Description of Artificial Sequence: Synthetic oligonucleotide"
  source: /note="RNA"
  source: /note="5' tri-ethylene glycol (TEG)"
  modified_base (1)..(1): bicyclic nucleic acid (BNA)
  modified_base (2)..(2): bicyclic nucleic acid (BNA)
  source: /note="3' tri-ethylene glycol (TEG)"
ggaagauggcauuucuag

SEQ ID NO: 9357 - RNA, 17 nt, Artificial Sequence
  source: /note="Description of Artificial Sequence: Synthetic oligonucleotide"
  source: /note="RNA"
  source: /note="5' tri-ethylene glycol (TEG)"
  modified_base (1)..(1): bicyclic nucleic acid (BNA)
  modified_base (2)..(2): bicyclic nucleic acid (BNA)
  source: /note="3' tri-ethylene glycol (TEG)"
ggaagauggcauuucua

SEQ ID NO: 9358 - RNA, 16 nt, Artificial Sequence
  source: /note="Description of Artificial Sequence: Synthetic oligonucleotide"
  source: /note="RNA"
  source: /note="5' tri-ethylene glycol (TEG)"
  modified_base (1)..(1): bicyclic nucleic acid (BNA)
  modified_base (2)..(2): bicyclic nucleic acid (BNA)
  source: /note="3' tri-ethylene glycol (TEG)"
ggaagauggcauuucu

SEQ ID NO: 9359 - RNA, 15 nt, Artificial Sequence
  source: /note="Description of Artificial Sequence: Synthetic oligonucleotide"
  source: /note="RNA"
  source: /note="5' tri-ethylene glycol (TEG)"
  modified_base (1)..(1): bicyclic nucleic acid (BNA)
  modified_base (2)..(2): bicyclic nucleic acid (BNA)
  source: /note="3' tri-ethylene glycol (TEG)"
ggaagauggcauuuc

SEQ ID NO: 9360 - RNA, 14 nt, Artificial Sequence
  source: /note="Description of Artificial Sequence: Synthetic oligonucleotide"
  source: /note="RNA"
  source: /note="5' tri-ethylene glycol (TEG)"
  modified_base (1)..(1): bicyclic nucleic acid (BNA)
  modified_base (2)..(2): bicyclic nucleic acid (BNA)
  source: /note="3' tri-ethylene glycol (TEG)"
ggaagauggcauuu

SEQ ID NO: 9361 - RNA, 13 nt, Artificial Sequence
  source: /note="Description of Artificial Sequence: Synthetic oligonucleotide"
  source: /note="RNA"
  source: /note="5' tri-ethylene glycol (TEG)"
  modified_base (1)..(1): bicyclic nucleic acid (BNA)
  modified_base (2)..(2): bicyclic nucleic acid (BNA)
  source: /note="3' tri-ethylene glycol (TEG)"
ggaagauggcauu

SEQ ID NO: 9362 - RNA, 12 nt, Artificial Sequence
  source: /note="Description of Artificial Sequence: Synthetic oligonucleotide"
  source: /note="RNA"
  source: /note="5' tri-ethylene glycol (TEG)"
  modified_base (1)..(1): bicyclic nucleic acid (BNA)
  modified_base (2)..(2): bicyclic nucleic acid (BNA)
  source: /note="3' tri-ethylene glycol (TEG)"
ggaagauggcau

SEQ ID NO: 9363 - RNA, 11 nt, Artificial Sequence
  source: /note="Description of Artificial Sequence: Synthetic oligonucleotide"
  source: /note="RNA"
  source: /note="5' tri-ethylene glycol (TEG)"
  modified_base (1)..(1): bicyclic nucleic acid (BNA)
  modified_base (2)..(2): bicyclic nucleic acid (BNA)
  source: /note="3' tri-ethylene glycol (TEG)"
ggaagauggca

SEQ ID NO: 9364 - RNA, 10 nt, Artificial Sequence
  source: /note="Description of Artificial Sequence: Synthetic oligonucleotide"
  source: /note="RNA"
  source: /note="5' tri-ethylene glycol (TEG)"
  modified_base (1)..(1): bicyclic nucleic acid (BNA)
  modified_base (2)..(2): bicyclic nucleic acid (BNA)
  source: /note="3' tri-ethylene glycol (TEG)"
ggaagauggc

SEQ ID NO: 9365 - RNA, 8 nt, Artificial Sequence
  source: /note="Description of Artificial Sequence: Synthetic oligonucleotide"
  source: /note="RNA"
  source: /note="5' tri-ethylene glycol (TEG)"
  modified_base (1)..(1): bicyclic nucleic acid (BNA)
  modified_base (2)..(2): bicyclic nucleic acid (BNA)
  source: /note="3' tri-ethylene glycol (TEG)"
ggaagaug

SEQ ID NO: 9366 - RNA, 17 nt, Artificial Sequence
  source: /note="Description of Artificial Sequence: Synthetic oligonucleotide"
  source: /note="RNA"
  source: /note="5' tri-ethylene glycol (TEG)"
  modified_base (1)..(1): bicyclic nucleic acid (BNA)
  modified_base (2)..(2): bicyclic nucleic acid (BNA)
  source: /note="3' tri-ethylene glycol (TEG)"
gaagauggcauuucuag

SEQ ID NO: 9367 - RNA, 16 nt, Artificial Sequence
  source: /note="Description of Artificial Sequence: Synthetic oligonucleotide"
  source: /note="RNA"
  source: /note="5' tri-ethylene glycol (TEG)"
  modified_base (1)..(1): bicyclic nucleic acid (BNA)
  modified_base (2)..(2): bicyclic nucleic acid (BNA)
  source: /note="3' tri-ethylene glycol (TEG)"
gaagauggcauuucua

SEQ ID NO: 9368 - RNA, 14 nt, Artificial Sequence
  source: /note="Description of Artificial Sequence: Synthetic oligonucleotide"
  source: /note="RNA"
  source: /note="5' tri-ethylene glycol (TEG)"
  modified_base (1)..(1): bicyclic nucleic acid (BNA)
  modified_base (2)..(2): bicyclic nucleic acid (BNA)
  source: /note="3' tri-ethylene glycol (TEG)"
gaagauggcauuuc

SEQ ID NO: 9369 - RNA, 13 nt, Artificial Sequence
  source: /note="Description of Artificial Sequence: Synthetic oligonucleotide"
  source: /note="RNA"
  source: /note="5' tri-ethylene glycol (TEG)"
  modified_base (1)..(1): bicyclic nucleic acid (BNA)
  modified_base (2)..(2): bicyclic nucleic acid (BNA)
  source: /note="3' tri-ethylene glycol (TEG)"
gaagauggcauuu

SEQ ID NO: 9370 - RNA, 12 nt, Artificial Sequence
  source: /note="Description of Artificial Sequence: Synthetic oligonucleotide"
  source: /note="RNA"
  source: /note="5' tri-ethylene glycol (TEG)"
  modified_base (1)..(1): bicyclic nucleic acid (BNA)
  modified_base (2)..(2): bicyclic nucleic acid (BNA)
  source: /note="3' tri-ethylene glycol (TEG)"
gaagauggcauu

SEQ ID NO: 9371 - RNA, 11 nt, Artificial Sequence
  source: /note="Description of Artificial Sequence: Synthetic oligonucleotide"
  source: /note="RNA"
  source: /note="5' tri-ethylene glycol (TEG)"
  modified_base (1)..(1): bicyclic nucleic acid (BNA)
  modified_base (2)..(2): bicyclic nucleic acid (BNA)
  source: /note="3' tri-ethylene glycol (TEG)"
gaagauggcau

SEQ ID NO: 9372 - RNA, 10 nt, Artificial Sequence
  source: /note="Description of Artificial Sequence: Synthetic oligonucleotide"
  source: /note="RNA"
  source: /note="5' tri-ethylene glycol (TEG)"
  modified_base (1)..(1): bicyclic nucleic acid (BNA)
  modified_base (2)..(2): bicyclic nucleic acid (BNA)
  source: /note="3' tri-ethylene glycol (TEG)"
gaagauggca

SEQ ID NO: 9373 - RNA, 9 nt, Artificial Sequence
  source: /note="Description of Artificial Sequence: Synthetic oligonucleotide"
  source: /note="RNA"
  source: /note="5' tri-ethylene glycol (TEG)"
  modified_base (1)..(1): bicyclic nucleic acid (BNA)
  modified_base (2)..(2): bicyclic nucleic acid (BNA)
  source: /note="3' tri-ethylene glycol (TEG)"
gaagauggc

SEQ ID NO: 9374 - RNA, 8 nt, Artificial Sequence
  source: /note="Description of Artificial Sequence: Synthetic oligonucleotide"
  source: /note="RNA"
  source: /note="5' tri-ethylene glycol (TEG)"
  modified_base (1)..(1): bicyclic nucleic acid (BNA)
  modified_base (2)..(2): bicyclic nucleic acid (BNA)
  source: /note="3' tri-ethylene glycol (TEG)"
gaagaugg

SEQ ID NO: 9375 - RNA, 16 nt, Artificial Sequence
  source: /note="Description of Artificial Sequence: Synthetic oligonucleotide"
  source: /note="RNA"
  source: /note="5' tri-ethylene glycol (TEG)"
  modified_base (1)..(1): bicyclic nucleic acid (BNA)
  modified_base (2)..(2): bicyclic nucleic acid (BNA)
  source: /note="3' tri-ethylene glycol (TEG)"
aagauggcauuucuag

SEQ ID NO: 9376 - RNA, 15 nt, Artificial Sequence
  source: /note="Description of Artificial Sequence: Synthetic oligonucleotide"
  source: /note="RNA"
  source: /note="5' tri-ethylene glycol (TEG)"
  modified_base (1)..(1): bicyclic nucleic acid (BNA)
  modified_base (2)..(2): bicyclic nucleic acid (BNA)
  source: /note="3' tri-ethylene glycol (TEG)"
aagauggcauuucua

SEQ ID NO: 9377 - RNA, 14 nt, Artificial Sequence
  source: /note="Description of Artificial Sequence: Synthetic oligonucleotide"
  source: /note="RNA"
  source: /note="5' tri-ethylene glycol (TEG)"
  modified_base (1)..(1): bicyclic nucleic acid (BNA)
  modified_base (2)..(2): bicyclic nucleic acid (BNA)
  source: /note="3' tri-ethylene glycol (TEG)"
aagauggcauuucu

SEQ ID NO: 9378 - RNA, 13 nt, Artificial Sequence
  source: /note="Description of Artificial Sequence: Synthetic oligonucleotide"
  source: /note="RNA"
  source: /note="5' tri-ethylene glycol (TEG)"
  modified_base (1)..(1): bicyclic nucleic acid (BNA)
  modified_base (2)..(2): bicyclic nucleic acid (BNA)
  source: /note="3' tri-ethylene glycol (TEG)"
aagauggcauuuc

SEQ ID NO: 9379 - RNA, 12 nt, Artificial Sequence
  source: /note="Description of Artificial Sequence: Synthetic oligonucleotide"
  source: /note="RNA"
  source: /note="5' tri-ethylene glycol (TEG)"
  modified_base (1)..(1): bicyclic nucleic acid (BNA)
  modified_base (2)..(2): bicyclic nucleic acid (BNA)
  source: /note="3' tri-ethylene glycol (TEG)"
aagauggcauuu

SEQ ID NO: 9380 - RNA, 11 nt, Artificial Sequence
  source: /note="Description of Artificial Sequence: Synthetic oligonucleotide"
  source: /note="RNA"
  source: /note="5' tri-ethylene glycol (TEG)"
  modified_base (1)..(1): bicyclic nucleic acid (BNA)
  modified_base (2)..(2): bicyclic nucleic acid (BNA)
  source: /note="3' tri-ethylene glycol (TEG)"
aagauggcauu

SEQ ID NO: 9381 - RNA, 10 nt, Artificial Sequence
  source: /note="Description of Artificial Sequence: Synthetic oligonucleotide"
  source: /note="RNA"
  source: /note="5' tri-ethylene glycol (TEG)"
  modified_base (1)..(1): bicyclic nucleic acid (BNA)
  modified_base (2)..(2): bicyclic nucleic acid (BNA)
  source: /note="3' tri-ethylene glycol (TEG)"
aagauggcau

SEQ ID NO: 9382 - RNA, 9 nt, Artificial Sequence
  source: /note="Description of Artificial Sequence: Synthetic oligonucleotide"
  source: /note="RNA"
  source: /note="5' tri-ethylene glycol (TEG)"
  modified_base (1)..(1): bicyclic nucleic acid (BNA)
  modified_base (2)..(2): bicyclic nucleic acid (BNA)
  source: /note="3' tri-ethylene glycol (TEG)"
aagauggca

SEQ ID NO: 9383 - RNA, 8 nt, Artificial Sequence
  source: /note="Description of Artificial Sequence: Synthetic oligonucleotide"
  source: /note="RNA"
  source: /note="5' tri-ethylene glycol (TEG)"
  modified_base (1)..(1): bicyclic nucleic acid (BNA)
  modified_base (2)..(2): bicyclic nucleic acid (BNA)
  source: /note="3' tri-ethylene glycol (TEG)"
aagauggc

SEQ ID NO: 9384 - RNA, 15 nt, Artificial Sequence
  source: /note="Description of Artificial Sequence: Synthetic oligonucleotide"
  source: /note="RNA"
  source: /note="5' tri-ethylene glycol (TEG)"
  modified_base (1)..(1): bicyclic nucleic acid (BNA)
  modified_base (2)..(2): bicyclic nucleic acid (BNA)
  source: /note="3' tri-ethylene glycol (TEG)"
agauggcauuucuag

SEQ ID NO: 9385 - RNA, 14 nt, Artificial Sequence
  source: /note="Description of Artificial Sequence: Synthetic oligonucleotide"
  source: /note="RNA"
  source: /note="5' tri-ethylene glycol (TEG)"
  modified_base (1)..(1): bicyclic nucleic acid (BNA)
  modified_base (2)..(2): bicyclic nucleic acid (BNA)
  source: /note="3' tri-ethylene glycol (TEG)"
agauggcauuucua

SEQ ID NO: 9386 - RNA, 13 nt, Artificial Sequence
  source: /note="Description of Artificial Sequence: Synthetic oligonucleotide"
  source: /note="RNA"
  source: /note="5' tri-ethylene glycol (TEG)"
  modified_base (1)..(1): bicyclic nucleic acid (BNA)
  modified_base (2)..(2): bicyclic nucleic acid (BNA)
  source: /note="3' tri-ethylene glycol (TEG)"
agauggcauuucu

SEQ ID NO: 9387 - RNA, 12 nt, Artificial Sequence
  source: /note="Description of Artificial Sequence: Synthetic oligonucleotide"
  source: /note="RNA"
  source: /note="5' tri-ethylene glycol (TEG)"
  modified_base (1)..(1): bicyclic nucleic acid (BNA)
  modified_base (2)..(2): bicyclic nucleic acid (BNA)
  source: /note="3' tri-ethylene glycol (TEG)"
agauggcauuuc

SEQ ID NO: 9388 - RNA, 11 nt, Artificial Sequence
  source: /note="Description of Artificial Sequence: Synthetic oligonucleotide"
  source: /note="RNA"
  source: /note="5' tri-ethylene glycol (TEG)"
  modified_base (1)..(1): bicyclic nucleic acid (BNA)
  modified_base (2)..(2): bicyclic nucleic acid (BNA)
  source: /note="3' tri-ethylene glycol (TEG)"
agauggcauuu

SEQ ID NO: 9389 - RNA, 10 nt, Artificial Sequence
  source: /note="Description of Artificial Sequence: Synthetic oligonucleotide"
  source: /note="RNA"
  source: /note="5' tri-ethylene glycol (TEG)"
  modified_base (1)..(1): bicyclic nucleic acid (BNA)
  modified_base (2)..(2): bicyclic nucleic acid (BNA)
  source: /note="3' tri-ethylene glycol (TEG)"
agauggcauu

SEQ ID NO: 9390 - RNA, 9 nt, Artificial Sequence
  source: /note="Description of Artificial Sequence: Synthetic oligonucleotide"
  source: /note="RNA"
  source: /note="5' tri-ethylene glycol (TEG)"
  modified_base (1)..(1): bicyclic nucleic acid (BNA)
  modified_base (2)..(2): bicyclic nucleic acid (BNA)
  source: /note="3' tri-ethylene glycol (TEG)"
agauggcau

SEQ ID NO: 9391 - RNA, 8 nt, Artificial Sequence
  source: /note="Description of Artificial Sequence: Synthetic oligonucleotide"
  source: /note="RNA"
  source: /note="5' tri-ethylene glycol (TEG)"
  modified_base (1)..(1): bicyclic nucleic acid (BNA)
  modified_base (2)..(2): bicyclic nucleic acid (BNA)
  source: /note="3' tri-ethylene glycol (TEG)"
agauggca

SEQ ID NO: 9392 - DNA, 30 bp, Artificial Sequence; identical to SEQ ID NO: 8204
  source: /note="Description of Artificial Sequence: Synthetic oligonucleotide"
  source: /note="Description of Combined DNA/RNA Molecule: Synthetic oligonucleotide"
  source: /note="DNA/RNA"
  source: /note="5' tri-ethylene glycol (TEG)"
  modified_base (1)..(1): bicyclic nucleic acid (BNA)
  modified_base (2)..(2): bicyclic nucleic acid (BNA)
  source: /note="3' tri-ethylene glycol (TEG)"

SEQ ID NO: 9393 - DNA, 29 bp, Artificial Sequence
  source: /note="Description of Artificial Sequence: Synthetic oligonucleotide"
  source: /note="Description of Combined DNA/RNA Molecule: Synthetic oligonucleotide"
  source: /note="DNA/RNA"
  source: /note="5' tri-ethylene glycol (TEG)"
  modified_base (1)..(1): bicyclic nucleic acid (BNA)
  modified_base (2)..(2): bicyclic nucleic acid (BNA)
  source: /note="3' tri-ethylene glycol (TEG)"
ctccaacaucaaggaagauggcauuucua

SEQ ID NO: 9394 - DNA, 28 bp, Artificial Sequence
  source: /note="Description of Artificial Sequence: Synthetic oligonucleotide"
  source: /note="Description of Combined DNA/RNA Molecule: Synthetic oligonucleotide"
  source: /note="DNA/RNA"
  source: /note="5' tri-ethylene glycol (TEG)"
  modified_base (1)..(1): bicyclic nucleic acid (BNA)
  modified_base (2)..(2): bicyclic nucleic acid (BNA)
  source: /note="3' tri-ethylene glycol (TEG)"
ctccaacaucaaggaagauggcauuucu

SEQ ID NO: 9395 - DNA, 27 bp, Artificial Sequence
  source: /note="Description of Artificial Sequence: Synthetic oligonucleotide"
  source: /note="Description of Combined DNA/RNA Molecule: Synthetic oligonucleotide"
  source: /note="DNA/RNA"
  source: /note="5' tri-ethylene glycol (TEG)"
  modified_base (1)..(1): bicyclic nucleic acid (BNA)
  modified_base (2)..(2): bicyclic nucleic acid (BNA)
  source: /note="3' tri-ethylene glycol (TEG)"
ctccaacaucaaggaagauggcauuuc

SEQ ID NO: 9396 - DNA, 26 bp, Artificial Sequence
  source: /note="Description of Artificial Sequence: Synthetic oligonucleotide"
  source: /note="Description of Combined DNA/RNA Molecule: Synthetic oligonucleotide"
  source: /note="DNA/RNA"
  source: /note="5' tri-ethylene glycol (TEG)"
  modified_base (1)..(1): bicyclic nucleic acid (BNA)
  modified_base (2)..(2): bicyclic nucleic acid (BNA)
  source: /note="3' tri-ethylene glycol (TEG)"
ctccaacaucaaggaagauggcauuu

SEQ ID NO: 9397 - DNA, 25 bp, Artificial Sequence
  source: /note="Description of Artificial Sequence: Synthetic oligonucleotide"
  source: /note="Description of Combined DNA/RNA Molecule: Synthetic oligonucleotide"
  source: /note="DNA/RNA"
  source: /note="5' tri-ethylene glycol (TEG)"
  modified_base (1)..(1): bicyclic nucleic acid (BNA)
  modified_base (2)..(2): bicyclic nucleic acid (BNA)
  source: /note="3' tri-ethylene glycol (TEG)"
ctccaacaucaaggaagauggcauu

SEQ ID NO: 9398 - DNA, 24 bp, Artificial Sequence
  source: /note="Description of Artificial Sequence: Synthetic oligonucleotide"
  source: /note="Description of Combined DNA/RNA Molecule: Synthetic oligonucleotide"
  source: /note="DNA/RNA"
  source: /note="5' tri-ethylene glycol (TEG)"
  modified_base (1)..(1): bicyclic nucleic acid (BNA)
  modified_base (2)..(2): bicyclic nucleic acid (BNA)
  source: /note="3' tri-ethylene glycol (TEG)"
ctccaacaucaaggaagauggcau

SEQ ID NO: 9399 - DNA, 23 bp, Artificial Sequence
  source: /note="Description of Artificial Sequence: Synthetic oligonucleotide"
  source: /note="Description of Combined DNA/RNA Molecule: Synthetic oligonucleotide"
  source: /note="DNA/RNA"
  source: /note="5' tri-ethylene glycol (TEG)"
  modified_base (1)..(1): bicyclic nucleic acid (BNA)
  modified_base (2)..(2): bicyclic nucleic acid (BNA)
  source: /note="3' tri-ethylene glycol (TEG)"
ctccaacaucaaggaagauggca

SEQ ID NO: 9400 - DNA, 22 bp, Artificial Sequence
  source: /note="Description of Artificial Sequence: Synthetic oligonucleotide"
  source: /note="Description of Combined DNA/RNA Molecule: Synthetic oligonucleotide"
  source: /note="DNA/RNA"
  source: /note="5' tri-ethylene glycol (TEG)"
  modified_base (1)..(1): bicyclic nucleic acid (BNA)
  modified_base (2)..(2): bicyclic nucleic acid (BNA)
  source: /note="3' tri-ethylene glycol (TEG)"
ctccaacaucaaggaagauggc

SEQ ID NO: 9401 - DNA, 21 bp, Artificial Sequence
  source: /note="Description of Artificial Sequence: Synthetic oligonucleotide"
  source: /note="Description of Combined DNA/RNA Molecule: Synthetic oligonucleotide"
  source: /note="DNA/RNA"
  source: /note="5' tri-ethylene glycol (TEG)"
  modified_base (1)..(1): bicyclic nucleic acid (BNA)
  modified_base (2)..(2): bicyclic nucleic acid (BNA)
  source: /note="3' tri-ethylene glycol (TEG)"
ctccaacaucaaggaagaugg

SEQ ID NO: 9402 - DNA, 20 bp, Artificial Sequence
  source: /note="Description of Artificial Sequence: Synthetic oligonucleotide"
  source: /note="Description of Combined DNA/RNA Molecule: Synthetic oligonucleotide"
  source: /note="DNA/RNA"
  source: /note="5' tri-ethylene glycol (TEG)"
  modified_base (1)..(1): bicyclic nucleic acid (BNA)
  modified_base (2)..(2): bicyclic nucleic acid (BNA)
  source: /note="3' tri-ethylene glycol (TEG)"
ctccaacaucaaggaagaug

SEQ ID NO: 9403 - DNA, 19 bp, Artificial Sequence
  source: /note="Description of Artificial Sequence: Synthetic oligonucleotide"
  source: /note="Description of Combined DNA/RNA Molecule: Synthetic oligonucleotide"
  source: /note="DNA/RNA"
  source: /note="5' tri-ethylene glycol (TEG)"
  modified_base (1)..(1): bicyclic nucleic acid (BNA)
  modified_base (2)..(2): bicyclic nucleic acid (BNA)
  source: /note="3' tri-ethylene glycol (TEG)"
ctccaacaucaaggaagau

SEQ ID NO: 9404 - DNA, 18 bp, Artificial Sequence
  source: /note="Description of Artificial Sequence: Synthetic oligonucleotide"
  source: /note="Description of Combined DNA/RNA Molecule: Synthetic oligonucleotide"
  source: /note="DNA/RNA"
  source: /note="5' tri-ethylene glycol (TEG)"
  modified_base (1)..(1): bicyclic nucleic acid (BNA)
  modified_base (2)..(2): bicyclic nucleic acid (BNA)
  source: /note="3' tri-ethylene glycol (TEG)"
ctccaacaucaaggaaga

SEQ ID NO: 9405 - DNA, 17 bp, Artificial Sequence
  source: /note="Description of Artificial Sequence: Synthetic oligonucleotide"
  source: /note="Description of Combined DNA/RNA Molecule: Synthetic oligonucleotide"
  source: /note="DNA/RNA"
  source: /note="5' tri-ethylene glycol (TEG)"
  modified_base (1)..(1): bicyclic nucleic acid (BNA)
  modified_base (2)..(2): bicyclic nucleic acid (BNA)
  source: /note="3' tri-ethylene glycol (TEG)"
ctccaacaucaaggaag

SEQ ID NO: 9406 - DNA, 29 bp, Artificial Sequence
  source: /note="Description of Artificial Sequence: Synthetic oligonucleotide"
  source: /note="Description of Combined DNA/RNA Molecule: Synthetic oligonucleotide"
  source: /note="DNA/RNA"
  source: /note="5' tri-ethylene glycol (TEG)"
  modified_base (1)..(1): bicyclic nucleic acid (BNA)
  modified_base (2)..(2): bicyclic nucleic acid (BNA)
  source: /note="3' tri-ethylene glycol (TEG)"
tccaacaucaaggaagauggcauuucuag

SEQ ID NO: 9407 - DNA, 28 bp, Artificial Sequence
  source: /note="Description of Artificial Sequence: Synthetic oligonucleotide"
  source: /note="Description of Combined DNA/RNA Molecule: Synthetic oligonucleotide"
  source: /note="DNA/RNA"
  source: /note="5' tri-ethylene glycol (TEG)"
  modified_base (1)..(1): bicyclic nucleic acid (BNA)
  modified_base (2)..(2): bicyclic nucleic acid (BNA)
  source: /note="3' tri-ethylene glycol (TEG)"
tccaacaucaaggaagauggcauuucua

SEQ ID NO: 9408 - DNA, 27 bp, Artificial Sequence
  source: /note="Description of Artificial Sequence: Synthetic oligonucleotide"
  source: /note="Description of Combined DNA/RNA Molecule: Synthetic oligonucleotide"
  source: /note="DNA/RNA"
  source: /note="5' tri-ethylene glycol (TEG)"
  modified_base (1)..(1): bicyclic nucleic acid (BNA)
  modified_base (2)..(2): bicyclic nucleic acid (BNA)
  source: /note="3' tri-ethylene glycol (TEG)"
tccaacaucaaggaagauggcauuucu

SEQ ID NO: 9409 - DNA, 26 bp, Artificial Sequence
  source: /note="Description of Artificial Sequence: Synthetic oligonucleotide"
  source: /note="Description of Combined DNA/RNA Molecule: Synthetic oligonucleotide"
  source: /note="DNA/RNA"
  source: /note="5' tri-ethylene glycol (TEG)"
  modified_base (1)..(1): bicyclic nucleic acid (BNA)
  modified_base (2)..(2): bicyclic nucleic acid (BNA)
  source: /note="3' tri-ethylene glycol (TEG)"
tccaacaucaaggaagauggcauuuc

SEQ ID NO: 9410 - DNA, 25 bp, Artificial Sequence
  source: /note="Description of Artificial Sequence: Synthetic oligonucleotide"
  source: /note="Description of Combined DNA/RNA Molecule: Synthetic oligonucleotide"
  source: /note="DNA/RNA"
  source: /note="5' tri-ethylene glycol (TEG)"
  modified_base (1)..(1): bicyclic nucleic acid (BNA)
  modified_base (2)..(2): bicyclic nucleic acid (BNA)
  source: /note="3' tri-ethylene glycol (TEG)"
tccaacaucaaggaagauggcauuu

SEQ ID NO: 9411 - DNA, 24 bp, Artificial Sequence
  source: /note="Description of Artificial Sequence: Synthetic oligonucleotide"
  source: /note="Description of Combined DNA/RNA Molecule: Synthetic oligonucleotide"
  source: /note="DNA/RNA"
  source: /note="5' tri-ethylene glycol (TEG)"
  modified_base (1)..(1): bicyclic nucleic acid (BNA)
  modified_base (2)..(2): bicyclic nucleic acid (BNA)
  source: /note="3' tri-ethylene glycol (TEG)"
tccaacaucaaggaagauggcauu

SEQ ID NO: 9412 - DNA, 23 bp, Artificial Sequence
  source: /note="Description of Artificial Sequence: Synthetic oligonucleotide"
  source: /note="Description of Combined DNA/RNA Molecule: Synthetic oligonucleotide"
  source: /note="DNA/RNA"
  source: /note="5' tri-ethylene glycol (TEG)"
  modified_base (1)..(1): bicyclic nucleic acid (BNA)
  modified_base (2)..(2): bicyclic nucleic acid (BNA)
  source: /note="3' tri-ethylene glycol (TEG)"
tccaacaucaaggaagauggcau

SEQ ID NO: 9413 - DNA, 22 bp, Artificial Sequence
  source: /note="Description of Artificial Sequence: Synthetic oligonucleotide"
  source: /note="Description of Combined DNA/RNA Molecule: Synthetic oligonucleotide"
  source: /note="DNA/RNA"
  source: /note="5' tri-ethylene glycol (TEG)"
  modified_base (1)..(1): bicyclic nucleic acid (BNA)
  modified_base (2)..(2): bicyclic nucleic acid (BNA)
  source: /note="3' tri-ethylene glycol (TEG)"
tccaacaucaaggaagauggca

SEQ ID NO: 9414 - DNA, 21 bp, Artificial Sequence
  source: /note="Description of Artificial Sequence: Synthetic oligonucleotide"
  source: /note="Description of Combined DNA/RNA Molecule: Synthetic oligonucleotide"
  source: /note="DNA/RNA"
  source: /note="5' tri-ethylene glycol (TEG)"
  modified_base (1)..(1): bicyclic nucleic acid (BNA)
  modified_base (2)..(2): bicyclic nucleic acid (BNA)
  source: /note="3' tri-ethylene glycol (TEG)"
tccaacaucaaggaagauggc

SEQ ID NO: 9415 - DNA, 20 bp, Artificial Sequence
  source: /note="Description of Artificial Sequence: Synthetic oligonucleotide"
  source: /note="Description of Combined DNA/RNA Molecule: Synthetic oligonucleotide"
  source: /note="DNA/RNA"
  source: /note="5' tri-ethylene glycol (TEG)"
  modified_base (1)..(1): bicyclic nucleic acid (BNA)
  modified_base (2)..(2): bicyclic nucleic acid (BNA)
  source: /note="3' tri-ethylene glycol (TEG)"
tccaacaucaaggaagaugg

SEQ ID NO: 9416 - DNA, 19 bp, Artificial Sequence
  source: /note="Description of Artificial Sequence: Synthetic oligonucleotide"
  source: /note="Description of Combined DNA/RNA Molecule: Synthetic oligonucleotide"
  source: /note="DNA/RNA"
  source: /note="5' tri-ethylene glycol (TEG)"
  modified_base (1)..(1): bicyclic nucleic acid (BNA)
  modified_base (2)..(2): bicyclic nucleic acid (BNA)
  source: /note="3' tri-ethylene glycol (TEG)"
tccaacaucaaggaagaug

SEQ ID NO: 9417 - DNA, 18 bp, Artificial Sequence
  source: /note="Description of Artificial Sequence: Synthetic oligonucleotide"
  source: /note="Description of Combined DNA/RNA Molecule: Synthetic oligonucleotide"
  source: /note="DNA/RNA"
  source: /note="5' tri-ethylene glycol (TEG)"
  modified_base (1)..(1): bicyclic nucleic acid (BNA)
  modified_base (2)..(2): bicyclic nucleic acid (BNA)
  source: /note="3' tri-ethylene glycol (TEG)"
tccaacaucaaggaagau

SEQ ID NO: 9418 - DNA, 17 bp, Artificial Sequence
  source: /note="Description of Artificial Sequence: Synthetic oligonucleotide"
  source: /note="Description of Combined DNA/RNA Molecule: Synthetic oligonucleotide"
  source: /note="DNA/RNA"
  source: /note="5' tri-ethylene glycol (TEG)"
  modified_base (1)..(1): bicyclic nucleic acid (BNA)
  modified_base (2)..(2): bicyclic nucleic acid (BNA)
  source: /note="3' tri-ethylene glycol (TEG)"
tccaacaucaaggaaga

SEQ ID NO: 9419 - DNA, 16 bp, Artificial Sequence
  source: /note="Description of Artificial Sequence: Synthetic oligonucleotide"
  source: /note="Description of Combined DNA/RNA Molecule: Synthetic oligonucleotide"
  source: /note="DNA/RNA"
  source: /note="5' tri-ethylene glycol (TEG)"
  modified_base (1)..(1): bicyclic nucleic acid (BNA)
  modified_base (2)..(2): bicyclic nucleic acid (BNA)
  source: /note="3' tri-ethylene glycol (TEG)"
tccaacaucaaggaag

SEQ ID NO: 9420 - RNA, 28 nt, Artificial Sequence
  source: /note="Description of Artificial Sequence: Synthetic oligonucleotide"
  source: /note="RNA"
  source: /note="5' tri-ethylene glycol (TEG)"
  modified_base (1)..(1): bicyclic nucleic acid (BNA)
  modified_base (2)..(2): bicyclic nucleic acid (BNA)
  source: /note="3' tri-ethylene glycol (TEG)"
ccaacaucaaggaagauggcauuucuag

SEQ ID NO: 9421 - RNA, 27 nt, Artificial Sequence
  source: /note="Description of Artificial Sequence: Synthetic oligonucleotide"
  source: /note="RNA"
  source: /note="5' tri-ethylene glycol (TEG)"
  modified_base (1)..(1): bicyclic nucleic acid (BNA)
  modified_base (2)..(2): bicyclic nucleic acid (BNA)
  source: /note="3' tri-ethylene glycol (TEG)"
ccaacaucaaggaagauggcauuucua

SEQ ID NO: 9422 - RNA, 26 nt, Artificial Sequence
  source: /note="Description of Artificial Sequence: Synthetic oligonucleotide"
  source: /note="RNA"
  source: /note="5' tri-ethylene glycol (TEG)"
  modified_base (1)..(1): bicyclic nucleic acid (BNA)
  modified_base (2)..(2): bicyclic nucleic acid (BNA)
  source: /note="3' tri-ethylene glycol (TEG)"
ccaacaucaaggaagauggcauuucu

SEQ ID NO: 9423 - RNA, 25 nt, Artificial Sequence
  source: /note="Description of Artificial Sequence: Synthetic oligonucleotide"
  source: /note="RNA"
  source: /note="5' tri-ethylene glycol (TEG)"
  modified_base (1)..(1): bicyclic nucleic acid (BNA)
  modified_base (2)..(2): bicyclic nucleic acid (BNA)
  source: /note="3' tri-ethylene glycol (TEG)"
ccaacaucaaggaagauggcauuuc

SEQ ID NO: 9424 - RNA, 24 nt, Artificial Sequence
  source: /note="Description of Artificial Sequence: Synthetic oligonucleotide"
  source: /note="RNA"
  source: /note="5' tri-ethylene glycol (TEG)"
  modified_base (1)..(1): bicyclic nucleic acid (BNA)
  modified_base (2)..(2): bicyclic nucleic acid (BNA)
  source: /note="3' tri-ethylene glycol (TEG)"
ccaacaucaaggaagauggcauuu

SEQ ID NO: 9425 - RNA, 23 nt, Artificial Sequence
  source: /note="Description of Artificial Sequence: Synthetic oligonucleotide"
  source: /note="RNA"
  source: /note="5' tri-ethylene glycol (TEG)"
  modified_base (1)..(1): bicyclic nucleic acid (BNA)
  modified_base (2)..(2): bicyclic nucleic acid (BNA)
  source: /note="3' tri-ethylene glycol (TEG)"
ccaacaucaaggaagauggcauu

SEQ ID NO: 9426 - RNA, 22 nt, Artificial Sequence
  source: /note="Description of Artificial Sequence: Synthetic oligonucleotide"
  source: /note="RNA"
  source: /note="5' tri-ethylene glycol (TEG)"
  modified_base (1)..(1): bicyclic nucleic acid (BNA)
  modified_base (2)..(2): bicyclic nucleic acid (BNA)
  source: /note="3' tri-ethylene glycol (TEG)"
ccaacaucaaggaagauggcau

SEQ ID NO: 9427 - RNA, 21 nt, Artificial Sequence
  source: /note="Description of Artificial Sequence: Synthetic oligonucleotide"
  source: /note="RNA"
  source: /note="5' tri-ethylene glycol (TEG)"
  modified_base (1)..(1): bicyclic nucleic acid (BNA)
  modified_base (2)..(2): bicyclic nucleic acid (BNA)
  source: /note="3' tri-ethylene glycol (TEG)"
ccaacaucaaggaagauggca

SEQ ID NO: 9428 - RNA, 20 nt, Artificial Sequence
  source: /note="Description of Artificial Sequence: Synthetic oligonucleotide"
  source: /note="RNA"
  source: /note="5' tri-ethylene glycol (TEG)"
  modified_base (1)..(1): bicyclic nucleic acid (BNA)
  modified_base (2)..(2): bicyclic nucleic acid (BNA)
  source: /note="3' tri-ethylene glycol (TEG)"
ccaacaucaaggaagauggc

SEQ ID NO: 9429 - RNA, 19 nt, Artificial Sequence
  source: /note="Description of Artificial Sequence: Synthetic oligonucleotide"
  source: /note="RNA"
  source: /note="5' tri-ethylene glycol (TEG)"
  modified_base (1)..(1): bicyclic nucleic acid (BNA)
  modified_base (2)..(2): bicyclic nucleic acid (BNA)
  source: /note="3' tri-ethylene glycol (TEG)"
ccaacaucaaggaagaugg

SEQ ID NO: 9430 - RNA, 18 nt, Artificial Sequence
  source: /note="Description of Artificial Sequence: Synthetic oligonucleotide"
  source: /note="RNA"
  source: /note="5' tri-ethylene glycol (TEG)"
  modified_base (1)..(1): bicyclic nucleic acid (BNA)
  modified_base (2)..(2): bicyclic nucleic acid (BNA)
  source: /note="3' tri-ethylene glycol (TEG)"
ccaacaucaaggaagaug

SEQ ID NO: 9431 - RNA, 17 nt, Artificial Sequence
  source: /note="Description of Artificial Sequence: Synthetic oligonucleotide"
  source: /note="RNA"
  source: /note="5' tri-ethylene glycol (TEG)"
  modified_base (1)..(1): bicyclic nucleic acid (BNA)
  modified_base (2)..(2): bicyclic nucleic acid (BNA)
  source: /note="3' tri-ethylene glycol (TEG)"
ccaacaucaaggaagau

SEQ ID NO: 9432 - RNA, 16 nt, Artificial Sequence
  source: /note="Description of Artificial Sequence: Synthetic oligonucleotide"
  source: /note="RNA"
  source: /note="5' tri-ethylene glycol (TEG)"
  modified_base (1)..(1): bicyclic nucleic acid (BNA)
  modified_base (2)..(2): bicyclic nucleic acid (BNA)
  source: /note="3' tri-ethylene glycol (TEG)"
ccaacaucaaggaaga

SEQ ID NO: 9433 - RNA, 15 nt, Artificial Sequence
  source: /note="Description of Artificial Sequence: Synthetic oligonucleotide"
  source: /note="RNA"
  source: /note="5' tri-ethylene glycol (TEG)"
  modified_base (1)..(1): bicyclic nucleic acid (BNA)
  modified_base (2)..(2): bicyclic nucleic acid (BNA)
  source: /note="3' tri-ethylene glycol (TEG)"
ccaacaucaaggaag

SEQ ID NO: 9434 - RNA, 27 nt, Artificial Sequence
  source: /note="Description of Artificial Sequence: Synthetic oligonucleotide"
  source: /note="RNA"
  source: /note="5' tri-ethylene glycol (TEG)"
  modified_base (1)..(1): bicyclic nucleic acid (BNA)
  modified_base (2)..(2): bicyclic nucleic acid (BNA)
  source: /note="3' tri-ethylene glycol (TEG)"
caacaucaaggaagauggcauuucuag

SEQ ID NO: 9435 - RNA, 26 nt, Artificial Sequence
  source: /note="Description of Artificial Sequence: Synthetic oligonucleotide"
  source: /note="RNA"
  source: /note="5' tri-ethylene glycol (TEG)"
  modified_base (1)..(1): bicyclic nucleic acid (BNA)
  modified_base (2)..(2): bicyclic nucleic acid (BNA)
  source: /note="3' tri-ethylene glycol (TEG)"
caacaucaaggaagauggcauuucua

SEQ ID NO: 9436 - RNA, 25 nt, Artificial Sequence
  source: /note="Description of Artificial Sequence: Synthetic oligonucleotide"
  source: /note="RNA"
  source: /note="5' tri-ethylene glycol (TEG)"
  modified_base (1)..(1): bicyclic nucleic acid (BNA)
  modified_base (2)..(2): bicyclic nucleic acid (BNA)
  source: /note="3' tri-ethylene glycol (TEG)"
caacaucaaggaagauggcauuucu

SEQ ID NO: 9437 - RNA, 24 nt, Artificial Sequence
  source: /note="Description of Artificial Sequence: Synthetic oligonucleotide"
  source: /note="RNA"
  source: /note="5' tri-ethylene glycol (TEG)"
  modified_base (1)..(1): bicyclic nucleic acid (BNA)
  modified_base (2)..(2): bicyclic nucleic acid (BNA)
  source: /note="3' tri-ethylene glycol (TEG)"
caacaucaaggaagauggcauuuc

SEQ ID NO: 9438 - RNA, 23 nt, Artificial Sequence
  source: /note="Description of Artificial Sequence: Synthetic oligonucleotide"
  source: /note="RNA"
  source: /note="5' tri-ethylene glycol (TEG)"
  modified_base (1)..(1): bicyclic nucleic acid (BNA)
  modified_base (2)..(2): bicyclic nucleic acid (BNA)
  source: /note="3' tri-ethylene glycol (TEG)"
caacaucaaggaagauggcauuu

SEQ ID NO: 9439 - RNA, 22 nt, Artificial Sequence
  source: /note="Description of Artificial Sequence: Synthetic oligonucleotide"
  source: /note="RNA"
  source: /note="5' tri-ethylene glycol (TEG)"
  modified_base (1)..(1): bicyclic nucleic acid (BNA)
  modified_base (2)..(2): bicyclic nucleic acid (BNA)
  source: /note="3' tri-ethylene glycol (TEG)"
caacaucaaggaagauggcauu

SEQ ID NO: 9440 - RNA, 21 nt, Artificial Sequence
  source: /note="Description of Artificial Sequence: Synthetic oligonucleotide"
  source: /note="RNA"
  source: /note="5' tri-ethylene glycol (TEG)"
  modified_base (1)..(1): bicyclic nucleic acid (BNA)
  modified_base (2)..(2): bicyclic nucleic acid (BNA)
  source: /note="3' tri-ethylene glycol (TEG)"
caacaucaaggaagauggcau

SEQ ID NO: 9441 - RNA, 20 nt, Artificial Sequence
  source: /note="Description of Artificial Sequence: Synthetic oligonucleotide"
  source: /note="RNA"
  source: /note="5' tri-ethylene glycol (TEG)"
  modified_base (1)..(1): bicyclic nucleic acid (BNA)
  modified_base (2)..(2): bicyclic nucleic acid (BNA)
  source: /note="3' tri-ethylene glycol (TEG)"
caacaucaaggaagauggca

SEQ ID NO: 9442 - RNA, 19 nt, Artificial Sequence
  source: /note="Description of Artificial Sequence: Synthetic oligonucleotide"
  source: /note="RNA"
  source: /note="5' tri-ethylene glycol (TEG)"
  modified_base (1)..(1): bicyclic nucleic acid (BNA)
  modified_base (2)..(2): bicyclic nucleic acid (BNA)
  source: /note="3' tri-ethylene glycol (TEG)"
caacaucaaggaagauggc

SEQ ID NO: 9443 - RNA, 18 nt, Artificial Sequence
  source: /note="Description of Artificial Sequence: Synthetic oligonucleotide"
  source: /note="RNA"
  source: /note="5' tri-ethylene glycol (TEG)"
  modified_base (1)..(1): bicyclic nucleic acid (BNA)
  modified_base (2)..(2): bicyclic nucleic acid (BNA)
  source: /note="3' tri-ethylene glycol (TEG)"
caacaucaaggaagaugg

SEQ ID NO: 9444 - RNA, 17 nt, Artificial Sequence
  source: /note="Description of Artificial Sequence: Synthetic oligonucleotide"
  source: /note="RNA"
  source: /note="5' tri-ethylene glycol (TEG)"
  modified_base (1)..(1): bicyclic nucleic acid (BNA)
  modified_base (2)..(2): bicyclic nucleic acid (BNA)
  source: /note="3' tri-ethylene glycol (TEG)"
caacaucaaggaagaug

SEQ ID NO: 9445 - RNA, 16 nt, Artificial Sequence
  source: /note="Description of Artificial Sequence: Synthetic oligonucleotide"
  source: /note="RNA"
  source: /note="5' tri-ethylene glycol (TEG)"
  modified_base (1)..(1): bicyclic nucleic acid (BNA)
  modified_base (2)..(2): bicyclic nucleic acid (BNA)
  source: /note="3' tri-ethylene glycol (TEG)"
caacaucaaggaagau

SEQ ID NO: 9446 - RNA, 15 nt, Artificial Sequence
  source: /note="Description of Artificial Sequence: Synthetic oligonucleotide"
  source: /note="RNA"
  source: /note="5' tri-ethylene glycol (TEG)"
  modified_base (1)..(1): bicyclic nucleic acid (BNA)
  modified_base (2)..(2): bicyclic nucleic acid (BNA)
  source: /note="3' tri-ethylene glycol (TEG)"
caacaucaaggaaga

SEQ ID NO: 9447 - RNA, 14 nt, Artificial Sequence
  source: /note="Description of Artificial Sequence: Synthetic oligonucleotide"
  source: /note="RNA"
  source: /note="5' tri-ethylene glycol (TEG)"
  modified_base (1)..(1): bicyclic nucleic acid (BNA)
  modified_base (2)..(2): bicyclic nucleic acid (BNA)
  source: /note="3' tri-ethylene glycol (TEG)"
caacaucaaggaag

SEQ ID NO: 9448 - RNA, 26 nt, Artificial Sequence
  source: /note="Description of Artificial Sequence: Synthetic oligonucleotide"
  source: /note="RNA"
  source: /note="5' tri-ethylene glycol (TEG)"
  modified_base (1)..(1): bicyclic nucleic acid (BNA)
  modified_base (2)..(2): bicyclic nucleic acid (BNA)
  source: /note="3' tri-ethylene glycol (TEG)"
aacaucaaggaagauggcauuucuag

SEQ ID NO: 9449 - RNA, 25 nt, Artificial Sequence
  source: /note="Description of Artificial Sequence: Synthetic oligonucleotide"
  source: /note="RNA"
  source: /note="5' tri-ethylene glycol (TEG)"
  modified_base (1)..(1): bicyclic nucleic acid (BNA)
  modified_base (2)..(2): bicyclic nucleic acid (BNA)
  source: /note="3' tri-ethylene glycol (TEG)"
aacaucaaggaagauggcauuucua

SEQ ID NO: 9450 - RNA, 24 nt, Artificial Sequence
  source: /note="Description of Artificial Sequence: Synthetic oligonucleotide"
  source: /note="RNA"
  source: /note="5' tri-ethylene glycol (TEG)"
  modified_base (1)..(1): bicyclic nucleic acid (BNA)
  modified_base (2)..(2): bicyclic nucleic acid (BNA)
  source: /note="3' tri-ethylene glycol (TEG)"
aacaucaaggaagauggcauuucu

SEQ ID NO: 9451 - RNA, 23 nt, Artificial Sequence
  source: /note="Description of Artificial Sequence: Synthetic oligonucleotide"
  source: /note="RNA"
  source: /note="5' tri-ethylene glycol (TEG)"
  modified_base (1)..(1): bicyclic nucleic acid (BNA)
  modified_base (2)..(2): bicyclic nucleic acid (BNA)
  source: /note="3' tri-ethylene glycol (TEG)"
aacaucaaggaagauggcauuuc

SEQ ID NO: 9452 - RNA, 22 nt, Artificial Sequence
  source: /note="Description of Artificial Sequence: Synthetic oligonucleotide"
  source: /note="RNA"
  source: /note="5' tri-ethylene glycol (TEG)"
  modified_base (1)..(1): bicyclic nucleic acid (BNA)
  modified_base (2)..(2): bicyclic nucleic acid (BNA)
  source: /note="3' tri-ethylene glycol (TEG)"
aacaucaaggaagauggcauuu

SEQ ID NO: 9453 - RNA, 21 nt, Artificial Sequence
  source: /note="Description of Artificial Sequence: Synthetic oligonucleotide"
  source: /note="RNA"
  source: /note="5' tri-ethylene glycol (TEG)"
  modified_base (1)..(1): bicyclic nucleic acid (BNA)
  modified_base (2)..(2): bicyclic nucleic acid (BNA)
  source: /note="3' tri-ethylene glycol (TEG)"
aacaucaaggaagauggcauu

SEQ ID NO: 9454 - RNA, 20 nt, Artificial Sequence
  source: /note="Description of Artificial Sequence: Synthetic oligonucleotide"
  source: /note="RNA"
  source: /note="5' tri-ethylene glycol (TEG)"
  modified_base (1)..(1): bicyclic nucleic acid (BNA)
  modified_base (2)..(2): bicyclic nucleic acid (BNA)
  source: /note="3' tri-ethylene glycol (TEG)"
aacaucaaggaagauggcau

SEQ ID NO: 9455 - RNA, 19 nt, Artificial Sequence
  source: /note="Description of Artificial Sequence: Synthetic oligonucleotide"
  source: /note="RNA"
  source: /note="5' tri-ethylene glycol (TEG)"
  modified_base (1)..(1): bicyclic nucleic acid (BNA)
  modified_base (2)..(2): bicyclic nucleic acid (BNA)
  source: /note="3' tri-ethylene glycol (TEG)"
aacaucaaggaagauggca

SEQ ID NO: 9456 - RNA, 18 nt, Artificial Sequence
  source: /note="Description of Artificial Sequence: Synthetic oligonucleotide"
  source: /note="RNA"
  source: /note="5' tri-ethylene glycol (TEG)"
  modified_base (1)..(1): bicyclic nucleic acid (BNA)
  modified_base (2)..(2): bicyclic nucleic acid (BNA)
  source: /note="3' tri-ethylene glycol (TEG)"
aacaucaaggaagauggc

SEQ ID NO: 9457 - RNA, 17 nt, Artificial Sequence
  source: /note="Description of Artificial Sequence: Synthetic oligonucleotide"
  source: /note="RNA"
  source: /note="5' tri-ethylene glycol (TEG)"
  modified_base (1)..(1): bicyclic nucleic acid (BNA)
  modified_base (2)..(2): bicyclic nucleic acid (BNA)
  source: /note="3' tri-ethylene glycol (TEG)"
aacaucaaggaagaugg

SEQ ID NO: 9458 - RNA, 16 nt, Artificial Sequence
  source: /note="Description of Artificial Sequence: Synthetic oligonucleotide"
  source: /note="RNA"
  source: /note="5' tri-ethylene glycol (TEG)"
  modified_base (1)..(1): bicyclic nucleic acid (BNA)
  modified_base (2)..(2): bicyclic nucleic acid (BNA)
  source: /note="3' tri-ethylene glycol (TEG)"
aacaucaaggaagaug

SEQ ID NO: 9459 - RNA, 15 nt, Artificial Sequence
  source: /note="Description of Artificial Sequence: Synthetic oligonucleotide"
  source: /note="RNA"
  source: /note="5' tri-ethylene glycol (TEG)"
  modified_base (1)..(1): bicyclic nucleic acid (BNA)
  modified_base (2)..(2): bicyclic nucleic acid (BNA)
  source: /note="3' tri-ethylene glycol (TEG)"
aacaucaaggaagau

SEQ ID NO: 9460 - RNA, 14 nt, Artificial Sequence
  source: /note="Description of Artificial Sequence: Synthetic oligonucleotide"
  source: /note="RNA"
  source: /note="5' tri-ethylene glycol (TEG)"
  modified_base (1)..(1): bicyclic nucleic acid (BNA)
  modified_base (2)..(2): bicyclic nucleic acid (BNA)
  source: /note="3' tri-ethylene glycol (TEG)"
aacaucaaggaaga

SEQ ID NO: 9461 - RNA, 13 nt, Artificial Sequence
  source: /note="Description of Artificial Sequence: Synthetic oligonucleotide"
  source: /note="RNA"
  source: /note="5' tri-ethylene glycol (TEG)"
  modified_base (1)..(1): bicyclic nucleic acid (BNA)
  modified_base (2)..(2): bicyclic nucleic acid (BNA)
  source: /note="3' tri-ethylene glycol (TEG)"
aacaucaaggaag

SEQ ID NO: 9462 - RNA, 25 nt, Artificial Sequence
  source: /note="Description of Artificial Sequence: Synthetic oligonucleotide"
  source: /note="RNA"
  source: /note="5' tri-ethylene glycol (TEG)"
  modified_base (1)..(1): bicyclic nucleic acid (BNA)
  modified_base (2)..(2): bicyclic nucleic acid (BNA)
  source: /note="3' tri-ethylene glycol (TEG)"
acaucaaggaagauggcauuucuag

SEQ ID NO: 9463 - RNA, 24 nt, Artificial Sequence
  source: /note="Description of Artificial Sequence: Synthetic oligonucleotide"
  source: /note="RNA"
  source: /note="5' tri-ethylene glycol (TEG)"
  modified_base (1)..(1): bicyclic nucleic acid (BNA)
  modified_base (2)..(2): bicyclic nucleic acid (BNA)
  source: /note="3' tri-ethylene glycol (TEG)"
acaucaaggaagauggcauuucua

SEQ ID NO: 9464 - RNA, 23 nt, Artificial Sequence
  source: /note="Description of Artificial Sequence: Synthetic oligonucleotide"
  source: /note="RNA"
  source: /note="5' tri-ethylene glycol (TEG)"
  modified_base (1)..(1): bicyclic nucleic acid (BNA)
  modified_base (2)..(2): bicyclic nucleic acid (BNA)
  source: /note="3' tri-ethylene glycol (TEG)"
acaucaaggaagauggcauuucu

SEQ ID NO: 9465 - RNA, 22 nt, Artificial Sequence
  source: /note="Description of Artificial Sequence: Synthetic oligonucleotide"
  source: /note="RNA"
  source: /note="5' tri-ethylene glycol (TEG)"
  modified_base (1)..(1): bicyclic nucleic acid (BNA)
  modified_base (2)..(2): bicyclic nucleic acid (BNA)
  source: /note="3' tri-ethylene glycol (TEG)"
acaucaaggaagauggcauuuc

SEQ ID NO: 9466 - RNA, 21 nt, Artificial Sequence
  source: /note="Description of Artificial Sequence: Synthetic oligonucleotide"
  source: /note="RNA"
  source: /note="5' tri-ethylene glycol (TEG)"
  modified_base (1)..(1): bicyclic nucleic acid (BNA)
  modified_base (2)..(2): bicyclic nucleic acid (BNA)
  source: /note="3' tri-ethylene glycol (TEG)"
acaucaaggaagauggcauuu

SEQ ID NO: 9467 - RNA, 20 nt, Artificial Sequence
  source: /note="Description of Artificial Sequence: Synthetic oligonucleotide"
  source: /note="RNA"
  source: /note="5' tri-ethylene glycol (TEG)"
  modified_base (1)..(1): bicyclic nucleic acid (BNA)
  modified_base (2)..(2): bicyclic nucleic acid (BNA)
  source: /note="3' tri-ethylene glycol (TEG)"
acaucaaggaagauggcauu

SEQ ID NO: 9468 - RNA, 19 nt, Artificial Sequence
  source: /note="Description of Artificial Sequence: Synthetic oligonucleotide"
  source: /note="RNA"
  source: /note="5' tri-ethylene glycol (TEG)"
  modified_base (1)..(1): bicyclic nucleic acid (BNA)
  modified_base (2)..(2): bicyclic nucleic acid (BNA)
  source: /note="3' tri-ethylene glycol (TEG)"
acaucaaggaagauggcau

SEQ ID NO: 9469 - RNA, 18 nt, Artificial Sequence
  source: /note="Description of Artificial Sequence: Synthetic oligonucleotide"
  source: /note="RNA"
  source: /note="5' tri-ethylene glycol (TEG)"
  modified_base (1)..(1): bicyclic nucleic acid (BNA)
  modified_base (2)..(2): bicyclic nucleic acid (BNA)
  source: /note="3' tri-ethylene glycol (TEG)"
acaucaaggaagauggca

SEQ ID NO: 9470 - RNA, 17 nt, Artificial Sequence
  source: /note="Description of Artificial Sequence: Synthetic oligonucleotide"
  source: /note="RNA"
  source: /note="5' tri-ethylene glycol (TEG)"
  modified_base (1)..(1): bicyclic nucleic acid (BNA)
  modified_base (2)..(2): bicyclic nucleic acid (BNA)
  source: /note="3' tri-ethylene glycol (TEG)"
acaucaaggaagauggc

SEQ ID NO: 9471 - RNA, 16 nt, Artificial Sequence
  source: /note="Description of Artificial Sequence: Synthetic oligonucleotide"
  source: /note="RNA"
  source: /note="5' tri-ethylene glycol (TEG)"
  modified_base (1)..(1): bicyclic nucleic acid (BNA)
  modified_base (2)..(2): bicyclic nucleic acid (BNA)
  source: /note="3' tri-ethylene glycol (TEG)"
acaucaaggaagaugg

SEQ ID NO: 9472 - RNA, 15 nt, Artificial Sequence
  source: /note="Description of Artificial Sequence: Synthetic oligonucleotide"
  source: /note="RNA"
  source: /note="5' tri-ethylene glycol (TEG)"
  modified_base (1)..(1): bicyclic nucleic acid (BNA)
  modified_base (2)..(2): bicyclic nucleic acid (BNA)
  source: /note="3' tri-ethylene glycol (TEG)"
acaucaaggaagaug

SEQ ID NO: 9473 - RNA, 14 nt, Artificial Sequence
  source: /note="Description of Artificial Sequence: Synthetic oligonucleotide"
  source: /note="RNA"
  source: /note="5' tri-ethylene glycol (TEG)"
  modified_base (1)..(1): bicyclic nucleic acid (BNA)
  modified_base (2)..(2): bicyclic nucleic acid (BNA)
  source: /note="3' tri-ethylene glycol (TEG)"
acaucaaggaagau

SEQ ID NO: 9474 - RNA, 13 nt, Artificial Sequence
  source: /note="Description of Artificial Sequence: Synthetic oligonucleotide"
  source: /note="RNA"
  source: /note="5' tri-ethylene glycol (TEG)"
  modified_base (1)..(1): bicyclic nucleic acid (BNA)
  modified_base (2)..(2): bicyclic nucleic acid (BNA)
  source: /note="3' tri-ethylene glycol (TEG)"
acaucaaggaaga

SEQ ID NO: 9475 - RNA, 12 nt, Artificial Sequence
  source: /note="Description of Artificial Sequence: Synthetic oligonucleotide"
  source: /note="RNA"
  source: /note="5' tri-ethylene glycol (TEG)"
  modified_base (1)..(1): bicyclic nucleic acid (BNA)
  modified_base (2)..(2): bicyclic nucleic acid (BNA)
  source: /note="3' tri-ethylene glycol (TEG)"
acaucaaggaag

SEQ ID NO: 9476 - RNA, 24 nt, Artificial Sequence
  source: /note="Description of Artificial Sequence: Synthetic oligonucleotide"
  source: /note="RNA"
  source: /note="5' tri-ethylene glycol (TEG)"
  modified_base (1)..(1): bicyclic nucleic acid (BNA)
  modified_base (2)..(2): bicyclic nucleic acid (BNA)
  source: /note="3' tri-ethylene glycol (TEG)"
caucaaggaagauggcauuucuag

SEQ ID NO: 9477 - RNA, 23 nt, Artificial Sequence
  source: /note="Description of Artificial Sequence: Synthetic oligonucleotide"
  source: /note="RNA"
  source: /note="5' tri-ethylene glycol (TEG)"
  modified_base (1)..(1): bicyclic nucleic acid (BNA)
  modified_base (2)..(2): bicyclic nucleic acid (BNA)
  source: /note="3' tri-ethylene glycol (TEG)"
caucaaggaagauggcauuucua

SEQ ID NO: 9478 - RNA, 22 nt, Artificial Sequence
  source: /note="Description of Artificial Sequence: Synthetic oligonucleotide"
  source: /note="RNA"
  source: /note="5' tri-ethylene glycol (TEG)"
  modified_base (1)..(1): bicyclic nucleic acid (BNA)
  modified_base (2)..(2): bicyclic nucleic acid (BNA)
  source: /note="3' tri-ethylene glycol (TEG)"
caucaaggaagauggcauuucu

SEQ ID NO: 9479 - RNA, 21 nt, Artificial Sequence
  source: /note="Description of Artificial Sequence: Synthetic oligonucleotide"
  source: /note="RNA"
  source: /note="5' tri-ethylene glycol (TEG)"
  modified_base (1)..(1): bicyclic nucleic acid (BNA)
  modified_base (2)..(2): bicyclic nucleic acid (BNA)
  source: /note="3' tri-ethylene glycol (TEG)"
caucaaggaagauggcauuuc

SEQ ID NO: 9480 - RNA, 20 nt, Artificial Sequence
  source: /note="Description of Artificial Sequence: Synthetic oligonucleotide"
  source: /note="RNA"
  source: /note="5' tri-ethylene glycol (TEG)"
  modified_base (1)..(1): bicyclic nucleic acid (BNA)
  modified_base (2)..(2): bicyclic nucleic acid (BNA)
  source: /note="3' tri-ethylene glycol (TEG)"
caucaaggaagauggcauuu

SEQ ID NO: 9481 - RNA, 19 nt, Artificial Sequence
  source: /note="Description of Artificial Sequence: Synthetic oligonucleotide"
  source: /note="RNA"
  source: /note="5' tri-ethylene glycol (TEG)"
  modified_base (1)..(1): bicyclic nucleic acid (BNA)
  modified_base (2)..(2): bicyclic nucleic acid (BNA)
  source: /note="3' tri-ethylene glycol (TEG)"
caucaaggaagauggcauu

SEQ ID NO: 9482 - RNA, 18 nt, Artificial Sequence
  source: /note="Description of Artificial Sequence: Synthetic oligonucleotide"
  source: /note="RNA"
  source: /note="5' tri-ethylene glycol (TEG)"
  modified_base (1)..(1): bicyclic nucleic acid (BNA)
  modified_base (2)..(2): bicyclic nucleic acid (BNA)
  source: /note="3' tri-ethylene glycol (TEG)"
caucaaggaagauggcau

SEQ ID NO: 9483 - RNA, 17 nt, Artificial Sequence
  source: /note="Description of Artificial Sequence: Synthetic oligonucleotide"
  source: /note="RNA"
  source: /note="5' tri-ethylene glycol (TEG)"
  modified_base (1)..(1): bicyclic nucleic acid (BNA)
  modified_base (2)..(2): bicyclic nucleic acid (BNA)
  source: /note="3' tri-ethylene glycol (TEG)"
caucaaggaagauggca

SEQ ID NO: 9484 - RNA, 16 nt, Artificial Sequence
  source: /note="Description of Artificial Sequence: Synthetic oligonucleotide"
  source: /note="RNA"
  source: /note="5' tri-ethylene glycol (TEG)"
  modified_base (1)..(1): bicyclic nucleic acid (BNA)
  modified_base (2)..(2): bicyclic nucleic acid (BNA)
  source: /note="3' tri-ethylene glycol (TEG)"
caucaaggaagauggc

SEQ ID NO: 9485 - RNA, 15 nt, Artificial Sequence
  source: /note="Description of Artificial Sequence: Synthetic oligonucleotide"
  source: /note="RNA"
  source: /note="5' tri-ethylene glycol (TEG)"
  modified_base (1)..(1): bicyclic nucleic acid (BNA)
  modified_base (2)..(2): bicyclic nucleic acid (BNA)
  source: /note="3' tri-ethylene glycol (TEG)"
caucaaggaagaugg

SEQ ID NO: 9486 - RNA, 14 nt, Artificial Sequence
  source: /note="Description of Artificial Sequence: Synthetic oligonucleotide"
  source: /note="RNA"
  source: /note="5' tri-ethylene glycol (TEG)"
  modified_base (1)..(1): bicyclic nucleic acid (BNA)
  modified_base (2)..(2): bicyclic nucleic acid (BNA)
  source: /note="3' tri-ethylene glycol (TEG)"
caucaaggaagaug

SEQ ID NO: 9487 - RNA, 13 nt, Artificial Sequence
  source: /note="Description of Artificial Sequence: Synthetic oligonucleotide"
  source: /note="RNA"
  source: /note="5' tri-ethylene glycol (TEG)"
  modified_base (1)..(1): bicyclic nucleic acid (BNA)
  modified_base (2)..(2): bicyclic nucleic acid (BNA)
  source: /note="3' tri-ethylene glycol (TEG)"
caucaaggaagau

SEQ ID NO: 9488 - RNA, 12 nt, Artificial Sequence
  source: /note="Description of Artificial Sequence: Synthetic oligonucleotide"
  source: /note="RNA"
  source: /note="5' tri-ethylene glycol (TEG)"
  modified_base (1)..(1): bicyclic nucleic acid (BNA)
  modified_base (2)..(2): bicyclic nucleic acid (BNA)
  source: /note="3' tri-ethylene glycol (TEG)"
caucaaggaaga

SEQ ID NO: 9489 - RNA, 11 nt, Artificial Sequence
  source: /note="Description of Artificial Sequence: Synthetic oligonucleotide"
  source: /note="RNA"
  source: /note="5' tri-ethylene glycol (TEG)"
  modified_base (1)..(1): bicyclic nucleic acid (BNA)
  modified_base (2)..(2): bicyclic nucleic acid (BNA)
  source: /note="3' tri-ethylene glycol (TEG)"
caucaaggaag

SEQ ID NO: 9490 - DNA, 23 bp, Artificial Sequence
  source: /note="Description of Artificial Sequence: Synthetic oligonucleotide"
  source: /note="Description of Combined DNA/RNA Molecule: Synthetic oligonucleotide"
  source: /note="DNA/RNA"
  source: /note="5' tri-ethylene glycol (TEG)"
  modified_base (1)..(1): bicyclic nucleic acid (BNA)
  modified_base (2)..(2): bicyclic nucleic acid (BNA)
  source: /note="3' tri-ethylene glycol (TEG)"
atcaaggaagauggcauuucuag

SEQ ID NO: 9491 - DNA, 22 bp, Artificial Sequence
  source: /note="Description of Artificial Sequence: Synthetic oligonucleotide"
  source: /note="Description of Combined DNA/RNA Molecule: Synthetic oligonucleotide"
  source: /note="DNA/RNA"
  source: /note="5' tri-ethylene glycol (TEG)"
  modified_base (1)..(1): bicyclic nucleic acid (BNA)
  modified_base (2)..(2): bicyclic nucleic acid (BNA)
  source: /note="3' tri-ethylene glycol (TEG)"
atcaaggaagauggcauuucua

SEQ ID NO: 9492 - DNA, 21 bp, Artificial Sequence
  source: /note="Description of Artificial Sequence: Synthetic oligonucleotide"
  source: /note="Description of Combined DNA/RNA Molecule: Synthetic oligonucleotide"
  source: /note="DNA/RNA"
  source: /note="5' tri-ethylene glycol (TEG)"
  modified_base (1)..(1): bicyclic nucleic acid (BNA)
  modified_base (2)..(2): bicyclic nucleic acid (BNA)
  source: /note="3' tri-ethylene glycol (TEG)"
atcaaggaagauggcauuucu

SEQ ID NO: 9493 - DNA, 20 bp, Artificial Sequence
  source: /note="Description of Artificial Sequence: Synthetic oligonucleotide"
  source: /note="Description of Combined DNA/RNA Molecule: Synthetic oligonucleotide"
  source: /note="DNA/RNA"
  source: /note="5' tri-ethylene glycol (TEG)"
  modified_base (1)..(1): bicyclic nucleic acid (BNA)
  modified_base (2)..(2): bicyclic nucleic acid (BNA)
  source: /note="3' tri-ethylene glycol (TEG)"
atcaaggaagauggcauuuc

SEQ ID NO: 9494 - DNA, 19 bp, Artificial Sequence
  source: /note="Description of Artificial Sequence: Synthetic oligonucleotide"
  source: /note="Description of Combined DNA/RNA Molecule: Synthetic oligonucleotide"
  source: /note="DNA/RNA"
  source: /note="5' tri-ethylene glycol (TEG)"
  modified_base (1)..(1): bicyclic nucleic acid (BNA)
  modified_base (2)..(2): bicyclic nucleic acid (BNA)
  source: /note="3' tri-ethylene glycol (TEG)"
atcaaggaagauggcauuu

SEQ ID NO: 9495 - DNA, 18 bp, Artificial Sequence
  source: /note="Description of Artificial Sequence: Synthetic oligonucleotide"
  source: /note="Description of Combined DNA/RNA Molecule: Synthetic oligonucleotide"
  source: /note="DNA/RNA"
  source: /note="5' tri-ethylene glycol (TEG)"
  modified_base (1)..(1): bicyclic nucleic acid (BNA)
  modified_base (2)..(2): bicyclic nucleic acid (BNA)
  source: /note="3' tri-ethylene glycol (TEG)"
atcaaggaagauggcauu

SEQ ID NO: 9496 - DNA, 17 bp, Artificial Sequence
  source: /note="Description of Artificial Sequence: Synthetic oligonucleotide"
  source: /note="Description of Combined DNA/RNA Molecule: Synthetic oligonucleotide"
  source: /note="DNA/RNA"
  source: /note="5' tri-ethylene glycol (TEG)"
  modified_base (1)..(1): bicyclic nucleic acid (BNA)
  modified_base (2)..(2): bicyclic nucleic acid (BNA)
  source: /note="3' tri-ethylene glycol (TEG)"
atcaaggaagauggcau

SEQ ID NO: 9497 - DNA, 16 bp, Artificial Sequence
  source: /note="Description of Artificial Sequence: Synthetic oligonucleotide"
  source: /note="Description of Combined DNA/RNA Molecule: Synthetic oligonucleotide"
  source: /note="DNA/RNA"
  source: /note="5' tri-ethylene glycol (TEG)"
  modified_base (1)..(1): bicyclic nucleic acid (BNA)
  modified_base (2)..(2): bicyclic nucleic acid (BNA)
  source: /note="3' tri-ethylene glycol (TEG)"
atcaaggaagauggca

SEQ ID NO: 9498 - DNA, 15 bp, Artificial Sequence
  source: /note="Description of Artificial Sequence: Synthetic oligonucleotide"
  source: /note="Description of Combined DNA/RNA Molecule: Synthetic oligonucleotide"
  source: /note="DNA/RNA"
  source: /note="5' tri-ethylene glycol (TEG)"
  modified_base (1)..(1): bicyclic nucleic acid (BNA)
  modified_base (2)..(2): bicyclic nucleic acid (BNA)
  source: /note="3' tri-ethylene glycol (TEG)"
atcaaggaagauggc

SEQ ID NO: 9499 - DNA, 14 bp, Artificial Sequence
  source: /note="Description of Artificial Sequence: Synthetic oligonucleotide"
  source: /note="Description of Combined DNA/RNA Molecule: Synthetic oligonucleotide"
  source: /note="DNA/RNA"
  source: /note="5' tri-ethylene glycol (TEG)"
  modified_base (1)..(1): bicyclic nucleic acid (BNA)
  modified_base (2)..(2): bicyclic nucleic acid (BNA)
  source: /note="3' tri-ethylene glycol (TEG)"
atcaaggaagaugg

SEQ ID NO: 9500 - DNA, 13 bp, Artificial Sequence
  source: /note="Description of Artificial Sequence: Synthetic oligonucleotide"
  source: /note="Description of Combined DNA/RNA Molecule: Synthetic oligonucleotide"
  source: /note="DNA/RNA"
  source: /note="5' tri-ethylene glycol (TEG)"
  modified_base (1)..(1): bicyclic nucleic acid (BNA)
  modified_base (2)..(2): bicyclic nucleic acid (BNA)
  source: /note="3' tri-ethylene glycol (TEG)"
atcaaggaagaug

SEQ ID NO: 9501 - DNA, 12 bp, Artificial Sequence
  source: /note="Description of Artificial Sequence: Synthetic oligonucleotide"
  source: /note="Description of Combined DNA/RNA Molecule: Synthetic oligonucleotide"
  source: /note="DNA/RNA"
  source: /note="5' tri-ethylene glycol (TEG)"
  modified_base (1)..(1): bicyclic nucleic acid (BNA)
  modified_base (2)..(2): bicyclic nucleic acid (BNA)
  source: /note="3' tri-ethylene glycol (TEG)"
atcaaggaagau

SEQ ID NO: 9502 - DNA, 11 bp, Artificial Sequence
  source: /note="Description of Artificial Sequence: Synthetic oligonucleotide"
  source: /note="DNA/RNA"
  source: /note="5' tri-ethylene glycol (TEG)"
  modified_base (1)..(1): bicyclic nucleic acid (BNA)
  modified_base (2)..(2): bicyclic nucleic acid (BNA)
  source: /note="3' tri-ethylene glycol (TEG)"
atcaaggaaga

SEQ ID NO: 9503 - DNA, 10 bp, Artificial Sequence
  source: /note="Description of Artificial Sequence: Synthetic oligonucleotide"
  source: /note="DNA/RNA"
  source: /note="5' tri-ethylene glycol (TEG)"
  modified_base (1)..(1): bicyclic nucleic acid (BNA)
  modified_base (2)..(2): bicyclic nucleic acid (BNA)
  source: /note="3' tri-ethylene glycol (TEG)"
atcaaggaag

SEQ ID NO: 9504 - RNA, 23 nt, Artificial Sequence
  source: /note="Description of Artificial Sequence: Synthetic oligonucleotide"
  source: /note="RNA"
  source: /note="5' tri-ethylene glycol (TEG)"
  modified_base (1)..(1): bicyclic nucleic acid (BNA)
  modified_base (2)..(2): bicyclic nucleic acid (BNA)
  source: /note="3' tri-ethylene glycol (TEG)"
ccagagcagguaccuccaacauc

SEQ ID NO: 9505 - RNA, 18 nt, Artificial Sequence
  source: /note="Description of Artificial Sequence: Synthetic oligonucleotide"
  source: /note="RNA"
  source: /note="5' tri-ethylene glycol (TEG)"
  modified_base (1)..(1): bicyclic nucleic acid (BNA)
  modified_base (2)..(2): bicyclic nucleic acid (BNA)
  source: /note="3' tri-ethylene glycol (TEG)"
ccagagcagguaccucca

SEQ ID NO: 9506 - RNA, 23 nt, Artificial Sequence
  source: /note="Description of Artificial Sequence: Synthetic oligonucleotide"
  source: /note="RNA"
  source: /note="5' tri-ethylene glycol (TEG)"
  modified_base (1)..(1): bicyclic nucleic acid (BNA)
  modified_base (2)..(2): bicyclic nucleic acid (BNA)
  source: /note="3' tri-ethylene glycol (TEG)"
ccucugugauuuuauaacuugau

SEQ ID NO: 9507 - DNA, 17 bp, Artificial Sequence
  source: /note="Description of Artificial Sequence: Synthetic oligonucleotide"
  source: /note="Description of Combined DNA/RNA Molecule: Synthetic oligonucleotide"
  source: /note="DNA/RNA"
  source: /note="5' tri-ethylene glycol (TEG)"
  modified_base (1)..(1): bicyclic nucleic acid (BNA)
  modified_base (2)..(2): bicyclic nucleic acid (BNA)
  source: /note="3' tri-ethylene glycol (TEG)"
tcacccaccaucacccu

SEQ ID NO: 9508 - DNA, 20 bp, Artificial Sequence
  source: /note="Description of Artificial Sequence: Synthetic oligonucleotide"
  source: /note="Description of Combined DNA/RNA Molecule: Synthetic oligonucleotide"
  source: /note="DNA/RNA"
  source: /note="5' tri-ethylene glycol (TEG)"
  modified_base (1)..(1): bicyclic nucleic acid (BNA)
  modified_base (2)..(2): bicyclic nucleic acid (BNA)
  source: /note="3' tri-ethylene glycol (TEG)"
tgauauccucaaggucaccc

SEQ ID NO: 9509 - DNA, 22 bp, Artificial Sequence
  source: /note="Description of Artificial Sequence: Synthetic oligonucleotide"
  source: /note="Description of Combined DNA/RNA Molecule: Synthetic oligonucleotide"
  source: /note="DNA/RNA"
  source: /note="5' tri-ethylene glycol (TEG)"
  modified_base (1)..(1): bicyclic nucleic acid (BNA)
  modified_base (2)..(2): bicyclic nucleic acid (BNA)
  source: /note="3' tri-ethylene glycol (TEG)"
ctgcuugaugaucaucucguug

SEQ ID NO: 9510 - DNA, 18 bp, Artificial Sequence
  source: /note="Description of Artificial Sequence: Synthetic oligonucleotide"
  source: /note="Description of Combined DNA/RNA Molecule: Synthetic oligonucleotide"
  source: /note="DNA/RNA"
  source: /note="5' tri-ethylene glycol (TEG)"
  modified_base (1)..(1): bicyclic nucleic acid (BNA)
  modified_base (2)..(2): bicyclic nucleic acid (BNA)
  source: /note="3' tri-ethylene glycol (TEG)"
ctgcuugaugaucaucuc

SEQ ID NO: 9511 - DNA, 19 bp, Artificial Sequence
  source: /note="Description of Artificial Sequence: Synthetic oligonucleotide"
  source: /note="Description of Combined DNA/RNA Molecule: Synthetic oligonucleotide"
  source: /note="DNA/RNA"
  source: /note="5' tri-ethylene glycol (TEG)"
  modified_base (1)..(1): bicyclic nucleic acid (BNA)
  modified_base (2)..(2): bicyclic nucleic acid (BNA)
  source: /note="3' tri-ethylene glycol (TEG)"
gtuuccuuaguaaccacag

SEQ ID NO: 9512 - DNA, 17 bp, Artificial Sequence
  source: /note="Description of Artificial Sequence: Synthetic oligonucleotide"
  source: /note="Description of Combined DNA/RNA Molecule: Synthetic oligonucleotide"
  source: /note="DNA/RNA"
  source: /note="5' tri-ethylene glycol (TEG)"
  modified_base (1)..(1): bicyclic nucleic acid (BNA)
  modified_base (2)..(2): bicyclic nucleic acid (BNA)
  source: /note="3' tri-ethylene glycol (TEG)"
gtuuccuuaguaaccac

SEQ ID NO: 9513 - DNA, 20 bp, Artificial Sequence
  source: /note="Description of Artificial Sequence: Synthetic oligonucleotide"
  source: /note="Description of Combined DNA/RNA Molecule: Synthetic oligonucleotide"
  source: /note="DNA/RNA"
  modified_base (19)..(19): bicyclic nucleic acid (BNA)
  modified_base (20)..(20): bicyclic nucleic acid (BNA)
ucaaggaagauggcauuuct

SEQ ID NO: 9514 - RNA, 22 nt, Artificial Sequence
  source: /note="Description of Artificial Sequence: Synthetic oligonucleotide"
  source: /note="RNA"
  modified_base (21)..(21): bicyclic nucleic acid (BNA)
  modified_base (22)..(22): bicyclic nucleic acid (BNA)
ucaaggaagauggcauuucuag

SEQ ID NO: 9515 - RNA, 18 nt, Artificial Sequence
  source: /note="Description of Artificial Sequence: Synthetic oligonucleotide"
  source: /note="RNA"
  modified_base (17)..(17): bicyclic nucleic acid (BNA)
  modified_base (18)..(18): bicyclic nucleic acid (BNA)
gguaaguucuguccaagc

SEQ ID NO: 9516 - RNA, 18 nt, Artificial Sequence
  source: /note="Description of Artificial Sequence: Synthetic oligonucleotide"
  source: /note="RNA"
  modified_base (17)..(17): bicyclic nucleic acid (BNA)
  modified_base (18)..(18): bicyclic nucleic acid (BNA)
guaaguucuguccaagcc

SEQ ID NO: 9517 - RNA, 18 nt, Artificial Sequence
  source: /note="Description of Artificial Sequence: Synthetic oligonucleotide"
  source: /note="RNA"
  modified_base (17)..(17): bicyclic nucleic acid (BNA)
  modified_base (18)..(18): bicyclic nucleic acid (BNA)
agucgguaaguucugucc

SEQ ID NO: 9518 - RNA, 18 nt, Artificial Sequence
  source: /note="Description of Artificial Sequence: Synthetic oligonucleotide"
  source: /note="RNA"
  modified_base (17)..(17): bicyclic nucleic acid (BNA)
  modified_base (18)..(18): bicyclic nucleic acid (BNA)
cuguccaagcccgguuga

SEQ ID NO: 9519 - RNA, 15 nt, Artificial Sequence
  source: /note="Description of Artificial Sequence: Synthetic oligonucleotide"
  source: /note="RNA"
  modified_base (14)..(14): bicyclic nucleic acid (BNA)
  modified_base (15)..(15): bicyclic nucleic acid (BNA)
uaaguucuguccaag

SEQ ID NO: 9520 - RNA, 20 nt, Artificial Sequence
  source: /note="Description of Artificial Sequence: Synthetic oligonucleotide"
  source: /note="RNA"
  modified_base (19)..(19): bicyclic nucleic acid (BNA)
  modified_base (20)..(20): bicyclic nucleic acid (BNA)
uucuguccaagcccgguuga

SEQ ID NO: 9521 - DNA, 19 bp, Artificial Sequence
  source: /note="Description of Artificial Sequence: Synthetic oligonucleotide"
  source: /note="Description of Combined DNA/RNA Molecule: Synthetic oligonucleotide"
  source: /note="DNA/RNA"
  modified_base (18)..(18): bicyclic nucleic acid (BNA)
  modified_base (19)..(19): bicyclic nucleic acid (BNA)
uucuguccaagcccggutg

SEQ ID NO: 9522 - DNA, 18 bp, Artificial Sequence
  source: /note="Description of Artificial Sequence: Synthetic oligonucleotide"
  source: /note="Description of Combined DNA/RNA Molecule: Synthetic oligonucleotide"
  source: /note="DNA/RNA"
  modified_base (17)..(17): bicyclic nucleic acid (BNA)
  modified_base (18)..(18): bicyclic nucleic acid (BNA)
uucuguccaagcccggtt

SEQ ID NO: 9523 - DNA, 17 bp, Artificial Sequence
  source: /note="Description of Artificial Sequence: Synthetic oligonucleotide"
  source: /note="Description of Combined DNA/RNA Molecule: Synthetic oligonucleotide"
  source: /note="DNA/RNA"
  modified_base (16)..(16): bicyclic nucleic acid (BNA)
  modified_base (17)..(17): bicyclic nucleic acid (BNA)
uucuguccaagcccggt

SEQ ID NO: 9524 - RNA, 16 nt, Artificial Sequence
  source: /note="Description of Artificial Sequence: Synthetic oligonucleotide"
  source: /note="RNA"
  modified_base (15)..(15): bicyclic nucleic acid (BNA)
  modified_base (16)..(16): bicyclic nucleic acid (BNA)
uucuguccaagcccgg

SEQ ID NO: 9525 - RNA, 15 nt, Artificial Sequence
  source: /note="Description of Artificial Sequence: Synthetic oligonucleotide"
  source: /note="RNA"
  modified_base (14)..(14): bicyclic nucleic acid (BNA)
  modified_base (15)..(15): bicyclic nucleic acid (BNA)
uucuguccaagcccg

SEQ ID NO: 9526 - RNA, 14 nt, Artificial Sequence
  source: /note="Description of Artificial Sequence: Synthetic oligonucleotide"
  source: /note="RNA"
  modified_base (13)..(13): bicyclic nucleic acid (BNA)
  modified_base (14)..(14): bicyclic nucleic acid (BNA)
uucuguccaagccc

SEQ ID NO: 9527 - RNA, 13 nt, Artificial Sequence
  source: /note="Description of Artificial Sequence: Synthetic oligonucleotide"
  source: /note="RNA"
  modified_base (12)..(12): bicyclic nucleic acid (BNA)
  modified_base (13)..(13): bicyclic nucleic acid (BNA)
uucuguccaagcc

SEQ ID NO: 9528 - RNA, 12 nt, Artificial Sequence
  source: /note="Description of Artificial Sequence: Synthetic oligonucleotide"
  source: /note="RNA"
  modified_base (11)..(11): bicyclic nucleic acid (BNA)
  modified_base (12)..(12): bicyclic nucleic acid (BNA)
uucuguccaagc

SEQ ID NO: 9529 - RNA, 11 nt, Artificial Sequence
  source: /note="Description of Artificial Sequence: Synthetic oligonucleotide"
  source: /note="RNA"
  modified_base (10)..(10): bicyclic nucleic acid (BNA)
  modified_base (11)..(11): bicyclic nucleic acid (BNA)
uucuguccaag

SEQ ID NO: 9530 - RNA, 10 nt, Artificial Sequence
  source: /note="Description of Artificial Sequence: Synthetic oligonucleotide"
  source: /note="RNA"
  modified_base (9)..(9): bicyclic nucleic acid (BNA)
  modified_base (10)..(10): bicyclic nucleic acid (BNA)
uucuguccaa

SEQ ID NO: 9531 - RNA, 9 nt, Artificial Sequence
  source: /note="Description of Artificial Sequence: Synthetic oligonucleotide"
  source: /note="RNA"
  modified_base (8)..(8): bicyclic nucleic acid (BNA)
  modified_base (9)..(9): bicyclic nucleic acid (BNA)
uucugucca

SEQ ID NO: 9532 - RNA, 8 nt, Artificial Sequence
  source: /note="Description of Artificial Sequence: Synthetic oligonucleotide"
  source: /note="RNA"
  modified_base (7)..(7): bicyclic nucleic acid (BNA)
  modified_base (8)..(8): bicyclic nucleic acid (BNA)
uucugucc

SEQ ID NO: 9533 - RNA, 19 nt, Artificial Sequence
  source: /note="Description of Artificial Sequence: Synthetic oligonucleotide"
  source: /note="RNA"
  modified_base (18)..(18): bicyclic nucleic acid (BNA)
  modified_base (19)..(19): bicyclic nucleic acid (BNA)
ucuguccaagcccgguuga

SEQ ID NO: 9534 - DNA, 18 bp, Artificial Sequence
  source: /note="Description of Artificial Sequence: Synthetic oligonucleotide"
  source: /note="Description of Combined DNA/RNA Molecule: Synthetic oligonucleotide"
  source: /note="DNA/RNA"
  modified_base (17)..(17): bicyclic nucleic acid (BNA)
  modified_base (18)..(18): bicyclic nucleic acid (BNA)
ucuguccaagcccggutg

SEQ ID NO: 9535 - DNA, 17 bp, Artificial Sequence
  source: /note="Description of Artificial Sequence: Synthetic oligonucleotide"
  source: /note="Description of Combined DNA/RNA Molecule: Synthetic oligonucleotide"
  source: /note="DNA/RNA"
  modified_base (16)..(16): bicyclic nucleic acid (BNA)
  modified_base (17)..(17): bicyclic nucleic acid (BNA)
ucuguccaagcccggtt

SEQ ID NO: 9536 - DNA, 16 bp, Artificial Sequence
  source: /note="Description of Artificial Sequence: Synthetic oligonucleotide"
  source: /note="Description of Combined DNA/RNA Molecule: Synthetic oligonucleotide"
  source: /note="DNA/RNA"
  modified_base (15)..(15): bicyclic nucleic acid (BNA)
  modified_base (16)..(16): bicyclic nucleic acid (BNA)
ucuguccaagcccggt

SEQ ID NO: 9537 - RNA, 15 nt, Artificial Sequence
  source: /note="Description of Artificial Sequence: Synthetic oligonucleotide"
  source: /note="RNA"
  modified_base (14)..(14): bicyclic nucleic acid (BNA)
  modified_base (15)..(15): bicyclic nucleic acid (BNA)
ucuguccaagcccgg

SEQ ID NO: 9538 - RNA, 14 nt, Artificial Sequence
  source: /note="Description of Artificial Sequence: Synthetic oligonucleotide"
  source: /note="RNA"
  modified_base (13)..(13): bicyclic nucleic acid (BNA)
  modified_base (14)..(14): bicyclic nucleic acid (BNA)
ucuguccaagcccg

SEQ ID NO: 9539 - RNA, 13 nt, Artificial Sequence
  source: /note="Description of Artificial Sequence: Synthetic oligonucleotide"
  source: /note="RNA"
  modified_base (12)..(12): bicyclic nucleic acid (BNA)
  modified_base (13)..(13): bicyclic nucleic acid (BNA)
ucuguccaagccc

SEQ ID NO: 9540 - RNA, 12 nt, Artificial Sequence
  source: /note="Description of Artificial Sequence: Synthetic oligonucleotide"
  source: /note="RNA"
  modified_base (11)..(11): bicyclic nucleic acid (BNA)
  modified_base (12)..(12): bicyclic nucleic acid (BNA)
ucuguccaagcc

SEQ ID NO: 9541 - RNA, 11 nt, Artificial Sequence
  source: /note="Description of Artificial Sequence: Synthetic oligonucleotide"
  source: /note="RNA"
  modified_base (10)..(10): bicyclic nucleic acid (BNA)
  modified_base (11)..(11): bicyclic nucleic acid (BNA)
ucuguccaagc

SEQ ID NO: 9542 - RNA, 10 nt, Artificial Sequence
  source: /note="Description of Artificial Sequence: Synthetic oligonucleotide"
  source: /note="RNA"
  modified_base (9)..(9): bicyclic nucleic acid (BNA)
  modified_base (10)..(10): bicyclic nucleic acid (BNA)
ucuguccaag

SEQ ID NO: 9543 - RNA, 9 nt, Artificial Sequence
  source: /note="Description of Artificial Sequence: Synthetic oligonucleotide"
  source: /note="RNA"
  modified_base (8)..(8): bicyclic nucleic acid (BNA)
  modified_base (9)..(9): bicyclic nucleic acid (BNA)
ucuguccaa

SEQ ID NO: 9544 - RNA, 8 nt, Artificial Sequence
  source: /note="Description of Artificial Sequence: Synthetic oligonucleotide"
  source: /note="RNA"
  modified_base (7)..(7): bicyclic nucleic acid (BNA)
  modified_base (8)..(8): bicyclic nucleic acid (BNA)
ucugucca

SEQ ID NO: 9545 - DNA, 17 bp, Artificial Sequence
  source: /note="Description of Artificial Sequence: Synthetic oligonucleotide"
  source: /note="Description of Combined DNA/RNA Molecule: Synthetic oligonucleotide"
  source: /note="DNA/RNA"
  modified_base (16)..(16): bicyclic nucleic acid (BNA)
  modified_base (17)..(17): bicyclic nucleic acid (BNA)
cuguccaagcccggutg

SEQ ID NO: 9546 - DNA, 16 bp, Artificial Sequence
  source: /note="Description of Artificial Sequence: Synthetic oligonucleotide"
  source: /note="Description of Combined DNA/RNA Molecule: Synthetic oligonucleotide"
  source: /note="DNA/RNA"
  modified_base (15)..(15): bicyclic nucleic acid (BNA)
  modified_base (16)..(16): bicyclic nucleic acid (BNA)
cuguccaagcccggtt

SEQ ID NO: 9547 - DNA, 15 bp, Artificial Sequence
  source: /note="Description of Artificial Sequence: Synthetic oligonucleotide"
  source: /note="Description of Combined DNA/RNA Molecule: Synthetic oligonucleotide"
  source: /note="DNA/RNA"
  modified_base (14)..(14): bicyclic nucleic acid (BNA)
  modified_base (15)..(15): bicyclic nucleic acid (BNA)
cuguccaagcccggt

SEQ ID NO: 9548 - RNA, 14 nt, Artificial Sequence
  source: /note="Description of Artificial Sequence: Synthetic oligonucleotide"
  source: /note="RNA"
  modified_base (13)..(13): bicyclic nucleic acid (BNA)
  modified_base (14)..(14): bicyclic nucleic acid (BNA)
cuguccaagcccgg

SEQ ID NO: 9549 - RNA, 13 nt, Artificial Sequence
  source: /note="Description of Artificial Sequence: Synthetic oligonucleotide"
  source: /note="RNA"
  modified_base (12)..(12): bicyclic nucleic acid (BNA)
  modified_base (13)..(13): bicyclic nucleic acid (BNA)
cuguccaagcccg

SEQ ID NO: 9550 - RNA, 12 nt, Artificial Sequence
  source: /note="Description of Artificial Sequence: Synthetic oligonucleotide"
  source: /note="RNA"
  modified_base (11)..(11): bicyclic nucleic acid (BNA)
  modified_base (12)..(12): bicyclic nucleic acid (BNA)
cuguccaagccc

SEQ ID NO: 9551 - RNA, 11 nt, Artificial Sequence
  source: /note="Description of Artificial Sequence: Synthetic oligonucleotide"
  source: /note="RNA"
  modified_base (10)..(10): bicyclic nucleic acid (BNA)
  modified_base (11)..(11): bicyclic nucleic acid (BNA)
cuguccaagcc

SEQ ID NO: 9552 - RNA, 10 nt, Artificial Sequence
  source: /note="Description of Artificial Sequence: Synthetic oligonucleotide"
  source: /note="RNA"
  modified_base (9)..(9): bicyclic nucleic acid (BNA)
  modified_base (10)..(10): bicyclic nucleic acid (BNA)
cuguccaagc

SEQ ID NO: 9553 - RNA, 9 nt, Artificial Sequence
  source: /note="Description of Artificial Sequence: Synthetic oligonucleotide"
  source: /note="RNA"
  modified_base (8)..(8): bicyclic nucleic acid (BNA)
  modified_base (9)..(9): bicyclic nucleic acid (BNA)
cuguccaag

SEQ ID NO: 9554 - RNA, 8 nt, Artificial Sequence
  source: /note="Description of Artificial Sequence: Synthetic oligonucleotide"
  source: /note="RNA"
  modified_base (7)..(7): bicyclic nucleic acid (BNA)
  modified_base (8)..(8): bicyclic nucleic acid (BNA)
cuguccaa

SEQ ID NO: 9555 - DNA, 20 bp, Artificial Sequence
  source: /note="Description of Artificial Sequence: Synthetic oligonucleotide"
  source: /note="Description of Combined DNA/RNA Molecule: Synthetic oligonucleotide"
  source: /note="DNA/RNA"
  modified_base (19)..(19): bicyclic nucleic acid (BNA)
  modified_base (20)..(20): bicyclic nucleic acid (BNA)
guucuguccaagcccggutg

SEQ ID NO: 9556 - DNA, 19 bp, Artificial Sequence
  source: /note="Description of Artificial Sequence: Synthetic oligonucleotide"
  source: /note="Description of Combined DNA/RNA Molecule: Synthetic oligonucleotide"
  source: /note="DNA/RNA"
  modified_base (18)..(18): bicyclic nucleic acid (BNA)
  modified_base (19)..(19): bicyclic nucleic acid (BNA)
guucuguccaagcccggtt

SEQ ID NO: 9557 - DNA, 18 bp, Artificial Sequence
  source: /note="Description of Artificial Sequence: Synthetic oligonucleotide"
  source: /note="Description of Combined DNA/RNA Molecule: Synthetic oligonucleotide"
  source: /note="DNA/RNA"
  modified_base (17)..(17): bicyclic nucleic acid (BNA)
  modified_base (18)..(18): bicyclic nucleic acid (BNA)
guucuguccaagcccggt

SEQ ID NO: 9558 - RNA, 17 nt, Artificial Sequence
  source: /note="Description of Artificial Sequence: Synthetic oligonucleotide"
  source: /note="RNA"
  modified_base (16)..(16): bicyclic nucleic acid (BNA)
  modified_base (17)..(17): bicyclic nucleic acid (BNA)
guucuguccaagcccgg

SEQ ID NO: 9559 - RNA, 16 nt, Artificial Sequence
  source: /note="Description of Artificial Sequence: Synthetic oligonucleotide"
  source: /note="RNA"
  modified_base (15)..(15): bicyclic nucleic acid (BNA)
  modified_base (16)..(16): bicyclic nucleic acid (BNA)
guucuguccaagcccg

SEQ ID NO: 9560 - RNA, 15 nt, Artificial Sequence
  source: /note="Description of Artificial Sequence: Synthetic oligonucleotide"
  source: /note="RNA"
  modified_base (14)..(14): bicyclic nucleic acid (BNA)
  modified_base (15)..(15): bicyclic nucleic acid (BNA)
guucuguccaagccc

SEQ ID NO: 9561 - RNA, 14 nt, Artificial Sequence
  source: /note="Description of Artificial Sequence: Synthetic oligonucleotide"
  source: /note="RNA"
  modified_base (13)..(13): bicyclic nucleic acid (BNA)
  modified_base (14)..(14): bicyclic nucleic acid (BNA)
guucuguccaagcc

SEQ ID NO: 9562 - RNA, 13 nt, Artificial Sequence
  source: /note="Description of Artificial Sequence: Synthetic oligonucleotide"
  source: /note="RNA"
  modified_base (12)..(12): bicyclic nucleic acid (BNA)
  modified_base (13)..(13): bicyclic nucleic acid (BNA)
guucuguccaagc

SEQ ID NO: 9563 - RNA, 12 nt, Artificial Sequence
  source: /note="Description of Artificial Sequence: Synthetic oligonucleotide"
  source: /note="RNA"
  modified_base (11)..(11): bicyclic nucleic acid (BNA)
  modified_base (12)..(12): bicyclic nucleic acid (BNA)
guucuguccaag

SEQ ID NO: 9564 - RNA, 11 nt, Artificial Sequence
  source: /note="Description of Artificial Sequence: Synthetic oligonucleotide"
  source: /note="RNA"
  modified_base (10)..(10): bicyclic nucleic acid (BNA)
  modified_base (11)..(11): bicyclic nucleic acid (BNA)
guucuguccaa

SEQ ID NO: 9565 - RNA, 10 nt, Artificial Sequence
  source: /note="Description of Artificial Sequence: Synthetic oligonucleotide"
  source: /note="RNA"
  modified_base (9)..(9): bicyclic nucleic acid (BNA)
  modified_base (10)..(10): bicyclic nucleic acid (BNA)
guucugucca

SEQ ID NO: 9566 - RNA, 9 nt, Artificial Sequence
  source: /note="Description of Artificial Sequence: Synthetic oligonucleotide"
  source: /note="RNA"
  modified_base (8)..(8): bicyclic nucleic acid (BNA)
  modified_base (9)..(9): bicyclic nucleic acid (BNA)
guucugucc

SEQ ID NO: 9567 - DNA, 8 bp, Artificial Sequence
  source: /note="Description of Artificial Sequence: Synthetic oligonucleotide"
  source: /note="Description of Combined DNA/RNA Molecule: Synthetic oligonucleotide"
  source: /note="DNA/RNA"
  modified_base (7)..(7): bicyclic nucleic acid (BNA)
  modified_base (8)..(8): bicyclic nucleic acid (BNA)
guucugtc

SEQ ID NO: 9568 - DNA, 20 bp, Artificial Sequence
  source: /note="Description of Artificial Sequence: Synthetic oligonucleotide"
  source: /note="Description of Combined DNA/RNA Molecule: Synthetic oligonucleotide"
  source: /note="DNA/RNA"
  modified_base (19)..(19): bicyclic nucleic acid (BNA)
  modified_base (20)..(20): bicyclic nucleic acid (BNA)
aguucuguccaagcccggtt

SEQ ID NO: 9569 - DNA, 19 bp, Artificial Sequence
  source: /note="Description of Artificial Sequence: Synthetic oligonucleotide"
  source: /note="Description of Combined DNA/RNA Molecule: Synthetic oligonucleotide"
  source: /note="DNA/RNA"
  modified_base (18)..(18): bicyclic nucleic acid (BNA)
  modified_base (19)..(19): bicyclic nucleic acid (BNA)
aguucuguccaagcccggt

SEQ ID NO: 9570 - RNA, 18 nt, Artificial Sequence
  source: /note="Description of Artificial Sequence: Synthetic oligonucleotide"
  source: /note="RNA"
  modified_base (17)..(17): bicyclic nucleic acid (BNA)
  modified_base (18)..(18): bicyclic nucleic acid (BNA)
aguucuguccaagcccgg

SEQ ID NO: 9571 - RNA, 17 nt, Artificial Sequence
  source: /note="Description of Artificial Sequence: Synthetic oligonucleotide"
  source: /note="RNA"
  modified_base (16)..(16): bicyclic nucleic acid (BNA)
  modified_base (17)..(17): bicyclic nucleic acid (BNA)
aguucuguccaagcccg

SEQ ID NO: 9572 - RNA, 16 nt, Artificial Sequence
  source: /note="Description of Artificial Sequence: Synthetic oligonucleotide"
  source: /note="RNA"
  modified_base (15)..(15): bicyclic nucleic acid (BNA)
  modified_base (16)..(16): bicyclic nucleic acid (BNA)
aguucuguccaagccc

SEQ ID NO: 9573 - RNA, 15 nt, Artificial Sequence
  source: /note="Description of Artificial Sequence: Synthetic oligonucleotide"
  source: /note="RNA"
  modified_base (14)..(14): bicyclic nucleic acid (BNA)
  modified_base (15)..(15): bicyclic nucleic acid (BNA)
aguucuguccaagcc

SEQ ID NO: 9574 - RNA, 14 nt, Artificial Sequence
  source: /note="Description of Artificial Sequence: Synthetic oligonucleotide"
  source: /note="RNA"
  modified_base (13)..(13): bicyclic nucleic acid (BNA)
  modified_base (14)..(14): bicyclic nucleic acid (BNA)
aguucuguccaagc

SEQ ID NO: 9575 - RNA, 13 nt, Artificial Sequence
  source: /note="Description of Artificial Sequence: Synthetic oligonucleotide"
  source: /note="RNA"
  modified_base (12)..(12): bicyclic nucleic acid (BNA)
  modified_base (13)..(13): bicyclic nucleic acid (BNA)
aguucuguccaag

SEQ ID NO: 9576 - RNA, 12 nt, Artificial Sequence
  source: /note="Description of Artificial Sequence: Synthetic oligonucleotide"
  source: /note="RNA"
  modified_base (11)..(11): bicyclic nucleic acid (BNA)
  modified_base (12)..(12): bicyclic nucleic acid (BNA)
aguucuguccaa

SEQ ID NO: 9577 - RNA, 11 nt, Artificial Sequence
  source: /note="Description of Artificial Sequence: Synthetic oligonucleotide"
  source: /note="RNA"
  modified_base (10)..(10): bicyclic nucleic acid (BNA)
  modified_base (11)..(11): bicyclic nucleic acid (BNA)
aguucugucca

SEQ ID NO: 9578 - RNA, 10 nt, Artificial Sequence
  source: /note="Description of Artificial Sequence: Synthetic oligonucleotide"
  source: /note="RNA"
  modified_base (9)..(9): bicyclic nucleic acid (BNA)
  modified_base (10)..(10): bicyclic nucleic acid (BNA)
aguucugucc

SEQ ID NO: 9579 - DNA, 9 bp, Artificial Sequence
  source: /note="Description of Artificial Sequence: Synthetic oligonucleotide"
  source: /note="Description of Combined DNA/RNA Molecule: Synthetic oligonucleotide"
  source: /note="DNA/RNA"
  modified_base (8)..(8): bicyclic nucleic acid (BNA)
  modified_base (9)..(9): bicyclic nucleic acid (BNA)
aguucugtc

SEQ ID NO: 9580 - DNA, 8 bp, Artificial Sequence
  source: /note="Description of Artificial Sequence: Synthetic oligonucleotide"
  source: /note="Description of Combined DNA/RNA Molecule: Synthetic oligonucleotide"
  source: /note="DNA/RNA"
  modified_base (7)..(7): bicyclic nucleic acid (BNA)
  modified_base (8)..(8): bicyclic nucleic acid (BNA)
aguucugt

SEQ ID NO: 9581 - DNA, 20 bp, Artificial Sequence
  source: /note="Description of Artificial Sequence: Synthetic oligonucleotide"
  source: /note="Description of Combined DNA/RNA Molecule: Synthetic oligonucleotide"
  source: /note="DNA/RNA"
  modified_base (19)..(19): bicyclic nucleic acid (BNA)
  modified_base (20)..(20): bicyclic nucleic acid (BNA)
aaguucuguccaagcccggt

SEQ ID NO: 9582 - RNA, 19 nt, Artificial Sequence
  source: /note="Description of Artificial Sequence: Synthetic oligonucleotide"
  source: /note="RNA"
  modified_base (18)..(18): bicyclic nucleic acid (BNA)
  modified_base (19)..(19): bicyclic nucleic acid (BNA)
aaguucuguccaagcccgg

SEQ ID NO: 9583 - RNA, 18 nt, Artificial Sequence
  source: /note="Description of Artificial Sequence: Synthetic oligonucleotide"
  source: /note="RNA"
  modified_base (17)..(17): bicyclic nucleic acid (BNA)
  modified_base (18)..(18): bicyclic nucleic acid (BNA)
aaguucuguccaagcccg

SEQ ID NO: 9584 - RNA, 17 nt, Artificial Sequence
  source: /note="Description of Artificial Sequence: Synthetic oligonucleotide"
  source: /note="RNA"
  modified_base (16)..(16): bicyclic nucleic acid (BNA)
  modified_base (17)..(17): bicyclic nucleic acid (BNA)
aaguucuguccaagccc

SEQ ID NO: 9585 - RNA, 16 nt, Artificial Sequence
  source: /note="Description of Artificial Sequence: Synthetic oligonucleotide"
  source: /note="RNA"
  modified_base (15)..(15): bicyclic nucleic acid (BNA)
  modified_base (16)..(16): bicyclic nucleic acid (BNA)
aaguucuguccaagcc

SEQ ID NO: 9586 - RNA, 15 nt, Artificial Sequence
  source: /note="Description of Artificial Sequence: Synthetic oligonucleotide"
  source: /note="RNA"
  modified_base (14)..(14): bicyclic nucleic acid (BNA)
  modified_base (15)..(15): bicyclic nucleic acid (BNA)
aaguucuguccaagc

SEQ ID NO: 9587 - RNA, 14 nt, Artificial Sequence
  source: /note="Description of Artificial Sequence: Synthetic oligonucleotide"
  source: /note="RNA"
  modified_base (13)..(13): bicyclic nucleic acid (BNA)
  modified_base (14)..(14): bicyclic nucleic acid (BNA)
aaguucuguccaag

SEQ ID NO: 9588 - RNA, 13 nt, Artificial Sequence
  source: /note="Description of Artificial Sequence: Synthetic oligonucleotide"
  source: /note="RNA"
  modified_base (12)..(12): bicyclic nucleic acid (BNA)
  modified_base (13)..(13): bicyclic nucleic acid (BNA)
aaguucuguccaa

SEQ ID NO: 9589 - RNA, 12 nt, Artificial Sequence
  source: /note="Description of Artificial Sequence: Synthetic oligonucleotide"
  source: /note="RNA"
  modified_base (11)..(11): bicyclic nucleic acid (BNA)
  modified_base (12)..(12): bicyclic nucleic acid (BNA)
aaguucugucca

SEQ ID NO: 9590 - RNA, 11 nt, Artificial Sequence
  source: /note="Description of Artificial Sequence: Synthetic oligonucleotide"
  source: /note="RNA"
  modified_base (10)..(10): bicyclic nucleic acid (BNA)
  modified_base (11)..(11): bicyclic nucleic acid (BNA)
aaguucugucc

SEQ ID NO: 9591 - DNA, 10 bp, Artificial Sequence
  source: /note="Description of Artificial Sequence: Synthetic oligonucleotide"
  source: /note="Description of Combined DNA/RNA Molecule: Synthetic oligonucleotide"
  source: /note="DNA/RNA"
  modified_base (9)..(9): bicyclic nucleic acid (BNA)
  modified_base (10)..(10): bicyclic nucleic acid (BNA)
aaguucugtc

SEQ ID NO: 9592 - DNA, 9 bp, Artificial Sequence
  source: /note="Description of Artificial Sequence: Synthetic oligonucleotide"
  source: /note="Description of Combined DNA/RNA Molecule: Synthetic oligonucleotide"
  source: /note="DNA/RNA"
  modified_base (8)..(8): bicyclic nucleic acid (BNA)
  modified_base (9)..(9): bicyclic nucleic acid (BNA)
aaguucugt

SEQ ID NO: 9593 - DNA, 8 bp, Artificial Sequence
  source: /note="Description of Artificial Sequence: Synthetic oligonucleotide"
  source: /note="Description of Combined DNA/RNA Molecule: Synthetic oligonucleotide"
  source: /note="DNA/RNA"
  modified_base (7)..(7): bicyclic nucleic acid (BNA)
  modified_base (8)..(8): bicyclic nucleic acid (BNA)
aaguuctg

SEQ ID NO: 9594 - RNA, 20 nt, Artificial Sequence
  source: /note="Description of Artificial Sequence: Synthetic oligonucleotide"
  source: /note="RNA"
  modified_base (19)..(19): bicyclic nucleic acid (BNA)
  modified_base (20)..(20): bicyclic nucleic acid (BNA)
uaaguucuguccaagcccgg

SEQ ID NO: 9595 - RNA, 19 nt, Artificial Sequence
  source: /note="Description of Artificial Sequence: Synthetic oligonucleotide"
  source: /note="RNA"
  modified_base (18)..(18): bicyclic nucleic acid (BNA)
  modified_base (19)..(19): bicyclic nucleic acid (BNA)
uaaguucuguccaagcccg

SEQ ID NO: 9596 - RNA, 18 nt, Artificial Sequence
  source: /note="Description of Artificial Sequence: Synthetic oligonucleotide"
  source: /note="RNA"
  modified_base (17)..(17): bicyclic nucleic acid (BNA)
  modified_base (18)..(18): bicyclic nucleic acid (BNA)
uaaguucuguccaagccc

SEQ ID NO: 9597 - RNA, 17 nt, Artificial Sequence
  source: /note="Description of Artificial Sequence: Synthetic oligonucleotide"
  source: /note="RNA"
  modified_base (16)..(16): bicyclic nucleic acid (BNA)
  modified_base (17)..(17): bicyclic nucleic acid (BNA)
uaaguucuguccaagcc

SEQ ID NO: 9598 - RNA, 16 nt, Artificial Sequence
  source: /note="Description of Artificial Sequence: Synthetic oligonucleotide"
  source: /note="RNA"
  modified_base (15)..(15): bicyclic nucleic acid (BNA)
  modified_base (16)..(16): bicyclic nucleic acid (BNA)
uaaguucuguccaagc

SEQ ID NO: 9599 - RNA, 14 nt, Artificial Sequence
  source: /note="Description of Artificial Sequence: Synthetic oligonucleotide"
  source: /note="RNA"
  modified_base (13)..(13): bicyclic nucleic acid (BNA)
  modified_base (14)..(14): bicyclic nucleic acid (BNA)
uaaguucuguccaa

SEQ ID NO: 9600 - RNA, 13 nt, Artificial Sequence
  source: /note="Description of Artificial Sequence: Synthetic oligonucleotide"
  source: /note="RNA"
  modified_base (12)..(12): bicyclic nucleic acid (BNA)
  modified_base (13)..(13): bicyclic nucleic acid (BNA)
uaaguucugucca

SEQ ID NO: 9601 - RNA, 12 nt, Artificial Sequence
  source: /note="Description of Artificial Sequence: Synthetic oligonucleotide"
  source: /note="RNA"
  modified_base (11)..(11): bicyclic nucleic acid (BNA)
  modified_base (12)..(12): bicyclic nucleic acid (BNA)
uaaguucugucc

SEQ ID NO: 9602 - DNA, 11 bp, Artificial Sequence
  source: /note="Description of Artificial Sequence: Synthetic oligonucleotide"
  source: /note="Description of Combined DNA/RNA Molecule: Synthetic oligonucleotide"
  source: /note="DNA/RNA"
  modified_base (10)..(10): bicyclic nucleic acid (BNA)
  modified_base (11)..(11): bicyclic nucleic acid (BNA)
uaaguucugtc

SEQ ID NO: 9603 - DNA, 10 bp, Artificial Sequence
  source: /note="Description of Artificial Sequence: Synthetic oligonucleotide"
  source: /note="Description of Combined DNA/RNA Molecule: Synthetic oligonucleotide"
  source: /note="DNA/RNA"
  modified_base (9)..(9): bicyclic nucleic acid (BNA)
  modified_base (10)..(10): bicyclic nucleic acid (BNA)
uaaguucugt

SEQ ID NO: 9604 - DNA, 9 bp, Artificial Sequence
  source: /note="Description of Artificial Sequence: Synthetic oligonucleotide"
  source: /note="Description of Combined DNA/RNA Molecule: Synthetic oligonucleotide"
  source: /note="DNA/RNA"
  modified_base (8)..(8): bicyclic nucleic acid (BNA)
  modified_base (9)..(9): bicyclic nucleic acid (BNA)
uaaguuctg

SEQ ID NO: 9605 - DNA, 8 bp, Artificial Sequence
  source: /note="Description of Artificial Sequence: Synthetic oligonucleotide"
  source: /note="Description of Combined DNA/RNA Molecule: Synthetic oligonucleotide"
  source: /note="DNA/RNA"
  modified_base (7)..(7): bicyclic nucleic acid (BNA)
  modified_base (8)..(8): bicyclic nucleic acid (BNA)
uaaguuct

SEQ ID NO: 9606 - RNA, 20 nt, Artificial Sequence
  source: /note="Description of Artificial Sequence: Synthetic oligonucleotide"
  source: /note="RNA"
  modified_base (19)..(19): bicyclic nucleic acid (BNA)
  modified_base (20)..(20): bicyclic nucleic acid (BNA)
guaaguucuguccaagcccg

SEQ ID NO: 9607 - RNA, 19 nt, Artificial Sequence
  source: /note="Description of Artificial Sequence: Synthetic oligonucleotide"
  source: /note="RNA"
  modified_base (18)..(18): bicyclic nucleic acid (BNA)
  modified_base (19)..(19): bicyclic nucleic acid (BNA)
guaaguucuguccaagccc

SEQ ID NO: 9608 - RNA, 17 nt, Artificial Sequence
  source: /note="Description of Artificial Sequence: Synthetic oligonucleotide"
  source: /note="RNA"
  modified_base (16)..(16): bicyclic nucleic acid (BNA)
  modified_base (17)..(17): bicyclic nucleic acid (BNA)
guaaguucuguccaagc

SEQ ID NO: 9609 - RNA, 16 nt, Artificial Sequence
  source: /note="Description of Artificial Sequence: Synthetic oligonucleotide"
  source: /note="RNA"
  modified_base (15)..(15): bicyclic nucleic acid (BNA)
  modified_base (16)..(16): bicyclic nucleic acid (BNA)
guaaguucuguccaag

SEQ ID NO: 9610 - RNA, 15 nt, Artificial Sequence
  source: /note="Description of Artificial Sequence: Synthetic oligonucleotide"
  source: /note="RNA"
  modified_base (14)..(14): bicyclic nucleic acid (BNA)
  modified_base (15)..(15): bicyclic nucleic acid (BNA)
guaaguucuguccaa

SEQ ID NO: 9611 - RNA, 14 nt, Artificial Sequence
  source: /note="Description of Artificial Sequence: Synthetic oligonucleotide"
  source: /note="RNA"
  modified_base (13)..(13): bicyclic nucleic acid (BNA)
  modified_base (14)..(14): bicyclic nucleic acid (BNA)
guaaguucugucca

SEQ ID NO: 9612 - RNA, 13 nt, Artificial Sequence
  source: /note="Description of Artificial Sequence: Synthetic oligonucleotide"
  source: /note="RNA"
  modified_base (12)..(12): bicyclic nucleic acid (BNA)
  modified_base (13)..(13): bicyclic nucleic acid (BNA)
guaaguucugucc

SEQ ID NO: 9613 - DNA, 12 bp, Artificial Sequence
  source: /note="Description of Artificial Sequence: Synthetic oligonucleotide"
  source: /note="Description of Combined DNA/RNA Molecule: Synthetic oligonucleotide"
  source: /note="DNA/RNA"
  modified_base (11)..(11): bicyclic nucleic acid (BNA)
  modified_base (12)..(12): bicyclic nucleic acid (BNA)
guaaguucugtc

SEQ ID NO: 9614 - DNA, 11 bp, Artificial Sequence
  source: /note="Description of Artificial Sequence: Synthetic oligonucleotide"
  source: /note="Description of Combined DNA/RNA Molecule: Synthetic oligonucleotide"
  source: /note="DNA/RNA"
  modified_base (10)..(10): bicyclic nucleic acid (BNA)
  modified_base (11)..(11): bicyclic nucleic acid (BNA)
guaaguucugt

SEQ ID NO: 9615 - DNA, 10 bp, Artificial Sequence
  source: /note="Description of Artificial Sequence: Synthetic oligonucleotide"
  source: /note="Description of Combined DNA/RNA Molecule: Synthetic oligonucleotide"
  source: /note="DNA/RNA"
  modified_base (9)..(9): bicyclic nucleic acid (BNA)
  modified_base (10)..(10): bicyclic nucleic acid (BNA)
guaaguuctg

SEQ ID NO: 9616 - DNA, 9 bp, Artificial Sequence
  source: /note="Description of Artificial Sequence: Synthetic oligonucleotide"
  source: /note="Description of Combined DNA/RNA Molecule: Synthetic oligonucleotide"
  source: /note="DNA/RNA"
  modified_base (8)..(8): bicyclic nucleic acid (BNA)
  modified_base (9)..(9): bicyclic nucleic acid (BNA)
guaaguuct

SEQ ID NO: 9617 - DNA, 8 bp, Artificial Sequence
  source: /note="Description of Artificial Sequence: Synthetic oligonucleotide"
  source: /note="Description of Combined DNA/RNA Molecule: Synthetic oligonucleotide"
  source: /note="DNA/RNA"
  modified_base (7)..(7): bicyclic nucleic acid (BNA)
  modified_base (8)..(8): bicyclic nucleic acid (BNA)
guaagutc

SEQ ID NO: 9618 - RNA, 20 nt, Artificial Sequence
  source: /note="Description of Artificial Sequence: Synthetic oligonucleotide"
  source: /note="RNA"
  modified_base (19)..(19): bicyclic nucleic acid (BNA)
  modified_base (20)..(20): bicyclic nucleic acid (BNA)
gguaaguucuguccaagccc

SEQ ID NO: 9619 - RNA, 19 nt, Artificial Sequence
  source: /note="Description of Artificial Sequence: Synthetic oligonucleotide"
  source: /note="RNA"
  modified_base (18)..(18): bicyclic nucleic acid (BNA)
  modified_base (19)..(19): bicyclic nucleic acid (BNA)
gguaaguucuguccaagcc

SEQ ID NO: 9620 - RNA, 17 nt, Artificial Sequence
  source: /note="Description of Artificial Sequence: Synthetic oligonucleotide"
  source: /note="RNA"
  modified_base (16)..(16): bicyclic nucleic acid (BNA)
  modified_base (17)..(17): bicyclic nucleic acid (BNA)
gguaaguucuguccaag

SEQ ID NO: 9621 - RNA, 16 nt, Artificial Sequence
  source: /note="Description of Artificial Sequence: Synthetic oligonucleotide"
  source: /note="RNA"
  modified_base (15)..(15): bicyclic nucleic acid (BNA)
  modified_base (16)..(16): bicyclic nucleic acid (BNA)
gguaaguucuguccaa

SEQ ID NO: 9622 - RNA, 15 nt, Artificial Sequence
  source: /note="Description of Artificial Sequence: Synthetic oligonucleotide"
  source: /note="RNA"
  modified_base (14)..(14): bicyclic nucleic acid (BNA)
  modified_base (15)..(15): bicyclic nucleic acid (BNA)
gguaaguucugucca

SEQ ID NO: 9623 - RNA, 14 nt, Artificial Sequence
  source: /note="Description of Artificial Sequence: Synthetic oligonucleotide"
  source: /note="RNA"
  modified_base (13)..(13): bicyclic nucleic acid (BNA)
  modified_base (14)..(14): bicyclic nucleic acid (BNA)
gguaaguucugucc

SEQ ID NO: 9624 - DNA, 13 bp, Artificial Sequence
  source: /note="Description of Artificial Sequence: Synthetic oligonucleotide"
  source: /note="Description of Combined DNA/RNA Molecule: Synthetic oligonucleotide"
  source: /note="DNA/RNA"
  modified_base (12)..(12): bicyclic nucleic acid (BNA)
  modified_base (13)..(13): bicyclic nucleic acid (BNA)
gguaaguucugtc

SEQ ID NO: 9625 - DNA, 12 bp, Artificial Sequence
  source: /note="Description of Artificial Sequence: Synthetic oligonucleotide"
  source: /note="Description of Combined DNA/RNA Molecule: Synthetic oligonucleotide"
  source: /note="DNA/RNA"
  modified_base (11)..(11): bicyclic nucleic acid (BNA)
  modified_base (12)..(12): bicyclic nucleic acid (BNA)
gguaaguucugt

SEQ ID NO: 9626 - DNA, 11 bp, Artificial Sequence
  source: /note="Description of Artificial Sequence: Synthetic oligonucleotide"
  source: /note="Description of Combined DNA/RNA Molecule: Synthetic oligonucleotide"
  source: /note="DNA/RNA"
  modified_base (10)..(10): bicyclic nucleic acid (BNA)
  modified_base (11)..(11): bicyclic nucleic acid (BNA)
gguaaguuctg

SEQ ID NO: 9627 - DNA, 10 bp, Artificial Sequence
  source: /note="Description of Artificial Sequence: Synthetic oligonucleotide"
  source: /note="Description of Combined DNA/RNA Molecule: Synthetic oligonucleotide"
  source: /note="DNA/RNA"
  modified_base (9)..(9): bicyclic nucleic acid (BNA)
  modified_base (10)..(10): bicyclic nucleic acid (BNA)
gguaaguuct

SEQ ID NO: 9628 - DNA, 9 bp, Artificial Sequence
  source: /note="Description of Artificial Sequence: Synthetic oligonucleotide"
  source: /note="Description of Combined DNA/RNA Molecule: Synthetic oligonucleotide"
  source: /note="DNA/RNA"
  modified_base (8)..(8): bicyclic nucleic acid (BNA)
  modified_base (9)..(9): bicyclic nucleic acid (BNA)
gguaagutc

SEQ ID NO: 9629 - DNA, 8 bp, Artificial Sequence
  source: /note="Description of Artificial Sequence: Synthetic oligonucleotide"
  source: /note="Description of Combined DNA/RNA Molecule: Synthetic oligonucleotide"
  source: /note="DNA/RNA"
  modified_base (7)..(7): bicyclic nucleic acid (BNA)
  modified_base (8)..(8): bicyclic nucleic acid (BNA)
gguaagtt

SEQ ID NO: 9630 - RNA, 20 nt, Artificial Sequence
  source: /note="Description of Artificial Sequence: Synthetic oligonucleotide"
  source: /note="RNA"
  modified_base (19)..(19): bicyclic nucleic acid (BNA)
  modified_base (20)..(20): bicyclic nucleic acid (BNA)
cgguaaguucuguccaagcc

SEQ ID NO: 9631 - RNA, 19 nt, Artificial Sequence
  source: /note="Description of Artificial Sequence: Synthetic oligonucleotide"
  source: /note="RNA"
  modified_base (18)..(18): bicyclic nucleic acid (BNA)
  modified_base (19)..(19): bicyclic nucleic acid (BNA)
cgguaaguucuguccaagc

SEQ ID NO: 9632 - RNA, 18 nt, Artificial Sequence
  source: /note="Description of Artificial Sequence: Synthetic oligonucleotide"
  source: /note="RNA"
  modified_base (17)..(17): bicyclic nucleic acid (BNA)
  modified_base (18)..(18): bicyclic nucleic acid (BNA)
cgguaaguucuguccaag

SEQ ID NO: 9633 - RNA, 17 nt, Artificial Sequence
  source: /note="Description of Artificial Sequence: Synthetic oligonucleotide"
  source: /note="RNA"
  modified_base (16)..(16): bicyclic nucleic acid (BNA)
  modified_base (17)..(17): bicyclic nucleic acid (BNA)
cgguaaguucuguccaa

SEQ ID NO: 9634 - RNA, 16 nt, Artificial Sequence
  source: /note="Description of Artificial Sequence: Synthetic oligonucleotide"
  source: /note="RNA"
  modified_base (15)..(15): bicyclic nucleic acid (BNA)
  modified_base (16)..(16): bicyclic nucleic acid (BNA)
cgguaaguucugucca

SEQ ID NO: 9635 - RNA, 15 nt, Artificial Sequence
  source: /note="Description of Artificial Sequence: Synthetic oligonucleotide"
  source: /note="RNA"
  modified_base (14)..(14): bicyclic nucleic acid (BNA)
  modified_base (15)..(15): bicyclic nucleic acid (BNA)
cgguaaguucugucc

SEQ ID NO: 9636 - DNA, 14 bp, Artificial Sequence
  source: /note="Description of Artificial Sequence: Synthetic oligonucleotide"
  source: /note="Description of Combined DNA/RNA Molecule: Synthetic oligonucleotide"
  source: /note="DNA/RNA"
  modified_base (13)..(13): bicyclic nucleic acid (BNA)
  modified_base (14)..(14): bicyclic nucleic acid (BNA)
cgguaaguucugtc

SEQ ID NO: 9637 - DNA, 13 bp, Artificial Sequence
  source: /note="Description of Artificial Sequence: Synthetic oligonucleotide"
  source: /note="Description of Combined DNA/RNA Molecule: Synthetic oligonucleotide"
  source: /note="DNA/RNA"
  modified_base (12)..(12): bicyclic nucleic acid (BNA)
  modified_base (13)..(13): bicyclic nucleic acid (BNA)
cgguaaguucugt

SEQ ID NO: 9638 - DNA, 12 bp, Artificial Sequence
  source: /note="Description of Artificial Sequence: Synthetic oligonucleotide"
  source: /note="Description of Combined DNA/RNA Molecule: Synthetic oligonucleotide"
  source: /note="DNA/RNA"
  modified_base (11)..(11): bicyclic nucleic acid (BNA)
  modified_base (12)..(12): bicyclic nucleic acid (BNA)
cgguaaguuctg

SEQ ID NO: 9639 - DNA, 11 bp, Artificial Sequence
  source: /note="Description of Artificial Sequence: Synthetic oligonucleotide"
  source: /note="Description of Combined DNA/RNA Molecule: Synthetic oligonucleotide"
  source: /note="DNA/RNA"
  modified_base (10)..(10): bicyclic nucleic acid (BNA)
  modified_base (11)..(11): bicyclic nucleic acid (BNA)
cgguaaguuct

SEQ ID NO: 9640 - DNA, 10 bp, Artificial Sequence
  source: /note="Description of Artificial Sequence: Synthetic oligonucleotide"
  source: /note="Description of Combined DNA/RNA Molecule: Synthetic oligonucleotide"
  source: /note="DNA/RNA"
  modified_base (9)..(9): bicyclic nucleic acid (BNA)
  modified_base (10)..(10): bicyclic nucleic acid (BNA)
cgguaagutc

SEQ ID NO: 9641 - DNA, 9 bp, Artificial Sequence
  source: /note="Description of Artificial Sequence: Synthetic oligonucleotide"
  source: /note="Description of Combined DNA/RNA Molecule: Synthetic oligonucleotide"
  source: /note="DNA/RNA"
  modified_base (8)..(8): bicyclic nucleic acid (BNA)
  modified_base (9)..(9): bicyclic nucleic acid (BNA)
cgguaagtt

SEQ ID NO: 9642 - DNA, 8 bp, Artificial Sequence
  source: /note="Description of Artificial Sequence: Synthetic oligonucleotide"
  source: /note="Description of Combined DNA/RNA Molecule: Synthetic oligonucleotide"
  source: /note="DNA/RNA"
  modified_base (7)..(7): bicyclic nucleic acid (BNA)
  modified_base (8)..(8): bicyclic nucleic acid (BNA)
cgguaagt

SEQ ID NO: 9643 - RNA, 20 nt, Artificial Sequence
  source: /note="Description of Artificial Sequence: Synthetic oligonucleotide"
  source: /note="RNA"
  modified_base (19)..(19): bicyclic nucleic acid (BNA)
  modified_base (20)..(20): bicyclic nucleic acid (BNA)
ucgguaaguucuguccaagc

SEQ ID NO: 9644 - RNA, 19 nt, Artificial Sequence
  source: /note="Description of Artificial Sequence: Synthetic oligonucleotide"
  source: /note="RNA"
  modified_base (18)..(18): bicyclic nucleic acid (BNA)
  modified_base (19)..(19): bicyclic nucleic acid (BNA)
ucgguaaguucuguccaag

SEQ ID NO: 9645 - RNA, 18 nt, Artificial Sequence
  source: /note="Description of Artificial Sequence: Synthetic oligonucleotide"
  source: /note="RNA"
  modified_base (17)..(17): bicyclic nucleic acid (BNA)
  modified_base (18)..(18): bicyclic nucleic acid (BNA)
ucgguaaguucuguccaa

SEQ ID NO: 9646 - RNA, 17 nt, Artificial Sequence
  source: /note="Description of Artificial Sequence: Synthetic oligonucleotide"
  source: /note="RNA"
  modified_base (16)..(16): bicyclic nucleic acid (BNA)
  modified_base (17)..(17): bicyclic nucleic acid (BNA)
ucgguaaguucugucca

SEQ ID NO: 9647 - RNA, 16 nt, Artificial Sequence
  source: /note="Description of Artificial Sequence: Synthetic oligonucleotide"
  source: /note="RNA"
  modified_base (15)..(15): bicyclic nucleic acid (BNA)
  modified_base (16)..(16): bicyclic nucleic acid (BNA)
ucgguaaguucugucc

SEQ ID NO: 9648 - DNA, 15 bp, Artificial Sequence
  source: /note="Description of Artificial Sequence: Synthetic oligonucleotide"
  source: /note="Description of Combined DNA/RNA Molecule: Synthetic oligonucleotide"
  source: /note="DNA/RNA"
  modified_base (14)..(14): bicyclic nucleic acid (BNA)
  modified_base (15)..(15): bicyclic nucleic acid (BNA)
ucgguaaguucugtc

SEQ ID NO: 9649 - DNA, 14 bp, Artificial Sequence
  source: /note="Description of Artificial Sequence: Synthetic oligonucleotide"
  source: /note="Description of Combined DNA/RNA Molecule: Synthetic oligonucleotide"
  source: /note="DNA/RNA"
  modified_base (13)..(13): bicyclic nucleic acid (BNA)
  modified_base (14)..(14): bicyclic nucleic acid (BNA)
ucgguaaguucugt

SEQ ID NO: 9650 - DNA, 13 bp, Artificial Sequence
  source: /note="Description of Artificial Sequence: Synthetic oligonucleotide"
  source: /note="Description of Combined DNA/RNA Molecule: Synthetic oligonucleotide"
  source: /note="DNA/RNA"
  modified_base (12)..(12): bicyclic nucleic acid (BNA)
  modified_base (13)..(13): bicyclic nucleic acid (BNA)
ucgguaaguuctg

SEQ ID NO: 9651 - DNA, 12 bp, Artificial Sequence
  source: /note="Description of Artificial Sequence: Synthetic oligonucleotide"
  source: /note="Description of Combined DNA/RNA Molecule: Synthetic oligonucleotide"
  source: /note="DNA/RNA"
  modified_base (11)..(11): bicyclic nucleic acid (BNA)
  modified_base (12)..(12): bicyclic nucleic acid (BNA)
ucgguaaguuct

SEQ ID NO: 9652 - DNA, 11 bp, Artificial Sequence
  source: /note="Description of Artificial Sequence: Synthetic oligonucleotide"
  source: /note="Description of Combined DNA/RNA Molecule: Synthetic oligonucleotide"
  source: /note="DNA/RNA"
  modified_base (10)..(10): bicyclic nucleic acid (BNA)
  modified_base (11)..(11): bicyclic nucleic acid (BNA)
ucgguaagutc

SEQ ID NO: 9653 - DNA, 10 bp, Artificial Sequence
  source: /note="Description of Artificial Sequence: Synthetic oligonucleotide"
  source: /note="Description of Combined DNA/RNA Molecule: Synthetic oligonucleotide"
  source: /note="DNA/RNA"
  modified_base (9)..(9): bicyclic nucleic acid (BNA)
  modified_base (10)..(10): bicyclic nucleic acid (BNA)
ucgguaagtt

SEQ ID NO: 9654 - DNA, 9 bp, Artificial Sequence
  source: /note="Description of Artificial Sequence: Synthetic oligonucleotide"
  source: /note="Description of Combined DNA/RNA Molecule: Synthetic oligonucleotide"
  source: /note="DNA/RNA"
  modified_base (8)..(8): bicyclic nucleic acid (BNA)
  modified_base (9)..(9): bicyclic nucleic acid (BNA)
ucgguaagt

SEQ ID NO: 9655 - RNA, 20 nt, Artificial Sequence
  source: /note="Description of Artificial Sequence: Synthetic oligonucleotide"
  source: /note="RNA"
  modified_base (19)..(19): bicyclic nucleic acid (BNA)
  modified_base (20)..(20): bicyclic nucleic acid (BNA)
gucgguaaguucuguccaag

SEQ ID NO: 9656 - RNA, 19 nt, Artificial Sequence
  source: /note="Description of Artificial Sequence: Synthetic oligonucleotide"
  source: /note="RNA"
  modified_base (18)..(18): bicyclic nucleic acid (BNA)
  modified_base (19)..(19): bicyclic nucleic acid (BNA)
gucgguaaguucuguccaa

SEQ ID NO: 9657 - RNA, 18 nt, Artificial Sequence
  source: /note="Description of Artificial Sequence: Synthetic oligonucleotide"
  source: /note="RNA"
  modified_base (17)..(17): bicyclic nucleic acid (BNA)
  modified_base (18)..(18): bicyclic nucleic acid (BNA)
gucgguaaguucugucca

SEQ ID NO: 9658 - RNA, 17 nt, Artificial Sequence
  source: /note="Description of Artificial Sequence: Synthetic oligonucleotide"
  source: /note="RNA"
  modified_base (16)..(16): bicyclic nucleic acid (BNA)
  modified_base (17)..(17): bicyclic nucleic acid (BNA)
gucgguaaguucugucc

SEQ ID NO: 9659 - DNA, 16 bp, Artificial Sequence
  source: /note="Description of Artificial Sequence: Synthetic oligonucleotide"
  source: /note="Description of Combined DNA/RNA Molecule: Synthetic oligonucleotide"
  source: /note="DNA/RNA"
  modified_base (15)..(15): bicyclic nucleic acid (BNA)
  modified_base (16)..(16): bicyclic nucleic acid (BNA)
gucgguaaguucugtc

SEQ ID NO: 9660 - DNA, 15 bp, Artificial Sequence
  source: /note="Description of Artificial Sequence: Synthetic oligonucleotide"
  source: /note="Description of Combined DNA/RNA Molecule: Synthetic oligonucleotide"
  source: /note="DNA/RNA"
  modified_base (14)..(14): bicyclic nucleic acid (BNA)
  modified_base (15)..(15): bicyclic nucleic acid (BNA)
gucgguaaguucugt

SEQ ID NO: 9661 - DNA, 14 bp, Artificial Sequence
  source: /note="Description of Artificial Sequence: Synthetic oligonucleotide"
  source: /note="Description of Combined DNA/RNA Molecule: Synthetic oligonucleotide"
  source: /note="DNA/RNA"
  modified_base (13)..(13): bicyclic nucleic acid (BNA)
  modified_base (14)..(14): bicyclic nucleic acid (BNA)
gucgguaaguuctg

SEQ ID NO: 9662 - DNA, 13 bp, Artificial Sequence
  source: /note="Description of Artificial Sequence: Synthetic oligonucleotide"
  source: /note="Description of Combined DNA/RNA Molecule: Synthetic oligonucleotide"
  source: /note="DNA/RNA"
  modified_base (12)..(12): bicyclic nucleic acid (BNA)
  modified_base (13)..(13): bicyclic nucleic acid (BNA)
gucgguaaguuct

SEQ ID NO: 9663 - DNA, 12 bp, Artificial Sequence
  source: /note="Description of Artificial Sequence: Synthetic oligonucleotide"
  source: /note="Description of Combined DNA/RNA Molecule: Synthetic oligonucleotide"
  source: /note="DNA/RNA"
  modified_base (11)..(11): bicyclic nucleic acid (BNA)
  modified_base (12)..(12): bicyclic nucleic acid (BNA)
gucgguaagutc

SEQ ID NO: 9664 - DNA, 11 bp, Artificial Sequence
  source: /note="Description of Artificial Sequence: Synthetic oligonucleotide"
  source: /note="Description of Combined DNA/RNA Molecule: Synthetic oligonucleotide"
  source: /note="DNA/RNA"
  modified_base (10)..(10): bicyclic nucleic acid (BNA)
  modified_base (11)..(11): bicyclic nucleic acid (BNA)
gucgguaagtt

SEQ ID NO: 9665 - DNA, 10 bp, Artificial Sequence
  source: /note="Description of Artificial Sequence: Synthetic oligonucleotide"
  source: /note="Description of Combined DNA/RNA Molecule: Synthetic oligonucleotide"
  source: /note="DNA/RNA"
  modified_base (9)..(9): bicyclic nucleic acid (BNA)
  modified_base (10)..(10): bicyclic nucleic acid (BNA)
gucgguaagt

SEQ ID NO: 9666 - RNA, 20 nt, Artificial Sequence
  source: /note="Description of Artificial Sequence: Synthetic oligonucleotide"
  source: /note="RNA"
  modified_base (19)..(19): bicyclic nucleic acid (BNA)
  modified_base (20)..(20): bicyclic nucleic acid (BNA)
agucgguaaguucuguccaa

SEQ ID NO: 9667 - RNA, 19 nt, Artificial Sequence
  source: /note="Description of Artificial Sequence: Synthetic oligonucleotide"
  source: /note="RNA"
  modified_base (18)..(18): bicyclic nucleic acid (BNA)
  modified_base (19)..(19): bicyclic nucleic acid (BNA)
agucgguaaguucugucca

SEQ ID NO: 9668 - DNA, 17 bp, Artificial Sequence
  source: /note="Description of Artificial Sequence: Synthetic oligonucleotide"
  source: /note="Description of Combined DNA/RNA Molecule: Synthetic oligonucleotide"
  source: /note="DNA/RNA"
  modified_base (16)..(16): bicyclic nucleic acid (BNA)
  modified_base (17)..(17): bicyclic nucleic acid (BNA)
agucgguaaguucugtc

SEQ ID NO: 9669 - DNA, 16 bp, Artificial Sequence
  source: /note="Description of Artificial Sequence: Synthetic oligonucleotide"
  source: /note="Description of Combined DNA/RNA Molecule: Synthetic oligonucleotide"
  source: /note="DNA/RNA"
  modified_base (15)..(15): bicyclic nucleic acid (BNA)
  modified_base (16)..(16): bicyclic nucleic acid (BNA)
agucgguaaguucugt

SEQ ID NO: 9670 - DNA, 15 bp, Artificial Sequence
  source: /note="Description of Artificial Sequence: Synthetic oligonucleotide"
  source: /note="Description of Combined DNA/RNA Molecule: Synthetic oligonucleotide"
  source: /note="DNA/RNA"
  modified_base (14)..(14): bicyclic nucleic acid (BNA)
  modified_base (15)..(15): bicyclic nucleic acid (BNA)
agucgguaaguuctg

SEQ ID NO: 9671 - DNA, 14 bp, Artificial Sequence
  source: /note="Description of Artificial Sequence: Synthetic oligonucleotide"
  source: /note="Description of Combined DNA/RNA Molecule: Synthetic oligonucleotide"
  source: /note="DNA/RNA"
  modified_base (13)..(13): bicyclic nucleic acid (BNA)
  modified_base (14)..(14): bicyclic nucleic acid (BNA)
agucgguaaguuct

SEQ ID NO: 9672 - DNA, 13 bp, Artificial Sequence
  source: /note="Description of Artificial Sequence: Synthetic oligonucleotide"
  source: /note="Description of Combined DNA/RNA Molecule: Synthetic oligonucleotide"
  source: /note="DNA/RNA"
  modified_base (12)..(12): bicyclic nucleic acid (BNA)
  modified_base (13)..(13): bicyclic nucleic acid (BNA)
agucgguaagutc

SEQ ID NO: 9673 - DNA, 12 bp, Artificial Sequence
  source: /note="Description of Artificial Sequence: Synthetic oligonucleotide"
  source: /note="Description of Combined DNA/RNA Molecule: Synthetic oligonucleotide"
  source: /note="DNA/RNA"
  modified_base (11)..(11): bicyclic nucleic acid (BNA)
  modified_base (12)..(12): bicyclic nucleic acid (BNA)
agucgguaagtt

SEQ ID NO: 9674 - DNA, 11 bp, Artificial Sequence
  source: /note="Description of Artificial Sequence: Synthetic oligonucleotide"
  source: /note="Description of Combined DNA/RNA Molecule: Synthetic oligonucleotide"
  source: /note="DNA/RNA"
  modified_base (10)..(10): bicyclic nucleic acid (BNA)
  modified_base (11)..(11): bicyclic nucleic acid (BNA)
agucgguaagt

SEQ ID NO: 9675 - RNA, 20 nt, Artificial Sequence
  source: /note="Description of Artificial Sequence: Synthetic oligonucleotide"
  source: /note="RNA"
  modified_base (19)..(19): bicyclic nucleic acid (BNA)
  modified_base (20)..(20): bicyclic nucleic acid (BNA)
cagucgguaaguucugucca

SEQ ID NO: 9676 - RNA, 19 nt, Artificial Sequence
  source: /note="Description of Artificial Sequence: Synthetic oligonucleotide"
  source: /note="RNA"
  modified_base (18)..(18): bicyclic nucleic acid (BNA)
  modified_base (19)..(19): bicyclic nucleic acid (BNA)
cagucgguaaguucugucc

SEQ ID NO: 9677 - DNA, 18 bp, Artificial Sequence
  source: /note="Description of Artificial Sequence: Synthetic oligonucleotide"
  source: /note="Description of Combined DNA/RNA Molecule: Synthetic oligonucleotide"
  source: /note="DNA/RNA"
  modified_base (17)..(17): bicyclic nucleic acid (BNA)
  modified_base (18)..(18): bicyclic nucleic acid (BNA)
cagucgguaaguucugtc

SEQ ID NO: 9678 - DNA, 17 bp, Artificial Sequence
  source: /note="Description of Artificial Sequence: Synthetic oligonucleotide"
  source: /note="Description of Combined DNA/RNA Molecule: Synthetic oligonucleotide"
  source: /note="DNA/RNA"
  modified_base (16)..(16): bicyclic nucleic acid (BNA)
  modified_base (17)..(17): bicyclic nucleic acid (BNA)
cagucgguaaguucugt

SEQ ID NO: 9679 - DNA, 16 bp, Artificial Sequence
  source: /note="Description of Artificial Sequence: Synthetic oligonucleotide"
  source: /note="Description of Combined DNA/RNA Molecule: Synthetic oligonucleotide"
  source: /note="DNA/RNA"
  modified_base (15)..(15): bicyclic nucleic acid (BNA)
  modified_base (16)..(16): bicyclic nucleic acid (BNA)
cagucgguaaguuctg

SEQ ID NO: 9680 - DNA, 15 bp, Artificial Sequence
  source: /note="Description of Artificial Sequence: Synthetic oligonucleotide"
  source: /note="Description of Combined DNA/RNA Molecule: Synthetic oligonucleotide"
  source: /note="DNA/RNA"
  modified_base (14)..(14): bicyclic nucleic acid (BNA)
  modified_base (15)..(15): bicyclic nucleic acid (BNA)
cagucgguaaguuct

SEQ ID NO: 9681 - DNA, 14 bp, Artificial Sequence
  source: /note="Description of Artificial Sequence: Synthetic oligonucleotide"
  source: /note="Description of Combined DNA/RNA Molecule: Synthetic oligonucleotide"
  source: /note="DNA/RNA"
  modified_base (13)..(13): bicyclic nucleic acid (BNA)
  modified_base (14)..(14): bicyclic nucleic acid (BNA)
cagucgguaagutc

SEQ ID NO: 9682 - DNA, 13 bp, Artificial Sequence
  source: /note="Description of Artificial Sequence: Synthetic oligonucleotide"
  source: /note="Description of Combined DNA/RNA Molecule: Synthetic oligonucleotide"
  source: /note="DNA/RNA"
  modified_base (12)..(12): bicyclic nucleic acid (BNA)
  modified_base (13)..(13): bicyclic nucleic acid (BNA)
cagucgguaagtt

SEQ ID NO: 9683 - DNA, 12 bp, Artificial Sequence
  source: /note="Description of Artificial Sequence: Synthetic oligonucleotide"
  source: /note="Description of Combined DNA/RNA Molecule: Synthetic oligonucleotide"
  source: /note="DNA/RNA"
  modified_base (11)..(11): bicyclic nucleic acid (BNA)
  modified_base (12)..(12): bicyclic nucleic acid (BNA)
cagucgguaagt

SEQ ID NO: 9684 - RNA, 20 nt, Artificial Sequence
  source: /note="Description of Artificial Sequence: Synthetic oligonucleotide"
  source: /note="RNA"
  modified_base (19)..(19): bicyclic nucleic acid (BNA)
  modified_base (20)..(20): bicyclic nucleic acid (BNA)
ccagucgguaaguucugucc

SEQ ID NO: 9685 - DNA, 19 bp, Artificial Sequence
  source: /note="Description of Artificial Sequence: Synthetic oligonucleotide"
  source: /note="Description of Combined DNA/RNA Molecule: Synthetic oligonucleotide"
  source: /note="DNA/RNA"
  modified_base (18)..(18): bicyclic nucleic acid (BNA)
  modified_base (19)..(19): bicyclic nucleic acid (BNA)
ccagucgguaaguucugtc

SEQ ID NO: 9686 - DNA, 18 bp, Artificial Sequence
  source: /note="Description of Artificial Sequence: Synthetic oligonucleotide"
  source: /note="Description of Combined DNA/RNA Molecule: Synthetic oligonucleotide"
  source: /note="DNA/RNA"
  modified_base (17)..(17): bicyclic nucleic acid (BNA)
  modified_base (18)..(18): bicyclic nucleic acid (BNA)
ccagucgguaaguucugt

SEQ ID NO: 9687 - DNA, 17 bp, Artificial Sequence
  source: /note="Description of Artificial Sequence: Synthetic oligonucleotide"
  source: /note="Description of Combined DNA/RNA Molecule: Synthetic oligonucleotide"
  source: /note="DNA/RNA"
  modified_base (16)..(16): bicyclic nucleic acid (BNA)
  modified_base (17)..(17): bicyclic nucleic acid (BNA)
ccagucgguaaguuctg

SEQ ID NO: 9688 - DNA, 16 bp, Artificial Sequence
  source: /note="Description of Artificial Sequence: Synthetic oligonucleotide"
  source: /note="Description of Combined DNA/RNA Molecule: Synthetic oligonucleotide"
  source: /note="DNA/RNA"
  modified_base (15)..(15): bicyclic nucleic acid (BNA)
  modified_base (16)..(16): bicyclic nucleic acid (BNA)
ccagucgguaaguuct

SEQ ID NO: 9689 - DNA, 15 bp, Artificial Sequence
  source: /note="Description of Artificial Sequence: Synthetic oligonucleotide"
  source: /note="Description of Combined DNA/RNA Molecule: Synthetic oligonucleotide"
  source: /note="DNA/RNA"
  modified_base (14)..(14): bicyclic nucleic acid (BNA)
  modified_base (15)..(15): bicyclic nucleic acid (BNA)
ccagucgguaagutc

SEQ ID NO: 9690 - DNA, 14 bp, Artificial Sequence
  source: /note="Description of Artificial Sequence: Synthetic oligonucleotide"
  source: /note="Description of Combined DNA/RNA Molecule: Synthetic oligonucleotide"
  source: /note="DNA/RNA"
  modified_base (13)..(13): bicyclic nucleic acid (BNA)
  modified_base (14)..(14): bicyclic nucleic acid (BNA)
ccagucgguaagtt

SEQ ID NO: 9691 - DNA, 13 bp, Artificial Sequence
  source: /note="Description of Artificial Sequence: Synthetic oligonucleotide"
  source: /note="Description of Combined DNA/RNA Molecule: Synthetic oligonucleotide"
  source: /note="DNA/RNA"
  modified_base (12)..(12): bicyclic nucleic acid (BNA)
  modified_base (13)..(13): bicyclic nucleic acid (BNA)
ccagucgguaagt

SEQ ID NO: 9692 - DNA, 20 bp, Artificial Sequence
  source: /note="Description of Artificial Sequence: Synthetic oligonucleotide"
  source: /note="Description of Combined DNA/RNA Molecule: Synthetic oligonucleotide"
  source: /note="DNA/RNA"
  modified_base (19)..(19): bicyclic nucleic acid (BNA)
  modified_base (20)..(20): bicyclic nucleic acid (BNA)
gccagucgguaaguucugtc

SEQ ID NO: 9693 - DNA, 19 bp, Artificial Sequence
  source: /note="Description of Artificial Sequence: Synthetic oligonucleotide"
  source: /note="Description of Combined DNA/RNA Molecule: Synthetic oligonucleotide"
  source: /note="DNA/RNA"
  modified_base (18)..(18): bicyclic nucleic acid (BNA)
  modified_base (19)..(19): bicyclic nucleic acid (BNA)
gccagucgguaaguucugt

SEQ ID NO: 9694 - DNA, 18 bp, Artificial Sequence
  source: /note="Description of Artificial Sequence: Synthetic oligonucleotide"
  source: /note="Description of Combined DNA/RNA Molecule: Synthetic oligonucleotide"
  source: /note="DNA/RNA"
  modified_base (17)..(17): bicyclic nucleic acid (BNA)
  modified_base (18)..(18): bicyclic nucleic acid (BNA)
gccagucgguaaguuctg

SEQ ID NO: 9695 - DNA, 17 bp, Artificial Sequence
  source: /note="Description of Artificial Sequence: Synthetic oligonucleotide"
  source: /note="Description of Combined DNA/RNA Molecule: Synthetic oligonucleotide"
  source: /note="DNA/RNA"
  modified_base (16)..(16): bicyclic nucleic acid (BNA)
  modified_base (17)..(17): bicyclic nucleic acid (BNA)
gccagucgguaaguuct

SEQ ID NO: 9696 - DNA, 16 bp, Artificial Sequence
  source: /note="Description of Artificial Sequence: Synthetic oligonucleotide"
  source: /note="Description of Combined DNA/RNA Molecule: Synthetic oligonucleotide"
  source: /note="DNA/RNA"
  modified_base (15)..(15): bicyclic nucleic acid (BNA)
  modified_base (16)..(16): bicyclic nucleic acid (BNA)
gccagucgguaagutc

SEQ ID NO: 9697 - DNA, 15 bp, Artificial Sequence
  source: /note="Description of Artificial Sequence: Synthetic oligonucleotide"
  source: /note="Description of Combined DNA/RNA Molecule: Synthetic oligonucleotide"
  source: /note="DNA/RNA"
  modified_base (14)..(14): bicyclic nucleic acid (BNA)
  modified_base (15)..(15): bicyclic nucleic acid (BNA)
gccagucgguaagtt

SEQ ID NO: 9698 - DNA, 14 bp, Artificial Sequence
  source: /note="Description of Artificial Sequence: Synthetic oligonucleotide"
  source: /note="Description of Combined DNA/RNA Molecule: Synthetic oligonucleotide"
  source: /note="DNA/RNA"
  modified_base (13)..(13): bicyclic nucleic acid (BNA)
  modified_base (14)..(14): bicyclic nucleic acid (BNA)
gccagucgguaagt

SEQ ID NO: 9699 - DNA, 20 bp, Artificial Sequence
  source: /note="Description of Artificial Sequence: Synthetic oligonucleotide"
  source: /note="Description of Combined DNA/RNA Molecule: Synthetic oligonucleotide"
  source: /note="DNA/RNA"
  modified_base (19)..(19): bicyclic nucleic acid (BNA)
  modified_base (20)..(20): bicyclic nucleic acid (BNA)
ucaaggaagauggcauuuct

SEQ ID NO: 9700 - RNA, 22 nt, Artificial Sequence
  source: /note="Description of Artificial Sequence: Synthetic oligonucleotide"
  source: /note="RNA"
  modified_base (21)..(21): bicyclic nucleic acid (BNA)
  modified_base (22)..(22): bicyclic nucleic acid (BNA)
ucaaggaagauggcauuucuag

SEQ ID NO: 9701 - DNA, 16 bp, Artificial Sequence
  source: /note="Description of Artificial Sequence: Synthetic oligonucleotide"
  source: /note="Description of Combined DNA/RNA Molecule: Synthetic oligonucleotide"
  source: /note="DNA/RNA"
  modified_base (15)..(15): bicyclic nucleic acid (BNA)
  modified_base (16)..(16): bicyclic nucleic acid (BNA)
ucaaggaagauggcat

SEQ ID NO: 9702 - DNA, 15 bp, Artificial Sequence
  source: /note="Description of Artificial Sequence: Synthetic oligonucleotide"
  source: /note="Description of Combined DNA/RNA Molecule: Synthetic oligonucleotide"
  source: /note="DNA/RNA"
  modified_base (14)..(14): bicyclic nucleic acid (BNA)
  modified_base (15)..(15): bicyclic nucleic acid (BNA)
gaagauggcauuuct

SEQ ID NO: 9703 - DNA, 21 bp, Artificial Sequence
  source: /note="Description of Artificial Sequence: Synthetic oligonucleotide"
  source: /note="Description of Combined DNA/RNA Molecule: Synthetic oligonucleotide"
  source: /note="DNA/RNA"
  modified_base (20)..(20): bicyclic nucleic acid (BNA)
  modified_base (21)..(21): bicyclic nucleic acid (BNA)
ucaaggaagauggcauuucta

SEQ ID NO: 9704 - DNA, 19 bp, Artificial Sequence
  source: /note="Description of Artificial Sequence: Synthetic oligonucleotide"
  source: /note="Description of Combined DNA/RNA Molecule: Synthetic oligonucleotide"
  source: /note="DNA/RNA"
  modified_base (18)..(18): bicyclic nucleic acid (BNA)
  modified_base (19)..(19): bicyclic nucleic acid (BNA)
ucaaggaagauggcauutc

SEQ ID NO: 9705 - DNA, 18 bp, Artificial Sequence
  source: /note="Description of Artificial Sequence: Synthetic oligonucleotide"
  source: /note="Description of Combined DNA/RNA Molecule: Synthetic oligonucleotide"
  source: /note="DNA/RNA"
  modified_base (17)..(17): bicyclic nucleic acid (BNA)
  modified_base (18)..(18): bicyclic nucleic acid (BNA)
ucaaggaagauggcautt

SEQ ID NO: 9706 - DNA, 17 bp, Artificial Sequence
  source: /note="Description of Artificial Sequence: Synthetic oligonucleotide"
  source: /note="Description of Combined DNA/RNA Molecule: Synthetic oligonucleotide"
  source: /note="DNA/RNA"
  modified_base (16)..(16): bicyclic nucleic acid (BNA)
  modified_base (17)..(17): bicyclic nucleic acid (BNA)
ucaaggaagauggcatt

SEQ ID NO: 9707 - RNA, 15 nt, Artificial Sequence
  source: /note="Description of Artificial Sequence: Synthetic oligonucleotide"
  source: /note="RNA"
  modified_base (14)..(14): bicyclic nucleic acid (BNA)
  modified_base (15)..(15): bicyclic nucleic acid (BNA)
ucaaggaagauggca

SEQ ID NO: 9708 - RNA, 14 nt, Artificial Sequence
  source: /note="Description of Artificial Sequence: Synthetic oligonucleotide"
  source: /note="RNA"
  modified_base (13)..(13): bicyclic nucleic acid (BNA)
  modified_base (14)..(14): bicyclic nucleic acid (BNA)
ucaaggaagauggc

SEQ ID NO: 9709 - RNA, 13 nt, Artificial Sequence
  source: /note="Description of Artificial Sequence: Synthetic oligonucleotide"
  source: /note="RNA"
  modified_base (12)..(12): bicyclic nucleic acid (BNA)
  modified_base (13)..(13): bicyclic nucleic acid (BNA)
ucaaggaagaugg

SEQ ID NO: 9710 - DNA, 12 bp, Artificial Sequence
  source: /note="Description of Artificial Sequence: Synthetic oligonucleotide"
  source: /note="Description of Combined DNA/RNA Molecule: Synthetic oligonucleotide"
  source: /note="DNA/RNA"
  modified_base (11)..(11): bicyclic nucleic acid (BNA)
  modified_base (12)..(12): bicyclic nucleic acid (BNA)
ucaaggaagatg

SEQ ID NO: 9711 - DNA, 11 bp, Artificial Sequence
  source: /note="Description of Artificial Sequence: Synthetic oligonucleotide"
  source: /note="Description of Combined DNA/RNA Molecule: Synthetic oligonucleotide"
  source: /note="DNA/RNA"
  modified_base (10)..(10): bicyclic nucleic acid (BNA)
  modified_base (11)..(11): bicyclic nucleic acid (BNA)
ucaaggaagat

SEQ ID NO: 9712 - RNA, 10 nt, Artificial Sequence
  source: /note="Description of Artificial Sequence: Synthetic oligonucleotide"
  source: /note="RNA"
  modified_base (9)..(9): bicyclic nucleic acid (BNA)
  modified_base (10)..(10): bicyclic nucleic acid (BNA)
ucaaggaaga

SEQ ID NO: 9713 - RNA, 9 nt, Artificial Sequence
  source: /note="Description of Artificial Sequence: Synthetic oligonucleotide"
  source: /note="RNA"
  modified_base (8)..(8): bicyclic nucleic acid (BNA)
  modified_base (9)..(9): bicyclic nucleic acid (BNA)
ucaaggaag

SEQ ID NO: 9714 - RNA, 21 nt, Artificial Sequence
  source: /note="Description of Artificial Sequence: Synthetic oligonucleotide"
  source: /note="RNA"
  modified_base (20)..(20): bicyclic nucleic acid (BNA)
  modified_base (21)..(21): bicyclic nucleic acid (BNA)
caaggaagauggcauuucuag

SEQ ID NO: 9715 - DNA, 20 bp, Artificial Sequence
  source: /note="Description of Artificial Sequence: Synthetic oligonucleotide"
  source: /note="Description of Combined DNA/RNA Molecule: Synthetic oligonucleotide"
  source: /note="DNA/RNA"
  modified_base (19)..(19): bicyclic nucleic acid (BNA)
  modified_base (20)..(20): bicyclic nucleic acid (BNA)
caaggaagauggcauuucta

SEQ ID NO: 9716 - DNA, 19 bp, Artificial Sequence
  source: /note="Description of Artificial Sequence: Synthetic oligonucleotide"
  source: /note="Description of Combined DNA/RNA Molecule: Synthetic oligonucleotide"
  source: /note="DNA/RNA"
  modified_base (18)..(18): bicyclic nucleic acid (BNA)
  modified_base (19)..(19): bicyclic nucleic acid (BNA)
caaggaagauggcauuuct

SEQ ID NO: 9717 - DNA, 18 bp, Artificial Sequence
  source: /note="Description of Artificial Sequence: Synthetic oligonucleotide"
  source: /note="Description of Combined DNA/RNA Molecule: Synthetic oligonucleotide"
  source: /note="DNA/RNA"
  modified_base (17)..(17): bicyclic nucleic acid (BNA)
  modified_base (18)..(18): bicyclic nucleic acid (BNA)
caaggaagauggcauutc

SEQ ID NO: 9718 - DNA, 17 bp, Artificial Sequence
  source: /note="Description of Artificial Sequence: Synthetic oligonucleotide"
  source: /note="Description of Combined DNA/RNA Molecule: Synthetic oligonucleotide"
  source: /note="DNA/RNA"
  modified_base (16)..(16): bicyclic nucleic acid (BNA)
  modified_base (17)..(17): bicyclic nucleic acid (BNA)
caaggaagauggcautt

SEQ ID NO: 9719 - DNA, 16 bp, Artificial Sequence
  source: /note="Description of Artificial Sequence: Synthetic oligonucleotide"
  source: /note="Description of Combined DNA/RNA Molecule: Synthetic oligonucleotide"
  source: /note="DNA/RNA"
  modified_base (15)..(15): bicyclic nucleic acid (BNA)
  modified_base (16)..(16): bicyclic nucleic acid (BNA)
caaggaagauggcatt

SEQ ID NO: 9720 - DNA, 15 bp, Artificial Sequence
  source: /note="Description of Artificial Sequence: Synthetic oligonucleotide"
  source: /note="Description of Combined DNA/RNA Molecule: Synthetic oligonucleotide"
  source: /note="DNA/RNA"
  modified_base (14)..(14): bicyclic nucleic acid (BNA)
  modified_base (15)..(15): bicyclic nucleic acid (BNA)
caaggaagauggcat

SEQ ID NO: 9721 - RNA, 14 nt, Artificial Sequence
  source: /note="Description of Artificial Sequence: Synthetic oligonucleotide"
  source: /note="RNA"
  modified_base (13)..(13): bicyclic nucleic acid (BNA)
  modified_base (14)..(14): bicyclic nucleic acid (BNA)
caaggaagauggca

SEQ ID NO: 9722 - RNA, 13 nt, Artificial Sequence
  source: /note="Description of Artificial Sequence: Synthetic oligonucleotide"
  source: /note="RNA"
  modified_base (12)..(12): bicyclic nucleic acid (BNA)
  modified_base (13)..(13): bicyclic nucleic acid (BNA)
caaggaagauggc

SEQ ID NO: 9723 - RNA, 12 nt, Artificial Sequence
  source: /note="Description of Artificial Sequence: Synthetic oligonucleotide"
  source: /note="RNA"
  modified_base (11)..(11): bicyclic nucleic acid (BNA)
  modified_base (12)..(12): bicyclic nucleic acid (BNA)
caaggaagaugg

SEQ ID NO: 9724 - DNA, 11 bp, Artificial Sequence
  source: /note="Description of Artificial Sequence: Synthetic oligonucleotide"
  source: /note="DNA/RNA"
  modified_base (10)..(10): bicyclic nucleic acid (BNA)
  modified_base (11)..(11): bicyclic nucleic acid (BNA)
caaggaagatg

SEQ ID NO: 9725 - DNA, 10 bp, Artificial Sequence
  source: /note="Description of Artificial Sequence: Synthetic oligonucleotide"
  source: /note="DNA/RNA"
  modified_base (9)..(9): bicyclic nucleic acid (BNA)
  modified_base (10)..(10): bicyclic nucleic acid (BNA)
caaggaagat

SEQ ID NO: 9726 - RNA, 9 nt, Artificial Sequence
  source: /note="Description of Artificial Sequence: Synthetic oligonucleotide"
  source: /note="RNA/Antisense Oligonucleotide"
  modified_base (8)..(8): bicyclic nucleic acid (BNA)
  modified_base (9)..(9): bicyclic nucleic acid (BNA)
caaggaaga

SEQ ID NO: 9727 - RNA, 8 nt, Artificial Sequence
  source: /note="Description of Artificial Sequence: Synthetic oligonucleotide"
  source: /note="RNA/Antisense Oligonucleotide"
  modified_base (7)..(7): bicyclic nucleic acid (BNA)
  modified_base (8)..(8): bicyclic nucleic acid (BNA)
caaggaag

SEQ ID NO: 9728 - RNA, 20 nt, Artificial Sequence
  source: /note="Description of Artificial Sequence: Synthetic oligonucleotide"
  source: /note="RNA"
  modified_base (19)..(19): bicyclic nucleic acid (BNA)
  modified_base (20)..(20): bicyclic nucleic acid (BNA)
aaggaagauggcauuucuag

SEQ ID NO: 9729 - DNA, 19 bp, Artificial Sequence
  source: /note="Description of Artificial Sequence: Synthetic oligonucleotide"
  source: /note="Description of Combined DNA/RNA Molecule: Synthetic oligonucleotide"
  source: /note="DNA/RNA"
  modified_base (18)..(18): bicyclic nucleic acid (BNA)
  modified_base (19)..(19): bicyclic nucleic acid (BNA)
aaggaagauggcauuucta

SEQ ID NO: 9730 - DNA, 18 bp, Artificial Sequence
  source: /note="Description of Artificial Sequence: Synthetic oligonucleotide"
  source: /note="Description of Combined DNA/RNA Molecule: Synthetic oligonucleotide"
  source: /note="DNA/RNA"
  modified_base (17)..(17): bicyclic nucleic acid (BNA)
  modified_base (18)..(18): bicyclic nucleic acid (BNA)
aaggaagauggcauuuct

SEQ ID NO: 9731 - DNA, 17 bp, Artificial Sequence
  source: /note="Description of Artificial Sequence: Synthetic oligonucleotide"
  source: /note="Description of Combined DNA/RNA Molecule: Synthetic oligonucleotide"
  source: /note="DNA/RNA"
  modified_base (16)..(16): bicyclic nucleic acid (BNA)
  modified_base (17)..(17): bicyclic nucleic acid (BNA)
aaggaagauggcauutc

SEQ ID NO: 9732 - DNA, 16 bp, Artificial Sequence
  source: /note="Description of Artificial Sequence: Synthetic oligonucleotide"
  source: /note="Description of Combined DNA/RNA Molecule: Synthetic oligonucleotide"
  source: /note="DNA/RNA"
  modified_base (15)..(15): bicyclic nucleic acid (BNA)
  modified_base (16)..(16): bicyclic nucleic acid (BNA)
aaggaagauggcautt

SEQ ID NO: 9733 - DNA, 15 bp, Artificial Sequence
  source: /note="Description of Artificial Sequence: Synthetic oligonucleotide"
  source: /note="Description of Combined DNA/RNA Molecule: Synthetic oligonucleotide"
  source: /note="DNA/RNA"
  modified_base (14)..(14): bicyclic nucleic acid (BNA)
  modified_base (15)..(15): bicyclic nucleic acid (BNA)
aaggaagauggcatt

SEQ ID NO: 9734 - DNA, 14 bp, Artificial Sequence
  source: /note="Description of Artificial Sequence: Synthetic oligonucleotide"
  source: /note="Description of Combined DNA/RNA Molecule: Synthetic oligonucleotide"
  source: /note="DNA/RNA"
  modified_base (13)..(13): bicyclic nucleic acid (BNA)
  modified_base (14)..(14): bicyclic nucleic acid (BNA)
aaggaagauggcat

SEQ ID NO: 9735 - RNA, 13 nt, Artificial Sequence
  source: /note="Description of Artificial Sequence: Synthetic oligonucleotide"
  source: /note="RNA"
  modified_base (12)..(12): bicyclic nucleic acid (BNA)
  modified_base (13)..(13): bicyclic nucleic acid (BNA)
aaggaagauggca

SEQ ID NO: 9736 - RNA, 12 nt, Artificial Sequence
  source: /note="Description of Artificial Sequence: Synthetic oligonucleotide"
  source: /note="RNA"
  modified_base (11)..(11): bicyclic nucleic acid (BNA)
  modified_base (12)..(12): bicyclic nucleic acid (BNA)
aaggaagauggc

SEQ ID NO: 9737 - RNA, 11 nt, Artificial Sequence
  source: /note="Description of Artificial Sequence: Synthetic oligonucleotide"
  source: /note="RNA"
  modified_base (10)..(10): bicyclic nucleic acid (BNA)
  modified_base (11)..(11): bicyclic nucleic acid (BNA)
aaggaagaugg

SEQ ID NO: 9738 - DNA, 10 bp, Artificial Sequence
  source: /note="Description of Artificial Sequence: Synthetic oligonucleotide"
  source: /note="DNA/RNA"
  modified_base (9)..(9): bicyclic nucleic acid (BNA)
  modified_base (10)..(10): bicyclic nucleic acid (BNA)
aaggaagatg

SEQ ID NO: 9739 - DNA, 9 bp, Artificial Sequence
  source: /note="Description of Artificial Sequence: Synthetic oligonucleotide"
  source: /note="DNA/RNA"
  modified_base (8)..(8): bicyclic nucleic acid (BNA)
  modified_base (9)..(9): bicyclic nucleic acid (BNA)
aaggaagat

SEQ ID NO: 9740 - RNA, 8 nt, Artificial Sequence
  source: /note="Description of Artificial Sequence: Synthetic oligonucleotide"
  source: /note="RNA/Antisense Oligonucleotide"
  modified_base (7)..(7): bicyclic nucleic acid (BNA)
  modified_base (8)..(8): bicyclic nucleic acid (BNA)
aaggaaga

SEQ ID NO: 9741 - RNA, 19 nt, Artificial Sequence
  source: /note="Description of Artificial Sequence: Synthetic oligonucleotide"
  source: /note="RNA"
  modified_base (18)..(18): bicyclic nucleic acid (BNA)
  modified_base (19)..(19): bicyclic nucleic acid (BNA)
aggaagauggcauuucuag

SEQ ID NO: 9742 - DNA, 18 bp, Artificial Sequence
  source: /note="Description of Artificial Sequence: Synthetic oligonucleotide"
  source: /note="Description of Combined DNA/RNA Molecule: Synthetic oligonucleotide"
  source: /note="DNA/RNA"
  modified_base (17)..(17): bicyclic nucleic acid (BNA)
  modified_base (18)..(18): bicyclic nucleic acid (BNA)
aggaagauggcauuucta

SEQ ID NO: 9743 - DNA, 17 bp, Artificial Sequence
  source: /note="Description of Artificial Sequence: Synthetic oligonucleotide"
  source: /note="Description of Combined DNA/RNA Molecule: Synthetic oligonucleotide"
  source: /note="DNA/RNA"
  modified_base (16)..(16): bicyclic nucleic acid (BNA)
  modified_base (17)..(17): bicyclic nucleic acid (BNA)
aggaagauggcauuuct

SEQ ID NO: 9744 - DNA, 16 bp, Artificial Sequence
  source: /note="Description of Artificial Sequence: Synthetic oligonucleotide"
  source: /note="Description of Combined DNA/RNA Molecule: Synthetic oligonucleotide"
  source: /note="DNA/RNA"
  modified_base (15)..(15): bicyclic nucleic acid (BNA)
  modified_base (16)..(16): bicyclic nucleic acid (BNA)
aggaagauggcauutc

SEQ ID NO: 9745 - DNA, 15 bp, Artificial Sequence
  source: /note="Description of Artificial Sequence: Synthetic oligonucleotide"
  source: /note="Description of Combined DNA/RNA Molecule: Synthetic oligonucleotide"
  source: /note="DNA/RNA"
  modified_base (14)..(14): bicyclic nucleic acid (BNA)
  modified_base (15)..(15): bicyclic nucleic acid (BNA)
aggaagauggcautt

SEQ ID NO: 9746 - DNA, 14 bp, Artificial Sequence
  source: /note="Description of Artificial Sequence: Synthetic oligonucleotide"
  source: /note="Description of Combined DNA/RNA Molecule: Synthetic oligonucleotide"
  source: /note="DNA/RNA"
  modified_base (13)..(13): bicyclic nucleic acid (BNA)
  modified_base (14)..(14): bicyclic nucleic acid (BNA)
aggaagauggcatt

SEQ ID NO: 9747 - DNA, 13 bp, Artificial Sequence
  source: /note="Description of Artificial Sequence: Synthetic oligonucleotide"
  source: /note="Description of Combined DNA/RNA Molecule: Synthetic oligonucleotide"
  source: /note="DNA/RNA"
  modified_base (12)..(12): bicyclic nucleic acid (BNA)
  modified_base (13)..(13): bicyclic nucleic acid (BNA)
aggaagauggcat

SEQ ID NO: 9748 - RNA, 12 nt, Artificial Sequence
  source: /note="Description of Artificial Sequence: Synthetic oligonucleotide"
  source: /note="RNA"
  modified_base (11)..(11): bicyclic nucleic acid (BNA)
  modified_base (12)..(12): bicyclic nucleic acid (BNA)
aggaagauggca

SEQ ID NO: 9749 - RNA, 10 nt, Artificial Sequence
  source: /note="Description of Artificial Sequence: Synthetic oligonucleotide"
  source: /note="RNA"
  modified_base (9)..(9): bicyclic nucleic acid (BNA)
  modified_base (10)..(10): bicyclic nucleic acid (BNA)
aggaagaugg

SEQ ID NO: 9750 - DNA, 9 bp, Artificial Sequence
  source: /note="Description of Artificial Sequence: Synthetic oligonucleotide"
  source: /note="DNA/RNA"
  modified_base (8)..(8): bicyclic nucleic acid (BNA)
  modified_base (9)..(9): bicyclic nucleic acid (BNA)
aggaagatg

SEQ ID NO: 9751 - DNA, 8 bp, Artificial Sequence
  source: /note="Description of Artificial Sequence: Synthetic oligonucleotide"
  source: /note="DNA/RNA"
  modified_base (7)..(7): bicyclic nucleic acid (BNA)
  modified_base (8)..(8): bicyclic nucleic acid (BNA)
aggaagat

SEQ ID NO: 9752 - RNA, 18 nt, Artificial Sequence
  source: /note="Description of Artificial Sequence: Synthetic oligonucleotide"
  source: /note="RNA"
  modified_base (17)..(17): bicyclic nucleic acid (BNA)
  modified_base (18)..(18): bicyclic nucleic acid (BNA)
ggaagauggcauuucuag

SEQ ID NO: 9753 - DNA, 17 bp, Artificial Sequence
  source: /note="Description of Artificial Sequence: Synthetic oligonucleotide"
  source: /note="Description of Combined DNA/RNA Molecule: Synthetic oligonucleotide"
  source: /note="DNA/RNA"
  modified_base (16)..(16): bicyclic nucleic acid (BNA)
  modified_base (17)..(17): bicyclic nucleic acid (BNA)
ggaagauggcauuucta

SEQ ID NO: 9754 - DNA, 16 bp, Artificial Sequence
  source: /note="Description of Artificial Sequence: Synthetic oligonucleotide"
  source: /note="Description of Combined DNA/RNA Molecule: Synthetic oligonucleotide"
  source: /note="DNA/RNA"
  modified_base (15)..(15): bicyclic nucleic acid (BNA)
  modified_base (16)..(16): bicyclic nucleic acid (BNA)
ggaagauggcauuuct

SEQ ID NO: 9755 - DNA, 15 bp, Artificial Sequence
  source: /note="Description of Artificial Sequence: Synthetic oligonucleotide"
  source: /note="Description of Combined DNA/RNA Molecule: Synthetic oligonucleotide"
  source: /note="DNA/RNA"
  modified_base (14)..(14): bicyclic nucleic acid (BNA)
  modified_base (15)..(15): bicyclic nucleic acid (BNA)
ggaagauggcauutc

SEQ ID NO: 9756 - DNA, 14 bp, Artificial Sequence
  source: /note="Description of Artificial Sequence: Synthetic oligonucleotide"
  source: /note="Description of Combined DNA/RNA Molecule: Synthetic oligonucleotide"
  source: /note="DNA/RNA"
  modified_base (13)..(13): bicyclic nucleic acid (BNA)
  modified_base (14)..(14): bicyclic nucleic acid (BNA)
ggaagauggcautt

SEQ ID NO: 9757 - DNA, 13 bp, Artificial Sequence
  source: /note="Description of Artificial Sequence: Synthetic oligonucleotide"
  source: /note="Description of Combined DNA/RNA Molecule: Synthetic oligonucleotide"
  source: /note="DNA/RNA"
  modified_base (12)..(12): bicyclic nucleic acid (BNA)
  modified_base (13)..(13): bicyclic nucleic acid (BNA)
ggaagauggcatt

SEQ ID NO: 9758 - DNA, 12 bp, Artificial Sequence
  source: /note="Description of Artificial Sequence: Synthetic oligonucleotide"
  source: /note="Description of Combined DNA/RNA Molecule: Synthetic oligonucleotide"
  source: /note="DNA/RNA"
  modified_base (11)..(11): bicyclic nucleic acid (BNA)
  modified_base (12)..(12): bicyclic nucleic acid (BNA)
ggaagauggcat

SEQ ID NO: 9759 - RNA, 11 nt, Artificial Sequence
  source: /note="Description of Artificial Sequence: Synthetic oligonucleotide"
  source: /note="RNA"
  modified_base (10)..(10): bicyclic nucleic acid (BNA)
  modified_base (11)..(11): bicyclic nucleic acid (BNA)
ggaagauggca

SEQ ID NO: 9760 - RNA, 10 nt, Artificial Sequence
  source: /note="Description of Artificial Sequence: Synthetic oligonucleotide"
  source: /note="RNA"
  modified_base (9)..(9): bicyclic nucleic acid (BNA)
  modified_base (10)..(10): bicyclic nucleic acid (BNA)
ggaagauggc

SEQ ID NO: 9761 - DNA, 8 bp, Artificial Sequence
  source: /note="Description of Artificial Sequence: Synthetic oligonucleotide"
  source: /note="DNA/RNA"
  modified_base (7)..(7): bicyclic nucleic acid (BNA)
  modified_base (8)..(8): bicyclic nucleic acid (BNA)
ggaagatg

SEQ ID NO: 9762 - RNA, 17 nt, Artificial Sequence
  source: /note="Description of Artificial Sequence: Synthetic oligonucleotide"
  source: /note="RNA"
  modified_base (16)..(16): bicyclic nucleic acid (BNA)
  modified_base (17)..(17): bicyclic nucleic acid (BNA)
gaagauggcauuucuag

SEQ ID NO: 9763 - DNA, 16 bp, Artificial Sequence
  source: /note="Description of Artificial Sequence: Synthetic oligonucleotide"
  source: /note="Description of Combined DNA/RNA Molecule: Synthetic oligonucleotide"
  source: /note="DNA/RNA"
  modified_base (15)..(15): bicyclic nucleic acid (BNA)
  modified_base (16)..(16): bicyclic nucleic acid (BNA)
gaagauggcauuucta

SEQ ID NO: 9764 - DNA, 14 bp, Artificial Sequence
  source: /note="Description of Artificial Sequence: Synthetic oligonucleotide"
  source: /note="Description of Combined DNA/RNA Molecule: Synthetic oligonucleotide"
  source: /note="DNA/RNA"
  modified_base (13)..(13): bicyclic nucleic acid (BNA)
  modified_base (14)..(14): bicyclic nucleic acid (BNA)
gaagauggcauutc

SEQ ID NO: 9765 - DNA, 13 bp, Artificial Sequence
  source: /note="Description of Artificial Sequence: Synthetic oligonucleotide"
  source: /note="Description of Combined DNA/RNA Molecule: Synthetic oligonucleotide"
  source: /note="DNA/RNA"
  modified_base (12)..(12): bicyclic nucleic acid (BNA)
  modified_base (13)..(13): bicyclic nucleic acid (BNA)
gaagauggcautt

SEQ ID NO: 9766 - DNA, 12 bp, Artificial Sequence
  source: /note="Description of Artificial Sequence: Synthetic oligonucleotide"
  source: /note="Description of Combined DNA/RNA Molecule: Synthetic oligonucleotide"
  source: /note="DNA/RNA"
  modified_base (11)..(11): bicyclic nucleic acid (BNA)
  modified_base (12)..(12): bicyclic nucleic acid (BNA)
gaagauggcatt

SEQ ID NO: 9767 - DNA, 11 bp, Artificial Sequence
  source: /note="Description of Artificial Sequence: Synthetic oligonucleotide"
  source: /note="Description of Combined DNA/RNA Molecule: Synthetic oligonucleotide"
  source: /note="DNA/RNA"
  modified_base (10)..(10): bicyclic nucleic acid (BNA)
  modified_base (11)..(11): bicyclic nucleic acid (BNA)
gaagauggcat

SEQ ID NO: 9768 - RNA, 10 nt, Artificial Sequence
  source: /note="Description of Artificial Sequence: Synthetic oligonucleotide"
  source: /note="RNA"
  modified_base (9)..(9): bicyclic nucleic acid (BNA)
  modified_base (10)..(10): bicyclic nucleic acid (BNA)
gaagauggca

SEQ ID NO: 9769 - RNA, 9 nt, Artificial Sequence
  source: /note="Description of Artificial Sequence: Synthetic oligonucleotide"
  source: /note="RNA"
  modified_base (8)..(8): bicyclic nucleic acid (BNA)
  modified_base (9)..(9): bicyclic nucleic acid (BNA)
gaagauggc

SEQ ID NO: 9770 - RNA, 8 nt, Artificial Sequence
  source: /note="Description of Artificial Sequence: Synthetic oligonucleotide"
  source: /note="RNA"
  modified_base (7)..(7): bicyclic nucleic acid (BNA)
  modified_base (8)..(8): bicyclic nucleic acid (BNA)
gaagaugg

SEQ ID NO: 9771 - RNA, 16 nt, Artificial Sequence
  source: /note="Description of Artificial Sequence: Synthetic oligonucleotide"
  source: /note="RNA"
  modified_base (15)..(15): bicyclic nucleic acid (BNA)
  modified_base (16)..(16): bicyclic nucleic acid (BNA)
aagauggcauuucuag

SEQ ID NO: 9772 - DNA, 15 bp, Artificial Sequence
  source: /note="Description of Artificial Sequence: Synthetic oligonucleotide"
  source: /note="Description of Combined DNA/RNA Molecule: Synthetic oligonucleotide"
  source: /note="DNA/RNA"
  modified_base (14)..(14): bicyclic nucleic acid (BNA)
  modified_base (15)..(15): bicyclic nucleic acid (BNA)
aagauggcauuucta

SEQ ID NO: 9773 - DNA, 14 bp, Artificial Sequence
  source: /note="Description of Artificial Sequence: Synthetic oligonucleotide"
  source: /note="Description of Combined DNA/RNA Molecule: Synthetic oligonucleotide"
  source: /note="DNA/RNA"
  modified_base (13)..(13): bicyclic nucleic acid (BNA)
  modified_base (14)..(14): bicyclic nucleic acid (BNA)
aagauggcauuuct

SEQ ID NO: 9774 - DNA, 13 bp, Artificial Sequence
  source: /note="Description of Artificial Sequence: Synthetic oligonucleotide"
  source: /note="Description of Combined DNA/RNA Molecule: Synthetic oligonucleotide"
  source: /note="DNA/RNA"
  modified_base (12)..(12): bicyclic nucleic acid (BNA)
  modified_base (13)..(13): bicyclic nucleic acid (BNA)
aagauggcauutc

SEQ ID NO: 9775 - DNA, 12 bp, Artificial Sequence
  source: /note="Description of Artificial Sequence: Synthetic oligonucleotide"
  source: /note="Description of Combined DNA/RNA Molecule: Synthetic oligonucleotide"
  source: /note="DNA/RNA"
  modified_base (11)..(11): bicyclic nucleic acid (BNA)
  modified_base (12)..(12): bicyclic nucleic acid (BNA)
aagauggcautt

SEQ ID NO: 9776 - DNA, 11 bp, Artificial Sequence
  source: /note="Description of Artificial Sequence: Synthetic oligonucleotide"
  source: /note="Description of Combined DNA/RNA Molecule: Synthetic oligonucleotide"
  source: /note="DNA/RNA"
  modified_base (10)..(10): bicyclic nucleic acid (BNA)
  modified_base (11)..(11): bicyclic nucleic acid (BNA)
aagauggcatt

SEQ ID NO: 9777 - DNA, 10 bp, Artificial Sequence
  source: /note="Description of Artificial Sequence: Synthetic oligonucleotide"
  source: /note="Description of Combined DNA/RNA Molecule: Synthetic oligonucleotide"
  source: /note="DNA/RNA"
  modified_base (9)..(9): bicyclic nucleic acid (BNA)
  modified_base (10)..(10): bicyclic nucleic acid (BNA)
aagauggcat

SEQ ID NO: 9778 - RNA, 9 nt, Artificial Sequence
  source: /note="Description of Artificial Sequence: Synthetic oligonucleotide"
  source: /note="RNA"
  modified_base (8)..(8): bicyclic nucleic acid (BNA)
  modified_base (9)..(9): bicyclic nucleic acid (BNA)
aagauggca

SEQ ID NO: 9779 - RNA, 8 nt, Artificial Sequence
  source: /note="Description of Artificial Sequence: Synthetic oligonucleotide"
  source: /note="RNA"
  modified_base (7)..(7): bicyclic nucleic acid (BNA)
  modified_base (8)..(8): bicyclic nucleic acid (BNA)
aagauggc

SEQ ID NO: 9780 - RNA, 15 nt, Artificial Sequence
  source: /note="Description of Artificial Sequence: Synthetic oligonucleotide"
  source: /note="RNA"
  modified_base (14)..(14): bicyclic nucleic acid (BNA)
  modified_base (15)..(15): bicyclic nucleic acid (BNA)
agauggcauuucuag

SEQ ID NO: 9781 - DNA, 14 bp, Artificial Sequence
  source: /note="Description of Artificial Sequence: Synthetic oligonucleotide"
  source: /note="Description of Combined DNA/RNA Molecule: Synthetic oligonucleotide"
  source: /note="DNA/RNA"
  modified_base (13)..(13): bicyclic nucleic acid (BNA)
  modified_base (14)..(14): bicyclic nucleic acid (BNA)
agauggcauuucta

SEQ ID NO: 9782 - DNA, 13 bp, Artificial Sequence
  source: /note="Description of Artificial Sequence: Synthetic oligonucleotide"
  source: /note="Description of Combined DNA/RNA Molecule: Synthetic oligonucleotide"
  source: /note="DNA/RNA"
  modified_base (12)..(12): bicyclic nucleic acid (BNA)
  modified_base (13)..(13): bicyclic nucleic acid (BNA)
agauggcauuuct

SEQ ID NO: 9783 - DNA, 12 bp, Artificial Sequence
  source: /note="Description of Artificial Sequence: Synthetic oligonucleotide"
  source: /note="Description of Combined DNA/RNA Molecule: Synthetic oligonucleotide"
  source: /note="DNA/RNA"
  modified_base (11)..(11): bicyclic nucleic acid (BNA)
  modified_base (12)..(12): bicyclic nucleic acid (BNA)
agauggcauutc

SEQ ID NO: 9784 - DNA, 11 bp, Artificial Sequence
  source: /note="Description of Artificial Sequence: Synthetic oligonucleotide"
  source: /note="Description of Combined DNA/RNA Molecule: Synthetic oligonucleotide"
  source: /note="DNA/RNA"
  modified_base (10)..(10): bicyclic nucleic acid (BNA)
  modified_base (11)..(11): bicyclic nucleic acid (BNA)
agauggcautt

SEQ ID NO: 9785 - DNA, 10 bp, Artificial Sequence
  source: /note="Description of Artificial Sequence: Synthetic oligonucleotide"
  source: /note="Description of Combined DNA/RNA Molecule: Synthetic oligonucleotide"
  source: /note="DNA/RNA"
  modified_base (9)..(9): bicyclic nucleic acid (BNA)
  modified_base (10)..(10): bicyclic nucleic acid (BNA)
agauggcatt

SEQ ID NO: 9786 - DNA, 9 bp, Artificial Sequence
  source: /note="Description of Artificial Sequence: Synthetic oligonucleotide"
  source: /note="Description of Combined DNA/RNA Molecule: Synthetic oligonucleotide"
  source: /note="DNA/RNA"
  modified_base (8)..(8): bicyclic nucleic acid (BNA)
  modified_base (9)..(9): bicyclic nucleic acid (BNA)
agauggcat

SEQ ID NO: 9787 - RNA, 8 nt, Artificial Sequence
  source: /note="Description of Artificial Sequence: Synthetic oligonucleotide"
  source: /note="RNA"
  modified_base (7)..(7): bicyclic nucleic acid (BNA)
  modified_base (8)..(8): bicyclic nucleic acid (BNA)
agauggca

SEQ ID NO: 9788 - RNA, 30 nt, Artificial Sequence; identical to SEQ ID NO: 284
  source: /note="Description of Artificial Sequence: Synthetic oligonucleotide"
  source: /note="RNA"
  modified_base (29)..(29): bicyclic nucleic acid (BNA)
  modified_base (30)..(30): bicyclic nucleic acid (BNA)

SEQ ID NO: 9789 - DNA, 29 bp, Artificial Sequence
  source: /note="Description of Artificial Sequence: Synthetic oligonucleotide"
  source: /note="Description of Combined DNA/RNA Molecule: Synthetic oligonucleotide"
  source: /note="DNA/RNA"
  modified_base (28)..(28): bicyclic nucleic acid (BNA)
  modified_base (29)..(29): bicyclic nucleic acid (BNA)
cuccaacaucaaggaagauggcauuucta

SEQ ID NO: 9790 - DNA, 28 bp, Artificial Sequence
  source: /note="Description of Artificial Sequence: Synthetic oligonucleotide"
  source: /note="Description of Combined DNA/RNA Molecule: Synthetic oligonucleotide"
  source: /note="DNA/RNA"
  modified_base (27)..(27): bicyclic nucleic acid (BNA)
  modified_base (28)..(28): bicyclic nucleic acid (BNA)
cuccaacaucaaggaagauggcauuuct

SEQ ID NO: 9791 - DNA, 27 bp, Artificial Sequence
  source: /note="Description of Artificial Sequence: Synthetic oligonucleotide"
  source: /note="Description of Combined DNA/RNA Molecule: Synthetic oligonucleotide"
  source: /note="DNA/RNA"
  modified_base (26)..(26): bicyclic nucleic acid (BNA)
  modified_base (27)..(27): bicyclic nucleic acid (BNA)
cuccaacaucaaggaagauggcauutc

SEQ ID NO: 9792 - DNA, 26 bp, Artificial Sequence
  source: /note="Description of Artificial Sequence: Synthetic oligonucleotide"
  source: /note="Description of Combined DNA/RNA Molecule: Synthetic oligonucleotide"
  source: /note="DNA/RNA"
  modified_base (25)..(25): bicyclic nucleic acid (BNA)
  modified_base (26)..(26): bicyclic nucleic acid (BNA)
cuccaacaucaaggaagauggcautt

SEQ ID NO: 9793 - DNA, 25 bp, Artificial Sequence
  source: /note="Description of Artificial Sequence: Synthetic oligonucleotide"
  source: /note="Description of Combined DNA/RNA Molecule: Synthetic oligonucleotide"
  source: /note="DNA/RNA"
  modified_base (24)..(24): bicyclic nucleic acid (BNA)
  modified_base (25)..(25): bicyclic nucleic acid (BNA)
cuccaacaucaaggaagauggcatt

SEQ ID NO: 9794 - DNA, 24 bp, Artificial Sequence
  source: /note="Description of Artificial Sequence: Synthetic oligonucleotide"
  source: /note="Description of Combined DNA/RNA Molecule: Synthetic oligonucleotide"
  source: /note="DNA/RNA"
  modified_base (23)..(23): bicyclic nucleic acid (BNA)
  modified_base (24)..(24): bicyclic nucleic acid (BNA)
cuccaacaucaaggaagauggcat

SEQ ID NO: 9795 - RNA, 23 nt, Artificial Sequence
  source: /note="Description of Artificial Sequence: Synthetic oligonucleotide"
  source: /note="RNA"
  modified_base (22)..(22): bicyclic nucleic acid (BNA)
  modified_base (23)..(23): bicyclic nucleic acid (BNA)
cuccaacaucaaggaagauggca

SEQ ID NO: 9796 - RNA, 22 nt, Artificial Sequence
  source: /note="Description of Artificial Sequence: Synthetic oligonucleotide"
  source: /note="RNA"
  modified_base (21)..(21): bicyclic nucleic acid (BNA)
  modified_base (22)..(22): bicyclic nucleic acid (BNA)
cuccaacaucaaggaagauggc

SEQ ID NO: 9797 - RNA, 21 nt, Artificial Sequence
  source: /note="Description of Artificial Sequence: Synthetic oligonucleotide"
  source: /note="RNA"
  modified_base (20)..(20): bicyclic nucleic acid (BNA)
  modified_base (21)..(21): bicyclic nucleic acid (BNA)
cuccaacaucaaggaagaugg

SEQ ID NO: 9798 - DNA, 20 bp, Artificial Sequence
  source: /note="Description of Artificial Sequence: Synthetic oligonucleotide"
  source: /note="Description of Combined DNA/RNA Molecule: Synthetic oligonucleotide"
  source: /note="DNA/RNA"
  modified_base (19)..(19): bicyclic nucleic acid (BNA)
  modified_base (20)..(20): bicyclic nucleic acid (BNA)
cuccaacaucaaggaagatg

SEQ ID NO: 9799 - DNA, 19 bp, Artificial Sequence
  source: /note="Description of Artificial Sequence: Synthetic oligonucleotide"
  source: /note="Description of Combined DNA/RNA Molecule: Synthetic oligonucleotide"
  source: /note="DNA/RNA"
  modified_base (18)..(18): bicyclic nucleic acid (BNA)
  modified_base (19)..(19): bicyclic nucleic acid (BNA)
cuccaacaucaaggaagat

SEQ ID NO: 9800 - RNA, 18 nt, Artificial Sequence
  source: /note="Description of Artificial Sequence: Synthetic oligonucleotide"
  source: /note="RNA"
  modified_base (17)..(17): bicyclic nucleic acid (BNA)
  modified_base (18)..(18): bicyclic nucleic acid (BNA)
cuccaacaucaaggaaga

SEQ ID NO: 9801 - RNA, 17 nt, Artificial Sequence
  source: /note="Description of Artificial Sequence: Synthetic oligonucleotide"
  source: /note="RNA"
  modified_base (16)..(16): bicyclic nucleic acid (BNA)
  modified_base (17)..(17): bicyclic nucleic acid (BNA)
cuccaacaucaaggaag

SEQ ID NO: 9802 - RNA, 29 nt, Artificial Sequence
  source: /note="Description of Artificial Sequence: Synthetic oligonucleotide"
  source: /note="RNA"
  modified_base (28)..(28): bicyclic nucleic acid (BNA)
  modified_base (29)..(29): bicyclic nucleic acid (BNA)
uccaacaucaaggaagauggcauuucuag

SEQ ID NO: 9803 - DNA, 28 bp, Artificial Sequence
  source: /note="Description of Artificial Sequence: Synthetic oligonucleotide"
  source: /note="Description of Combined DNA/RNA Molecule: Synthetic oligonucleotide"
  source: /note="DNA/RNA"
  modified_base (27)..(27): bicyclic nucleic acid (BNA)
  modified_base (28)..(28): bicyclic nucleic acid (BNA)
uccaacaucaaggaagauggcauuucta

SEQ ID NO: 9804 - DNA, 27 bp, Artificial Sequence
  source: /note="Description of Artificial Sequence: Synthetic oligonucleotide"
  source: /note="Description of Combined DNA/RNA Molecule: Synthetic oligonucleotide"
  source: /note="DNA/RNA"
  modified_base (26)..(26): bicyclic nucleic acid (BNA)
  modified_base (27)..(27): bicyclic nucleic acid (BNA)
uccaacaucaaggaagauggcauuuct

SEQ ID NO: 9805 - DNA, 26 bp, Artificial Sequence
  source: /note="Description of Artificial Sequence: Synthetic oligonucleotide"
  source: /note="Description of Combined DNA/RNA Molecule: Synthetic oligonucleotide"
  source: /note="DNA/RNA"
  modified_base (25)..(25): bicyclic nucleic acid (BNA)
  modified_base (26)..(26): bicyclic nucleic acid (BNA)
uccaacaucaaggaagauggcauutc

SEQ ID NO: 9806 - DNA, 25 bp, Artificial Sequence
  source: /note="Description of Artificial Sequence: Synthetic oligonucleotide"
  source: /note="Description of Combined DNA/RNA Molecule: Synthetic oligonucleotide"
  source: /note="DNA/RNA"
  modified_base (24)..(24): bicyclic nucleic acid (BNA)
  modified_base (25)..(25): bicyclic nucleic acid (BNA)
uccaacaucaaggaagauggcautt

SEQ ID NO: 9807 - DNA, 24 bp, Artificial Sequence
  source: /note="Description of Artificial Sequence: Synthetic oligonucleotide"
  source: /note="Description of Combined DNA/RNA Molecule: Synthetic oligonucleotide"
  source: /note="DNA/RNA"
  modified_base (23)..(23): bicyclic nucleic acid (BNA)
  modified_base (24)..(24): bicyclic nucleic acid (BNA)
uccaacaucaaggaagauggcatt

SEQ ID NO: 9808 - DNA, 23 bp, Artificial Sequence
  source: /note="Description of Artificial Sequence: Synthetic oligonucleotide"
  source: /note="Description of Combined DNA/RNA Molecule: Synthetic oligonucleotide"
  source: /note="DNA/RNA"
  modified_base (22)..(22): bicyclic nucleic acid (BNA)
  modified_base (23)..(23): bicyclic nucleic acid (BNA)
uccaacaucaaggaagauggcat

SEQ ID NO: 9809 - RNA, 22 nt, Artificial Sequence
  source: /note="Description of Artificial Sequence: Synthetic oligonucleotide"
  source: /note="RNA"
  modified_base (21)..(21): bicyclic nucleic acid (BNA)
  modified_base (22)..(22): bicyclic nucleic acid (BNA)
uccaacaucaaggaagauggca

SEQ ID NO: 9810 - RNA, 21 nt, Artificial Sequence
  source: /note="Description of Artificial Sequence: Synthetic oligonucleotide"
  source: /note="RNA"
  modified_base (20)..(20): bicyclic nucleic acid (BNA)
  modified_base (21)..(21): bicyclic nucleic acid (BNA)
uccaacaucaaggaagauggc

SEQ ID NO: 9811 - RNA, 20 nt, Artificial Sequence
  source: /note="Description of Artificial Sequence: Synthetic oligonucleotide"
  source: /note="RNA"
  modified_base (19)..(19): bicyclic nucleic acid (BNA)
  modified_base (20)..(20): bicyclic nucleic acid (BNA)
uccaacaucaaggaagaugg

SEQ ID NO: 9812 - DNA, 19 bp, Artificial Sequence
  source: /note="Description of Artificial Sequence: Synthetic oligonucleotide"
  source: /note="Description of Combined DNA/RNA Molecule: Synthetic oligonucleotide"
  source: /note="DNA/RNA"
  modified_base (18)..(18): bicyclic nucleic acid (BNA)
  modified_base (19)..(19): bicyclic nucleic acid (BNA)
uccaacaucaaggaagatg

SEQ ID NO: 9813 - DNA, 18 bp, Artificial Sequence
  source: /note="Description of Artificial Sequence: Synthetic oligonucleotide"
  source: /note="Description of Combined DNA/RNA Molecule: Synthetic oligonucleotide"
  source: /note="DNA/RNA"
  modified_base (17)..(17): bicyclic nucleic acid (BNA)
  modified_base (18)..(18): bicyclic nucleic acid (BNA)
uccaacaucaaggaagat

SEQ ID NO: 9814 - RNA, 17 nt, Artificial Sequence
  source: /note="Description of Artificial Sequence: Synthetic oligonucleotide"
  source: /note="RNA"
  modified_base (16)..(16): bicyclic nucleic acid (BNA)
  modified_base (17)..(17): bicyclic nucleic acid (BNA)
uccaacaucaaggaaga

SEQ ID NO: 9815 - RNA, 16 nt, Artificial Sequence
  source: /note="Description of Artificial Sequence: Synthetic oligonucleotide"
  source: /note="RNA"
  modified_base (15)..(15): bicyclic nucleic acid (BNA)
  modified_base (16)..(16): bicyclic nucleic acid (BNA)
uccaacaucaaggaag

SEQ ID NO: 9816 - RNA, 28 nt, Artificial Sequence
  source: /note="Description of Artificial Sequence: Synthetic oligonucleotide"
  source: /note="RNA"
  modified_base (27)..(27): bicyclic nucleic acid (BNA)
  modified_base (28)..(28): bicyclic nucleic acid (BNA)
ccaacaucaaggaagauggcauuucuag

SEQ ID NO: 9817 - DNA, 27 bp, Artificial Sequence
  source: /note="Description of Artificial Sequence: Synthetic oligonucleotide"
  source: /note="Description of Combined DNA/RNA Molecule: Synthetic oligonucleotide"
  source: /note="DNA/RNA"
  modified_base (26)..(26): bicyclic nucleic acid (BNA)
  modified_base (27)..(27): bicyclic nucleic acid (BNA)
ccaacaucaaggaagauggcauuucta

SEQ ID NO: 9818 - DNA, 26 bp, Artificial Sequence
  source: /note="Description of Artificial Sequence: Synthetic oligonucleotide"
  source: /note="Description of Combined DNA/RNA Molecule: Synthetic oligonucleotide"
  source: /note="DNA/RNA"
  modified_base (25)..(25): bicyclic nucleic acid (BNA)
  modified_base (26)..(26): bicyclic nucleic acid (BNA)
ccaacaucaaggaagauggcauuuct

SEQ ID NO: 9819 - DNA, 25 bp, Artificial Sequence
  source: /note="Description of Artificial Sequence: Synthetic oligonucleotide"
  source: /note="Description of Combined DNA/RNA Molecule: Synthetic oligonucleotide"
  source: /note="DNA/RNA"
  modified_base (24)..(24): bicyclic nucleic acid (BNA)
  modified_base (25)..(25): bicyclic nucleic acid (BNA)
ccaacaucaaggaagauggcauutc

SEQ ID NO: 9820 - DNA, 24 bp, Artificial Sequence
  source: /note="Description of Artificial Sequence: Synthetic oligonucleotide"
  source: /note="Description of Combined DNA/RNA Molecule: Synthetic oligonucleotide"
  source: /note="DNA/RNA"
  modified_base (23)..(23): bicyclic nucleic acid (BNA)
  modified_base (24)..(24): bicyclic nucleic acid (BNA)
ccaacaucaaggaagauggcautt

SEQ ID NO: 9821 - DNA, 23 bp, Artificial Sequence
  source: /note="Description of Artificial Sequence: Synthetic oligonucleotide"
  source: /note="Description of Combined DNA/RNA Molecule: Synthetic oligonucleotide"
  source: /note="DNA/RNA"
  modified_base (22)..(22): bicyclic nucleic acid (BNA)
  modified_base (23)..(23): bicyclic nucleic acid (BNA)
ccaacaucaaggaagauggcatt

SEQ ID NO: 9822 - DNA, 22 bp, Artificial Sequence
  source: /note="Description of Artificial Sequence: Synthetic oligonucleotide"
  source: /note="Description of Combined DNA/RNA Molecule: Synthetic oligonucleotide"
  source: /note="DNA/RNA"
  modified_base (21)..(21): bicyclic nucleic acid (BNA)
  modified_base (22)..(22): bicyclic nucleic acid (BNA)
ccaacaucaaggaagauggcat

SEQ ID NO: 9823 - RNA, 21 nt, Artificial Sequence
  source: /note="Description of Artificial Sequence: Synthetic oligonucleotide"
  source: /note="RNA"
  modified_base (20)..(20): bicyclic nucleic acid (BNA)
  modified_base (21)..(21): bicyclic nucleic acid (BNA)
ccaacaucaaggaagauggca

SEQ ID NO: 9824 - RNA, 20 nt, Artificial Sequence
  source: /note="Description of Artificial Sequence: Synthetic oligonucleotide"
  source: /note="RNA"
  modified_base (19)..(19): bicyclic nucleic acid (BNA)
  modified_base (20)..(20): bicyclic nucleic acid (BNA)
ccaacaucaaggaagauggc

SEQ ID NO: 9825 - RNA, 19 nt, Artificial Sequence
  source: /note="Description of Artificial Sequence: Synthetic oligonucleotide"
  source: /note="RNA"
  modified_base (18)..(18): bicyclic nucleic acid (BNA)
  modified_base (19)..(19): bicyclic nucleic acid (BNA)
ccaacaucaaggaagaugg

SEQ ID NO: 9826 - DNA, 18 bp, Artificial Sequence
  source: /note="Description of Artificial Sequence: Synthetic oligonucleotide"
  source: /note="Description of Combined DNA/RNA Molecule: Synthetic oligonucleotide"
  source: /note="DNA/RNA"
  modified_base (17)..(17): bicyclic nucleic acid (BNA)
  modified_base (18)..(18): bicyclic nucleic acid (BNA)
ccaacaucaaggaagatg

SEQ ID NO: 9827 - DNA, 17 bp, Artificial Sequence
  source: /note="Description of Artificial Sequence: Synthetic oligonucleotide"
  source: /note="Description of Combined DNA/RNA Molecule: Synthetic oligonucleotide"
  source: /note="DNA/RNA"
  modified_base (16)..(16): bicyclic nucleic acid (BNA)
  modified_base (17)..(17): bicyclic nucleic acid (BNA)
ccaacaucaaggaagat

SEQ ID NO: 9828 - RNA, 16 nt, Artificial Sequence
  source: /note="Description of Artificial Sequence: Synthetic oligonucleotide"
  source: /note="RNA"
  modified_base (15)..(15): bicyclic nucleic acid (BNA)
  modified_base (16)..(16): bicyclic nucleic acid (BNA)
ccaacaucaaggaaga

SEQ ID NO: 9829 - RNA, 15 nt, Artificial Sequence
  source: /note="Description of Artificial Sequence: Synthetic oligonucleotide"
  source: /note="RNA"
  modified_base (14)..(14): bicyclic nucleic acid (BNA)
  modified_base (15)..(15): bicyclic nucleic acid (BNA)
ccaacaucaaggaag

SEQ ID NO: 9830 - RNA, 27 nt, Artificial Sequence
  source: /note="Description of Artificial Sequence: Synthetic oligonucleotide"
  source: /note="RNA"
  modified_base (26)..(26): bicyclic nucleic acid (BNA)
  modified_base (27)..(27): bicyclic nucleic acid (BNA)
caacaucaaggaagauggcauuucuag

SEQ ID NO: 9831 - DNA, 26 bp, Artificial Sequence
  source: /note="Description of Artificial Sequence: Synthetic oligonucleotide"
  source: /note="Description of Combined DNA/RNA Molecule: Synthetic oligonucleotide"
  source: /note="DNA/RNA"
  modified_base (25)..(25): bicyclic nucleic acid (BNA)
  modified_base (26)..(26): bicyclic nucleic acid (BNA)
caacaucaaggaagauggcauuucta

SEQ ID NO: 9832 - DNA, 25 bp, Artificial Sequence
  source: /note="Description of Artificial Sequence: Synthetic oligonucleotide"
  source: /note="Description of Combined DNA/RNA Molecule: Synthetic oligonucleotide"
  source: /note="DNA/RNA"
  modified_base (24)..(24): bicyclic nucleic acid (BNA)
  modified_base (25)..(25): bicyclic nucleic acid (BNA)
caacaucaaggaagauggcauuuct

SEQ ID NO: 9833 - DNA, 24 bp, Artificial Sequence
  source: /note="Description of Artificial Sequence: Synthetic oligonucleotide"
  source: /note="Description of Combined DNA/RNA Molecule: Synthetic oligonucleotide"
  source: /note="DNA/RNA"
  modified_base (23)..(23): bicyclic nucleic acid (BNA)
  modified_base (24)..(24): bicyclic nucleic acid (BNA)
caacaucaaggaagauggcauutc

SEQ ID NO: 9834 - DNA, 23 bp, Artificial Sequence
  source: /note="Description of Artificial Sequence: Synthetic oligonucleotide"
  source: /note="Description of Combined DNA/RNA Molecule: Synthetic oligonucleotide"
  source: /note="DNA/RNA"
  modified_base (22)..(22): bicyclic nucleic acid (BNA)
  modified_base (23)..(23): bicyclic nucleic acid (BNA)
caacaucaaggaagauggcautt

SEQ ID NO: 9835 - DNA, 22 bp, Artificial Sequence
  source: /note="Description of Artificial Sequence: Synthetic oligonucleotide"
  source: /note="Description of Combined DNA/RNA Molecule: Synthetic oligonucleotide"
  source: /note="DNA/RNA"
  modified_base (21)..(21): bicyclic nucleic acid (BNA)
  modified_base (22)..(22): bicyclic nucleic acid (BNA)
caacaucaaggaagauggcatt

SEQ ID NO: 9836 - DNA, 21 bp, Artificial Sequence
  source: /note="Description of Artificial Sequence: Synthetic oligonucleotide"
  source: /note="Description of Combined DNA/RNA Molecule: Synthetic oligonucleotide"
  source: /note="DNA/RNA"
  modified_base (20)..(20): bicyclic nucleic acid (BNA)
  modified_base (21)..(21): bicyclic nucleic acid (BNA)
caacaucaaggaagauggcat

SEQ ID NO: 9837 - RNA, 20 nt, Artificial Sequence
  source: /note="Description of Artificial Sequence: Synthetic oligonucleotide"
  source: /note="RNA"
  modified_base (19)..(19): bicyclic nucleic acid (BNA)
  modified_base (20)..(20): bicyclic nucleic acid (BNA)
caacaucaaggaagauggca

SEQ ID NO: 9838 - RNA, 19 nt, Artificial Sequence
  source: /note="Description of Artificial Sequence: Synthetic oligonucleotide"
  source: /note="RNA"
  modified_base (18)..(18): bicyclic nucleic acid (BNA)
  modified_base (19)..(19): bicyclic nucleic acid (BNA)
caacaucaaggaagauggc

SEQ ID NO: 9839 - RNA, 18 nt, Artificial Sequence
  source: /note="Description of Artificial Sequence: Synthetic oligonucleotide"
  source: /note="RNA"
  modified_base (17)..(17): bicyclic nucleic acid (BNA)
  modified_base (18)..(18): bicyclic nucleic acid (BNA)
caacaucaaggaagaugg

SEQ ID NO: 9840 - DNA, 17 bp, Artificial Sequence
  source: /note="Description of Artificial Sequence: Synthetic oligonucleotide"
  source: /note="Description of Combined DNA/RNA Molecule: Synthetic oligonucleotide"
  source: /note="DNA/RNA"
  modified_base (16)..(16): bicyclic nucleic acid (BNA)
  modified_base (17)..(17): bicyclic nucleic acid (BNA)
caacaucaaggaagatg

SEQ ID NO: 9841 - DNA, 16 bp, Artificial Sequence
  source: /note="Description of Artificial Sequence: Synthetic oligonucleotide"
  source: /note="Description of Combined DNA/RNA Molecule: Synthetic oligonucleotide"
  source: /note="DNA/RNA"
  modified_base (15)..(15): bicyclic nucleic acid (BNA)
  modified_base (16)..(16): bicyclic nucleic acid (BNA)
caacaucaaggaagat

SEQ ID NO: 9842 - RNA, 15 nt, Artificial Sequence
  source: /note="Description of Artificial Sequence: Synthetic oligonucleotide"
  source: /note="RNA"
  modified_base (14)..(14): bicyclic nucleic acid (BNA)
  modified_base (15)..(15): bicyclic nucleic acid (BNA)
caacaucaaggaaga

SEQ ID NO: 9843 - RNA, 14 nt, Artificial Sequence
  source: /note="Description of Artificial Sequence: Synthetic oligonucleotide"
  source: /note="RNA"
  modified_base (13)..(13): bicyclic nucleic acid (BNA)
  modified_base (14)..(14): bicyclic nucleic acid (BNA)
caacaucaaggaag

SEQ ID NO: 9844 - RNA, 26 nt, Artificial Sequence
  source: /note="Description of Artificial Sequence: Synthetic oligonucleotide"
  source: /note="RNA"
  modified_base (25)..(25): bicyclic nucleic acid (BNA)
  modified_base (26)..(26): bicyclic nucleic acid (BNA)
aacaucaaggaagauggcauuucuag

SEQ ID NO: 9845 - DNA, 25 bp, Artificial Sequence
  source: /note="Description of Artificial Sequence: Synthetic oligonucleotide"
  source: /note="Description of Combined DNA/RNA Molecule: Synthetic oligonucleotide"
  source: /note="DNA/RNA"
  modified_base (24)..(24): bicyclic nucleic acid (BNA)
  modified_base (25)..(25): bicyclic nucleic acid (BNA)
aacaucaaggaagauggcauuucta

SEQ ID NO: 9846 - DNA, 24 bp, Artificial Sequence
  source: /note="Description of Artificial Sequence: Synthetic oligonucleotide"
  source: /note="Description of Combined DNA/RNA Molecule: Synthetic oligonucleotide"
  source: /note="DNA/RNA"
  modified_base (23)..(23): bicyclic nucleic acid (BNA)
  modified_base (24)..(24): bicyclic nucleic acid (BNA)
aacaucaaggaagauggcauuuct

SEQ ID NO: 9847 - DNA, 23 bp, Artificial Sequence
  source: /note="Description of Artificial Sequence: Synthetic oligonucleotide"
  source: /note="Description of Combined DNA/RNA Molecule: Synthetic oligonucleotide"
  source: /note="DNA/RNA"
  modified_base (22)..(22): bicyclic nucleic acid (BNA)
  modified_base (23)..(23): bicyclic nucleic acid (BNA)
aacaucaaggaagauggcauutc

SEQ ID NO: 9848 - DNA, 22 bp, Artificial Sequence
  source: /note="Description of Artificial Sequence: Synthetic oligonucleotide"
  source: /note="Description of Combined DNA/RNA Molecule: Synthetic oligonucleotide"
  source: /note="DNA/RNA"
  modified_base (21)..(21): bicyclic nucleic acid (BNA)
  modified_base (22)..(22): bicyclic nucleic acid (BNA)
aacaucaaggaagauggcautt

SEQ ID NO: 9849 - DNA, 21 bp, Artificial Sequence
  source: /note="Description of Artificial Sequence: Synthetic oligonucleotide"
  source: /note="Description of Combined DNA/RNA Molecule: Synthetic oligonucleotide"
  source: /note="DNA/RNA"
  modified_base (20)..(20): bicyclic nucleic acid (BNA)
  modified_base (21)..(21): bicyclic nucleic acid (BNA)
aacaucaaggaagauggcatt

SEQ ID NO: 9850 - DNA, 20 bp, Artificial Sequence
  source: /note="Description of Artificial Sequence: Synthetic oligonucleotide"
  source: /note="Description of Combined DNA/RNA Molecule: Synthetic oligonucleotide"
  source: /note="DNA/RNA"
  modified_base (19)..(19): bicyclic nucleic acid (BNA)
  modified_base (20)..(20): bicyclic nucleic acid (BNA)
aacaucaaggaagauggcat

SEQ ID NO: 9851 - RNA, 19 nt, Artificial Sequence
  source: /note="Description of Artificial Sequence: Synthetic oligonucleotide"
  source: /note="RNA"
  modified_base (18)..(18): bicyclic nucleic acid (BNA)
  modified_base (19)..(19): bicyclic nucleic acid (BNA)
aacaucaaggaagauggca

SEQ ID NO: 9852 - RNA, 18 nt, Artificial Sequence
  source: /note="Description of Artificial Sequence: Synthetic oligonucleotide"
  source: /note="RNA"
  modified_base (17)..(17): bicyclic nucleic acid (BNA)
  modified_base (18)..(18): bicyclic nucleic acid (BNA)
aacaucaaggaagauggc

SEQ ID NO: 9853 - RNA, 17 nt, Artificial Sequence
  source: /note="Description of Artificial Sequence: Synthetic oligonucleotide"
  source: /note="RNA"
  modified_base (16)..(16): bicyclic nucleic acid (BNA)
  modified_base (17)..(17): bicyclic nucleic acid (BNA)
aacaucaaggaagaugg

SEQ ID NO: 9854 - DNA, 16 bp, Artificial Sequence
  source: /note="Description of Artificial Sequence: Synthetic oligonucleotide"
  source: /note="Description of Combined DNA/RNA Molecule: Synthetic oligonucleotide"
  source: /note="DNA/RNA"
  modified_base (15)..(15): bicyclic nucleic acid (BNA)
  modified_base (16)..(16): bicyclic nucleic acid (BNA)
aacaucaaggaagatg

SEQ ID NO: 9855 - DNA, 15 bp, Artificial Sequence
  source: /note="Description of Artificial Sequence: Synthetic oligonucleotide"
  source: /note="Description of Combined DNA/RNA Molecule: Synthetic oligonucleotide"
  source: /note="DNA/RNA"
  modified_base (14)..(14): bicyclic nucleic acid (BNA)
  modified_base (15)..(15): bicyclic nucleic acid (BNA)
aacaucaaggaagat

SEQ ID NO: 9856 - RNA, 14 nt, Artificial Sequence
  source: /note="Description of Artificial Sequence: Synthetic oligonucleotide"
  source: /note="RNA"
  modified_base (13)..(13): bicyclic nucleic acid (BNA)
  modified_base (14)..(14): bicyclic nucleic acid (BNA)
aacaucaaggaaga

SEQ ID NO: 9857 - RNA, 13 nt, Artificial Sequence
  source: /note="Description of Artificial Sequence: Synthetic oligonucleotide"
  source: /note="RNA"
  modified_base (12)..(12): bicyclic nucleic acid (BNA)
  modified_base (13)..(13): bicyclic nucleic acid (BNA)
aacaucaaggaag

SEQ ID NO: 9858 - RNA, 25 nt, Artificial Sequence
  source: /note="Description of Artificial Sequence: Synthetic oligonucleotide"
  source: /note="RNA"
  modified_base (24)..(24): bicyclic nucleic acid (BNA)
  modified_base (25)..(25): bicyclic nucleic acid (BNA)
acaucaaggaagauggcauuucuag

SEQ ID NO: 9859 - DNA, 24 bp, Artificial Sequence
  source: /note="Description of Artificial Sequence: Synthetic oligonucleotide"
  source: /note="Description of Combined DNA/RNA Molecule: Synthetic oligonucleotide"
  source: /note="DNA/RNA"
  modified_base (23)..(23): bicyclic nucleic acid (BNA)
  modified_base (24)..(24): bicyclic nucleic acid (BNA)
acaucaaggaagauggcauuucta

SEQ ID NO: 9860 - DNA, 23 bp, Artificial Sequence
  source: /note="Description of Artificial Sequence: Synthetic oligonucleotide"
  source: /note="Description of Combined DNA/RNA Molecule: Synthetic oligonucleotide"
  source: /note="DNA/RNA"
  modified_base (22)..(22): bicyclic nucleic acid (BNA)
  modified_base (23)..(23): bicyclic nucleic acid (BNA)
acaucaaggaagauggcauuuct

SEQ ID NO: 9861 - DNA, 22 bp, Artificial Sequence
  source: /note="Description of Artificial Sequence: Synthetic oligonucleotide"
  source: /note="Description of Combined DNA/RNA Molecule: Synthetic oligonucleotide"
  source: /note="DNA/RNA"
  modified_base (21)..(21): bicyclic nucleic acid (BNA)
  modified_base (22)..(22): bicyclic nucleic acid (BNA)
acaucaaggaagauggcauutc

SEQ ID NO: 9862 - DNA, 21 bp, Artificial Sequence
  source: /note="Description of Artificial Sequence: Synthetic oligonucleotide"
  source: /note="Description of Combined DNA/RNA Molecule: Synthetic oligonucleotide"
  source: /note="DNA/RNA"
  modified_base (20)..(20): bicyclic nucleic acid (BNA)
  modified_base (21)..(21): bicyclic nucleic acid (BNA)
acaucaaggaagauggcautt

SEQ ID NO: 9863 - DNA, 20 bp, Artificial Sequence
  source: /note="Description of Artificial Sequence: Synthetic oligonucleotide"
  source: /note="Description of Combined DNA/RNA Molecule: Synthetic oligonucleotide"
  source: /note="DNA/RNA"
  modified_base (19)..(19): bicyclic nucleic acid (BNA)
  modified_base (20)..(20): bicyclic nucleic acid (BNA)
acaucaaggaagauggcatt

SEQ ID NO: 9864 - DNA, 19 bp, Artificial Sequence
  source: /note="Description of Artificial Sequence: Synthetic oligonucleotide"
  source: /note="Description of Combined DNA/RNA Molecule: Synthetic oligonucleotide"
  source: /note="DNA/RNA"
  modified_base (18)..(18): bicyclic nucleic acid (BNA)
  modified_base (19)..(19): bicyclic nucleic acid (BNA)
acaucaaggaagauggcat

SEQ ID NO: 9865 - RNA, 18 nt, Artificial Sequence
  source: /note="Description of Artificial Sequence: Synthetic oligonucleotide"
  source: /note="RNA"
  modified_base (17)..(17): bicyclic nucleic acid (BNA)
  modified_base (18)..(18): bicyclic nucleic acid (BNA)
acaucaaggaagauggca

SEQ ID NO: 9866 - RNA, 17 nt, Artificial Sequence
  source: /note="Description of Artificial Sequence: Synthetic oligonucleotide"
  source: /note="RNA"
  modified_base (16)..(16): bicyclic nucleic acid (BNA)
  modified_base (17)..(17): bicyclic nucleic acid (BNA)
acaucaaggaagauggc

SEQ ID NO: 9867 - RNA, 16 nt, Artificial Sequence
  source: /note="Description of Artificial Sequence: Synthetic oligonucleotide"
  source: /note="RNA"
  modified_base (15)..(15): bicyclic nucleic acid (BNA)
  modified_base (16)..(16): bicyclic nucleic acid (BNA)
acaucaaggaagaugg

SEQ ID NO: 9868 - DNA, 15 bp, Artificial Sequence
  source: /note="Description of Artificial Sequence: Synthetic oligonucleotide"
  source: /note="Description of Combined DNA/RNA Molecule: Synthetic oligonucleotide"
  source: /note="DNA/RNA"
  modified_base (14)..(14): bicyclic nucleic acid (BNA)
  modified_base (15)..(15): bicyclic nucleic acid (BNA)
acaucaaggaagatg

SEQ ID NO: 9869 - DNA, 14 bp, Artificial Sequence
  source: /note="Description of Artificial Sequence: Synthetic oligonucleotide"
  source: /note="Description of Combined DNA/RNA Molecule: Synthetic oligonucleotide"
  source: /note="DNA/RNA"
  modified_base (13)..(13): bicyclic nucleic acid (BNA)
  modified_base (14)..(14): bicyclic nucleic acid (BNA)
acaucaaggaagat

SEQ ID NO: 9870 - RNA, 13 nt, Artificial Sequence
  source: /note="Description of Artificial Sequence: Synthetic oligonucleotide"
  source: /note="RNA"
  modified_base (12)..(12): bicyclic nucleic acid (BNA)
  modified_base (13)..(13): bicyclic nucleic acid (BNA)
acaucaaggaaga

SEQ ID NO: 9871 - RNA, 12 nt, Artificial Sequence
  source: /note="Description of Artificial Sequence: Synthetic oligonucleotide"
  source: /note="RNA"
  modified_base (11)..(11): bicyclic nucleic acid (BNA)
  modified_base (12)..(12): bicyclic nucleic acid (BNA)
acaucaaggaag

SEQ ID NO: 9872 - RNA, 24 nt, Artificial Sequence
  source: /note="Description of Artificial Sequence: Synthetic oligonucleotide"
  source: /note="RNA"
  modified_base (23)..(23): bicyclic nucleic acid (BNA)
  modified_base (24)..(24): bicyclic nucleic acid (BNA)
caucaaggaagauggcauuucuag

SEQ ID NO: 9873 - DNA, 23 bp, Artificial Sequence
  source: /note="Description of Artificial Sequence: Synthetic oligonucleotide"
  source: /note="Description of Combined DNA/RNA Molecule: Synthetic oligonucleotide"
  source: /note="DNA/RNA"
  modified_base (22)..(22): bicyclic nucleic acid (BNA)
  modified_base (23)..(23): bicyclic nucleic acid (BNA)
caucaaggaagauggcauuucta

SEQ ID NO: 9874 - DNA, 22 bp, Artificial Sequence
  source: /note="Description of Artificial Sequence: Synthetic oligonucleotide"
  source: /note="Description of Combined DNA/RNA Molecule: Synthetic oligonucleotide"
  source: /note="DNA/RNA"
  modified_base (21)..(21): bicyclic nucleic acid (BNA)
  modified_base (22)..(22): bicyclic nucleic acid (BNA)
caucaaggaagauggcauuuct

SEQ ID NO: 9875 - DNA, 21 bp, Artificial Sequence
  source: /note="Description of Artificial Sequence: Synthetic oligonucleotide"
  source: /note="Description of Combined DNA/RNA Molecule: Synthetic oligonucleotide"
  source: /note="DNA/RNA"
  modified_base (20)..(20): bicyclic nucleic acid (BNA)
  modified_base (21)..(21): bicyclic nucleic acid (BNA)
caucaaggaagauggcauutc

SEQ ID NO: 9876 - DNA, 20 bp, Artificial Sequence
  source: /note="Description of Artificial Sequence: Synthetic oligonucleotide"
  source: /note="Description of Combined DNA/RNA Molecule: Synthetic oligonucleotide"
  source: /note="DNA/RNA"
  modified_base (19)..(19): bicyclic nucleic acid (BNA)
  modified_base (20)..(20): bicyclic nucleic acid (BNA)
caucaaggaagauggcautt

SEQ ID NO: 9877 - DNA, 19 bp, Artificial Sequence
  source: /note="Description of Artificial Sequence: Synthetic oligonucleotide"
  source: /note="Description of Combined DNA/RNA Molecule: Synthetic oligonucleotide"
  source: /note="DNA/RNA"
  modified_base (18)..(18): bicyclic nucleic acid (BNA)
  modified_base (19)..(19): bicyclic nucleic acid (BNA)
caucaaggaagauggcatt

SEQ ID NO: 9878 - DNA, 18 bp, Artificial Sequence
  source: /note="Description of Artificial Sequence: Synthetic oligonucleotide"
  source: /note="Description of Combined DNA/RNA Molecule: Synthetic oligonucleotide"
  source: /note="DNA/RNA"
  modified_base (17)..(17): bicyclic nucleic acid (BNA)
  modified_base (18)..(18): bicyclic nucleic acid (BNA)
caucaaggaagauggcat

SEQ ID NO: 9879 - RNA, 17 nt, Artificial Sequence
  source: /note="Description of Artificial Sequence: Synthetic oligonucleotide"
  source: /note="RNA"
  modified_base (16)..(16): bicyclic nucleic acid (BNA)
  modified_base (17)..(17): bicyclic nucleic acid (BNA)
caucaaggaagauggca

SEQ ID NO: 9880 - RNA, 16 nt, Artificial Sequence
  source: /note="Description of Artificial Sequence: Synthetic oligonucleotide"
  source: /note="RNA"
  modified_base (15)..(15): bicyclic nucleic acid (BNA)
  modified_base (16)..(16): bicyclic nucleic acid (BNA)
caucaaggaagauggc

SEQ ID NO: 9881 - RNA, 15 nt, Artificial Sequence
  source: /note="Description of Artificial Sequence: Synthetic oligonucleotide"
  source: /note="RNA"
  modified_base (14)..(14): bicyclic nucleic acid (BNA)
  modified_base (15)..(15): bicyclic nucleic acid (BNA)
caucaaggaagaugg

SEQ ID NO: 9882 - DNA, 14 bp, Artificial Sequence
  source: /note="Description of Artificial Sequence: Synthetic oligonucleotide"
  source: /note="Description of Combined DNA/RNA Molecule: Synthetic oligonucleotide"
  source: /note="DNA/RNA"
  modified_base (13)..(13): bicyclic nucleic acid (BNA)
  modified_base (14)..(14): bicyclic nucleic acid (BNA)
caucaaggaagatg

SEQ ID NO: 9883 - DNA, 13 bp, Artificial Sequence
  source: /note="Description of Artificial Sequence: Synthetic oligonucleotide"
  source: /note="Description of Combined DNA/RNA Molecule: Synthetic oligonucleotide"
  source: /note="DNA/RNA"
  modified_base (12)..(12): bicyclic nucleic acid (BNA)
  modified_base (13)..(13): bicyclic nucleic acid (BNA)
caucaaggaagat

SEQ ID NO: 9884 - RNA, 12 nt, Artificial Sequence
  source: /note="Description of Artificial Sequence: Synthetic oligonucleotide"
  source: /note="RNA"
  modified_base (11)..(11): bicyclic nucleic acid (BNA)
  modified_base (12)..(12): bicyclic nucleic acid (BNA)
caucaaggaaga

SEQ ID NO: 9885 - RNA, 11 nt, Artificial Sequence
  source: /note="Description of Artificial Sequence: Synthetic oligonucleotide"
  source: /note="RNA"
  modified_base (10)..(10): bicyclic nucleic acid (BNA)
  modified_base (11)..(11): bicyclic nucleic acid (BNA)
caucaaggaag

SEQ ID NO: 9886 - RNA, 23 nt, Artificial Sequence
  source: /note="Description of Artificial Sequence: Synthetic oligonucleotide"
  source: /note="RNA"
  modified_base (22)..(22): bicyclic nucleic acid (BNA)
  modified_base (23)..(23): bicyclic nucleic acid (BNA)
aucaaggaagauggcauuucuag

SEQ ID NO: 9887 - DNA, 22 bp, Artificial Sequence
  source: /note="Description of Artificial Sequence: Synthetic oligonucleotide"
  source: /note="Description of Combined DNA/RNA Molecule: Synthetic oligonucleotide"
  source: /note="DNA/RNA"
  modified_base (21)..(21): bicyclic nucleic acid (BNA)
  modified_base (22)..(22): bicyclic nucleic acid (BNA)
aucaaggaagauggcauuucta

SEQ ID NO: 9888 - DNA, 21 bp, Artificial Sequence
  source: /note="Description of Artificial Sequence: Synthetic oligonucleotide"
  source: /note="Description of Combined DNA/RNA Molecule: Synthetic oligonucleotide"
  source: /note="DNA/RNA"
  modified_base (20)..(20): bicyclic nucleic acid (BNA)
  modified_base (21)..(21): bicyclic nucleic acid (BNA)
aucaaggaagauggcauuuct

SEQ ID NO: 9889 - DNA, 20 bp, Artificial Sequence
  source: /note="Description of Artificial Sequence: Synthetic oligonucleotide"
  source: /note="Description of Combined DNA/RNA Molecule: Synthetic oligonucleotide"
  source: /note="DNA/RNA"
  modified_base (19)..(19): bicyclic nucleic acid (BNA)
  modified_base (20)..(20): bicyclic nucleic acid (BNA)
aucaaggaagauggcauutc

SEQ ID NO: 9890 - DNA, 19 bp, Artificial Sequence
  source: /note="Description of Artificial Sequence: Synthetic oligonucleotide"
  source: /note="Description of Combined DNA/RNA Molecule: Synthetic oligonucleotide"
  source: /note="DNA/RNA"
  modified_base (18)..(18): bicyclic nucleic acid (BNA)
  modified_base (19)..(19): bicyclic nucleic acid (BNA)
aucaaggaagauggcautt

SEQ ID NO: 9891 - DNA, 18 bp, Artificial Sequence
  source: /note="Description of Artificial Sequence: Synthetic oligonucleotide"
  source: /note="Description of Combined DNA/RNA Molecule: Synthetic oligonucleotide"
  source: /note="DNA/RNA"
  modified_base (17)..(17): bicyclic nucleic acid (BNA)
  modified_base (18)..(18): bicyclic nucleic acid (BNA)
aucaaggaagauggcatt

SEQ ID NO: 9892 - DNA, 17 bp, Artificial Sequence
  source: /note="Description of Artificial Sequence: Synthetic oligonucleotide"
  source: /note="Description of Combined DNA/RNA Molecule: Synthetic oligonucleotide"
  source: /note="DNA/RNA"
  modified_base (16)..(16): bicyclic nucleic acid (BNA)
  modified_base (17)..(17): bicyclic nucleic acid (BNA)
aucaaggaagauggcat

SEQ ID NO: 9893 - RNA, 16 nt, Artificial Sequence
  source: /note="Description of Artificial Sequence: Synthetic oligonucleotide"
  source: /note="RNA"
  modified_base (15)..(15): bicyclic nucleic acid (BNA)
  modified_base (16)..(16): bicyclic nucleic acid (BNA)
aucaaggaagauggca

SEQ ID NO: 9894 - RNA, 15 nt, Artificial Sequence
  source: /note="Description of Artificial Sequence: Synthetic oligonucleotide"
  source: /note="RNA"
  modified_base (14)..(14): bicyclic nucleic acid (BNA)
  modified_base (15)..(15): bicyclic nucleic acid (BNA)
aucaaggaagauggc

SEQ ID NO: 9895 - RNA, 14 nt, Artificial Sequence
  source: /note="Description of Artificial Sequence: Synthetic oligonucleotide"
  source: /note="RNA"
  modified_base (13)..(13): bicyclic nucleic acid (BNA)
  modified_base (14)..(14): bicyclic nucleic acid (BNA)
aucaaggaagaugg

SEQ ID NO: 9896 - DNA, 13 bp, Artificial Sequence
  source: /note="Description of Artificial Sequence: Synthetic oligonucleotide"
  source: /note="Description of Combined DNA/RNA Molecule: Synthetic oligonucleotide"
  source: /note="DNA/RNA"
  modified_base (12)..(12): bicyclic nucleic acid (BNA)
  modified_base (13)..(13): bicyclic nucleic acid (BNA)
aucaaggaagatg

SEQ ID NO: 9897 - DNA, 12 bp, Artificial Sequence
  source: /note="Description of Artificial Sequence: Synthetic oligonucleotide"
  source: /note="Description of Combined DNA/RNA Molecule: Synthetic oligonucleotide"
  source: /note="DNA/RNA"
  modified_base (11)..(11): bicyclic nucleic acid (BNA)
  modified_base (12)..(12): bicyclic nucleic acid (BNA)
aucaaggaagat

SEQ ID NO: 9898 - RNA, 11 nt, Artificial Sequence
  source: /note="Description of Artificial Sequence: Synthetic oligonucleotide"
  source: /note="RNA"
  modified_base (10)..(10): bicyclic nucleic acid (BNA)
  modified_base (11)..(11): bicyclic nucleic acid (BNA)
aucaaggaaga

SEQ ID NO: 9899 - RNA, 10 nt, Artificial Sequence
  source: /note="Description of Artificial Sequence: Synthetic oligonucleotide"
  source: /note="RNA"
  modified_base (9)..(9): bicyclic nucleic acid (BNA)
  modified_base (10)..(10): bicyclic nucleic acid (BNA)
aucaaggaag

SEQ ID NO: 9900 - DNA, 23 bp, Artificial Sequence
  source: /note="Description of Artificial Sequence: Synthetic oligonucleotide"
  source: /note="Description of Combined DNA/RNA Molecule: Synthetic oligonucleotide"
  source: /note="DNA/RNA"
  modified_base (22)..(22): bicyclic nucleic acid (BNA)
  modified_base (23)..(23): bicyclic nucleic acid (BNA)
ccagagcagguaccuccaacatc

SEQ ID NO: 9901 - RNA, 18 nt, Artificial Sequence
  source: /note="Description of Artificial Sequence: Synthetic oligonucleotide"
  source: /note="RNA"
  modified_base (17)..(17): bicyclic nucleic acid (BNA)
  modified_base (18)..(18): bicyclic nucleic acid (BNA)
ccagagcagguaccucca

SEQ ID NO: 9902 - DNA, 23 bp, Artificial Sequence
  source: /note="Description of Artificial Sequence: Synthetic oligonucleotide"
  source: /note="Description of Combined DNA/RNA Molecule: Synthetic oligonucleotide"
  source: /note="DNA/RNA"
  modified_base (22)..(22): bicyclic nucleic acid (BNA)
  modified_base (23)..(23): bicyclic nucleic acid (BNA)
ccucugugauuuuauaacuugat

SEQ ID NO: 9903 - DNA, 17 bp, Artificial Sequence
  source: /note="Description of Artificial Sequence: Synthetic oligonucleotide"
  source: /note="Description of Combined DNA/RNA Molecule: Synthetic oligonucleotide"
  source: /note="DNA/RNA"
  modified_base (16)..(16): bicyclic nucleic acid (BNA)
  modified_base (17)..(17): bicyclic nucleic acid (BNA)
ucacccaccaucaccct

SEQ ID NO: 9904 - RNA, 20 nt, Artificial Sequence
  source: /note="Description of Artificial Sequence: Synthetic oligonucleotide"
  source: /note="RNA"
  modified_base (19)..(19): bicyclic nucleic acid (BNA)
  modified_base (20)..(20): bicyclic nucleic acid (BNA)
ugauauccucaaggucaccc

SEQ ID NO: 9905 - DNA, 22 bp, Artificial Sequence
  source: /note="Description of Artificial Sequence: Synthetic oligonucleotide"
  source: /note="Description of Combined DNA/RNA Molecule: Synthetic oligonucleotide"
  source: /note="DNA/RNA"
  modified_base (21)..(21): bicyclic nucleic acid (BNA)
  modified_base (22)..(22): bicyclic nucleic acid (BNA)
cugcuugaugaucaucucgutg

SEQ ID NO: 9906 - DNA, 18 bp, Artificial Sequence
  source: /note="Description of Artificial Sequence: Synthetic oligonucleotide"
  source: /note="Description of Combined DNA/RNA Molecule: Synthetic oligonucleotide"
  source: /note="DNA/RNA"
  modified_base (17)..(17): bicyclic nucleic acid (BNA)
  modified_base (18)..(18): bicyclic nucleic acid (BNA)
cugcuugaugaucauctc

SEQ ID NO: 9907 - RNA, 19 nt, Artificial Sequence
  source: /note="Description of Artificial Sequence: Synthetic oligonucleotide"
  source: /note="RNA"
  modified_base (18)..(18): bicyclic nucleic acid (BNA)
  modified_base (19)..(19): bicyclic nucleic acid (BNA)
guuuccuuaguaaccacag

SEQ ID NO: 9908 - RNA, 17 nt, Artificial Sequence
  source: /note="Description of Artificial Sequence: Synthetic oligonucleotide"
  source: /note="RNA"
  modified_base (16)..(16): bicyclic nucleic acid (BNA)
  modified_base (17)..(17): bicyclic nucleic acid (BNA)
guuuccuuaguaaccac

SEQ ID NO: 9909 - DNA, 20 bp, Artificial Sequence
  source: /note="Description of Artificial Sequence: Synthetic oligonucleotide"
  source: /note="Description of Combined DNA/RNA Molecule: Synthetic oligonucleotide"
  source: /note="DNA/RNA"
  source: /note="5' tri-ethylene glycol (TEG)"
  modified_base (19)..(19): bicyclic nucleic acid (BNA)
  modified_base (20)..(20): bicyclic nucleic acid (BNA)
ucaaggaagauggcauuuct

SEQ ID NO: 9910 - RNA, 22 nt, Artificial Sequence
  source: /note="Description of Artificial Sequence: Synthetic oligonucleotide"
  source: /note="RNA"
  source: /note="5' tri-ethylene glycol (TEG)"
  modified_base (21)..(21): bicyclic nucleic acid (BNA)
  modified_base (22)..(22): bicyclic nucleic acid (BNA)
ucaaggaagauggcauuucuag

SEQ ID NO: 9911 - RNA, 18 nt, Artificial Sequence
  source: /note="Description of Artificial Sequence: Synthetic oligonucleotide"
  source: /note="RNA"
  source: /note="5' tri-ethylene glycol (TEG)"
  modified_base (17)..(17): bicyclic nucleic acid (BNA)
  modified_base (18)..(18): bicyclic nucleic acid (BNA)
gguaaguucuguccaagc

SEQ ID NO: 9912 - RNA, 18 nt, Artificial Sequence
  source: /note="Description of Artificial Sequence: Synthetic oligonucleotide"
  source: /note="RNA"
  source: /note="5' tri-ethylene glycol (TEG)"
  modified_base (17)..(17): bicyclic nucleic acid (BNA)
  modified_base (18)..(18): bicyclic nucleic acid (BNA)
guaaguucuguccaagcc

SEQ ID NO: 9913 - RNA, 18 nt, Artificial Sequence
  source: /note="Description of Artificial Sequence: Synthetic oligonucleotide"
  source: /note="RNA"
  source: /note="5' tri-ethylene glycol (TEG)"
  modified_base (17)..(17): bicyclic nucleic acid (BNA)
  modified_base (18)..(18): bicyclic nucleic acid (BNA)
agucgguaaguucugucc

SEQ ID NO: 9914 - RNA, 18 nt, Artificial Sequence
  source: /note="Description of Artificial Sequence: Synthetic oligonucleotide"
  source: /note="RNA"
  source: /note="5' tri-ethylene glycol (TEG)"
  modified_base (17)..(17): bicyclic nucleic acid (BNA)
  modified_base (18)..(18): bicyclic nucleic acid (BNA)
cuguccaagcccgguuga

SEQ ID NO: 9915 - RNA, 15 nt, Artificial Sequence
  source: /note="Description of Artificial Sequence: Synthetic oligonucleotide"
  source: /note="RNA"
  source: /note="5' tri-ethylene glycol (TEG)"
  modified_base (14)..(14): bicyclic nucleic acid (BNA)
  modified_base (15)..(15): bicyclic nucleic acid (BNA)
uaaguucuguccaag

SEQ ID NO: 9916 - RNA, 20 nt, Artificial Sequence
  source: /note="Description of Artificial Sequence: Synthetic oligonucleotide"
  source: /note="RNA"
  source: /note="5' tri-ethylene glycol (TEG)"
  modified_base (19)..(19): bicyclic nucleic acid (BNA)
  modified_base (20)..(20): bicyclic nucleic acid (BNA)
uucuguccaagcccgguuga

SEQ ID NO: 9917 - DNA, 19 bp, Artificial Sequence
  source: /note="Description of Artificial Sequence: Synthetic oligonucleotide"
  source: /note="Description of Combined DNA/RNA Molecule: Synthetic oligonucleotide"
  source: /note="DNA/RNA"
  source: /note="5' tri-ethylene glycol (TEG)"
  modified_base (18)..(18): bicyclic nucleic acid (BNA)
  modified_base (19)..(19): bicyclic nucleic acid (BNA)
uucuguccaagcccggutg

SEQ ID NO: 9918 - DNA, 18 bp, Artificial Sequence
  source: /note="Description of Artificial Sequence: Synthetic oligonucleotide"
  source: /note="Description of Combined DNA/RNA Molecule: Synthetic oligonucleotide"
  source: /note="DNA/RNA"
  source: /note="5' tri-ethylene glycol (TEG)"
  modified_base (17)..(17): bicyclic nucleic acid (BNA)
  modified_base (18)..(18): bicyclic nucleic acid (BNA)
uucuguccaagcccggtt

SEQ ID NO: 9919 - DNA, 17 bp, Artificial Sequence
  source: /note="Description of Artificial Sequence: Synthetic oligonucleotide"
  source: /note="Description of Combined DNA/RNA Molecule: Synthetic oligonucleotide"
  source: /note="DNA/RNA"
  source: /note="5' tri-ethylene glycol (TEG)"
  modified_base (16)..(16): bicyclic nucleic acid (BNA)
  modified_base (17)..(17): bicyclic nucleic acid (BNA)
uucuguccaagcccggt

SEQ ID NO: 9920 - RNA, 16 nt, Artificial Sequence
  source: /note="Description of Artificial Sequence: Synthetic oligonucleotide"
  source: /note="RNA"
  source: /note="5' tri-ethylene glycol (TEG)"
  modified_base (15)..(15): bicyclic nucleic acid (BNA)
  modified_base (16)..(16): bicyclic nucleic acid (BNA)
uucuguccaagcccgg

SEQ ID NO: 9921 - RNA, 15 nt, Artificial Sequence
  source: /note="Description of Artificial Sequence: Synthetic oligonucleotide"
  source: /note="RNA"
  source: /note="5' tri-ethylene glycol (TEG)"
  modified_base (14)..(14): bicyclic nucleic acid (BNA)
  modified_base (15)..(15): bicyclic nucleic acid (BNA)
uucuguccaagcccg

SEQ ID NO: 9922 - RNA, 14 nt, Artificial Sequence
  source: /note="Description of Artificial Sequence: Synthetic oligonucleotide"
  source: /note="RNA"
  source: /note="5' tri-ethylene glycol (TEG)"
  modified_base (13)..(13): bicyclic nucleic acid (BNA)
  modified_base (14)..(14): bicyclic nucleic acid (BNA)
uucuguccaagccc

SEQ ID NO: 9923 - RNA, 13 nt, Artificial Sequence
  source: /note="Description of Artificial Sequence: Synthetic oligonucleotide"
  source: /note="RNA"
  source: /note="5' tri-ethylene glycol (TEG)"
  modified_base (12)..(12): bicyclic nucleic acid (BNA)
  modified_base (13)..(13): bicyclic nucleic acid (BNA)
uucuguccaagcc

SEQ ID NO: 9924 - RNA, 12 nt, Artificial Sequence
  source: /note="Description of Artificial Sequence: Synthetic oligonucleotide"
  source: /note="RNA"
  source: /note="5' tri-ethylene glycol (TEG)"
  modified_base (11)..(11): bicyclic nucleic acid (BNA)
  modified_base (12)..(12): bicyclic nucleic acid (BNA)
uucuguccaagc

SEQ ID NO: 9925 - RNA, 11 nt, Artificial Sequence
  source: /note="Description of Artificial Sequence: Synthetic oligonucleotide"
  source: /note="RNA"
  source: /note="5' tri-ethylene glycol (TEG)"
  modified_base (10)..(10): bicyclic nucleic acid (BNA)
  modified_base (11)..(11): bicyclic nucleic acid (BNA)
uucuguccaag

SEQ ID NO: 9926 - RNA, 10 nt, Artificial Sequence
  source: /note="Description of Artificial Sequence: Synthetic oligonucleotide"
  source: /note="RNA"
  source: /note="5' tri-ethylene glycol (TEG)"
  modified_base (9)..(9): bicyclic nucleic acid (BNA)
  modified_base (10)..(10): bicyclic nucleic acid (BNA)
uucuguccaa

SEQ ID NO: 9927 - RNA, 9 nt, Artificial Sequence
  source: /note="Description of Artificial Sequence: Synthetic oligonucleotide"
  source: /note="RNA"
  source: /note="5' tri-ethylene glycol (TEG)"
  modified_base (8)..(8): bicyclic nucleic acid (BNA)
  modified_base (9)..(9): bicyclic nucleic acid (BNA)
uucugucca

SEQ ID NO: 9928 - RNA, 8 nt, Artificial Sequence
  source: /note="Description of Artificial Sequence: Synthetic oligonucleotide"
  source: /note="RNA"
  source: /note="5' tri-ethylene glycol (TEG)"
  modified_base (7)..(7): bicyclic nucleic acid (BNA)
  modified_base (8)..(8): bicyclic nucleic acid (BNA)
uucugucc

SEQ ID NO: 9929 - RNA, 19 nt, Artificial Sequence
  source: /note="Description of Artificial Sequence: Synthetic oligonucleotide"
  source: /note="RNA"
  source: /note="5' tri-ethylene glycol (TEG)"
  modified_base (18)..(18): bicyclic nucleic acid (BNA)
  modified_base (19)..(19): bicyclic nucleic acid (BNA)
ucuguccaagcccgguuga

SEQ ID NO: 9930 - DNA, 18 bp, Artificial Sequence
  source: /note="Description of Artificial Sequence: Synthetic oligonucleotide"
  source: /note="Description of Combined DNA/RNA Molecule: Synthetic oligonucleotide"
  source: /note="DNA/RNA"
  source: /note="5' tri-ethylene glycol (TEG)"
  modified_base (17)..(17): bicyclic nucleic acid (BNA)
  modified_base (18)..(18): bicyclic nucleic acid (BNA)
ucuguccaagcccggutg

SEQ ID NO: 9931 - DNA, 17 bp, Artificial Sequence
  source: /note="Description of Artificial Sequence: Synthetic oligonucleotide"
  source: /note="Description of Combined DNA/RNA Molecule: Synthetic oligonucleotide"
  source: /note="DNA/RNA"
  source: /note="5' tri-ethylene glycol (TEG)"
  modified_base (16)..(16): bicyclic nucleic acid (BNA)
  modified_base (17)..(17): bicyclic nucleic acid (BNA)
ucuguccaagcccggtt

SEQ ID NO: 9932 - DNA, 16 bp, Artificial Sequence
  source: /note="Description of Artificial Sequence: Synthetic oligonucleotide"
  source: /note="Description of Combined DNA/RNA Molecule: Synthetic oligonucleotide"
  source: /note="DNA/RNA"
  source: /note="5' tri-ethylene glycol (TEG)"
  modified_base (15)..(15): bicyclic nucleic acid (BNA)
  modified_base (16)..(16): bicyclic nucleic acid (BNA)
ucuguccaagcccggt

SEQ ID NO: 9933 - RNA, 15 nt, Artificial Sequence
  source: /note="Description of Artificial Sequence: Synthetic oligonucleotide"
  source: /note="RNA"
  source: /note="5' tri-ethylene glycol (TEG)"
  modified_base (14)..(14): bicyclic nucleic acid (BNA)
  modified_base (15)..(15): bicyclic nucleic acid (BNA)
ucuguccaagcccgg

SEQ ID NO: 9934 - RNA, 14 nt, Artificial Sequence
  source: /note="Description of Artificial Sequence: Synthetic oligonucleotide"
  source: /note="RNA"
  source: /note="5' tri-ethylene glycol (TEG)"
  modified_base (13)..(13): bicyclic nucleic acid (BNA)
  modified_base (14)..(14): bicyclic nucleic acid (BNA)
ucuguccaagcccg

SEQ ID NO: 9935 - RNA, 13 nt, Artificial Sequence
  source: /note="Description of Artificial Sequence: Synthetic oligonucleotide"
  source: /note="RNA"
  source: /note="5' tri-ethylene glycol (TEG)"
  modified_base (12)..(12): bicyclic nucleic acid (BNA)
  modified_base (13)..(13): bicyclic nucleic acid (BNA)
ucuguccaagccc

SEQ ID NO: 9936 - RNA, 12 nt, Artificial Sequence
  source: /note="Description of Artificial Sequence: Synthetic oligonucleotide"
  source: /note="RNA"
  source: /note="5' tri-ethylene glycol (TEG)"
  modified_base (11)..(11): bicyclic nucleic acid (BNA)
  modified_base (12)..(12): bicyclic nucleic acid (BNA)
ucuguccaagcc

SEQ ID NO: 9937 - RNA, 11 nt, Artificial Sequence
  source: /note="Description of Artificial Sequence: Synthetic oligonucleotide"
  source: /note="RNA"
  source: /note="5' tri-ethylene glycol (TEG)"
  modified_base (10)..(10): bicyclic nucleic acid (BNA)
  modified_base (11)..(11): bicyclic nucleic acid (BNA)
ucuguccaagc

SEQ ID NO: 9938 - RNA, 10 nt, Artificial Sequence
  source: /note="Description of Artificial Sequence: Synthetic oligonucleotide"
  source: /note="RNA"
  source: /note="5' tri-ethylene glycol (TEG)"
  modified_base (9)..(9): bicyclic nucleic acid (BNA)
  modified_base (10)..(10): bicyclic nucleic acid (BNA)
ucuguccaag

SEQ ID NO: 9939 - RNA, 9 nt, Artificial Sequence
  source: /note="Description of Artificial Sequence: Synthetic oligonucleotide"
  source: /note="RNA"
  source: /note="5' tri-ethylene glycol (TEG)"
  modified_base (8)..(8): bicyclic nucleic acid (BNA)
  modified_base (9)..(9): bicyclic nucleic acid (BNA)
ucuguccaa

SEQ ID NO: 9940 - RNA, 8 nt, Artificial Sequence
  source: /note="Description of Artificial Sequence: Synthetic oligonucleotide"
  source: /note="RNA"
  source: /note="5' tri-ethylene glycol (TEG)"
  modified_base (7)..(7): bicyclic nucleic acid (BNA)
  modified_base (8)..(8): bicyclic nucleic acid (BNA)
ucugucca

SEQ ID NO: 9941 - DNA, 17 bp, Artificial Sequence
  source: /note="Description of Artificial Sequence: Synthetic oligonucleotide"
  source: /note="Description of Combined DNA/RNA Molecule: Synthetic oligonucleotide"
  source: /note="DNA/RNA"
  source: /note="5' tri-ethylene glycol (TEG)"
  modified_base (16)..(16): bicyclic nucleic acid (BNA)
  modified_base (17)..(17): bicyclic nucleic acid (BNA)
cuguccaagcccggutg

SEQ ID NO: 9942 - DNA, 16 bp, Artificial Sequence
  source: /note="Description of Artificial Sequence: Synthetic oligonucleotide"
  source: /note="Description of Combined DNA/RNA Molecule: Synthetic oligonucleotide"
  source: /note="DNA/RNA"
  source: /note="5' tri-ethylene glycol (TEG)"
  modified_base (15)..(15): bicyclic nucleic acid (BNA)
  modified_base (16)..(16): bicyclic nucleic acid (BNA)
cuguccaagcccggtt

SEQ ID NO: 9943 - DNA, 15 bp, Artificial Sequence
  source: /note="Description of Artificial Sequence: Synthetic oligonucleotide"
  source: /note="Description of Combined DNA/RNA Molecule: Synthetic oligonucleotide"
  source: /note="DNA/RNA"
  source: /note="5' tri-ethylene glycol (TEG)"
  modified_base (14)..(14): bicyclic nucleic acid (BNA)
  modified_base (15)..(15): bicyclic nucleic acid (BNA)
cuguccaagcccggt

SEQ ID NO: 9944 - RNA, 14 nt, Artificial Sequence
  source: /note="Description of Artificial Sequence: Synthetic oligonucleotide"
  source: /note="RNA"
  source: /note="5' tri-ethylene glycol (TEG)"
  modified_base (13)..(13): bicyclic nucleic acid (BNA)
  modified_base (14)..(14): bicyclic nucleic acid (BNA)
cuguccaagcccgg

SEQ ID NO: 9945 - RNA, 13 nt, Artificial Sequence
  source: /note="Description of Artificial Sequence: Synthetic oligonucleotide"
  source: /note="RNA"
  source: /note="5' tri-ethylene glycol (TEG)"
  modified_base (12)..(12): bicyclic nucleic acid (BNA)
  modified_base (13)..(13): bicyclic nucleic acid (BNA)
cuguccaagcccg

SEQ ID NO: 9946 - RNA, 12 nt, Artificial Sequence
  source: /note="Description of Artificial Sequence: Synthetic oligonucleotide"
  source: /note="RNA"
  source: /note="5' tri-ethylene glycol (TEG)"
  modified_base (11)..(11): bicyclic nucleic acid (BNA)
  modified_base (12)..(12): bicyclic nucleic acid (BNA)
cuguccaagccc

SEQ ID NO: 9947 - RNA, 11 nt, Artificial Sequence
  source: /note="Description of Artificial Sequence: Synthetic oligonucleotide"
  source: /note="RNA"
  source: /note="5' tri-ethylene glycol (TEG)"
  modified_base (10)..(10): bicyclic nucleic acid (BNA)
  modified_base (11)..(11): bicyclic nucleic acid (BNA)
cuguccaagcc

SEQ ID NO: 9948 - RNA, 10 nt, Artificial Sequence
  source: /note="Description of Artificial Sequence: Synthetic oligonucleotide"
  source: /note="RNA"
  source: /note="5' tri-ethylene glycol (TEG)"
  modified_base (9)..(9): bicyclic nucleic acid (BNA)
  modified_base (10)..(10): bicyclic nucleic acid (BNA)
cuguccaagc

SEQ ID NO: 9949 - RNA, 9 nt, Artificial Sequence
  source: /note="Description of Artificial Sequence: Synthetic oligonucleotide"
  source: /note="RNA"
  source: /note="5' tri-ethylene glycol (TEG)"
  modified_base (8)..(8): bicyclic nucleic acid (BNA)
  modified_base (9)..(9): bicyclic nucleic acid (BNA)
cuguccaag

SEQ ID NO: 9950 - RNA, 8 nt, Artificial Sequence
  source: /note="Description of Artificial Sequence: Synthetic oligonucleotide"
  source: /note="RNA"
  source: /note="5' tri-ethylene glycol (TEG)"
  modified_base (7)..(7): bicyclic nucleic acid (BNA)
  modified_base (8)..(8): bicyclic nucleic acid (BNA)
cuguccaa

SEQ ID NO: 9951 - DNA, 20 bp, Artificial Sequence
  source: /note="Description of Artificial Sequence: Synthetic oligonucleotide"
  source: /note="Description of Combined DNA/RNA Molecule: Synthetic oligonucleotide"
  source: /note="DNA/RNA"
  source: /note="5' tri-ethylene glycol (TEG)"
  modified_base (19)..(19): bicyclic nucleic acid (BNA)
  modified_base (20)..(20): bicyclic nucleic acid (BNA)
guucuguccaagcccggutg

SEQ ID NO: 9952 - DNA, 19 bp, Artificial Sequence
  source: /note="Description of Artificial Sequence: Synthetic oligonucleotide"
  source: /note="Description of Combined DNA/RNA Molecule: Synthetic oligonucleotide"
  source: /note="DNA/RNA"
  source: /note="5' tri-ethylene glycol (TEG)"
  modified_base (18)..(18): bicyclic nucleic acid (BNA)
  modified_base (19)..(19): bicyclic nucleic acid (BNA)
guucuguccaagcccggtt

SEQ ID NO: 9953 - DNA, 18 bp, Artificial Sequence
  source: /note="Description of Artificial Sequence: Synthetic oligonucleotide"
  source: /note="Description of Combined DNA/RNA Molecule: Synthetic oligonucleotide"
  source: /note="DNA/RNA"
  source: /note="5' tri-ethylene glycol (TEG)"
  modified_base (17)..(17): bicyclic nucleic acid (BNA)
  modified_base (18)..(18): bicyclic nucleic acid (BNA)
guucuguccaagcccggt

SEQ ID NO: 9954 - RNA, 17 nt, Artificial Sequence
  source: /note="Description of Artificial Sequence: Synthetic oligonucleotide"
  source: /note="RNA"
  source: /note="5' tri-ethylene glycol (TEG)"
  modified_base (16)..(16): bicyclic nucleic acid (BNA)
  modified_base (17)..(17): bicyclic nucleic acid (BNA)
guucuguccaagcccgg

SEQ ID NO: 9955 - RNA, 16 nt, Artificial Sequence
  source: /note="Description of Artificial Sequence: Synthetic oligonucleotide"
  source: /note="RNA"
  source: /note="5' tri-ethylene glycol (TEG)"
  modified_base (15)..(15): bicyclic nucleic acid (BNA)
  modified_base (16)..(16): bicyclic nucleic acid (BNA)
guucuguccaagcccg

SEQ ID NO: 9956 - RNA, 15 nt, Artificial Sequence
  source: /note="Description of Artificial Sequence: Synthetic oligonucleotide"
  source: /note="RNA"
  source: /note="5' tri-ethylene glycol (TEG)"
  modified_base (14)..(14): bicyclic nucleic acid (BNA)
  modified_base (15)..(15): bicyclic nucleic acid (BNA)
guucuguccaagccc

SEQ ID NO: 9957 - RNA, 14 nt, Artificial Sequence
  source: /note="Description of Artificial Sequence: Synthetic oligonucleotide"
  source: /note="RNA"
  source: /note="5' tri-ethylene glycol (TEG)"
  modified_base (13)..(13): bicyclic nucleic acid (BNA)
  modified_base (14)..(14): bicyclic nucleic acid (BNA)
guucuguccaagcc

SEQ ID NO: 9958 - RNA, 13 nt, Artificial Sequence
  source: /note="Description of Artificial Sequence: Synthetic oligonucleotide"
  source: /note="RNA"
  source: /note="5' tri-ethylene glycol (TEG)"
  modified_base (12)..(12): bicyclic nucleic acid (BNA)
  modified_base (13)..(13): bicyclic nucleic acid (BNA)
guucuguccaagc

SEQ ID NO: 9959 - RNA, 12 nt, Artificial Sequence
  source: /note="Description of Artificial Sequence: Synthetic oligonucleotide"
  source: /note="RNA"
  source: /note="5' tri-ethylene glycol (TEG)"
  modified_base (11)..(11): bicyclic nucleic acid (BNA)
  modified_base (12)..(12): bicyclic nucleic acid (BNA)
guucuguccaag

SEQ ID NO: 9960 - RNA, 11 nt, Artificial Sequence
  source: /note="Description of Artificial Sequence: Synthetic oligonucleotide"
  source: /note="RNA"
  source: /note="5' tri-ethylene glycol (TEG)"
  modified_base (10)..(10): bicyclic nucleic acid (BNA)
  modified_base (11)..(11): bicyclic nucleic acid (BNA)
guucuguccaa

SEQ ID NO: 9961 - RNA, 10 nt, Artificial Sequence
  source: /note="Description of Artificial Sequence: Synthetic oligonucleotide"
  source: /note="RNA"
  source: /note="5' tri-ethylene glycol (TEG)"
  modified_base (9)..(9): bicyclic nucleic acid (BNA)
  modified_base (10)..(10): bicyclic nucleic acid (BNA)
guucugucca

SEQ ID NO: 9962 - RNA, 9 nt, Artificial Sequence
  source: /note="Description of Artificial Sequence: Synthetic oligonucleotide"
  source: /note="RNA"
  source: /note="5' tri-ethylene glycol (TEG)"
  modified_base (8)..(8): bicyclic nucleic acid (BNA)
  modified_base (9)..(9): bicyclic nucleic acid (BNA)
guucugucc

SEQ ID NO: 9963 - DNA, 8 bp, Artificial Sequence
  source: /note="Description of Artificial Sequence: Synthetic oligonucleotide"
  source: /note="Description of Combined DNA/RNA Molecule: Synthetic oligonucleotide"
  source: /note="DNA/RNA"
  source: /note="5' tri-ethylene glycol (TEG)"
  modified_base (7)..(7): bicyclic nucleic acid (BNA)
  modified_base (8)..(8): bicyclic nucleic acid (BNA)
guucugtc

SEQ ID NO: 9964 - DNA, 20 bp, Artificial Sequence
  source: /note="Description of Artificial Sequence: Synthetic oligonucleotide"
  source: /note="Description of Combined DNA/RNA Molecule: Synthetic oligonucleotide"
  source: /note="DNA/RNA"
  source: /note="5' tri-ethylene glycol (TEG)"
  modified_base (19)..(19): bicyclic nucleic acid (BNA)
  modified_base (20)..(20): bicyclic nucleic acid (BNA)
aguucuguccaagcccggtt

SEQ ID NO: 9965 - DNA, 19 bp, Artificial Sequence
  source: /note="Description of Artificial Sequence: Synthetic oligonucleotide"
  source: /note="Description of Combined DNA/RNA Molecule: Synthetic oligonucleotide"
  source: /note="DNA/RNA"
  source: /note="5' tri-ethylene glycol (TEG)"
  modified_base (18)..(18): bicyclic nucleic acid (BNA)
  modified_base (19)..(19): bicyclic nucleic acid (BNA)
aguucuguccaagcccggt

SEQ ID NO: 9966 - RNA, 18 nt, Artificial Sequence
  source: /note="Description of Artificial Sequence: Synthetic oligonucleotide"
  source: /note="RNA"
  source: /note="5' tri-ethylene glycol (TEG)"
  modified_base (17)..(17): bicyclic nucleic acid (BNA)
  modified_base (18)..(18): bicyclic nucleic acid (BNA)
aguucuguccaagcccgg

SEQ ID NO: 9967 - RNA, 17 nt, Artificial Sequence
  source: /note="Description of Artificial Sequence: Synthetic oligonucleotide"
  source: /note="RNA"
  source: /note="5' tri-ethylene glycol (TEG)"
  modified_base (16)..(16): bicyclic nucleic acid (BNA)
  modified_base (17)..(17): bicyclic nucleic acid (BNA)
aguucuguccaagcccg

SEQ ID NO: 9968 - RNA, 16 nt, Artificial Sequence
  source: /note="Description of Artificial Sequence: Synthetic oligonucleotide"
  source: /note="RNA"
  source: /note="5' tri-ethylene glycol (TEG)"
  modified_base (15)..(15): bicyclic nucleic acid (BNA)
  modified_base (16)..(16): bicyclic nucleic acid (BNA)
aguucuguccaagccc

SEQ ID NO: 9969 - RNA, 15 nt, Artificial Sequence
  source: /note="Description of Artificial Sequence: Synthetic oligonucleotide"
  source: /note="RNA"
  source: /note="5' tri-ethylene glycol (TEG)"
  modified_base (14)..(14): bicyclic nucleic acid (BNA)
  modified_base (15)..(15): bicyclic nucleic acid (BNA)
aguucuguccaagcc

SEQ ID NO: 9970 - RNA, 14 nt, Artificial Sequence
  source: /note="Description of Artificial Sequence: Synthetic oligonucleotide"
  source: /note="RNA"
  source: /note="5' tri-ethylene glycol (TEG)"
  modified_base (13)..(13): bicyclic nucleic acid (BNA)
  modified_base (14)..(14): bicyclic nucleic acid (BNA)
aguucuguccaagc

SEQ ID NO: 9971 - RNA, 13 nt, Artificial Sequence
  source: /note="Description of Artificial Sequence: Synthetic oligonucleotide"
  source: /note="RNA"
  source: /note="5' tri-ethylene glycol (TEG)"
  modified_base (12)..(12): bicyclic nucleic acid (BNA)
  modified_base (13)..(13): bicyclic nucleic acid (BNA)
aguucuguccaag

SEQ ID NO: 9972 - RNA, 12 nt, Artificial Sequence
  source: /note="Description of Artificial Sequence: Synthetic oligonucleotide"
  source: /note="RNA"
  source: /note="5' tri-ethylene glycol (TEG)"
  modified_base (11)..(11): bicyclic nucleic acid (BNA)
  modified_base (12)..(12): bicyclic nucleic acid (BNA)
aguucuguccaa

SEQ ID NO: 9973 - RNA, 11 nt, Artificial Sequence
  source: /note="Description of Artificial Sequence: Synthetic oligonucleotide"
  source: /note="RNA"
  source: /note="5' tri-ethylene glycol (TEG)"
  modified_base (10)..(10): bicyclic nucleic acid (BNA)
  modified_base (11)..(11): bicyclic nucleic acid (BNA)
aguucugucca

SEQ ID NO: 9974 - RNA, 10 nt, Artificial Sequence
  source: /note="Description of Artificial Sequence: Synthetic oligonucleotide"
  source: /note="RNA"
  source: /note="5' tri-ethylene glycol (TEG)"
  modified_base (9)..(9): bicyclic nucleic acid (BNA)
  modified_base (10)..(10): bicyclic nucleic acid (BNA)
aguucugucc

SEQ ID NO: 9975 - DNA, 9 bp, Artificial Sequence
  source: /note="Description of Artificial Sequence: Synthetic oligonucleotide"
  source: /note="Description of Combined DNA/RNA Molecule: Synthetic oligonucleotide"
  source: /note="DNA/RNA"
  source: /note="5' tri-ethylene glycol (TEG)"
  modified_base (8)..(8): bicyclic nucleic acid (BNA)
  modified_base (9)..(9): bicyclic nucleic acid (BNA)
aguucugtc

SEQ ID NO: 9976 - DNA, 8 bp, Artificial Sequence
  source: /note="Description of Artificial Sequence: Synthetic oligonucleotide"
  source: /note="Description of Combined DNA/RNA Molecule: Synthetic oligonucleotide"
  source: /note="DNA/RNA"
  source: /note="5' tri-ethylene glycol (TEG)"
  modified_base (7)..(7): bicyclic nucleic acid (BNA)
  modified_base (8)..(8): bicyclic nucleic acid (BNA)
aguucugt

SEQ ID NO: 9977 - DNA, 20 bp, Artificial Sequence
  source: /note="Description of Artificial Sequence: Synthetic oligonucleotide"
  source: /note="Description of Combined DNA/RNA Molecule: Synthetic oligonucleotide"
  source: /note="DNA/RNA"
  source: /note="5' tri-ethylene glycol (TEG)"
  modified_base (19)..(19): bicyclic nucleic acid (BNA)
  modified_base (20)..(20): bicyclic nucleic acid (BNA)
aaguucuguccaagcccggt

SEQ ID NO: 9978 - RNA, 19 nt, Artificial Sequence
  source: /note="Description of Artificial Sequence: Synthetic oligonucleotide"
  source: /note="RNA"
  source: /note="5' tri-ethylene glycol (TEG)"
  modified_base (18)..(18): bicyclic nucleic acid (BNA)
  modified_base (19)..(19): bicyclic nucleic acid (BNA)
aaguucuguccaagcccgg

SEQ ID NO: 9979 - RNA, 18 nt, Artificial Sequence
  source: /note="Description of Artificial Sequence: Synthetic oligonucleotide"
  source: /note="RNA"
  source: /note="5' tri-ethylene glycol (TEG)"
  modified_base (17)..(17): bicyclic nucleic acid (BNA)
  modified_base (18)..(18): bicyclic nucleic acid (BNA)
aaguucuguccaagcccg

SEQ ID NO: 9980 - RNA, 17 nt, Artificial Sequence
  source: /note="Description of Artificial Sequence: Synthetic oligonucleotide"
  source: /note="RNA"
  source: /note="5' tri-ethylene glycol (TEG)"
  modified_base (16)..(16): bicyclic nucleic acid (BNA)
  modified_base (17)..(17): bicyclic nucleic acid (BNA)
aaguucuguccaagccc

SEQ ID NO: 9981 - RNA, 16 nt, Artificial Sequence
  source: /note="Description of Artificial Sequence: Synthetic oligonucleotide"
  source: /note="RNA"
  source: /note="5' tri-ethylene glycol (TEG)"
  modified_base (15)..(15): bicyclic nucleic acid (BNA)
  modified_base (16)..(16): bicyclic nucleic acid (BNA)
aaguucuguccaagcc

SEQ ID NO: 9982 - RNA, 15 nt, Artificial Sequence
  source: /note="Description of Artificial Sequence: Synthetic oligonucleotide"
  source: /note="RNA"
  source: /note="5' tri-ethylene glycol (TEG)"
  modified_base (14)..(14): bicyclic nucleic acid (BNA)
  modified_base (15)..(15): bicyclic nucleic acid (BNA)
aaguucuguccaagc

SEQ ID NO: 9983 - RNA, 14 nt, Artificial Sequence
  source: /note="Description of Artificial Sequence: Synthetic oligonucleotide"
  source: /note="RNA"
  source: /note="5' tri-ethylene glycol (TEG)"
  modified_base (13)..(13): bicyclic nucleic acid (BNA)
  modified_base (14)..(14): bicyclic nucleic acid (BNA)
aaguucuguccaag

SEQ ID NO: 9984 - RNA, 13 nt, Artificial Sequence
  source: /note="Description of Artificial Sequence: Synthetic oligonucleotide"
  source: /note="RNA"
  source: /note="5' tri-ethylene glycol (TEG)"
  modified_base (12)..(12): bicyclic nucleic acid (BNA)
  modified_base (13)..(13): bicyclic nucleic acid (BNA)
aaguucuguccaa

SEQ ID NO: 9985 - RNA, 12 nt, Artificial Sequence
  source: /note="Description of Artificial Sequence: Synthetic oligonucleotide"
  source: /note="RNA"
  source: /note="5' tri-ethylene glycol (TEG)"
  modified_base (11)..(11): bicyclic nucleic acid (BNA)
  modified_base (12)..(12): bicyclic nucleic acid (BNA)
aaguucugucca

SEQ ID NO: 9986 - RNA, 11 nt, Artificial Sequence
  source: /note="Description of Artificial Sequence: Synthetic oligonucleotide"
  source: /note="RNA"
  source: /note="5' tri-ethylene glycol (TEG)"
  modified_base (10)..(10): bicyclic nucleic acid (BNA)
  modified_base (11)..(11): bicyclic nucleic acid (BNA)
aaguucugucc

SEQ ID NO: 9987 - DNA, 10 bp, Artificial Sequence
  source: /note="Description of Artificial Sequence: Synthetic oligonucleotide"
  source: /note="Description of Combined DNA/RNA Molecule: Synthetic oligonucleotide"
  source: /note="DNA/RNA"
  source: /note="5' tri-ethylene glycol (TEG)"
  modified_base (9)..(9): bicyclic nucleic acid (BNA)
  modified_base (10)..(10): bicyclic nucleic acid (BNA)
aaguucugtc

SEQ ID NO: 9988 - DNA, 9 bp, Artificial Sequence
  source: /note="Description of Artificial Sequence: Synthetic oligonucleotide"
  source: /note="Description of Combined DNA/RNA Molecule: Synthetic oligonucleotide"
  source: /note="DNA/RNA"
  source: /note="5' tri-ethylene glycol (TEG)"
  modified_base (8)..(8): bicyclic nucleic acid (BNA)
  modified_base (9)..(9): bicyclic nucleic acid (BNA)
aaguucugt

SEQ ID NO: 9989 - DNA, 8 bp, Artificial Sequence
  source: /note="Description of Artificial Sequence: Synthetic oligonucleotide"
  source: /note="Description of Combined DNA/RNA Molecule: Synthetic oligonucleotide"
  source: /note="DNA/RNA"
  source: /note="5' tri-ethylene glycol (TEG)"
  modified_base (7)..(7): bicyclic nucleic acid (BNA)
  modified_base (8)..(8): bicyclic nucleic acid (BNA)
aaguuctg

SEQ ID NO: 9990 - RNA, 20 nt, Artificial Sequence
  source: /note="Description of Artificial Sequence: Synthetic oligonucleotide"
  source: /note="RNA"
  source: /note="5' tri-ethylene glycol (TEG)"
  modified_base (19)..(19): bicyclic nucleic acid (BNA)
  modified_base (20)..(20): bicyclic nucleic acid (BNA)
uaaguucuguccaagcccgg

SEQ ID NO: 9991 - RNA, 19 nt, Artificial Sequence
  source: /note="Description of Artificial Sequence: Synthetic oligonucleotide"
  source: /note="RNA"
  source: /note="5' tri-ethylene glycol (TEG)"
  modified_base (18)..(18): bicyclic nucleic acid (BNA)
  modified_base (19)..(19): bicyclic nucleic acid (BNA)
uaaguucuguccaagcccg

SEQ ID NO: 9992 - RNA, 18 nt, Artificial Sequence
  source: /note="Description of Artificial Sequence: Synthetic oligonucleotide"
  source: /note="RNA"
  source: /note="5' tri-ethylene glycol (TEG)"
  modified_base (17)..(17): bicyclic nucleic acid (BNA)
  modified_base (18)..(18): bicyclic nucleic acid (BNA)
uaaguucuguccaagccc

SEQ ID NO: 9993 - RNA, 17 nt, Artificial Sequence
  source: /note="Description of Artificial Sequence: Synthetic oligonucleotide"
  source: /note="RNA"
  source: /note="5' tri-ethylene glycol (TEG)"
  modified_base (16)..(16): bicyclic nucleic acid (BNA)
  modified_base (17)..(17): bicyclic nucleic acid (BNA)
uaaguucuguccaagcc

SEQ ID NO: 9994 - RNA, 16 nt, Artificial Sequence
  source: /note="Description of Artificial Sequence: Synthetic oligonucleotide"
  source: /note="RNA"
  source: /note="5' tri-ethylene glycol (TEG)"
  modified_base (15)..(15): bicyclic nucleic acid (BNA)
  modified_base (16)..(16): bicyclic nucleic acid (BNA)
uaaguucuguccaagc

SEQ ID NO: 9995 - RNA, 14 nt, Artificial Sequence
  source: /note="Description of Artificial Sequence: Synthetic oligonucleotide"
  source: /note="RNA"
  source: /note="5' tri-ethylene glycol (TEG)"
  modified_base (13)..(13): bicyclic nucleic acid (BNA)
  modified_base (14)..(14): bicyclic nucleic acid (BNA)
uaaguucuguccaa

SEQ ID NO: 9996 - RNA, 13 nt, Artificial Sequence
  source: /note="Description of Artificial Sequence: Synthetic oligonucleotide"
  source: /note="RNA"
  source: /note="5' tri-ethylene glycol (TEG)"
  modified_base (12)..(12): bicyclic nucleic acid (BNA)
  modified_base (13)..(13): bicyclic nucleic acid (BNA)
uaaguucugucca

SEQ ID NO: 9997 - RNA, 12 nt, Artificial Sequence
  source: /note="Description of Artificial Sequence: Synthetic oligonucleotide"
  source: /note="RNA"
  source: /note="5' tri-ethylene glycol (TEG)"
  modified_base (11)..(11): bicyclic nucleic acid (BNA)
  modified_base (12)..(12): bicyclic nucleic acid (BNA)
uaaguucugucc

SEQ ID NO: 9998 - DNA, 11 bp, Artificial Sequence
  source: /note="Description of Artificial Sequence: Synthetic oligonucleotide"
  source: /note="Description of Combined DNA/RNA Molecule: Synthetic oligonucleotide"
  source: /note="DNA/RNA"
  source: /note="5' tri-ethylene glycol (TEG)"
  modified_base (10)..(10): bicyclic nucleic acid (BNA)
  modified_base (11)..(11): bicyclic nucleic acid (BNA)
uaaguucugtc

SEQ ID NO: 9999 - DNA, 10 bp, Artificial Sequence
  source: /note="Description of Artificial Sequence: Synthetic oligonucleotide"
  source: /note="Description of Combined DNA/RNA Molecule: Synthetic oligonucleotide"
  source: /note="DNA/RNA"
  source: /note="5' tri-ethylene glycol (TEG)"
  modified_base (9)..(9): bicyclic nucleic acid (BNA)
  modified_base (10)..(10): bicyclic nucleic acid (BNA)
uaaguucugt

SEQ ID NO: 10000 - DNA, 9 bp, Artificial Sequence
  source: /note="Description of Artificial Sequence: Synthetic oligonucleotide"
  source: /note="Description of Combined DNA/RNA Molecule: Synthetic oligonucleotide"
  source: /note="DNA/RNA"
  source: /note="5' tri-ethylene glycol (TEG)"
  modified_base (8)..(8): bicyclic nucleic acid (BNA)
  modified_base (9)..(9): bicyclic nucleic acid (BNA)
uaaguuctg

SEQ ID NO: 10001 - DNA, 8 bp, Artificial Sequence
  source: /note="Description of Artificial Sequence: Synthetic oligonucleotide"
  source: /note="Description of Combined DNA/RNA Molecule: Synthetic oligonucleotide"
  source: /note="DNA/RNA"
  source: /note="5' tri-ethylene glycol (TEG)"
  modified_base (7)..(7): bicyclic nucleic acid (BNA)
  modified_base (8)..(8): bicyclic nucleic acid (BNA)
uaaguuct

SEQ ID NO: 10002 - RNA, 20 nt, Artificial Sequence
  source: /note="Description of Artificial Sequence: Synthetic oligonucleotide"
  source: /note="RNA"
  source: /note="5' tri-ethylene glycol (TEG)"
  modified_base (19)..(19): bicyclic nucleic acid (BNA)
  modified_base (20)..(20): bicyclic nucleic acid (BNA)
guaaguucuguccaagcccg

SEQ ID NO: 10003 - RNA, 19 nt, Artificial Sequence
  source: /note="Description of Artificial Sequence: Synthetic oligonucleotide"
  source: /note="RNA"
  source: /note="5' tri-ethylene glycol (TEG)"
  modified_base (18)..(18): bicyclic nucleic acid (BNA)
  modified_base (19)..(19): bicyclic nucleic acid (BNA)
guaaguucuguccaagccc

SEQ ID NO: 10004 - RNA, 17 nt, Artificial Sequence
  source: /note="Description of Artificial Sequence: Synthetic oligonucleotide"
  source: /note="RNA"
  source: /note="5' tri-ethylene glycol (TEG)"
  modified_base (16)..(16): bicyclic nucleic acid (BNA)
  modified_base (17)..(17): bicyclic nucleic acid (BNA)
guaaguucuguccaagc

SEQ ID NO: 10005 - RNA, 16 nt, Artificial Sequence
  source: /note="Description of Artificial Sequence: Synthetic oligonucleotide"
  source: /note="RNA"
  source: /note="5' tri-ethylene glycol (TEG)"
  modified_base (15)..(15): bicyclic nucleic acid (BNA)
  modified_base (16)..(16): bicyclic nucleic acid (BNA)
guaaguucuguccaag

SEQ ID NO: 10006 - RNA, 15 nt, Artificial Sequence
  source: /note="Description of Artificial Sequence: Synthetic oligonucleotide"
  source: /note="RNA"
  source: /note="5' tri-ethylene glycol (TEG)"
  modified_base (14)..(14): bicyclic nucleic acid (BNA)
  modified_base (15)..(15): bicyclic nucleic acid (BNA)
guaaguucuguccaa

SEQ ID NO: 10007 - RNA, 14 nt, Artificial Sequence
  source: /note="Description of Artificial Sequence: Synthetic oligonucleotide"
  source: /note="RNA"
  source: /note="5' tri-ethylene glycol (TEG)"
  modified_base (13)..(13): bicyclic nucleic acid (BNA)
  modified_base (14)..(14): bicyclic nucleic acid (BNA)
guaaguucugucca

SEQ ID NO: 10008 - RNA, 13 nt, Artificial Sequence
  source: /note="Description of Artificial Sequence: Synthetic oligonucleotide"
  source: /note="RNA"
  source: /note="5' tri-ethylene glycol (TEG)"
  modified_base (12)..(12): bicyclic nucleic acid (BNA)
  modified_base (13)..(13): bicyclic nucleic acid (BNA)
guaaguucugucc

SEQ ID NO: 10009 - DNA, 12 bp, Artificial Sequence
  source: /note="Description of Artificial Sequence: Synthetic oligonucleotide"
  source: /note="Description of Combined DNA/RNA Molecule: Synthetic oligonucleotide"
  source: /note="DNA/RNA"
  source: /note="5' tri-ethylene glycol (TEG)"
  modified_base (11)..(11): bicyclic nucleic acid (BNA)
  modified_base (12)..(12): bicyclic nucleic acid (BNA)
guaaguucugtc

SEQ ID NO: 10010 - DNA, 11 bp, Artificial Sequence
  source: /note="Description of Artificial Sequence: Synthetic oligonucleotide"
  source: /note="Description of Combined DNA/RNA Molecule: Synthetic oligonucleotide"
  source: /note="DNA/RNA"
  source: /note="5' tri-ethylene glycol (TEG)"
  modified_base (10)..(10): bicyclic nucleic acid (BNA)
  modified_base (11)..(11): bicyclic nucleic acid (BNA)
guaaguucugt

SEQ ID NO: 10011 - DNA, 10 bp, Artificial Sequence
  source: /note="Description of Artificial Sequence: Synthetic oligonucleotide"
  source: /note="Description of Combined DNA/RNA Molecule: Synthetic oligonucleotide"
  source: /note="DNA/RNA"
  source: /note="5' tri-ethylene glycol (TEG)"
  modified_base (9)..(9): bicyclic nucleic acid (BNA)
  modified_base (10)..(10): bicyclic nucleic acid (BNA)
guaaguuctg

SEQ ID NO: 10012 - DNA, 9 bp, Artificial Sequence
  source: /note="Description of Artificial Sequence: Synthetic oligonucleotide"
  source: /note="Description of Combined DNA/RNA Molecule: Synthetic oligonucleotide"
  source: /note="DNA/RNA"
  source: /note="5' tri-ethylene glycol (TEG)"
  modified_base (8)..(8): bicyclic nucleic acid (BNA)
  modified_base (9)..(9): bicyclic nucleic acid (BNA)
guaaguuct

SEQ ID NO: 10013 - DNA, 8 bp, Artificial Sequence
  source: /note="Description of Artificial Sequence: Synthetic oligonucleotide"
  source: /note="Description of Combined DNA/RNA Molecule: Synthetic oligonucleotide"
  source: /note="DNA/RNA"
  source: /note="5' tri-ethylene glycol (TEG)"
  modified_base (7)..(7): bicyclic nucleic acid (BNA)
  modified_base (8)..(8): bicyclic nucleic acid (BNA)
guaagutc

SEQ ID NO: 10014 - RNA, 20 nt, Artificial Sequence
  source: /note="Description of Artificial Sequence: Synthetic oligonucleotide"
  source: /note="RNA"
  source: /note="5' tri-ethylene glycol (TEG)"
  modified_base (19)..(19): bicyclic nucleic acid (BNA)
  modified_base (20)..(20): bicyclic nucleic acid (BNA)
gguaaguucuguccaagccc

SEQ ID NO: 10015 - RNA, 19 nt, Artificial Sequence
  source: /note="Description of Artificial Sequence: Synthetic oligonucleotide"
  source: /note="RNA"
  source: /note="5' tri-ethylene glycol (TEG)"
  modified_base (18)..(18): bicyclic nucleic acid (BNA)
  modified_base (19)..(19): bicyclic nucleic acid (BNA)
gguaaguucuguccaagcc

SEQ ID NO: 10016 - RNA, 17 nt, Artificial Sequence
  source: /note="Description of Artificial Sequence: Synthetic oligonucleotide"
  source: /note="RNA"
  source: /note="5' tri-ethylene glycol (TEG)"
  modified_base (16)..(16): bicyclic nucleic acid (BNA)
  modified_base (17)..(17): bicyclic nucleic acid (BNA)
gguaaguucuguccaag

SEQ ID NO: 10017 - RNA, 16 nt, Artificial Sequence
  source: /note="Description of Artificial Sequence: Synthetic oligonucleotide"
  source: /note="RNA"
  source: /note="5' tri-ethylene glycol (TEG)"
  modified_base (15)..(15): bicyclic nucleic acid (BNA)
  modified_base (16)..(16): bicyclic nucleic acid (BNA)
gguaaguucuguccaa

SEQ ID NO: 10018 - RNA, 15 nt, Artificial Sequence
  source: /note="Description of Artificial Sequence: Synthetic oligonucleotide"
  source: /note="RNA"
  source: /note="5' tri-ethylene glycol (TEG)"
  modified_base (14)..(14): bicyclic nucleic acid (BNA)
  modified_base (15)..(15): bicyclic nucleic acid (BNA)
gguaaguucugucca

SEQ ID NO: 10019 - RNA, 14 nt, Artificial Sequence
  source: /note="Description of Artificial Sequence: Synthetic oligonucleotide"
  source: /note="RNA"
  source: /note="5' tri-ethylene glycol (TEG)"
  modified_base (13)..(13): bicyclic nucleic acid (BNA)
  modified_base (14)..(14): bicyclic nucleic acid (BNA)
gguaaguucugucc

SEQ ID NO: 10020 - DNA, 13 bp, Artificial Sequence
  source: /note="Description of Artificial Sequence: Synthetic oligonucleotide"
  source: /note="Description of Combined DNA/RNA Molecule: Synthetic oligonucleotide"
  source: /note="DNA/RNA"
  source: /note="5' tri-ethylene glycol (TEG)"
  modified_base (12)..(12): bicyclic nucleic acid (BNA)
  modified_base (13)..(13): bicyclic nucleic acid (BNA)
gguaaguucugtc

SEQ ID NO: 10021 - DNA, 12 bp, Artificial Sequence
  source: /note="Description of Artificial Sequence: Synthetic oligonucleotide"
  source: /note="Description of Combined DNA/RNA Molecule: Synthetic oligonucleotide"
  source: /note="DNA/RNA"
  source: /note="5' tri-ethylene glycol (TEG)"
  modified_base (11)..(11): bicyclic nucleic acid (BNA)
  modified_base (12)..(12): bicyclic nucleic acid (BNA)
gguaaguucugt

SEQ ID NO: 10022 - DNA, 11 bp, Artificial Sequence
  source: /note="Description of Artificial Sequence: Synthetic oligonucleotide"
  source: /note="Description of Combined DNA/RNA Molecule: Synthetic oligonucleotide"
  source: /note="DNA/RNA"
  source: /note="5' tri-ethylene glycol (TEG)"
  modified_base (10)..(10): bicyclic nucleic acid (BNA)
  modified_base (11)..(11): bicyclic nucleic acid (BNA)
gguaaguuctg

SEQ ID NO: 10023 - DNA, 10 bp, Artificial Sequence
  source: /note="Description of Artificial Sequence: Synthetic oligonucleotide"
  source: /note="Description of Combined DNA/RNA Molecule: Synthetic oligonucleotide"
  source: /note="DNA/RNA"
  source: /note="5' tri-ethylene glycol (TEG)"
  modified_base (9)..(9): bicyclic nucleic acid (BNA)
  modified_base (10)..(10): bicyclic nucleic acid (BNA)
gguaaguuct

SEQ ID NO: 10024 - DNA, 9 bp, Artificial Sequence
  source: /note="Description of Artificial Sequence: Synthetic oligonucleotide"
  source: /note="Description of Combined DNA/RNA Molecule: Synthetic oligonucleotide"
  source: /note="DNA/RNA"
  source: /note="5' tri-ethylene glycol (TEG)"
  modified_base (8)..(8): bicyclic nucleic acid (BNA)
  modified_base (9)..(9): bicyclic nucleic acid (BNA)
gguaagutc

SEQ ID NO: 10025 - DNA, 8 bp, Artificial Sequence
  source: /note="Description of Artificial Sequence: Synthetic oligonucleotide"
  source: /note="Description of Combined DNA/RNA Molecule: Synthetic oligonucleotide"
  source: /note="DNA/RNA"
  source: /note="5' tri-ethylene glycol (TEG)"
  modified_base (7)..(7): bicyclic nucleic acid (BNA)
  modified_base (8)..(8): bicyclic nucleic acid (BNA)
gguaagtt

SEQ ID NO: 10026 - RNA, 20 nt, Artificial Sequence
  source: /note="Description of Artificial Sequence: Synthetic oligonucleotide"
  source: /note="RNA"
  source: /note="5' tri-ethylene glycol (TEG)"
  modified_base (19)..(19): bicyclic nucleic acid (BNA)
  modified_base (20)..(20): bicyclic nucleic acid (BNA)
cgguaaguucuguccaagcc

SEQ ID NO: 10027 - RNA, 19 nt, Artificial Sequence
  source: /note="Description of Artificial Sequence: Synthetic oligonucleotide"
  source: /note="RNA"
  source: /note="5' tri-ethylene glycol (TEG)"
  modified_base (18)..(18): bicyclic nucleic acid (BNA)
  modified_base (19)..(19): bicyclic nucleic acid (BNA)
cgguaaguucuguccaagc

SEQ ID NO: 10028 - RNA, 18 nt, Artificial Sequence
  source: /note="Description of Artificial Sequence: Synthetic oligonucleotide"
  source: /note="RNA"
  source: /note="5' tri-ethylene glycol (TEG)"
  modified_base (17)..(17): bicyclic nucleic acid (BNA)
  modified_base (18)..(18): bicyclic nucleic acid (BNA)
cgguaaguucuguccaag

SEQ ID NO: 10029 - RNA, 17 nt, Artificial Sequence
  source: /note="Description of Artificial Sequence: Synthetic oligonucleotide"
  source: /note="RNA"
  source: /note="5' tri-ethylene glycol (TEG)"
  modified_base (16)..(16): bicyclic nucleic acid (BNA)
  modified_base (17)..(17): bicyclic nucleic acid (BNA)
cgguaaguucuguccaa

SEQ ID NO: 10030 - RNA, 16 nt, Artificial Sequence
  source: /note="Description of Artificial Sequence: Synthetic oligonucleotide"
  source: /note="RNA"
  source: /note="5' tri-ethylene glycol (TEG)"
  modified_base (15)..(15): bicyclic nucleic acid (BNA)
  modified_base (16)..(16): bicyclic nucleic acid (BNA)
cgguaaguucugucca

SEQ ID NO: 10031 - RNA, 15 nt, Artificial Sequence
  source: /note="Description of Artificial Sequence: Synthetic oligonucleotide"
  source: /note="RNA"
  source: /note="5' tri-ethylene glycol (TEG)"
  modified_base (14)..(14): bicyclic nucleic acid (BNA)
  modified_base (15)..(15): bicyclic nucleic acid (BNA)
cgguaaguucugucc

SEQ ID NO: 10032 - DNA, 14 bp, Artificial Sequence
  source: /note="Description of Artificial Sequence: Synthetic oligonucleotide"
  source: /note="Description of Combined DNA/RNA Molecule: Synthetic oligonucleotide"
  source: /note="DNA/RNA"
  source: /note="5' tri-ethylene glycol (TEG)"
  modified_base (13)..(13): bicyclic nucleic acid (BNA)
  modified_base (14)..(14): bicyclic nucleic acid (BNA)
cgguaaguucugtc

SEQ ID NO: 10033 - DNA, 13 bp, Artificial Sequence
  source: /note="Description of Artificial Sequence: Synthetic oligonucleotide"
  source: /note="Description of Combined DNA/RNA Molecule: Synthetic oligonucleotide"
  source: /note="DNA/RNA"
  source: /note="5' tri-ethylene glycol (TEG)"
  modified_base (12)..(12): bicyclic nucleic acid (BNA)
  modified_base (13)..(13): bicyclic nucleic acid (BNA)
cgguaaguucugt

SEQ ID NO: 10034 - DNA, 12 bp, Artificial Sequence
  source: /note="Description of Artificial Sequence: Synthetic oligonucleotide"
  source: /note="Description of Combined DNA/RNA Molecule: Synthetic oligonucleotide"
  source: /note="DNA/RNA"
  source: /note="5' tri-ethylene glycol (TEG)"
  modified_base (11)..(11): bicyclic nucleic acid (BNA)
  modified_base (12)..(12): bicyclic nucleic acid (BNA)
cgguaaguuctg

SEQ ID NO: 10035 - DNA, 11 bp, Artificial Sequence
  source: /note="Description of Artificial Sequence: Synthetic oligonucleotide"
  source: /note="Description of Combined DNA/RNA Molecule: Synthetic oligonucleotide"
  source: /note="DNA/RNA"
  source: /note="5' tri-ethylene glycol (TEG)"
  modified_base (10)..(10): bicyclic nucleic acid (BNA)
  modified_base (11)..(11): bicyclic nucleic acid (BNA)
cgguaaguuct

SEQ ID NO: 10036 - DNA, 10 bp, Artificial Sequence
  source: /note="Description of Artificial Sequence: Synthetic oligonucleotide"
  source: /note="Description of Combined DNA/RNA Molecule: Synthetic oligonucleotide"
  source: /note="DNA/RNA"
  source: /note="5' tri-ethylene glycol (TEG)"
  modified_base (9)..(9): bicyclic nucleic acid (BNA)
  modified_base (10)..(10): bicyclic nucleic acid (BNA)
cgguaagutc

SEQ ID NO: 10037 - DNA, 9 bp, Artificial Sequence
  source: /note="Description of Artificial Sequence: Synthetic oligonucleotide"
  source: /note="Description of Combined DNA/RNA Molecule: Synthetic oligonucleotide"
  source: /note="DNA/RNA"
  source: /note="5' tri-ethylene glycol (TEG)"
  modified_base (8)..(8): bicyclic nucleic acid (BNA)
  modified_base (9)..(9): bicyclic nucleic acid (BNA)
cgguaagtt

SEQ ID NO: 10038 - DNA, 8 bp, Artificial Sequence
  source: /note="Description of Artificial Sequence: Synthetic oligonucleotide"
  source: /note="Description of Combined DNA/RNA Molecule: Synthetic oligonucleotide"
  source: /note="DNA/RNA"
  source: /note="5' tri-ethylene glycol (TEG)"
  modified_base (7)..(7): bicyclic nucleic acid (BNA)
  modified_base (8)..(8): bicyclic nucleic acid (BNA)
cgguaagt

SEQ ID NO: 10039 - RNA, 20 nt, Artificial Sequence
  source: /note="Description of Artificial Sequence: Synthetic oligonucleotide"
  source: /note="RNA"
  source: /note="5' tri-ethylene glycol (TEG)"
  modified_base (19)..(19): bicyclic nucleic acid (BNA)
  modified_base (20)..(20): bicyclic nucleic acid (BNA)
ucgguaaguucuguccaagc

SEQ ID NO: 10040 - RNA, 19 nt, Artificial Sequence
  source: /note="Description of Artificial Sequence: Synthetic oligonucleotide"
  source: /note="RNA"
  source: /note="5' tri-ethylene glycol (TEG)"
  modified_base (18)..(18): bicyclic nucleic acid (BNA)
  modified_base (19)..(19): bicyclic nucleic acid (BNA)
ucgguaaguucuguccaag

SEQ ID NO: 10041 - RNA, 18 nt, Artificial Sequence
  source: /note="Description of Artificial Sequence: Synthetic oligonucleotide"
  source: /note="RNA"
  source: /note="5' tri-ethylene glycol (TEG)"
  modified_base (17)..(17): bicyclic nucleic acid (BNA)
  modified_base (18)..(18): bicyclic nucleic acid (BNA)
ucgguaaguucuguccaa

SEQ ID NO: 10042 - RNA, 17 nt, Artificial Sequence
  source: /note="Description of Artificial Sequence: Synthetic oligonucleotide"
  source: /note="RNA"
  source: /note="5' tri-ethylene glycol (TEG)"
  modified_base (16)..(16): bicyclic nucleic acid (BNA)
  modified_base (17)..(17): bicyclic nucleic acid (BNA)
ucgguaaguucugucca

SEQ ID NO: 10043 - RNA, 16 nt, Artificial Sequence
  source: /note="Description of Artificial Sequence: Synthetic oligonucleotide"
  source: /note="RNA"
  source: /note="5' tri-ethylene glycol (TEG)"
  modified_base (15)..(15): bicyclic nucleic acid (BNA)
  modified_base (16)..(16): bicyclic nucleic acid (BNA)
ucgguaaguucugucc

SEQ ID NO: 10044 - DNA, 15 bp, Artificial Sequence
  source: /note="Description of Artificial Sequence: Synthetic oligonucleotide"
  source: /note="Description of Combined DNA/RNA Molecule: Synthetic oligonucleotide"
  source: /note="DNA/RNA"
  source: /note="5' tri-ethylene glycol (TEG)"
  modified_base (14)..(14): bicyclic nucleic acid (BNA)
  modified_base (15)..(15): bicyclic nucleic acid (BNA)
ucgguaaguucugtc

SEQ ID NO: 10045 - DNA, 14 bp, Artificial Sequence
  source: /note="Description of Artificial Sequence: Synthetic oligonucleotide"
  source: /note="Description of Combined DNA/RNA Molecule: Synthetic oligonucleotide"
  source: /note="DNA/RNA"
  source: /note="5' tri-ethylene glycol (TEG)"
  modified_base (13)..(13): bicyclic nucleic acid (BNA)
  modified_base (14)..(14): bicyclic nucleic acid (BNA)
ucgguaaguucugt

SEQ ID NO: 10046 - DNA, 13 bp, Artificial Sequence
  source: /note="Description of Artificial Sequence: Synthetic oligonucleotide"
  source: /note="Description of Combined DNA/RNA Molecule: Synthetic oligonucleotide"
  source: /note="DNA/RNA"
  source: /note="5' tri-ethylene glycol (TEG)"
  modified_base (12)..(12): bicyclic nucleic acid (BNA)
  modified_base (13)..(13): bicyclic nucleic acid (BNA)
ucgguaaguuctg

SEQ ID NO: 10047 - DNA, 12 bp, Artificial Sequence
  source: /note="Description of Artificial Sequence: Synthetic oligonucleotide"
  source: /note="Description of Combined DNA/RNA Molecule: Synthetic oligonucleotide"
  source: /note="DNA/RNA"
  source: /note="5' tri-ethylene glycol (TEG)"
  modified_base (11)..(11): bicyclic nucleic acid (BNA)
  modified_base (12)..(12): bicyclic nucleic acid (BNA)
ucgguaaguuct

SEQ ID NO: 10048 - DNA, 11 bp, Artificial Sequence
  source: /note="Description of Artificial Sequence: Synthetic oligonucleotide"
  source: /note="Description of Combined DNA/RNA Molecule: Synthetic oligonucleotide"
  source: /note="DNA/RNA"
  source: /note="5' tri-ethylene glycol (TEG)"
  modified_base (10)..(10): bicyclic nucleic acid (BNA)
  modified_base (11)..(11): bicyclic nucleic acid (BNA)
ucgguaagutc

SEQ ID NO: 10049 - DNA, 10 bp, Artificial Sequence
  source: /note="Description of Artificial Sequence: Synthetic oligonucleotide"
  source: /note="Description of Combined DNA/RNA Molecule: Synthetic oligonucleotide"
  source: /note="DNA/RNA"
  source: /note="5' tri-ethylene glycol (TEG)"
  modified_base (9)..(9): bicyclic nucleic acid (BNA)
  modified_base (10)..(10): bicyclic nucleic acid (BNA)
ucgguaagtt

SEQ ID NO: 10050 - DNA, 9 bp, Artificial Sequence
  source: /note="Description of Artificial Sequence: Synthetic oligonucleotide"
  source: /note="Description of Combined DNA/RNA Molecule: Synthetic oligonucleotide"
  source: /note="DNA/RNA"
  source: /note="5' tri-ethylene glycol (TEG)"
  modified_base (8)..(8): bicyclic nucleic acid (BNA)
  modified_base (9)..(9): bicyclic nucleic acid (BNA)
ucgguaagt

SEQ ID NO: 10051 - RNA, 20 nt, Artificial Sequence
  source: /note="Description of Artificial Sequence: Synthetic oligonucleotide"
  source: /note="RNA"
  source: /note="5' tri-ethylene glycol (TEG)"
  modified_base (19)..(19): bicyclic nucleic acid (BNA)
  modified_base (20)..(20): bicyclic nucleic acid (BNA)
gucgguaaguucuguccaag

SEQ ID NO: 10052 - RNA, 19 nt, Artificial Sequence
  source: /note="Description of Artificial Sequence: Synthetic oligonucleotide"
  source: /note="RNA"
  source: /note="5' tri-ethylene glycol (TEG)"
  modified_base (18)..(18): bicyclic nucleic acid (BNA)
  modified_base (19)..(19): bicyclic nucleic acid (BNA)
gucgguaaguucuguccaa

SEQ ID NO: 10053 - RNA, 18 nt, Artificial Sequence
  source: /note="Description of Artificial Sequence: Synthetic oligonucleotide"
  source: /note="RNA"
  source: /note="5' tri-ethylene glycol (TEG)"
  modified_base (17)..(17): bicyclic nucleic acid (BNA)
  modified_base (18)..(18): bicyclic nucleic acid (BNA)
gucgguaaguucugucca

SEQ ID NO: 10054 - RNA, 17 nt, Artificial Sequence
  source: /note="Description of Artificial Sequence: Synthetic oligonucleotide"
  source: /note="RNA"
  source: /note="5' tri-ethylene glycol (TEG)"
  modified_base (16)..(16): bicyclic nucleic acid (BNA)
  modified_base (17)..(17): bicyclic nucleic acid (BNA)
gucgguaaguucugucc

SEQ ID NO: 10055 - DNA, 16 bp, Artificial Sequence
  source: /note="Description of Artificial Sequence: Synthetic oligonucleotide"
  source: /note="Description of Combined DNA/RNA Molecule: Synthetic oligonucleotide"
  source: /note="DNA/RNA"
  source: /note="5' tri-ethylene glycol (TEG)"
  modified_base (15)..(15): bicyclic nucleic acid (BNA)
  modified_base (16)..(16): bicyclic nucleic acid (BNA)
gucgguaaguucugtc

SEQ ID NO: 10056 - DNA, 15 bp, Artificial Sequence
  source: /note="Description of Artificial Sequence: Synthetic oligonucleotide"
  source: /note="Description of Combined DNA/RNA Molecule: Synthetic oligonucleotide"
  source: /note="DNA/RNA"
  source: /note="5' tri-ethylene glycol (TEG)"
  modified_base (14)..(14): bicyclic nucleic acid (BNA)
  modified_base (15)..(15): bicyclic nucleic acid (BNA)
gucgguaaguucugt

SEQ ID NO: 10057 - DNA, 14 bp, Artificial Sequence
  source: /note="Description of Artificial Sequence: Synthetic oligonucleotide"
  source: /note="Description of Combined DNA/RNA Molecule: Synthetic oligonucleotide"
  source: /note="DNA/RNA"
  source: /note="5' tri-ethylene glycol (TEG)"
  modified_base (13)..(13): bicyclic nucleic acid (BNA)
  modified_base (14)..(14): bicyclic nucleic acid (BNA)
gucgguaaguuctg

SEQ ID NO: 10058 - DNA, 13 bp, Artificial Sequence
  source: /note="Description of Artificial Sequence: Synthetic oligonucleotide"
  source: /note="Description of Combined DNA/RNA Molecule: Synthetic oligonucleotide"
  source: /note="DNA/RNA"
  source: /note="5' tri-ethylene glycol (TEG)"
  modified_base (12)..(12): bicyclic nucleic acid (BNA)
  modified_base (13)..(13): bicyclic nucleic acid (BNA)
gucgguaaguuct

SEQ ID NO: 10059 - DNA, 12 bp, Artificial Sequence
  source: /note="Description of Artificial Sequence: Synthetic oligonucleotide"
  source: /note="Description of Combined DNA/RNA Molecule: Synthetic oligonucleotide"
  source: /note="DNA/RNA"
  source: /note="5' tri-ethylene glycol (TEG)"
  modified_base (11)..(11): bicyclic nucleic acid (BNA)
  modified_base (12)..(12): bicyclic nucleic acid (BNA)
gucgguaagutc

SEQ ID NO: 10060 - DNA, 11 bp, Artificial Sequence
  source: /note="Description of Artificial Sequence: Synthetic oligonucleotide"
  source: /note="Description of Combined DNA/RNA Molecule: Synthetic oligonucleotide"
  source: /note="DNA/RNA"
  source: /note="5' tri-ethylene glycol (TEG)"
  modified_base (10)..(10): bicyclic nucleic acid (BNA)
  modified_base (11)..(11): bicyclic nucleic acid (BNA)
gucgguaagtt

SEQ ID NO: 10061 - DNA, 10 bp, Artificial Sequence
  source: /note="Description of Artificial Sequence: Synthetic oligonucleotide"
  source: /note="Description of Combined DNA/RNA Molecule: Synthetic oligonucleotide"
  source: /note="DNA/RNA"
  source: /note="5' tri-ethylene glycol (TEG)"
  modified_base (9)..(9): bicyclic nucleic acid (BNA)
  modified_base (10)..(10): bicyclic nucleic acid (BNA)
gucgguaagt

SEQ ID NO: 10062 - RNA, 20 nt, Artificial Sequence
  source: /note="Description of Artificial Sequence: Synthetic oligonucleotide"
  source: /note="RNA"
  source: /note="5' tri-ethylene glycol (TEG)"
  modified_base (19)..(19): bicyclic nucleic acid (BNA)
  modified_base (20)..(20): bicyclic nucleic acid (BNA)
agucgguaaguucuguccaa

SEQ ID NO: 10063 - RNA, 19 nt, Artificial Sequence
  source: /note="Description of Artificial Sequence: Synthetic oligonucleotide"
  source: /note="RNA"
  source: /note="5' tri-ethylene glycol (TEG)"
  modified_base (18)..(18): bicyclic nucleic acid (BNA)
  modified_base (19)..(19): bicyclic nucleic acid (BNA)
agucgguaaguucugucca

SEQ ID NO: 10064 - DNA, 17 bp, Artificial Sequence
  source: /note="Description of Artificial Sequence: Synthetic oligonucleotide"
  source: /note="Description of Combined DNA/RNA Molecule: Synthetic oligonucleotide"
  source: /note="DNA/RNA"
  source: /note="5' tri-ethylene glycol (TEG)"
  modified_base (16)..(16): bicyclic nucleic acid (BNA)
  modified_base (17)..(17): bicyclic nucleic acid (BNA)
agucgguaaguucugtc

SEQ ID NO: 10065 - DNA, 16 bp, Artificial Sequence
  source: /note="Description of Artificial Sequence: Synthetic oligonucleotide"
  source: /note="Description of Combined DNA/RNA Molecule: Synthetic oligonucleotide"
  source: /note="DNA/RNA"
  source: /note="5' tri-ethylene glycol (TEG)"
  modified_base (15)..(15): bicyclic nucleic acid (BNA)
  modified_base (16)..(16): bicyclic nucleic acid (BNA)
agucgguaaguucugt

SEQ ID NO: 10066 - DNA, 15 bp, Artificial Sequence
  source: /note="Description of Artificial Sequence: Synthetic oligonucleotide"
  source: /note="Description of Combined DNA/RNA Molecule: Synthetic oligonucleotide"
  source: /note="DNA/RNA"
  source: /note="5' tri-ethylene glycol (TEG)"
  modified_base (14)..(14): bicyclic nucleic acid (BNA)
  modified_base (15)..(15): bicyclic nucleic acid (BNA)
agucgguaaguuctg

SEQ ID NO: 10067 - DNA, 14 bp, Artificial Sequence
  source: /note="Description of Artificial Sequence: Synthetic oligonucleotide"
  source: /note="Description of Combined DNA/RNA Molecule: Synthetic oligonucleotide"
  source: /note="DNA/RNA"
  source: /note="5' tri-ethylene glycol (TEG)"
  modified_base (13)..(13): bicyclic nucleic acid (BNA)
  modified_base (14)..(14): bicyclic nucleic acid (BNA)
agucgguaaguuct

SEQ ID NO: 10068 - DNA, 13 bp, Artificial Sequence
  source: /note="Description of Artificial Sequence: Synthetic oligonucleotide"
  source: /note="Description of Combined DNA/RNA Molecule: Synthetic oligonucleotide"
  source: /note="DNA/RNA"
  source: /note="5' tri-ethylene glycol (TEG)"
  modified_base (12)..(12): bicyclic nucleic acid (BNA)
  modified_base (13)..(13): bicyclic nucleic acid (BNA)
agucgguaagutc

SEQ ID NO: 10069 - DNA, 12 bp, Artificial Sequence
  source: /note="Description of Artificial Sequence: Synthetic oligonucleotide"
  source: /note="Description of Combined DNA/RNA Molecule: Synthetic oligonucleotide"
  source: /note="DNA/RNA"
  source: /note="5' tri-ethylene glycol (TEG)"
  modified_base (11)..(11): bicyclic nucleic acid (BNA)
  modified_base (12)..(12): bicyclic nucleic acid (BNA)
agucgguaagtt

SEQ ID NO: 10070 - DNA, 11 bp, Artificial Sequence
  source: /note="Description of Artificial Sequence: Synthetic oligonucleotide"
  source: /note="Description of Combined DNA/RNA Molecule: Synthetic oligonucleotide"
  source: /note="DNA/RNA"
  source: /note="5' tri-ethylene glycol (TEG)"
  modified_base (10)..(10): bicyclic nucleic acid (BNA)
  modified_base (11)..(11): bicyclic nucleic acid (BNA)
agucgguaagt

SEQ ID NO: 10071 - RNA, 20 nt, Artificial Sequence
  source: /note="Description of Artificial Sequence: Synthetic oligonucleotide"
  source: /note="RNA"
  source: /note="5' tri-ethylene glycol (TEG)"
  modified_base (19)..(19): bicyclic nucleic acid (BNA)
  modified_base (20)..(20): bicyclic nucleic acid (BNA)
cagucgguaaguucugucca

SEQ ID NO: 10072 - RNA, 19 nt, Artificial Sequence
  source: /note="Description of Artificial Sequence: Synthetic oligonucleotide"
  source: /note="RNA"
  source: /note="5' tri-ethylene glycol (TEG)"
  modified_base (18)..(18): bicyclic nucleic acid (BNA)
  modified_base (19)..(19): bicyclic nucleic acid (BNA)
cagucgguaaguucugucc

SEQ ID NO: 10073 - DNA, 18 bp, Artificial Sequence
  source: /note="Description of Artificial Sequence: Synthetic oligonucleotide"
  source: /note="Description of Combined DNA/RNA Molecule: Synthetic oligonucleotide"
  source: /note="DNA/RNA"
  source: /note="5' tri-ethylene glycol (TEG)"
  modified_base (17)..(17): bicyclic nucleic acid (BNA)
  modified_base (18)..(18): bicyclic nucleic acid (BNA)
cagucgguaaguucugtc

SEQ ID NO: 10074 - DNA, 17 bp, Artificial Sequence
  source: /note="Description of Artificial Sequence: Synthetic oligonucleotide"
  source: /note="Description of Combined DNA/RNA Molecule: Synthetic oligonucleotide"
  source: /note="DNA/RNA"
  source: /note="5' tri-ethylene glycol (TEG)"
  modified_base (16)..(16): bicyclic nucleic acid (BNA)
  modified_base (17)..(17): bicyclic nucleic acid (BNA)
cagucgguaaguucugt

SEQ ID NO: 10075 - DNA, 16 bp, Artificial Sequence
  source: /note="Description of Artificial Sequence: Synthetic oligonucleotide"
  source: /note="Description of Combined DNA/RNA Molecule: Synthetic oligonucleotide"
  source: /note="DNA/RNA"
  source: /note="5' tri-ethylene glycol (TEG)"
  modified_base (15)..(15): bicyclic nucleic acid (BNA)
  modified_base (16)..(16): bicyclic nucleic acid (BNA)
cagucgguaaguuctg

SEQ ID NO: 10076 - DNA, 15 bp, Artificial Sequence
  source: /note="Description of Artificial Sequence: Synthetic oligonucleotide"
  source: /note="Description of Combined DNA/RNA Molecule: Synthetic oligonucleotide"
  source: /note="DNA/RNA"
  source: /note="5' tri-ethylene glycol (TEG)"
  modified_base (14)..(14): bicyclic nucleic acid (BNA)
  modified_base (15)..(15): bicyclic nucleic acid (BNA)
cagucgguaaguuct

SEQ ID NO: 10077 - DNA, 14 bp, Artificial Sequence
  source: /note="Description of Artificial Sequence: Synthetic oligonucleotide"
  source: /note="Description of Combined DNA/RNA Molecule: Synthetic oligonucleotide"
  source: /note="DNA/RNA"
  source: /note="5' tri-ethylene glycol (TEG)"
  modified_base (13)..(13): bicyclic nucleic acid (BNA)
  modified_base (14)..(14): bicyclic nucleic acid (BNA)
cagucgguaagutc

SEQ ID NO: 10078 - DNA, 13 bp, Artificial Sequence
  source: /note="Description of Artificial Sequence: Synthetic oligonucleotide"
  source: /note="Description of Combined DNA/RNA Molecule: Synthetic oligonucleotide"
  source: /note="DNA/RNA"
  source: /note="5' tri-ethylene glycol (TEG)"
  modified_base (12)..(12): bicyclic nucleic acid (BNA)
  modified_base (13)..(13): bicyclic nucleic acid (BNA)
cagucgguaagtt

SEQ ID NO: 10079 - DNA, 12 bp, Artificial Sequence
  source: /note="Description of Artificial Sequence: Synthetic oligonucleotide"
  source: /note="Description of Combined DNA/RNA Molecule: Synthetic oligonucleotide"
  source: /note="DNA/RNA"
  source: /note="5' tri-ethylene glycol (TEG)"
  modified_base (11)..(11): bicyclic nucleic acid (BNA)
  modified_base (12)..(12): bicyclic nucleic acid (BNA)
cagucgguaagt

SEQ ID NO: 10080 - RNA, 20 nt, Artificial Sequence
  source: /note="Description of Artificial Sequence: Synthetic oligonucleotide"
  source: /note="RNA"
  source: /note="5' tri-ethylene glycol (TEG)"
  modified_base (19)..(19): bicyclic nucleic acid (BNA)
  modified_base (20)..(20): bicyclic nucleic acid (BNA)
ccagucgguaaguucugucc

SEQ ID NO: 10081 - DNA, 19 bp, Artificial Sequence
  source: /note="Description of Artificial Sequence: Synthetic oligonucleotide"
  source: /note="Description of Combined DNA/RNA Molecule: Synthetic oligonucleotide"
  source: /note="DNA/RNA"
  source: /note="5' tri-ethylene glycol (TEG)"
  modified_base (18)..(18): bicyclic nucleic acid (BNA)
  modified_base (19)..(19): bicyclic nucleic acid (BNA)
ccagucgguaaguucugtc

SEQ ID NO: 10082 - DNA, 18 bp, Artificial Sequence
  source: /note="Description of Artificial Sequence: Synthetic oligonucleotide"
  source: /note="Description of Combined DNA/RNA Molecule: Synthetic oligonucleotide"
  source: /note="DNA/RNA"
  source: /note="5' tri-ethylene glycol (TEG)"
  modified_base (17)..(17): bicyclic nucleic acid (BNA)
  modified_base (18)..(18): bicyclic nucleic acid (BNA)
ccagucgguaaguucugt

SEQ ID NO: 10083 - DNA, 17 bp, Artificial Sequence
  source: /note="Description of Artificial Sequence: Synthetic oligonucleotide"
  source: /note="Description of Combined DNA/RNA Molecule: Synthetic oligonucleotide"
  source: /note="DNA/RNA"
  source: /note="5' tri-ethylene glycol (TEG)"
  modified_base (16)..(16): bicyclic nucleic acid (BNA)
  modified_base (17)..(17): bicyclic nucleic acid (BNA)
ccagucgguaaguuctg

SEQ ID NO: 10084 - DNA, 16 bp, Artificial Sequence
  source: /note="Description of Artificial Sequence: Synthetic oligonucleotide"
  source: /note="Description of Combined DNA/RNA Molecule: Synthetic oligonucleotide"
  source: /note="DNA/RNA"
  source: /note="5' tri-ethylene glycol (TEG)"
  modified_base (15)..(15): bicyclic nucleic acid (BNA)
  modified_base (16)..(16): bicyclic nucleic acid (BNA)
ccagucgguaaguuct

SEQ ID NO: 10085 - DNA, 15 bp, Artificial Sequence
  source: /note="Description of Artificial Sequence: Synthetic oligonucleotide"
  source: /note="Description of Combined DNA/RNA Molecule: Synthetic oligonucleotide"
  source: /note="DNA/RNA"
  source: /note="5' tri-ethylene glycol (TEG)"
  modified_base (14)..(14): bicyclic nucleic acid (BNA)
  modified_base (15)..(15): bicyclic nucleic acid (BNA)
ccagucgguaagutc

SEQ ID NO: 10086 - DNA, 14 bp, Artificial Sequence
  source: /note="Description of Artificial Sequence: Synthetic oligonucleotide"
  source: /note="Description of Combined DNA/RNA Molecule: Synthetic oligonucleotide"
  source: /note="DNA/RNA"
  source: /note="5' tri-ethylene glycol (TEG)"
  modified_base (13)..(13): bicyclic nucleic acid (BNA)
  modified_base (14)..(14): bicyclic nucleic acid (BNA)
ccagucgguaagtt

SEQ ID NO: 10087 - DNA, 13 bp, Artificial Sequence
  source: /note="Description of Artificial Sequence: Synthetic oligonucleotide"
  source: /note="Description of Combined DNA/RNA Molecule: Synthetic oligonucleotide"
  source: /note="DNA/RNA"
  source: /note="5' tri-ethylene glycol (TEG)"
  modified_base (12)..(12): bicyclic nucleic acid (BNA)
  modified_base (13)..(13): bicyclic nucleic acid (BNA)
ccagucgguaagt

SEQ ID NO: 10088 - DNA, 20 bp, Artificial Sequence
  source: /note="Description of Artificial Sequence: Synthetic oligonucleotide"
  source: /note="Description of Combined DNA/RNA Molecule: Synthetic oligonucleotide"
  source: /note="DNA/RNA"
  source: /note="5' tri-ethylene glycol (TEG)"
  modified_base (19)..(19): bicyclic nucleic acid (BNA)
  modified_base (20)..(20): bicyclic nucleic acid (BNA)
gccagucgguaaguucugtc

SEQ ID NO: 10089 - DNA, 19 bp, Artificial Sequence
  source: /note="Description of Artificial Sequence: Synthetic oligonucleotide"
  source: /note="Description of Combined DNA/RNA Molecule: Synthetic oligonucleotide"
  source: /note="DNA/RNA"
  source: /note="5' tri-ethylene glycol (TEG)"
  modified_base (18)..(18): bicyclic nucleic acid (BNA)
  modified_base (19)..(19): bicyclic nucleic acid (BNA)
gccagucgguaaguucugt

SEQ ID NO: 10090 - DNA, 18 bp, Artificial Sequence
  source: /note="Description of Artificial Sequence: Synthetic oligonucleotide"
  source: /note="Description of Combined DNA/RNA Molecule: Synthetic oligonucleotide"
  source: /note="DNA/RNA"
  source: /note="5' tri-ethylene glycol (TEG)"
  modified_base (17)..(17): bicyclic nucleic acid (BNA)
  modified_base (18)..(18): bicyclic nucleic acid (BNA)
gccagucgguaaguuctg

SEQ ID NO: 10091 - DNA, 17 bp, Artificial Sequence
  source: /note="Description of Artificial Sequence: Synthetic oligonucleotide"
  source: /note="Description of Combined DNA/RNA Molecule: Synthetic oligonucleotide"
  source: /note="DNA/RNA"
  source: /note="5' tri-ethylene glycol (TEG)"
  modified_base (16)..(16): bicyclic nucleic acid (BNA)
  modified_base (17)..(17): bicyclic nucleic acid (BNA)
gccagucgguaaguuct

SEQ ID NO: 10092 - DNA, 16 bp, Artificial Sequence
  source: /note="Description of Artificial Sequence: Synthetic oligonucleotide"
  source: /note="Description of Combined DNA/RNA Molecule: Synthetic oligonucleotide"
  source: /note="DNA/RNA"
  source: /note="5' tri-ethylene glycol (TEG)"
  modified_base (15)..(15): bicyclic nucleic acid (BNA)
  modified_base (16)..(16): bicyclic nucleic acid (BNA)
gccagucgguaagutc

SEQ ID NO: 10093 - DNA, 15 bp, Artificial Sequence
  source: /note="Description of Artificial Sequence: Synthetic oligonucleotide"
  source: /note="Description of Combined DNA/RNA Molecule: Synthetic oligonucleotide"
  source: /note="DNA/RNA"
  source: /note="5' tri-ethylene glycol (TEG)"
  modified_base (14)..(14): bicyclic nucleic acid (BNA)
  modified_base (15)..(15): bicyclic nucleic acid (BNA)
gccagucgguaagtt

SEQ ID NO: 10094 - DNA, 14 bp, Artificial Sequence
  source: /note="Description of Artificial Sequence: Synthetic oligonucleotide"
  source: /note="Description of Combined DNA/RNA Molecule: Synthetic oligonucleotide"
  source: /note="DNA/RNA"
  source: /note="5' tri-ethylene glycol (TEG)"
  modified_base (13)..(13): bicyclic nucleic acid (BNA)
  modified_base (14)..(14): bicyclic nucleic acid (BNA)
gccagucgguaagt

SEQ ID NO: 10095 - DNA, 20 bp, Artificial Sequence
  source: /note="Description of Artificial Sequence: Synthetic oligonucleotide"
  source: /note="Description of Combined DNA/RNA Molecule: Synthetic oligonucleotide"
  source: /note="DNA/RNA"
  source: /note="5' tri-ethylene glycol (TEG)"
  modified_base (19)..(19): bicyclic nucleic acid (BNA)
  modified_base (20)..(20): bicyclic nucleic acid (BNA)
ucaaggaagauggcauuuct

SEQ ID NO: 10096 - RNA, 22 nt, Artificial Sequence
  source: /note="Description of Artificial Sequence: Synthetic oligonucleotide"
  source: /note="RNA"
  source: /note="5' tri-ethylene glycol (TEG)"
  modified_base (21)..(21): bicyclic nucleic acid (BNA)
  modified_base (22)..(22): bicyclic nucleic acid (BNA)
ucaaggaagauggcauuucuag

SEQ ID NO: 10097 - DNA, 16 bp, Artificial Sequence
  source: /note="Description of Artificial Sequence: Synthetic oligonucleotide"
  source: /note="Description of Combined DNA/RNA Molecule: Synthetic oligonucleotide"
  source: /note="DNA/RNA"
  source: /note="5' tri-ethylene glycol (TEG)"
  modified_base (15)..(15): bicyclic nucleic acid (BNA)
  modified_base (16)..(16): bicyclic nucleic acid (BNA)
ucaaggaagauggcat

SEQ ID NO: 10098 - DNA, 15 bp, Artificial Sequence
  source: /note="Description of Artificial Sequence: Synthetic oligonucleotide"
  source: /note="Description of Combined DNA/RNA Molecule: Synthetic oligonucleotide"
  source: /note="DNA/RNA"
  source: /note="5' tri-ethylene glycol (TEG)"
  modified_base (14)..(14): bicyclic nucleic acid (BNA)
  modified_base (15)..(15): bicyclic nucleic acid (BNA)
gaagauggcauuuct

SEQ ID NO: 10099 - DNA, 21 bp, Artificial Sequence
  source: /note="Description of Artificial Sequence: Synthetic oligonucleotide"
  source: /note="Description of Combined DNA/RNA Molecule: Synthetic oligonucleotide"
  source: /note="DNA/RNA"
  source: /note="5' tri-ethylene glycol (TEG)"
  modified_base (20)..(20): bicyclic nucleic acid (BNA)
  modified_base (21)..(21): bicyclic nucleic acid (BNA)
ucaaggaagauggcauuucta

SEQ ID NO: 10100 - DNA, 19 bp, Artificial Sequence
  source: /note="Description of Artificial Sequence: Synthetic oligonucleotide"
  source: /note="Description of Combined DNA/RNA Molecule: Synthetic oligonucleotide"
  source: /note="DNA/RNA"
  source: /note="5' tri-ethylene glycol (TEG)"
  modified_base (18)..(18): bicyclic nucleic acid (BNA)
  modified_base (19)..(19): bicyclic nucleic acid (BNA)
ucaaggaagauggcauutc

SEQ ID NO: 10101 - DNA, 18 bp, Artificial Sequence
  source: /note="Description of Artificial Sequence: Synthetic oligonucleotide"
  source: /note="Description of Combined DNA/RNA Molecule: Synthetic oligonucleotide"
  source: /note="DNA/RNA"
  source: /note="5' tri-ethylene glycol (TEG)"
  modified_base (17)..(17): bicyclic nucleic acid (BNA)
  modified_base (18)..(18): bicyclic nucleic acid (BNA)
ucaaggaagauggcautt

SEQ ID NO: 10102 - DNA, 17 bp, Artificial Sequence
  source: /note="Description of Artificial Sequence: Synthetic oligonucleotide"
  source: /note="Description of Combined DNA/RNA Molecule: Synthetic oligonucleotide"
  source: /note="DNA/RNA"
  source: /note="5' tri-ethylene glycol (TEG)"
  modified_base (16)..(16): bicyclic nucleic acid (BNA)
  modified_base (17)..(17): bicyclic nucleic acid (BNA)
ucaaggaagauggcatt

SEQ ID NO: 10103 - RNA, 15 nt, Artificial Sequence
  source: /note="Description of Artificial Sequence: Synthetic oligonucleotide"
  source: /note="RNA"
  source: /note="5' tri-ethylene glycol (TEG)"
  modified_base (14)..(14): bicyclic nucleic acid (BNA)
  modified_base (15)..(15): bicyclic nucleic acid (BNA)
ucaaggaagauggca

SEQ ID NO: 10104 - RNA, 14 nt, Artificial Sequence
  source: /note="Description of Artificial Sequence: Synthetic oligonucleotide"
  source: /note="RNA"
  source: /note="5' tri-ethylene glycol (TEG)"
  modified_base (13)..(13): bicyclic nucleic acid (BNA)
  modified_base (14)..(14): bicyclic nucleic acid (BNA)
ucaaggaagauggc

SEQ ID NO: 10105 - RNA, 13 nt, Artificial Sequence
  source: /note="Description of Artificial Sequence: Synthetic oligonucleotide"
  source: /note="RNA"
  source: /note="5' tri-ethylene glycol (TEG)"
  modified_base (12)..(12): bicyclic nucleic acid (BNA)
  modified_base (13)..(13): bicyclic nucleic acid (BNA)
ucaaggaagaugg

SEQ ID NO: 10106 - DNA, 12 bp, Artificial Sequence
  source: /note="Description of Artificial Sequence: Synthetic oligonucleotide"
  source: /note="Description of Combined DNA/RNA Molecule: Synthetic oligonucleotide"
  source: /note="DNA/RNA"
  source: /note="5' tri-ethylene glycol (TEG)"
  modified_base (11)..(11): bicyclic nucleic acid (BNA)
  modified_base (12)..(12): bicyclic nucleic acid (BNA)
ucaaggaagatg

SEQ ID NO: 10107 - DNA, 11 bp, Artificial Sequence
  source: /note="Description of Artificial Sequence: Synthetic oligonucleotide"
  source: /note="Description of Combined DNA/RNA Molecule: Synthetic oligonucleotide"
  source: /note="DNA/RNA"
  source: /note="5' tri-ethylene glycol (TEG)"
  modified_base (10)..(10): bicyclic nucleic acid (BNA)
  modified_base (11)..(11): bicyclic nucleic acid (BNA)
ucaaggaagat

SEQ ID NO: 10108 - RNA, 10 nt, Artificial Sequence
  source: /note="Description of Artificial Sequence: Synthetic oligonucleotide"
  source: /note="RNA"
  source: /note="5' tri-ethylene glycol (TEG)"
  modified_base (9)..(9): bicyclic nucleic acid (BNA)
  modified_base (10)..(10): bicyclic nucleic acid (BNA)
ucaaggaaga

SEQ ID NO: 10109 - RNA, 9 nt, Artificial Sequence
  source: /note="Description of Artificial Sequence: Synthetic oligonucleotide"
  source: /note="RNA"
  source: /note="5' tri-ethylene glycol (TEG)"
  modified_base (8)..(8): bicyclic nucleic acid (BNA)
  modified_base (9)..(9): bicyclic nucleic acid (BNA)
ucaaggaag

SEQ ID NO: 10110 - RNA, 21 nt, Artificial Sequence
  source: /note="Description of Artificial Sequence: Synthetic oligonucleotide"
  source: /note="RNA"
  source: /note="5' tri-ethylene glycol (TEG)"
  modified_base (20)..(20): bicyclic nucleic acid (BNA)
  modified_base (21)..(21): bicyclic nucleic acid (BNA)
caaggaagauggcauuucuag

SEQ ID NO: 10111 - DNA, 20 bp, Artificial Sequence
  source: /note="Description of Artificial Sequence: Synthetic oligonucleotide"
  source: /note="Description of Combined DNA/RNA Molecule: Synthetic oligonucleotide"
  source: /note="DNA/RNA"
  source: /note="5' tri-ethylene glycol (TEG)"
  modified_base (19)..(19): bicyclic nucleic acid (BNA)
  modified_base (20)..(20): bicyclic nucleic acid (BNA)
caaggaagauggcauuucta

SEQ ID NO: 10112 - DNA, 19 bp, Artificial Sequence
  source: /note="Description of Artificial Sequence: Synthetic oligonucleotide"
  source: /note="Description of Combined DNA/RNA Molecule: Synthetic oligonucleotide"
  source: /note="DNA/RNA"
  source: /note="5' tri-ethylene glycol (TEG)"
  modified_base (18)..(18): bicyclic nucleic acid (BNA)
  modified_base (19)..(19): bicyclic nucleic acid (BNA)
caaggaagauggcauuuct

SEQ ID NO: 10113 - DNA, 18 bp, Artificial Sequence
  source: /note="Description of Artificial Sequence: Synthetic oligonucleotide"
  source: /note="Description of Combined DNA/RNA Molecule: Synthetic oligonucleotide"
  source: /note="DNA/RNA"
  source: /note="5' tri-ethylene glycol (TEG)"
  modified_base (17)..(17): bicyclic nucleic acid (BNA)
  modified_base (18)..(18): bicyclic nucleic acid (BNA)
caaggaagauggcauutc

SEQ ID NO: 10114 - DNA, 17 bp, Artificial Sequence
  source: /note="Description of Artificial Sequence: Synthetic oligonucleotide"
  source: /note="Description of Combined DNA/RNA Molecule: Synthetic oligonucleotide"
  source: /note="DNA/RNA"
  source: /note="5' tri-ethylene glycol (TEG)"
  modified_base (16)..(16): bicyclic nucleic acid (BNA)
  modified_base (17)..(17): bicyclic nucleic acid (BNA)
caaggaagauggcautt

SEQ ID NO: 10115 - DNA, 16 bp, Artificial Sequence
  source: /note="Description of Artificial Sequence: Synthetic oligonucleotide"
  source: /note="Description of Combined DNA/RNA Molecule: Synthetic oligonucleotide"
  source: /note="DNA/RNA"
  source: /note="5' tri-ethylene glycol (TEG)"
  modified_base (15)..(15): bicyclic nucleic acid (BNA)
  modified_base (16)..(16): bicyclic nucleic acid (BNA)
caaggaagauggcatt

SEQ ID NO: 10116 - DNA, 15 bp, Artificial Sequence
  source: /note="Description of Artificial Sequence: Synthetic oligonucleotide"
  source: /note="Description of Combined DNA/RNA Molecule: Synthetic oligonucleotide"
  source: /note="DNA/RNA"
  source: /note="5' tri-ethylene glycol (TEG)"
  modified_base (14)..(14): bicyclic nucleic acid (BNA)
  modified_base (15)..(15): bicyclic nucleic acid (BNA)
caaggaagauggcat

SEQ ID NO: 10117 - RNA, 14 nt, Artificial Sequence
  source: /note="Description of Artificial Sequence: Synthetic oligonucleotide"
  source: /note="RNA"
  source: /note="5' tri-ethylene glycol (TEG)"
  modified_base (13)..(13): bicyclic nucleic acid (BNA)
  modified_base (14)..(14): bicyclic nucleic acid (BNA)
caaggaagauggca

SEQ ID NO: 10118 - RNA, 13 nt, Artificial Sequence
  source: /note="Description of Artificial Sequence: Synthetic oligonucleotide"
  source: /note="RNA"
  source: /note="5' tri-ethylene glycol (TEG)"
  modified_base (12)..(12): bicyclic nucleic acid (BNA)
  modified_base (13)..(13): bicyclic nucleic acid (BNA)
caaggaagauggc

SEQ ID NO: 10119 - RNA, 12 nt, Artificial Sequence
  source: /note="Description of Artificial Sequence: Synthetic oligonucleotide"
  source: /note="RNA"
  source: /note="5' tri-ethylene glycol (TEG)"
  modified_base (11)..(11): bicyclic nucleic acid (BNA)
  modified_base (12)..(12): bicyclic nucleic acid (BNA)
caaggaagaugg

SEQ ID NO: 10120 - DNA, 11 bp, Artificial Sequence
  source: /note="Description of Artificial Sequence: Synthetic oligonucleotide"
  source: /note="DNA/RNA"
  source: /note="5' tri-ethylene glycol (TEG)"
  modified_base (10)..(10): bicyclic nucleic acid (BNA)
  modified_base (11)..(11): bicyclic nucleic acid (BNA)
caaggaagatg

SEQ ID NO: 10121 - DNA, 10 bp, Artificial Sequence
  source: /note="Description of Artificial Sequence: Synthetic oligonucleotide"
  source: /note="DNA/RNA"
  source: /note="5' tri-ethylene glycol (TEG)"
  modified_base (9)..(9): bicyclic nucleic acid (BNA)
  modified_base (10)..(10): bicyclic nucleic acid (BNA)
caaggaagat

SEQ ID NO: 10122 - RNA, 9 nt, Artificial Sequence
  source: /note="Description of Artificial Sequence: Synthetic oligonucleotide"
  source: /note="RNA/Antisense Oligonucleotide"
  source: /note="5' tri-ethylene glycol (TEG)"
  modified_base (8)..(8): bicyclic nucleic acid (BNA)
  modified_base (9)..(9): bicyclic nucleic acid (BNA)
caaggaaga

SEQ ID NO: 10123 - RNA, 8 nt, Artificial Sequence
  source: /note="Description of Artificial Sequence: Synthetic oligonucleotide"
  source: /note="RNA/Antisense Oligonucleotide"
  source: /note="5' tri-ethylene glycol (TEG)"
  modified_base (7)..(7): bicyclic nucleic acid (BNA)
  modified_base (8)..(8): bicyclic nucleic acid (BNA)
caaggaag

SEQ ID NO: 10124 - RNA, 20 nt, Artificial Sequence
  source: /note="Description of Artificial Sequence: Synthetic oligonucleotide"
  source: /note="RNA"
  source: /note="5' tri-ethylene glycol (TEG)"
  modified_base (19)..(19): bicyclic nucleic acid (BNA)
  modified_base (20)..(20): bicyclic nucleic acid (BNA)
aaggaagauggcauuucuag

SEQ ID NO: 10125 - DNA, 19 bp, Artificial Sequence
  source: /note="Description of Artificial Sequence: Synthetic oligonucleotide"
  source: /note="Description of Combined DNA/RNA Molecule: Synthetic oligonucleotide"
  source: /note="DNA/RNA"
  source: /note="5' tri-ethylene glycol (TEG)"
  modified_base (18)..(18): bicyclic nucleic acid (BNA)
  modified_base (19)..(19): bicyclic nucleic acid (BNA)
aaggaagauggcauuucta

SEQ ID NO: 10126 - DNA, 18 bp, Artificial Sequence
  source: /note="Description of Artificial Sequence: Synthetic oligonucleotide"
  source: /note="Description of Combined DNA/RNA Molecule: Synthetic oligonucleotide"
  source: /note="DNA/RNA"
  source: /note="5' tri-ethylene glycol (TEG)"
  modified_base (17)..(17): bicyclic nucleic acid (BNA)
  modified_base (18)..(18): bicyclic nucleic acid (BNA)
aaggaagauggcauuuct

SEQ ID NO: 10127 - DNA, 17 bp, Artificial Sequence
  source: /note="Description of Artificial Sequence: Synthetic oligonucleotide"
  source: /note="Description of Combined DNA/RNA Molecule: Synthetic oligonucleotide"
  source: /note="DNA/RNA"
  source: /note="5' tri-ethylene glycol (TEG)"
  modified_base (16)..(16): bicyclic nucleic acid (BNA)
  modified_base (17)..(17): bicyclic nucleic acid (BNA)
aaggaagauggcauutc

SEQ ID NO: 10128 - DNA, 16 bp, Artificial Sequence
  source: /note="Description of Artificial Sequence: Synthetic oligonucleotide"
  source: /note="Description of Combined DNA/RNA Molecule: Synthetic oligonucleotide"
  source: /note="DNA/RNA"
  source: /note="5' tri-ethylene glycol (TEG)"
  modified_base (15)..(15): bicyclic nucleic acid (BNA)
  modified_base (16)..(16): bicyclic nucleic acid (BNA)
aaggaagauggcautt

SEQ ID NO: 10129 - DNA, 15 bp, Artificial Sequence
  source: /note="Description of Artificial Sequence: Synthetic oligonucleotide"
  source: /note="Description of Combined DNA/RNA Molecule: Synthetic oligonucleotide"
  source: /note="DNA/RNA"
  source: /note="5' tri-ethylene glycol (TEG)"
  modified_base (14)..(14): bicyclic nucleic acid (BNA)
  modified_base (15)..(15): bicyclic nucleic acid (BNA)
aaggaagauggcatt

SEQ ID NO: 10130 - DNA, 14 bp, Artificial Sequence
  source: /note="Description of Artificial Sequence: Synthetic oligonucleotide"
  source: /note="Description of Combined DNA/RNA Molecule: Synthetic oligonucleotide"
  source: /note="DNA/RNA"
  source: /note="5' tri-ethylene glycol (TEG)"
  modified_base (13)..(13): bicyclic nucleic acid (BNA)
  modified_base (14)..(14): bicyclic nucleic acid (BNA)
aaggaagauggcat

SEQ ID NO: 10131 - RNA, 13 nt, Artificial Sequence
  source: /note="Description of Artificial Sequence: Synthetic oligonucleotide"
  source: /note="RNA"
  source: /note="5' tri-ethylene glycol (TEG)"
  modified_base (12)..(12): bicyclic nucleic acid (BNA)
  modified_base (13)..(13): bicyclic nucleic acid (BNA)
aaggaagauggca

SEQ ID NO: 10132 - RNA, 12 nt, Artificial Sequence
  source: /note="Description of Artificial Sequence: Synthetic oligonucleotide"
  source: /note="RNA"
  source: /note="5' tri-ethylene glycol (TEG)"
  modified_base (11)..(11): bicyclic nucleic acid (BNA)
  modified_base (12)..(12): bicyclic nucleic acid (BNA)
aaggaagauggc

SEQ ID NO: 10133 - RNA, 11 nt, Artificial Sequence
  source: /note="Description of Artificial Sequence: Synthetic oligonucleotide"
  source: /note="RNA"
  source: /note="5' tri-ethylene glycol (TEG)"
  modified_base (10)..(10): bicyclic nucleic acid (BNA)
  modified_base (11)..(11): bicyclic nucleic acid (BNA)
aaggaagaugg

SEQ ID NO: 10134 - DNA, 10 bp, Artificial Sequence
  source: /note="Description of Artificial Sequence: Synthetic oligonucleotide"
  source: /note="DNA/RNA"
  source: /note="5' tri-ethylene glycol (TEG)"
  modified_base (9)..(9): bicyclic nucleic acid (BNA)
  modified_base (10)..(10): bicyclic nucleic acid (BNA)
aaggaagatg

SEQ ID NO: 10135 - DNA, 9 bp, Artificial Sequence
  source: /note="Description of Artificial Sequence: Synthetic oligonucleotide"
  source: /note="DNA/RNA"
  source: /note="5' tri-ethylene glycol (TEG)"
  modified_base (8)..(8): bicyclic nucleic acid (BNA)
  modified_base (9)..(9): bicyclic nucleic acid (BNA)
aaggaagat

SEQ ID NO: 10136 - RNA, 8 nt, Artificial Sequence
  source: /note="Description of Artificial Sequence: Synthetic oligonucleotide"
  source: /note="RNA/Antisense Oligonucleotide"
  source: /note="5' tri-ethylene glycol (TEG)"
  modified_base (7)..(7): bicyclic nucleic acid (BNA)
  modified_base (8)..(8): bicyclic nucleic acid (BNA)
aaggaaga

SEQ ID NO: 10137 - RNA, 19 nt, Artificial Sequence
  source: /note="Description of Artificial Sequence: Synthetic oligonucleotide"
  source: /note="RNA"
  source: /note="5' tri-ethylene glycol (TEG)"
  modified_base (18)..(18): bicyclic nucleic acid (BNA)
  modified_base (19)..(19): bicyclic nucleic acid (BNA)
aggaagauggcauuucuag

SEQ ID NO: 10138 - DNA, 18 bp, Artificial Sequence
  source: /note="Description of Artificial Sequence: Synthetic oligonucleotide"
  source: /note="Description of Combined DNA/RNA Molecule: Synthetic oligonucleotide"
  source: /note="DNA/RNA"
  source: /note="5' tri-ethylene glycol (TEG)"
  modified_base (17)..(17): bicyclic nucleic acid (BNA)
  modified_base (18)..(18): bicyclic nucleic acid (BNA)
aggaagauggcauuucta

SEQ ID NO: 10139 - DNA, 17 bp, Artificial Sequence
  source: /note="Description of Artificial Sequence: Synthetic oligonucleotide"
  source: /note="Description of Combined DNA/RNA Molecule: Synthetic oligonucleotide"
  source: /note="DNA/RNA"
  source: /note="5' tri-ethylene glycol (TEG)"
  modified_base (16)..(16): bicyclic nucleic acid (BNA)
  modified_base (17)..(17): bicyclic nucleic acid (BNA)
aggaagauggcauuuct

SEQ ID NO: 10140 - DNA, 16 bp, Artificial Sequence
  source: /note="Description of Artificial Sequence: Synthetic oligonucleotide"
  source: /note="Description of Combined DNA/RNA Molecule: Synthetic oligonucleotide"
  source: /note="DNA/RNA"
  source: /note="5' tri-ethylene glycol (TEG)"
  modified_base (15)..(15): bicyclic nucleic acid (BNA)
  modified_base (16)..(16): bicyclic nucleic acid (BNA)
aggaagauggcauutc

SEQ ID NO: 10141 - DNA, 15 bp, Artificial Sequence
  source: /note="Description of Artificial Sequence: Synthetic oligonucleotide"
  source: /note="Description of Combined DNA/RNA Molecule: Synthetic oligonucleotide"
  source: /note="DNA/RNA"
  source: /note="5' tri-ethylene glycol (TEG)"
  modified_base (14)..(14): bicyclic nucleic acid (BNA)
  modified_base (15)..(15): bicyclic nucleic acid (BNA)
aggaagauggcautt

SEQ ID NO: 10142 - DNA, 14 bp, Artificial Sequence
  source: /note="Description of Artificial Sequence: Synthetic oligonucleotide"
  source: /note="Description of Combined DNA/RNA Molecule: Synthetic oligonucleotide"
  source: /note="DNA/RNA"
  source: /note="5' tri-ethylene glycol (TEG)"
  modified_base (13)..(13): bicyclic nucleic acid (BNA)
  modified_base (14)..(14): bicyclic nucleic acid (BNA)
aggaagauggcatt

SEQ ID NO: 10143 - DNA, 13 bp, Artificial Sequence
  source: /note="Description of Artificial Sequence: Synthetic oligonucleotide"
  source: /note="Description of Combined DNA/RNA Molecule: Synthetic oligonucleotide"
  source: /note="DNA/RNA"
  source: /note="5' tri-ethylene glycol (TEG)"
  modified_base (12)..(12): bicyclic nucleic acid (BNA)
  modified_base (13)..(13): bicyclic nucleic acid (BNA)
aggaagauggcat

SEQ ID NO: 10144 - RNA, 12 nt, Artificial Sequence
  source: /note="Description of Artificial Sequence: Synthetic oligonucleotide"
  source: /note="RNA"
  source: /note="5' tri-ethylene glycol (TEG)"
  modified_base (11)..(11): bicyclic nucleic acid (BNA)
  modified_base (12)..(12): bicyclic nucleic acid (BNA)
aggaagauggca

SEQ ID NO: 10145 - RNA, 10 nt, Artificial Sequence
  source: /note="Description of Artificial Sequence: Synthetic oligonucleotide"
  source: /note="RNA"
  source: /note="5' tri-ethylene glycol (TEG)"
  modified_base (9)..(9): bicyclic nucleic acid (BNA)
  modified_base (10)..(10): bicyclic nucleic acid (BNA)
aggaagaugg

SEQ ID NO: 10146 - DNA, 9 bp, Artificial Sequence
  source: /note="Description of Artificial Sequence: Synthetic oligonucleotide"
  source: /note="DNA/RNA"
  source: /note="5' tri-ethylene glycol (TEG)"
  modified_base (8)..(8): bicyclic nucleic acid (BNA)
  modified_base (9)..(9): bicyclic nucleic acid (BNA)
aggaagatg

SEQ ID NO: 10147 - DNA, 8 bp, Artificial Sequence
  source: /note="Description of Artificial Sequence: Synthetic oligonucleotide"
  source: /note="DNA/RNA"
  source: /note="5' tri-ethylene glycol (TEG)"
  modified_base (7)..(7): bicyclic nucleic acid (BNA)
  modified_base (8)..(8): bicyclic nucleic acid (BNA)
aggaagat

SEQ ID NO: 10148 - RNA, 18 nt, Artificial Sequence
  source: /note="Description of Artificial Sequence: Synthetic oligonucleotide"
  source: /note="RNA"
  source: /note="5' tri-ethylene glycol (TEG)"
  modified_base (17)..(17): bicyclic nucleic acid (BNA)
  modified_base (18)..(18): bicyclic nucleic acid (BNA)
ggaagauggcauuucuag

SEQ ID NO: 10149 - DNA, 17 bp, Artificial Sequence
  source: /note="Description of Artificial Sequence: Synthetic oligonucleotide"
  source: /note="Description of Combined DNA/RNA Molecule: Synthetic oligonucleotide"
  source: /note="DNA/RNA"
  source: /note="5' tri-ethylene glycol (TEG)"
  modified_base (16)..(16): bicyclic nucleic acid (BNA)
  modified_base (17)..(17): bicyclic nucleic acid (BNA)
ggaagauggcauuucta

SEQ ID NO: 10150 - DNA, 16 bp, Artificial Sequence
  source: /note="Description of Artificial Sequence: Synthetic oligonucleotide"
  source: /note="Description of Combined DNA/RNA Molecule: Synthetic oligonucleotide"
  source: /note="DNA/RNA"
  source: /note="5' tri-ethylene glycol (TEG)"
  modified_base (15)..(15): bicyclic nucleic acid (BNA)
  modified_base (16)..(16): bicyclic nucleic acid (BNA)
ggaagauggcauuuct

SEQ ID NO: 10151 - DNA, 15 bp, Artificial Sequence
  source: /note="Description of Artificial Sequence: Synthetic oligonucleotide"
  source: /note="Description of Combined DNA/RNA Molecule: Synthetic oligonucleotide"
  source: /note="DNA/RNA"
  source: /note="5' tri-ethylene glycol (TEG)"
  modified_base (14)..(14): bicyclic nucleic acid (BNA)
  modified_base (15)..(15): bicyclic nucleic acid (BNA)
ggaagauggcauutc

SEQ ID NO: 10152 - DNA, 14 bp, Artificial Sequence
  source: /note="Description of Artificial Sequence: Synthetic oligonucleotide"
  source: /note="Description of Combined DNA/RNA Molecule: Synthetic oligonucleotide"
  source: /note="DNA/RNA"
  source: /note="5' tri-ethylene glycol (TEG)"
  modified_base (13)..(13): bicyclic nucleic acid (BNA)
  modified_base (14)..(14): bicyclic nucleic acid (BNA)
ggaagauggcautt

SEQ ID NO: 10153 - DNA, 13 bp, Artificial Sequence
  source: /note="Description of Artificial Sequence: Synthetic oligonucleotide"
  source: /note="Description of Combined DNA/RNA Molecule: Synthetic oligonucleotide"
  source: /note="DNA/RNA"
  source: /note="5' tri-ethylene glycol (TEG)"
  modified_base (12)..(12): bicyclic nucleic acid (BNA)
  modified_base (13)..(13): bicyclic nucleic acid (BNA)
ggaagauggcatt

SEQ ID NO: 10154 - DNA, 12 bp, Artificial Sequence
  source: /note="Description of Artificial Sequence: Synthetic oligonucleotide"
  source: /note="Description of Combined DNA/RNA Molecule: Synthetic oligonucleotide"
  source: /note="DNA/RNA"
  source: /note="5' tri-ethylene glycol (TEG)"
  modified_base (11)..(11): bicyclic nucleic acid (BNA)
  modified_base (12)..(12): bicyclic nucleic acid (BNA)
ggaagauggcat

SEQ ID NO: 10155 - RNA, 11 nt, Artificial Sequence
  source: /note="Description of Artificial Sequence: Synthetic oligonucleotide"
  source: /note="RNA"
  source: /note="5' tri-ethylene glycol (TEG)"
  modified_base (10)..(10): bicyclic nucleic acid (BNA)
  modified_base (11)..(11): bicyclic nucleic acid (BNA)
ggaagauggca

SEQ ID NO: 10156 - RNA, 10 nt, Artificial Sequence
  source: /note="Description of Artificial Sequence: Synthetic oligonucleotide"
  source: /note="RNA"
  source: /note="5' tri-ethylene glycol (TEG)"
  modified_base (9)..(9): bicyclic nucleic acid (BNA)
  modified_base (10)..(10): bicyclic nucleic acid (BNA)
ggaagauggc

SEQ ID NO: 10157 - DNA, 8 bp, Artificial Sequence
  source: /note="Description of Artificial Sequence: Synthetic oligonucleotide"
  source: /note="DNA/RNA"
  source: /note="5' tri-ethylene glycol (TEG)"
  modified_base (7)..(7): bicyclic nucleic acid (BNA)
  modified_base (8)..(8): bicyclic nucleic acid (BNA)
ggaagatg

SEQ ID NO: 10158 - RNA, 17 nt, Artificial Sequence
  source: /note="Description of Artificial Sequence: Synthetic oligonucleotide"
  source: /note="RNA"
  source: /note="5' tri-ethylene glycol (TEG)"
  modified_base (16)..(16): bicyclic nucleic acid (BNA)
  modified_base (17)..(17): bicyclic nucleic acid (BNA)
gaagauggcauuucuag

SEQ ID NO: 10159 - DNA, 16 bp, Artificial Sequence
  source: /note="Description of Artificial Sequence: Synthetic oligonucleotide"
  source: /note="Description of Combined DNA/RNA Molecule: Synthetic oligonucleotide"
  source: /note="DNA/RNA"
  source: /note="5' tri-ethylene glycol (TEG)"
  modified_base (15)..(15): bicyclic nucleic acid (BNA)
  modified_base (16)..(16): bicyclic nucleic acid (BNA)
gaagauggcauuucta

SEQ ID NO: 10160 - DNA, 14 bp, Artificial Sequence
  source: /note="Description of Artificial Sequence: Synthetic oligonucleotide"
  source: /note="Description of Combined DNA/RNA Molecule: Synthetic oligonucleotide"
  source: /note="DNA/RNA"
  source: /note="5' tri-ethylene glycol (TEG)"
  modified_base (13)..(13): bicyclic nucleic acid (BNA)
  modified_base (14)..(14): bicyclic nucleic acid (BNA)
gaagauggcauutc

SEQ ID NO: 10161 - DNA, 13 bp, Artificial Sequence
  source: /note="Description of Artificial Sequence: Synthetic oligonucleotide"
  source: /note="Description of Combined DNA/RNA Molecule: Synthetic oligonucleotide"
  source: /note="DNA/RNA"
  source: /note="5' tri-ethylene glycol (TEG)"
  modified_base (12)..(12): bicyclic nucleic acid (BNA)
  modified_base (13)..(13): bicyclic nucleic acid (BNA)
gaagauggcautt

SEQ ID NO: 10162 - DNA, 12 bp, Artificial Sequence
  source: /note="Description of Artificial Sequence: Synthetic oligonucleotide"
  source: /note="Description of Combined DNA/RNA Molecule: Synthetic oligonucleotide"
  source: /note="DNA/RNA"
  source: /note="5' tri-ethylene glycol (TEG)"
  modified_base (11)..(11): bicyclic nucleic acid (BNA)
  modified_base (12)..(12): bicyclic nucleic acid (BNA)
gaagauggcatt

SEQ ID NO: 10163 - DNA, 11 bp, Artificial Sequence
  source: /note="Description of Artificial Sequence: Synthetic oligonucleotide"
  source: /note="Description of Combined DNA/RNA Molecule: Synthetic oligonucleotide"
  source: /note="DNA/RNA"
  source: /note="5' tri-ethylene glycol (TEG)"
  modified_base (10)..(10): bicyclic nucleic acid (BNA)
  modified_base (11)..(11): bicyclic nucleic acid (BNA)
gaagauggcat

SEQ ID NO: 10164 - RNA, 10 nt, Artificial Sequence
  source: /note="Description of Artificial Sequence: Synthetic oligonucleotide"
  source: /note="RNA"
  source: /note="5' tri-ethylene glycol (TEG)"
  modified_base (9)..(9): bicyclic nucleic acid (BNA)
  modified_base (10)..(10): bicyclic nucleic acid (BNA)
gaagauggca

SEQ ID NO: 10165 - RNA, 9 nt, Artificial Sequence
  source: /note="Description of Artificial Sequence: Synthetic oligonucleotide"
  source: /note="RNA"
  source: /note="5' tri-ethylene glycol (TEG)"
  modified_base (8)..(8): bicyclic nucleic acid (BNA)
  modified_base (9)..(9): bicyclic nucleic acid (BNA)
gaagauggc

SEQ ID NO: 10166 - RNA, 8 nt, Artificial Sequence
  source: /note="Description of Artificial Sequence: Synthetic oligonucleotide"
  source: /note="RNA"
  source: /note="5' tri-ethylene glycol (TEG)"
  modified_base (7)..(7): bicyclic nucleic acid (BNA)
  modified_base (8)..(8): bicyclic nucleic acid (BNA)
gaagaugg

SEQ ID NO: 10167 - RNA, 16 nt, Artificial Sequence
  source: /note="Description of Artificial Sequence: Synthetic oligonucleotide"
  source: /note="RNA"
  source: /note="5' tri-ethylene glycol (TEG)"
  modified_base (15)..(15): bicyclic nucleic acid (BNA)
  modified_base (16)..(16): bicyclic nucleic acid (BNA)
aagauggcauuucuag

SEQ ID NO: 10168 - DNA, 15 bp, Artificial Sequence
  source: /note="Description of Artificial Sequence: Synthetic oligonucleotide"
  source: /note="Description of Combined DNA/RNA Molecule: Synthetic oligonucleotide"
  source: /note="DNA/RNA"
  source: /note="5' tri-ethylene glycol (TEG)"
  modified_base (14)..(14): bicyclic nucleic acid (BNA)
  modified_base (15)..(15): bicyclic nucleic acid (BNA)
aagauggcauuucta

SEQ ID NO: 10169 - DNA, 14 bp, Artificial Sequence
  source: /note="Description of Artificial Sequence: Synthetic oligonucleotide"
  source: /note="Description of Combined DNA/RNA Molecule: Synthetic oligonucleotide"
  source: /note="DNA/RNA"
  source: /note="5' tri-ethylene glycol (TEG)"
  modified_base (13)..(13): bicyclic nucleic acid (BNA)
  modified_base (14)..(14): bicyclic nucleic acid (BNA)
aagauggcauuuct

SEQ ID NO: 10170 - DNA, 13 bp, Artificial Sequence
  source: /note="Description of Artificial Sequence: Synthetic oligonucleotide"
  source: /note="Description of Combined DNA/RNA Molecule: Synthetic oligonucleotide"
  source: /note="DNA/RNA"
  source: /note="5' tri-ethylene glycol (TEG)"
  modified_base (12)..(12): bicyclic nucleic acid (BNA)
  modified_base (13)..(13): bicyclic nucleic acid (BNA)
aagauggcauutc

SEQ ID NO: 10171 - DNA, 12 bp, Artificial Sequence
  source: /note="Description of Artificial Sequence: Synthetic oligonucleotide"
  source: /note="Description of Combined DNA/RNA Molecule: Synthetic oligonucleotide"
  source: /note="DNA/RNA"
  source: /note="5' tri-ethylene glycol (TEG)"
  modified_base (11)..(11): bicyclic nucleic acid (BNA)
  modified_base (12)..(12): bicyclic nucleic acid (BNA)
aagauggcautt

SEQ ID NO: 10172 - DNA, 11 bp, Artificial Sequence
  source: /note="Description of Artificial Sequence: Synthetic oligonucleotide"
  source: /note="Description of Combined DNA/RNA Molecule: Synthetic oligonucleotide"
  source: /note="DNA/RNA"
  source: /note="5' tri-ethylene glycol (TEG)"
  modified_base (10)..(10): bicyclic nucleic acid (BNA)
  modified_base (11)..(11): bicyclic nucleic acid (BNA)
aagauggcatt

SEQ ID NO: 10173 - DNA, 10 bp, Artificial Sequence
  source: /note="Description of Artificial Sequence: Synthetic oligonucleotide"
  source: /note="Description of Combined DNA/RNA Molecule: Synthetic oligonucleotide"
  source: /note="DNA/RNA"
  source: /note="5' tri-ethylene glycol (TEG)"
  modified_base (9)..(9): bicyclic nucleic acid (BNA)
  modified_base (10)..(10): bicyclic nucleic acid (BNA)
aagauggcat

SEQ ID NO: 10174 - RNA, 9 nt, Artificial Sequence
  source: /note="Description of Artificial Sequence: Synthetic oligonucleotide"
  source: /note="RNA"
  source: /note="5' tri-ethylene glycol (TEG)"
  modified_base (8)..(8): bicyclic nucleic acid (BNA)
  modified_base (9)..(9): bicyclic nucleic acid (BNA)
aagauggca

SEQ ID NO: 10175 - RNA, 8 nt, Artificial Sequence
  source: /note="Description of Artificial Sequence: Synthetic oligonucleotide"
  source: /note="RNA"
  source: /note="5' tri-ethylene glycol (TEG)"
  modified_base (7)..(7): bicyclic nucleic acid (BNA)
  modified_base (8)..(8): bicyclic nucleic acid (BNA)
aagauggc

SEQ ID NO: 10176 - RNA, 15 nt, Artificial Sequence
  source: /note="Description of Artificial Sequence: Synthetic oligonucleotide"
  source: /note="RNA"
  source: /note="5' tri-ethylene glycol (TEG)"
  modified_base (14)..(14): bicyclic nucleic acid (BNA)
  modified_base (15)..(15): bicyclic nucleic acid (BNA)
agauggcauuucuag

SEQ ID NO: 10177 - DNA, 14 bp, Artificial Sequence
  source: /note="Description of Artificial Sequence: Synthetic oligonucleotide"
  source: /note="Description of Combined DNA/RNA Molecule: Synthetic oligonucleotide"
  source: /note="DNA/RNA"
  source: /note="5' tri-ethylene glycol (TEG)"
  modified_base (13)..(13): bicyclic nucleic acid (BNA)
  modified_base (14)..(14): bicyclic nucleic acid (BNA)
agauggcauuucta

SEQ ID NO: 10178 - DNA, 13 bp, Artificial Sequence
  source: /note="Description of Artificial Sequence: Synthetic oligonucleotide"
  source: /note="Description of Combined DNA/RNA Molecule: Synthetic oligonucleotide"
  source: /note="DNA/RNA"
  source: /note="5' tri-ethylene glycol (TEG)"
  modified_base (12)..(12): bicyclic nucleic acid (BNA)
  modified_base (13)..(13): bicyclic nucleic acid (BNA)
agauggcauuuct

SEQ ID NO: 10179 - DNA, 12 bp, Artificial Sequence
  source: /note="Description of Artificial Sequence: Synthetic oligonucleotide"
  source: /note="Description of Combined DNA/RNA Molecule: Synthetic oligonucleotide"
  source: /note="DNA/RNA"
  source: /note="5' tri-ethylene glycol (TEG)"
  modified_base (11)..(11): bicyclic nucleic acid (BNA)
  modified_base (12)..(12): bicyclic nucleic acid (BNA)
agauggcauutc

SEQ ID NO: 10180 - DNA, 11 bp, Artificial Sequence
  source: /note="Description of Artificial Sequence: Synthetic oligonucleotide"
  source: /note="Description of Combined DNA/RNA Molecule: Synthetic oligonucleotide"
  source: /note="DNA/RNA"
  source: /note="5' tri-ethylene glycol (TEG)"
  modified_base (10)..(10): bicyclic nucleic acid (BNA)
  modified_base (11)..(11): bicyclic nucleic acid (BNA)
agauggcautt

SEQ ID NO: 10181 - DNA, 10 bp, Artificial Sequence
  source: /note="Description of Artificial Sequence: Synthetic oligonucleotide"
  source: /note="Description of Combined DNA/RNA Molecule: Synthetic oligonucleotide"
  source: /note="DNA/RNA"
  source: /note="5' tri-ethylene glycol (TEG)"
  modified_base (9)..(9): bicyclic nucleic acid (BNA)
  modified_base (10)..(10): bicyclic nucleic acid (BNA)
agauggcatt

SEQ ID NO: 10182 - DNA, 9 bp, Artificial Sequence
  source: /note="Description of Artificial Sequence: Synthetic oligonucleotide"
  source: /note="Description of Combined DNA/RNA Molecule: Synthetic oligonucleotide"
  source: /note="DNA/RNA"
  source: /note="5' tri-ethylene glycol (TEG)"
  modified_base (8)..(8): bicyclic nucleic acid (BNA)
  modified_base (9)..(9): bicyclic nucleic acid (BNA)
agauggcat

SEQ ID NO: 10183 - RNA, 8 nt, Artificial Sequence
  source: /note="Description of Artificial Sequence: Synthetic oligonucleotide"
  source: /note="RNA"
  source: /note="5' tri-ethylene glycol (TEG)"
  modified_base (7)..(7): bicyclic nucleic acid (BNA)
  modified_base (8)..(8): bicyclic nucleic acid (BNA)
agauggca

SEQ ID NO: 10184 - RNA, 30 nt, Artificial Sequence; identical to SEQ ID NO: 284
  source: /note="Description of Artificial Sequence: Synthetic oligonucleotide"
  source: /note="RNA"
  source: /note="5' tri-ethylene glycol (TEG)"
  modified_base (29)..(29): bicyclic nucleic acid (BNA)
  modified_base (30)..(30): bicyclic nucleic acid (BNA)

SEQ ID NO: 10185 - DNA, 29 bp, Artificial Sequence
  source: /note="Description of Artificial Sequence: Synthetic oligonucleotide"
  source: /note="Description of Combined DNA/RNA Molecule: Synthetic oligonucleotide"
  source: /note="DNA/RNA"
  source: /note="5' tri-ethylene glycol (TEG)"
  modified_base (28)..(28): bicyclic nucleic acid (BNA)
  modified_base (29)..(29): bicyclic nucleic acid (BNA)
cuccaacaucaaggaagauggcauuucta

SEQ ID NO: 10186 - DNA, 28 bp, Artificial Sequence
  source: /note="Description of Artificial Sequence: Synthetic oligonucleotide"
  source: /note="Description of Combined DNA/RNA Molecule: Synthetic oligonucleotide"
  source: /note="DNA/RNA"
  source: /note="5' tri-ethylene glycol (TEG)"
  modified_base (27)..(27): bicyclic nucleic acid (BNA)
  modified_base (28)..(28): bicyclic nucleic acid (BNA)
cuccaacaucaaggaagauggcauuuct

SEQ ID NO: 10187 - DNA, 27 bp, Artificial Sequence
  source: /note="Description of Artificial Sequence: Synthetic oligonucleotide"
  source: /note="Description of Combined DNA/RNA Molecule: Synthetic oligonucleotide"
  source: /note="DNA/RNA"
  source: /note="5' tri-ethylene glycol (TEG)"
  modified_base (26)..(26): bicyclic nucleic acid (BNA)
  modified_base (27)..(27): bicyclic nucleic acid (BNA)
cuccaacaucaaggaagauggcauutc

SEQ ID NO: 10188 - DNA, 26 bp, Artificial Sequence
  source: /note="Description of Artificial Sequence: Synthetic oligonucleotide"
  source: /note="Description of Combined DNA/RNA Molecule: Synthetic oligonucleotide"
  source: /note="DNA/RNA"
  source: /note="5' tri-ethylene glycol (TEG)"
  modified_base (25)..(25): bicyclic nucleic acid (BNA)
  modified_base (26)..(26): bicyclic nucleic acid (BNA)
cuccaacaucaaggaagauggcautt

SEQ ID NO: 10189 - DNA, 25 bp, Artificial Sequence
  source: /note="Description of Artificial Sequence: Synthetic oligonucleotide"
  source: /note="Description of Combined DNA/RNA Molecule: Synthetic oligonucleotide"
  source: /note="DNA/RNA"
  source: /note="5' tri-ethylene glycol (TEG)"
  modified_base (24)..(24): bicyclic nucleic acid (BNA)
  modified_base (25)..(25): bicyclic nucleic acid (BNA)
cuccaacaucaaggaagauggcatt

SEQ ID NO: 10190 - DNA, 24 bp, Artificial Sequence
  source: /note="Description of Artificial Sequence: Synthetic oligonucleotide"
  source: /note="Description of Combined DNA/RNA Molecule: Synthetic oligonucleotide"
  source: /note="DNA/RNA"
  source: /note="5' tri-ethylene glycol (TEG)"
  modified_base (23)..(23): bicyclic nucleic acid (BNA)
  modified_base (24)..(24): bicyclic nucleic acid (BNA)
cuccaacaucaaggaagauggcat

SEQ ID NO: 10191 - RNA, 23 nt, Artificial Sequence
  source: /note="Description of Artificial Sequence: Synthetic oligonucleotide"
  source: /note="RNA"
  source: /note="5' tri-ethylene glycol (TEG)"
  modified_base (22)..(22): bicyclic nucleic acid (BNA)
  modified_base (23)..(23): bicyclic nucleic acid (BNA)
cuccaacaucaaggaagauggca

SEQ ID NO: 10192 - RNA, 22 nt, Artificial Sequence
  source: /note="Description of Artificial Sequence: Synthetic oligonucleotide"
  source: /note="RNA"
  source: /note="5' tri-ethylene glycol (TEG)"
  modified_base (21)..(21): bicyclic nucleic acid (BNA)
  modified_base (22)..(22): bicyclic nucleic acid (BNA)
cuccaacaucaaggaagauggc

SEQ ID NO: 10193 - RNA, 21 nt, Artificial Sequence
  source: /note="Description of Artificial Sequence: Synthetic oligonucleotide"
  source: /note="RNA"
  source: /note="5' tri-ethylene glycol (TEG)"
  modified_base (20)..(20): bicyclic nucleic acid (BNA)
  modified_base (21)..(21): bicyclic nucleic acid (BNA)
cuccaacaucaaggaagaugg

SEQ ID NO: 10194 - DNA, 20 bp, Artificial Sequence
  source: /note="Description of Artificial Sequence: Synthetic oligonucleotide"
  source: /note="Description of Combined DNA/RNA Molecule: Synthetic oligonucleotide"
  source: /note="DNA/RNA"
  source: /note="5' tri-ethylene glycol (TEG)"
  modified_base (19)..(19): bicyclic nucleic acid (BNA)
  modified_base (20)..(20): bicyclic nucleic acid (BNA)
cuccaacaucaaggaagatg

SEQ ID NO: 10195 - DNA, 19 bp, Artificial Sequence
  source: /note="Description of Artificial Sequence: Synthetic oligonucleotide"
  source: /note="Description of Combined DNA/RNA Molecule: Synthetic oligonucleotide"
  source: /note="DNA/RNA"
  source: /note="5' tri-ethylene glycol (TEG)"
  modified_base (18)..(18): bicyclic nucleic acid (BNA)
  modified_base (19)..(19): bicyclic nucleic acid (BNA)
cuccaacaucaaggaagat

SEQ ID NO: 10196 - RNA, 18 nt, Artificial Sequence
  source: /note="Description of Artificial Sequence: Synthetic oligonucleotide"
  source: /note="RNA"
  source: /note="5' tri-ethylene glycol (TEG)"
  modified_base (17)..(17): bicyclic nucleic acid (BNA)
  modified_base (18)..(18): bicyclic nucleic acid (BNA)
cuccaacaucaaggaaga

SEQ ID NO: 10197 - RNA, 17 nt, Artificial Sequence
  source: /note="Description of Artificial Sequence: Synthetic oligonucleotide"
  source: /note="RNA"
  source: /note="5' tri-ethylene glycol (TEG)"
  modified_base (16)..(16): bicyclic nucleic acid (BNA)
  modified_base (17)..(17): bicyclic nucleic acid (BNA)
cuccaacaucaaggaag

SEQ ID NO: 10198 - RNA, 29 nt, Artificial Sequence
  source: /note="Description of Artificial Sequence: Synthetic oligonucleotide"
  source: /note="RNA"
  source: /note="5' tri-ethylene glycol (TEG)"
  modified_base (28)..(28): bicyclic nucleic acid (BNA)
  modified_base (29)..(29): bicyclic nucleic acid (BNA)
uccaacaucaaggaagauggcauuucuag

SEQ ID NO: 10199 - DNA, 28 bp, Artificial Sequence
  source: /note="Description of Artificial Sequence: Synthetic oligonucleotide"
  source: /note="Description of Combined DNA/RNA Molecule: Synthetic oligonucleotide"
  source: /note="DNA/RNA"
  source: /note="5' tri-ethylene glycol (TEG)"
  modified_base (27)..(27): bicyclic nucleic acid (BNA)
  modified_base (28)..(28): bicyclic nucleic acid (BNA)
uccaacaucaaggaagauggcauuucta

SEQ ID NO: 10200 - DNA, 27 bp, Artificial Sequence
  source: /note="Description of Artificial Sequence: Synthetic oligonucleotide"
  source: /note="Description of Combined DNA/RNA Molecule: Synthetic oligonucleotide"
  source: /note="DNA/RNA"
  source: /note="5' tri-ethylene glycol (TEG)"
  modified_base (26)..(26): bicyclic nucleic acid (BNA)
  modified_base (27)..(27): bicyclic nucleic acid (BNA)
uccaacaucaaggaagauggcauuuct

SEQ ID NO: 10201 - DNA, 26 bp, Artificial Sequence
  source: /note="Description of Artificial Sequence: Synthetic oligonucleotide"
  source: /note="Description of Combined DNA/RNA Molecule: Synthetic oligonucleotide"
  source: /note="DNA/RNA"
  source: /note="5' tri-ethylene glycol (TEG)"
  modified_base (25)..(25): bicyclic nucleic acid (BNA)
  modified_base (26)..(26): bicyclic nucleic acid (BNA)
uccaacaucaaggaagauggcauutc

SEQ ID NO: 10202 - DNA, 25 bp, Artificial Sequence
  source: /note="Description of Artificial Sequence: Synthetic oligonucleotide"
  source: /note="Description of Combined DNA/RNA Molecule: Synthetic oligonucleotide"
  source: /note="DNA/RNA"
  source: /note="5' tri-ethylene glycol (TEG)"
  modified_base (24)..(24): bicyclic nucleic acid (BNA)
  modified_base (25)..(25): bicyclic nucleic acid (BNA)
uccaacaucaaggaagauggcautt

SEQ ID NO: 10203 - DNA, 24 bp, Artificial Sequence
  source: /note="Description of Artificial Sequence: Synthetic oligonucleotide"
  source: /note="Description of Combined DNA/RNA Molecule: Synthetic oligonucleotide"
  source: /note="DNA/RNA"
  source: /note="5' tri-ethylene glycol (TEG)"
  modified_base (23)..(23): bicyclic nucleic acid (BNA)
  modified_base (24)..(24): bicyclic nucleic acid (BNA)
uccaacaucaaggaagauggcatt

SEQ ID NO: 10204 - DNA, 23 bp, Artificial Sequence
  source: /note="Description of Artificial Sequence: Synthetic oligonucleotide"
  source: /note="Description of Combined DNA/RNA Molecule: Synthetic oligonucleotide"
  source: /note="DNA/RNA"
  source: /note="5' tri-ethylene glycol (TEG)"
  modified_base (22)..(22): bicyclic nucleic acid (BNA)
  modified_base (23)..(23): bicyclic nucleic acid (BNA)
uccaacaucaaggaagauggcat

SEQ ID NO: 10205 - RNA, 22 nt, Artificial Sequence
  source: /note="Description of Artificial Sequence: Synthetic oligonucleotide"
  source: /note="RNA"
  source: /note="5' tri-ethylene glycol (TEG)"
  modified_base (21)..(21): bicyclic nucleic acid (BNA)
  modified_base (22)..(22): bicyclic nucleic acid (BNA)
uccaacaucaaggaagauggca

SEQ ID NO: 10206 - RNA, 21 nt, Artificial Sequence
  source: /note="Description of Artificial Sequence: Synthetic oligonucleotide"
  source: /note="RNA"
  source: /note="5' tri-ethylene glycol (TEG)"
  modified_base (20)..(20): bicyclic nucleic acid (BNA)
  modified_base (21)..(21): bicyclic nucleic acid (BNA)
uccaacaucaaggaagauggc

SEQ ID NO: 10207 - RNA, 20 nt, Artificial Sequence
  source: /note="Description of Artificial Sequence: Synthetic oligonucleotide"
  source: /note="RNA"
  source: /note="5' tri-ethylene glycol (TEG)"
  modified_base (19)..(19): bicyclic nucleic acid (BNA)
  modified_base (20)..(20): bicyclic nucleic acid (BNA)
uccaacaucaaggaagaugg

SEQ ID NO: 10208 - DNA, 19 bp, Artificial Sequence
  source: /note="Description of Artificial Sequence: Synthetic oligonucleotide"
  source: /note="Description of Combined DNA/RNA Molecule: Synthetic oligonucleotide"
  source: /note="DNA/RNA"
  source: /note="5' tri-ethylene glycol (TEG)"
  modified_base (18)..(18): bicyclic nucleic acid (BNA)
  modified_base (19)..(19): bicyclic nucleic acid (BNA)
uccaacaucaaggaagatg

SEQ ID NO: 10209 - DNA, 18 bp, Artificial Sequence
  source: /note="Description of Artificial Sequence: Synthetic oligonucleotide"
  source: /note="Description of Combined DNA/RNA Molecule: Synthetic oligonucleotide"
  source: /note="DNA/RNA"
  source: /note="5' tri-ethylene glycol (TEG)"
  modified_base (17)..(17): bicyclic nucleic acid (BNA)
  modified_base (18)..(18): bicyclic nucleic acid (BNA)
uccaacaucaaggaagat

SEQ ID NO: 10210 - RNA, 17 nt, Artificial Sequence
  source: /note="Description of Artificial Sequence: Synthetic oligonucleotide"
  source: /note="RNA"
  source: /note="5' tri-ethylene glycol (TEG)"
  modified_base (16)..(16): bicyclic nucleic acid (BNA)
  modified_base (17)..(17): bicyclic nucleic acid (BNA)
uccaacaucaaggaaga

SEQ ID NO: 10211 - RNA, 16 nt, Artificial Sequence
  source: /note="Description of Artificial Sequence: Synthetic oligonucleotide"
  source: /note="RNA"
  source: /note="5' tri-ethylene glycol (TEG)"
  modified_base (15)..(15): bicyclic nucleic acid (BNA)
  modified_base (16)..(16): bicyclic nucleic acid (BNA)
uccaacaucaaggaag

SEQ ID NO: 10212 - RNA, 28 nt, Artificial Sequence
  source: /note="Description of Artificial Sequence: Synthetic oligonucleotide"
  source: /note="RNA"
  source: /note="5' tri-ethylene glycol (TEG)"
  modified_base (27)..(27): bicyclic nucleic acid (BNA)
  modified_base (28)..(28): bicyclic nucleic acid (BNA)
ccaacaucaaggaagauggcauuucuag

SEQ ID NO: 10213 - DNA, 27 bp, Artificial Sequence
  source: /note="Description of Artificial Sequence: Synthetic oligonucleotide"
  source: /note="Description of Combined DNA/RNA Molecule: Synthetic oligonucleotide"
  source: /note="DNA/RNA"
  source: /note="5' tri-ethylene glycol (TEG)"
  modified_base (26)..(26): bicyclic nucleic acid (BNA)
  modified_base (27)..(27): bicyclic nucleic acid (BNA)
ccaacaucaaggaagauggcauuucta

SEQ ID NO: 10214 - DNA, 26 bp, Artificial Sequence
  source: /note="Description of Artificial Sequence: Synthetic oligonucleotide"
  source: /note="Description of Combined DNA/RNA Molecule: Synthetic oligonucleotide"
  source: /note="DNA/RNA"
  source: /note="5' tri-ethylene glycol (TEG)"
  modified_base (25)..(25): bicyclic nucleic acid (BNA)
  modified_base (26)..(26): bicyclic nucleic acid (BNA)
ccaacaucaaggaagauggcauuuct

SEQ ID NO: 10215 - DNA, 25 bp, Artificial Sequence
  source: /note="Description of Artificial Sequence: Synthetic oligonucleotide"
  source: /note="Description of Combined DNA/RNA Molecule: Synthetic oligonucleotide"
  source: /note="DNA/RNA"
  source: /note="5' tri-ethylene glycol (TEG)"
  modified_base (24)..(24): bicyclic nucleic acid (BNA)
  modified_base (25)..(25): bicyclic nucleic acid (BNA)
ccaacaucaaggaagauggcauutc

SEQ ID NO: 10216 - DNA, 24 bp, Artificial Sequence
  source: /note="Description of Artificial Sequence: Synthetic oligonucleotide"
  source: /note="Description of Combined DNA/RNA Molecule: Synthetic oligonucleotide"
  source: /note="DNA/RNA"
  source: /note="5' tri-ethylene glycol (TEG)"
  modified_base (23)..(23): bicyclic nucleic acid (BNA)
  modified_base (24)..(24): bicyclic nucleic acid (BNA)
ccaacaucaaggaagauggcautt

SEQ ID NO: 10217 - DNA, 23 bp, Artificial Sequence
  source: /note="Description of Artificial Sequence: Synthetic oligonucleotide"
  source: /note="Description of Combined DNA/RNA Molecule: Synthetic oligonucleotide"
  source: /note="DNA/RNA"
  source: /note="5' tri-ethylene glycol (TEG)"
  modified_base (22)..(22): bicyclic nucleic acid (BNA)
  modified_base (23)..(23): bicyclic nucleic acid (BNA)
ccaacaucaaggaagauggcatt

SEQ ID NO: 10218 - DNA, 22 bp, Artificial Sequence
  source: /note="Description of Artificial Sequence: Synthetic oligonucleotide"
  source: /note="Description of Combined DNA/RNA Molecule: Synthetic oligonucleotide"
  source: /note="DNA/RNA"
  source: /note="5' tri-ethylene glycol (TEG)"
  modified_base (21)..(21): bicyclic nucleic acid (BNA)
  modified_base (22)..(22): bicyclic nucleic acid (BNA)
ccaacaucaaggaagauggcat

SEQ ID NO: 10219 - RNA, 21 nt, Artificial Sequence
  source: /note="Description of Artificial Sequence: Synthetic oligonucleotide"
  source: /note="RNA"
  source: /note="5' tri-ethylene glycol (TEG)"
  modified_base (20)..(20): bicyclic nucleic acid (BNA)
  modified_base (21)..(21): bicyclic nucleic acid (BNA)
ccaacaucaaggaagauggca

SEQ ID NO: 10220 - RNA, 20 nt, Artificial Sequence
  source: /note="Description of Artificial Sequence: Synthetic oligonucleotide"
  source: /note="RNA"
  source: /note="5' tri-ethylene glycol (TEG)"
  modified_base (19)..(19): bicyclic nucleic acid (BNA)
  modified_base (20)..(20): bicyclic nucleic acid (BNA)
ccaacaucaaggaagauggc

SEQ ID NO: 10221 - RNA, 19 nt, Artificial Sequence
  source: /note="Description of Artificial Sequence: Synthetic oligonucleotide"
  source: /note="RNA"
  source: /note="5' tri-ethylene glycol (TEG)"
  modified_base (18)..(18): bicyclic nucleic acid (BNA)
  modified_base (19)..(19): bicyclic nucleic acid (BNA)
ccaacaucaaggaagaugg

SEQ ID NO: 10222 - DNA, 18 bp, Artificial Sequence
  source: /note="Description of Artificial Sequence: Synthetic oligonucleotide"
  source: /note="Description of Combined DNA/RNA Molecule: Synthetic oligonucleotide"
  source: /note="DNA/RNA"
  source: /note="5' tri-ethylene glycol (TEG)"
  modified_base (17)..(17): bicyclic nucleic acid (BNA)
  modified_base (18)..(18): bicyclic nucleic acid (BNA)
ccaacaucaaggaagatg

SEQ ID NO: 10223 - DNA, 17 bp, Artificial Sequence
  source: /note="Description of Artificial Sequence: Synthetic oligonucleotide"
  source: /note="Description of Combined DNA/RNA Molecule: Synthetic oligonucleotide"
  source: /note="DNA/RNA"
  source: /note="5' tri-ethylene glycol (TEG)"
  modified_base (16)..(16): bicyclic nucleic acid (BNA)
  modified_base (17)..(17): bicyclic nucleic acid (BNA)
ccaacaucaaggaagat

SEQ ID NO: 10224 - RNA, 16 nt, Artificial Sequence
  source: /note="Description of Artificial Sequence: Synthetic oligonucleotide"
  source: /note="RNA"
  source: /note="5' tri-ethylene glycol (TEG)"
  modified_base (15)..(15): bicyclic nucleic acid (BNA)
  modified_base (16)..(16): bicyclic nucleic acid (BNA)
ccaacaucaaggaaga

SEQ ID NO: 10225 - RNA, 15 nt, Artificial Sequence
  source: /note="Description of Artificial Sequence: Synthetic oligonucleotide"
  source: /note="RNA"
  source: /note="5' tri-ethylene glycol (TEG)"
  modified_base (14)..(14): bicyclic nucleic acid (BNA)
  modified_base (15)..(15): bicyclic nucleic acid (BNA)
ccaacaucaaggaag

SEQ ID NO: 10226 - RNA, 27 nt, Artificial Sequence
  source: /note="Description of Artificial Sequence: Synthetic oligonucleotide"
  source: /note="RNA"
  source: /note="5' tri-ethylene glycol (TEG)"
  modified_base (26)..(26): bicyclic nucleic acid (BNA)
  modified_base (27)..(27): bicyclic nucleic acid (BNA)
caacaucaaggaagauggcauuucuag

SEQ ID NO: 10227 - DNA, 26 bp, Artificial Sequence
  source: /note="Description of Artificial Sequence: Synthetic oligonucleotide"
  source: /note="Description of Combined DNA/RNA Molecule: Synthetic oligonucleotide"
  source: /note="DNA/RNA"
  source: /note="5' tri-ethylene glycol (TEG)"
  modified_base (25)..(25): bicyclic nucleic acid (BNA)
  modified_base (26)..(26): bicyclic nucleic acid (BNA)
caacaucaaggaagauggcauuucta

SEQ ID NO: 10228 - DNA, 25 bp, Artificial Sequence
  source: /note="Description of Artificial Sequence: Synthetic oligonucleotide"
  source: /note="Description of Combined DNA/RNA Molecule: Synthetic oligonucleotide"
  source: /note="DNA/RNA"
  source: /note="5' tri-ethylene glycol (TEG)"
  modified_base (24)..(24): bicyclic nucleic acid (BNA)
  modified_base (25)..(25): bicyclic nucleic acid (BNA)
caacaucaaggaagauggcauuuct

SEQ ID NO: 10229 - DNA, 24 bp, Artificial Sequence
  source: /note="Description of Artificial Sequence: Synthetic oligonucleotide"
  source: /note="Description of Combined DNA/RNA Molecule: Synthetic oligonucleotide"
  source: /note="DNA/RNA"
  source: /note="5' tri-ethylene glycol (TEG)"
  modified_base (23)..(23): bicyclic nucleic acid (BNA)
  modified_base (24)..(24): bicyclic nucleic acid (BNA)
caacaucaaggaagauggcauutc

SEQ ID NO: 10230 - DNA, 23 bp, Artificial Sequence
  source: /note="Description of Artificial Sequence: Synthetic oligonucleotide"
  source: /note="Description of Combined DNA/RNA Molecule: Synthetic oligonucleotide"
  source: /note="DNA/RNA"
  source: /note="5' tri-ethylene glycol (TEG)"
  modified_base (22)..(22): bicyclic nucleic acid (BNA)
  modified_base (23)..(23): bicyclic nucleic acid (BNA)
caacaucaaggaagauggcautt

SEQ ID NO: 10231 - DNA, 22 bp, Artificial Sequence
  source: /note="Description of Artificial Sequence: Synthetic oligonucleotide"
  source: /note="Description of Combined DNA/RNA Molecule: Synthetic oligonucleotide"
  source: /note="DNA/RNA"
  source: /note="5' tri-ethylene glycol (TEG)"
  modified_base (21)..(21): bicyclic nucleic acid (BNA)
  modified_base (22)..(22): bicyclic nucleic acid (BNA)
caacaucaaggaagauggcatt

SEQ ID NO: 10232 - DNA, 21 bp, Artificial Sequence
  source: /note="Description of Artificial Sequence: Synthetic oligonucleotide"
  source: /note="Description of Combined DNA/RNA Molecule: Synthetic oligonucleotide"
  source: /note="DNA/RNA"
  source: /note="5' tri-ethylene glycol (TEG)"
  modified_base (20)..(20): bicyclic nucleic acid (BNA)
  modified_base (21)..(21): bicyclic nucleic acid (BNA)
caacaucaaggaagauggcat

SEQ ID NO: 10233 - RNA, 20 nt, Artificial Sequence
  source: /note="Description of Artificial Sequence: Synthetic oligonucleotide"
  source: /note="RNA"
  source: /note="5' tri-ethylene glycol (TEG)"
  modified_base (19)..(19): bicyclic nucleic acid (BNA)
  modified_base (20)..(20): bicyclic nucleic acid (BNA)
caacaucaaggaagauggca

SEQ ID NO: 10234 - RNA, 19 nt, Artificial Sequence
  source: /note="Description of Artificial Sequence: Synthetic oligonucleotide"
  source: /note="RNA"
  source: /note="5' tri-ethylene glycol (TEG)"
  modified_base (18)..(18): bicyclic nucleic acid (BNA)
  modified_base (19)..(19): bicyclic nucleic acid (BNA)
caacaucaaggaagauggc

SEQ ID NO: 10235 - RNA, 18 nt, Artificial Sequence
  source: /note="Description of Artificial Sequence: Synthetic oligonucleotide"
  source: /note="RNA"
  source: /note="5' tri-ethylene glycol (TEG)"
  modified_base (17)..(17): bicyclic nucleic acid (BNA)
  modified_base (18)..(18): bicyclic nucleic acid (BNA)
caacaucaaggaagaugg

SEQ ID NO: 10236 - DNA, 17 bp, Artificial Sequence
  source: /note="Description of Artificial Sequence: Synthetic oligonucleotide"
  source: /note="Description of Combined DNA/RNA Molecule: Synthetic oligonucleotide"
  source: /note="DNA/RNA"
  source: /note="5' tri-ethylene glycol (TEG)"
  modified_base (16)..(16): bicyclic nucleic acid (BNA)
  modified_base (17)..(17): bicyclic nucleic acid (BNA)
caacaucaaggaagatg

SEQ ID NO: 10237 - DNA, 16 bp, Artificial Sequence
  source: /note="Description of Artificial Sequence: Synthetic oligonucleotide"
  source: /note="Description of Combined DNA/RNA Molecule: Synthetic oligonucleotide"
  source: /note="DNA/RNA"
  source: /note="5' tri-ethylene glycol (TEG)"
  modified_base (15)..(15): bicyclic nucleic acid (BNA)
  modified_base (16)..(16): bicyclic nucleic acid (BNA)
caacaucaaggaagat

SEQ ID NO: 10238 - RNA, 15 nt, Artificial Sequence
  source: /note="Description of Artificial Sequence: Synthetic oligonucleotide"
  source: /note="RNA"
  source: /note="5' tri-ethylene glycol (TEG)"
  modified_base (14)..(14): bicyclic nucleic acid (BNA)
  modified_base (15)..(15): bicyclic nucleic acid (BNA)
caacaucaaggaaga

SEQ ID NO: 10239 - RNA, 14 nt, Artificial Sequence
  source: /note="Description of Artificial Sequence: Synthetic oligonucleotide"
  source: /note="RNA"
  source: /note="5' tri-ethylene glycol (TEG)"
  modified_base (13)..(13): bicyclic nucleic acid (BNA)
  modified_base (14)..(14): bicyclic nucleic acid (BNA)
caacaucaaggaag

SEQ ID NO: 10240 - RNA, 26 nt, Artificial Sequence
  source: /note="Description of Artificial Sequence: Synthetic oligonucleotide"
  source: /note="RNA"
  source: /note="5' tri-ethylene glycol (TEG)"
  modified_base (25)..(25): bicyclic nucleic acid (BNA)
  modified_base (26)..(26): bicyclic nucleic acid (BNA)
aacaucaaggaagauggcauuucuag

SEQ ID NO: 10241 - DNA, 25 bp, Artificial Sequence
  source: /note="Description of Artificial Sequence: Synthetic oligonucleotide"
  source: /note="Description of Combined DNA/RNA Molecule: Synthetic oligonucleotide"
  source: /note="DNA/RNA"
  source: /note="5' tri-ethylene glycol (TEG)"
  modified_base (24)..(24): bicyclic nucleic acid (BNA)
  modified_base (25)..(25): bicyclic nucleic acid (BNA)
aacaucaaggaagauggcauuucta

SEQ ID NO: 10242 - DNA, 24 bp, Artificial Sequence
  source: /note="Description of Artificial Sequence: Synthetic oligonucleotide"
  source: /note="Description of Combined DNA/RNA Molecule: Synthetic oligonucleotide"
  source: /note="DNA/RNA"
  source: /note="5' tri-ethylene glycol (TEG)"
  modified_base (23)..(23): bicyclic nucleic acid (BNA)
  modified_base (24)..(24): bicyclic nucleic acid (BNA)
aacaucaaggaagauggcauuuct

SEQ ID NO: 10243 - DNA, 23 bp, Artificial Sequence
  source: /note="Description of Artificial Sequence: Synthetic oligonucleotide"
  source: /note="Description of Combined DNA/RNA Molecule: Synthetic oligonucleotide"
  source: /note="DNA/RNA"
  source: /note="5' tri-ethylene glycol (TEG)"
  modified_base (22)..(22): bicyclic nucleic acid (BNA)
  modified_base (23)..(23): bicyclic nucleic acid (BNA)
aacaucaaggaagauggcauutc

SEQ ID NO: 10244 - DNA, 22 bp, Artificial Sequence
  source: /note="Description of Artificial Sequence: Synthetic oligonucleotide"
  source: /note="Description of Combined DNA/RNA Molecule: Synthetic oligonucleotide"
  source: /note="DNA/RNA"
  source: /note="5' tri-ethylene glycol (TEG)"
  modified_base (21)..(21): bicyclic nucleic acid (BNA)
  modified_base (22)..(22): bicyclic nucleic acid (BNA)
aacaucaaggaagauggcautt

SEQ ID NO: 10245 - DNA, 21 bp, Artificial Sequence
  source: /note="Description of Artificial Sequence: Synthetic oligonucleotide"
  source: /note="Description of Combined DNA/RNA Molecule: Synthetic oligonucleotide"
  source: /note="DNA/RNA"
  source: /note="5' tri-ethylene glycol (TEG)"
  modified_base (20)..(20): bicyclic nucleic acid (BNA)
  modified_base (21)..(21): bicyclic nucleic acid (BNA)
aacaucaaggaagauggcatt

SEQ ID NO: 10246 - DNA, 20 bp, Artificial Sequence
  source: /note="Description of Artificial Sequence: Synthetic oligonucleotide"
  source: /note="Description of Combined DNA/RNA Molecule: Synthetic oligonucleotide"
  source: /note="DNA/RNA"
  source: /note="5' tri-ethylene glycol (TEG)"
  modified_base (19)..(19): bicyclic nucleic acid (BNA)
  modified_base (20)..(20): bicyclic nucleic acid (BNA)
aacaucaaggaagauggcat

SEQ ID NO: 10247 - RNA, 19 nt, Artificial Sequence
  source: /note="Description of Artificial Sequence: Synthetic oligonucleotide"
  source: /note="RNA"
  source: /note="5' tri-ethylene glycol (TEG)"
  modified_base (18)..(18): bicyclic nucleic acid (BNA)
  modified_base (19)..(19): bicyclic nucleic acid (BNA)
aacaucaaggaagauggca

SEQ ID NO: 10248 - RNA, 18 nt, Artificial Sequence
  source: /note="Description of Artificial Sequence: Synthetic oligonucleotide"
  source: /note="RNA"
  source: /note="5' tri-ethylene glycol (TEG)"
  modified_base (17)..(17): bicyclic nucleic acid (BNA)
  modified_base (18)..(18): bicyclic nucleic acid (BNA)
aacaucaaggaagauggc

SEQ ID NO: 10249 - RNA, 17 nt, Artificial Sequence
  source: /note="Description of Artificial Sequence: Synthetic oligonucleotide"
  source: /note="RNA"
  source: /note="5' tri-ethylene glycol (TEG)"
  modified_base (16)..(16): bicyclic nucleic acid (BNA)
  modified_base (17)..(17): bicyclic nucleic acid (BNA)
aacaucaaggaagaugg

SEQ ID NO: 10250 - DNA, 16 bp, Artificial Sequence
  source: /note="Description of Artificial Sequence: Synthetic oligonucleotide"
  source: /note="Description of Combined DNA/RNA Molecule: Synthetic oligonucleotide"
  source: /note="DNA/RNA"
  source: /note="5' tri-ethylene glycol (TEG)"
  modified_base (15)..(15): bicyclic nucleic acid (BNA)
  modified_base (16)..(16): bicyclic nucleic acid (BNA)
aacaucaaggaagatg

SEQ ID NO: 10251 - DNA, 15 bp, Artificial Sequence
  source: /note="Description of Artificial Sequence: Synthetic oligonucleotide"
  source: /note="Description of Combined DNA/RNA Molecule: Synthetic oligonucleotide"
  source: /note="DNA/RNA"
  source: /note="5' tri-ethylene glycol (TEG)"
  modified_base (14)..(14): bicyclic nucleic acid (BNA)
  modified_base (15)..(15): bicyclic nucleic acid (BNA)
aacaucaaggaagat

SEQ ID NO: 10252 - RNA, 14 nt, Artificial Sequence
  source: /note="Description of Artificial Sequence: Synthetic oligonucleotide"
  source: /note="RNA"
  source: /note="5' tri-ethylene glycol (TEG)"
  modified_base (13)..(13): bicyclic nucleic acid (BNA)
  modified_base (14)..(14): bicyclic nucleic acid (BNA)
aacaucaaggaaga

SEQ ID NO: 10253 - RNA, 13 nt, Artificial Sequence
  source: /note="Description of Artificial Sequence: Synthetic oligonucleotide"
  source: /note="RNA"
  source: /note="5' tri-ethylene glycol (TEG)"
  modified_base (12)..(12): bicyclic nucleic acid (BNA)
  modified_base (13)..(13): bicyclic nucleic acid (BNA)
aacaucaaggaag

SEQ ID NO: 10254 - RNA, 25 nt, Artificial Sequence
  source: /note="Description of Artificial Sequence: Synthetic oligonucleotide"
  source: /note="RNA"
  source: /note="5' tri-ethylene glycol (TEG)"
  modified_base (24)..(24): bicyclic nucleic acid (BNA)
  modified_base (25)..(25): bicyclic nucleic acid (BNA)
acaucaaggaagauggcauuucuag

SEQ ID NO: 10255 - DNA, 24 bp, Artificial Sequence
  source: /note="Description of Artificial Sequence: Synthetic oligonucleotide"
  source: /note="Description of Combined DNA/RNA Molecule: Synthetic oligonucleotide"
  source: /note="DNA/RNA"
  source: /note="5' tri-ethylene glycol (TEG)"
  modified_base (23)..(23): bicyclic nucleic acid (BNA)
  modified_base (24)..(24): bicyclic nucleic acid (BNA)
acaucaaggaagauggcauuucta

SEQ ID NO: 10256 - DNA, 23 bp, Artificial Sequence
  source: /note="Description of Artificial Sequence: Synthetic oligonucleotide"
  source: /note="Description of Combined DNA/RNA Molecule: Synthetic oligonucleotide"
  source: /note="DNA/RNA"
  source: /note="5' tri-ethylene glycol (TEG)"
  modified_base (22)..(22): bicyclic nucleic acid (BNA)
  modified_base (23)..(23): bicyclic nucleic acid (BNA)
acaucaaggaagauggcauuuct

SEQ ID NO: 10257 - DNA, 22 bp, Artificial Sequence
  source: /note="Description of Artificial Sequence: Synthetic oligonucleotide"
  source: /note="Description of Combined DNA/RNA Molecule: Synthetic oligonucleotide"
  source: /note="DNA/RNA"
  source: /note="5' tri-ethylene glycol (TEG)"
  modified_base (21)..(21): bicyclic nucleic acid (BNA)
  modified_base (22)..(22): bicyclic nucleic acid (BNA)
acaucaaggaagauggcauutc

SEQ ID NO: 10258 - DNA, 21 bp, Artificial Sequence
  source: /note="Description of Artificial Sequence: Synthetic oligonucleotide"
  source: /note="Description of Combined DNA/RNA Molecule: Synthetic oligonucleotide"
  source: /note="DNA/RNA"
  source: /note="5' tri-ethylene glycol (TEG)"
  modified_base (20)..(20): bicyclic nucleic acid (BNA)
  modified_base (21)..(21): bicyclic nucleic acid (BNA)
acaucaaggaagauggcautt

SEQ ID NO: 10259 - DNA, 20 bp, Artificial Sequence
  source: /note="Description of Artificial Sequence: Synthetic oligonucleotide"
  source: /note="Description of Combined DNA/RNA Molecule: Synthetic oligonucleotide"
  source: /note="DNA/RNA"
  source: /note="5' tri-ethylene glycol (TEG)"
  modified_base (19)..(19): bicyclic nucleic acid (BNA)
  modified_base (20)..(20): bicyclic nucleic acid (BNA)
acaucaaggaagauggcatt

SEQ ID NO: 10260 - DNA, 19 bp, Artificial Sequence
  source: /note="Description of Artificial Sequence: Synthetic oligonucleotide"
  source: /note="Description of Combined DNA/RNA Molecule: Synthetic oligonucleotide"
  source: /note="DNA/RNA"
  source: /note="5' tri-ethylene glycol (TEG)"
  modified_base (18)..(18): bicyclic nucleic acid (BNA)
  modified_base (19)..(19): bicyclic nucleic acid (BNA)
acaucaaggaagauggcat

SEQ ID NO: 10261 - RNA, 18 nt, Artificial Sequence
  source: /note="Description of Artificial Sequence: Synthetic oligonucleotide"
  source: /note="RNA"
  source: /note="5' tri-ethylene glycol (TEG)"
  modified_base (17)..(17): bicyclic nucleic acid (BNA)
  modified_base (18)..(18): bicyclic nucleic acid (BNA)
acaucaaggaagauggca

SEQ ID NO: 10262 - RNA, 17 nt, Artificial Sequence
  source: /note="Description of Artificial Sequence: Synthetic oligonucleotide"
  source: /note="RNA"
  source: /note="5' tri-ethylene glycol (TEG)"
  modified_base (16)..(16): bicyclic nucleic acid (BNA)
  modified_base (17)..(17): bicyclic nucleic acid (BNA)
acaucaaggaagauggc

SEQ ID NO: 10263 - RNA, 16 nt, Artificial Sequence
  source: /note="Description of Artificial Sequence: Synthetic oligonucleotide"
  source: /note="RNA"
  source: /note="5' tri-ethylene glycol (TEG)"
  modified_base (15)..(15): bicyclic nucleic acid (BNA)
  modified_base (16)..(16): bicyclic nucleic acid (BNA)
acaucaaggaagaugg

SEQ ID NO: 10264 - DNA, 15 bp, Artificial Sequence
  source: /note="Description of Artificial Sequence: Synthetic oligonucleotide"
  source: /note="Description of Combined DNA/RNA Molecule: Synthetic oligonucleotide"
  source: /note="DNA/RNA"
  source: /note="5' tri-ethylene glycol (TEG)"
  modified_base (14)..(14): bicyclic nucleic acid (BNA)
  modified_base (15)..(15): bicyclic nucleic acid (BNA)
acaucaaggaagatg

SEQ ID NO: 10265 - DNA, 14 bp, Artificial Sequence
  source: /note="Description of Artificial Sequence: Synthetic oligonucleotide"
  source: /note="Description of Combined DNA/RNA Molecule: Synthetic oligonucleotide"
  source: /note="DNA/RNA"
  source: /note="5' tri-ethylene glycol (TEG)"
  modified_base (13)..(13): bicyclic nucleic acid (BNA)
  modified_base (14)..(14): bicyclic nucleic acid (BNA)
acaucaaggaagat

SEQ ID NO: 10266 - RNA, 13 nt, Artificial Sequence
  source: /note="Description of Artificial Sequence: Synthetic oligonucleotide"
  source: /note="RNA"
  source: /note="5' tri-ethylene glycol (TEG)"
  modified_base (12)..(12): bicyclic nucleic acid (BNA)
  modified_base (13)..(13): bicyclic nucleic acid (BNA)
acaucaaggaaga

SEQ ID NO: 10267 - RNA, 12 nt, Artificial Sequence
  source: /note="Description of Artificial Sequence: Synthetic oligonucleotide"
  source: /note="RNA"
  source: /note="5' tri-ethylene glycol (TEG)"
  modified_base (11)..(11): bicyclic nucleic acid (BNA)
  modified_base (12)..(12): bicyclic nucleic acid (BNA)
acaucaaggaag

SEQ ID NO: 10268 - RNA, 24 nt, Artificial Sequence
  source: /note="Description of Artificial Sequence: Synthetic oligonucleotide"
  source: /note="RNA"
  source: /note="5' tri-ethylene glycol (TEG)"
  modified_base (23)..(23): bicyclic nucleic acid (BNA)
  modified_base (24)..(24): bicyclic nucleic acid (BNA)
caucaaggaagauggcauuucuag

SEQ ID NO: 10269 - DNA, 23 bp, Artificial Sequence
  source: /note="Description of Artificial Sequence: Synthetic oligonucleotide"
  source: /note="Description of Combined DNA/RNA Molecule: Synthetic oligonucleotide"
  source: /note="DNA/RNA"
  source: /note="5' tri-ethylene glycol (TEG)"
  modified_base (22)..(22): bicyclic nucleic acid (BNA)
  modified_base (23)..(23): bicyclic nucleic acid (BNA)
caucaaggaagauggcauuucta

SEQ ID NO: 10270 - DNA, 22 bp, Artificial Sequence
  source: /note="Description of Artificial Sequence: Synthetic oligonucleotide"
  source: /note="Description of Combined DNA/RNA Molecule: Synthetic oligonucleotide"
  source: /note="DNA/RNA"
  source: /note="5' tri-ethylene glycol (TEG)"
  modified_base (21)..(21): bicyclic nucleic acid (BNA)
  modified_base (22)..(22): bicyclic nucleic acid (BNA)
caucaaggaagauggcauuuct

SEQ ID NO: 10271 - DNA, 21 bp, Artificial Sequence
  source: /note="Description of Artificial Sequence: Synthetic oligonucleotide"
  source: /note="Description of Combined DNA/RNA Molecule: Synthetic oligonucleotide"
  source: /note="DNA/RNA"
  source: /note="5' tri-ethylene glycol (TEG)"
  modified_base (20)..(20): bicyclic nucleic acid (BNA)
  modified_base (21)..(21): bicyclic nucleic acid (BNA)
caucaaggaagauggcauutc

SEQ ID NO: 10272 - DNA, 20 bp, Artificial Sequence
  source: /note="Description of Artificial Sequence: Synthetic oligonucleotide"
  source: /note="Description of Combined DNA/RNA Molecule: Synthetic oligonucleotide"
  source: /note="DNA/RNA"
  source: /note="5' tri-ethylene glycol (TEG)"
  modified_base (19)..(19): bicyclic nucleic acid (BNA)
  modified_base (20)..(20): bicyclic nucleic acid (BNA)
caucaaggaagauggcautt

SEQ ID NO: 10273 - DNA, 19 bp, Artificial Sequence
  source: /note="Description of Artificial Sequence: Synthetic oligonucleotide"
  source: /note="Description of Combined DNA/RNA Molecule: Synthetic oligonucleotide"
  source: /note="DNA/RNA"
  source: /note="5' tri-ethylene glycol (TEG)"
  modified_base (18)..(18): bicyclic nucleic acid (BNA)
  modified_base (19)..(19): bicyclic nucleic acid (BNA)
caucaaggaagauggcatt

SEQ ID NO: 10274 - DNA, 18 bp, Artificial Sequence
  source: /note="Description of Artificial Sequence: Synthetic oligonucleotide"
  source: /note="Description of Combined DNA/RNA Molecule: Synthetic oligonucleotide"
  source: /note="DNA/RNA"
  source: /note="5' tri-ethylene glycol (TEG)"
  modified_base (17)..(17): bicyclic nucleic acid (BNA)
  modified_base (18)..(18): bicyclic nucleic acid (BNA)
caucaaggaagauggcat

SEQ ID NO: 10275 - RNA, 17 nt, Artificial Sequence
  source: /note="Description of Artificial Sequence: Synthetic oligonucleotide"
  source: /note="RNA"
  source: /note="5' tri-ethylene glycol (TEG)"
  modified_base (16)..(16): bicyclic nucleic acid (BNA)
  modified_base (17)..(17): bicyclic nucleic acid (BNA)
caucaaggaagauggca

SEQ ID NO: 10276 - RNA, 16 nt, Artificial Sequence
  source: /note="Description of Artificial Sequence: Synthetic oligonucleotide"
  source: /note="RNA"
  source: /note="5' tri-ethylene glycol (TEG)"
  modified_base (15)..(15): bicyclic nucleic acid (BNA)
  modified_base (16)..(16): bicyclic nucleic acid (BNA)
caucaaggaagauggc

SEQ ID NO: 10277 - RNA, 15 nt, Artificial Sequence
  source: /note="Description of Artificial Sequence: Synthetic oligonucleotide"
  source: /note="RNA"
  source: /note="5' tri-ethylene glycol (TEG)"
  modified_base (14)..(14): bicyclic nucleic acid (BNA)
  modified_base (15)..(15): bicyclic nucleic acid (BNA)
caucaaggaagaugg

SEQ ID NO: 10278 - DNA, 14 bp, Artificial Sequence
  source: /note="Description of Artificial Sequence: Synthetic oligonucleotide"
  source: /note="Description of Combined DNA/RNA Molecule: Synthetic oligonucleotide"
  source: /note="DNA/RNA"
  source: /note="5' tri-ethylene glycol (TEG)"
  modified_base (13)..(13): bicyclic nucleic acid (BNA)
  modified_base (14)..(14): bicyclic nucleic acid (BNA)
caucaaggaagatg

SEQ ID NO: 10279 - DNA, 13 bp, Artificial Sequence
  source: /note="Description of Artificial Sequence: Synthetic oligonucleotide"
  source: /note="Description of Combined DNA/RNA Molecule: Synthetic oligonucleotide"
  source: /note="DNA/RNA"
  source: /note="5' tri-ethylene glycol (TEG)"
  modified_base (12)..(12): bicyclic nucleic acid (BNA)
  modified_base (13)..(13): bicyclic nucleic acid (BNA)
caucaaggaagat

SEQ ID NO: 10280 - RNA, 12 nt, Artificial Sequence
  source: /note="Description of Artificial Sequence: Synthetic oligonucleotide"
  source: /note="RNA"
  source: /note="5' tri-ethylene glycol (TEG)"
  modified_base (11)..(11): bicyclic nucleic acid (BNA)
  modified_base (12)..(12): bicyclic nucleic acid (BNA)
caucaaggaaga

SEQ ID NO: 10281 - RNA, 11 nt, Artificial Sequence
  source: /note="Description of Artificial Sequence: Synthetic oligonucleotide"
  source: /note="RNA"
  source: /note="5' tri-ethylene glycol (TEG)"
  modified_base (10)..(10): bicyclic nucleic acid (BNA)
  modified_base (11)..(11): bicyclic nucleic acid (BNA)
caucaaggaag

SEQ ID NO: 10282 - RNA, 23 nt, Artificial Sequence
  source: /note="Description of Artificial Sequence: Synthetic oligonucleotide"
  source: /note="RNA"
  source: /note="5' tri-ethylene glycol (TEG)"
  modified_base (22)..(22): bicyclic nucleic acid (BNA)
  modified_base (23)..(23): bicyclic nucleic acid (BNA)
aucaaggaagauggcauuucuag

SEQ ID NO: 10283 - DNA, 22 bp, Artificial Sequence
  source: /note="Description of Artificial Sequence: Synthetic oligonucleotide"
  source: /note="Description of Combined DNA/RNA Molecule: Synthetic oligonucleotide"
  source: /note="DNA/RNA"
  source: /note="5' tri-ethylene glycol (TEG)"
  modified_base (21)..(21): bicyclic nucleic acid (BNA)
  modified_base (22)..(22): bicyclic nucleic acid (BNA)
aucaaggaagauggcauuucta

SEQ ID NO: 10284 - DNA, 21 bp, Artificial Sequence
  source: /note="Description of Artificial Sequence: Synthetic oligonucleotide"
  source: /note="Description of Combined DNA/RNA Molecule: Synthetic oligonucleotide"
  source: /note="DNA/RNA"
  source: /note="5' tri-ethylene glycol (TEG)"
  modified_base (20)..(20): bicyclic nucleic acid (BNA)
  modified_base (21)..(21): bicyclic nucleic acid (BNA)
aucaaggaagauggcauuuct

SEQ ID NO: 10285 - DNA, 20 bp, Artificial Sequence
  source: /note="Description of Artificial Sequence: Synthetic oligonucleotide"
  source: /note="Description of Combined DNA/RNA Molecule: Synthetic oligonucleotide"
  source: /note="DNA/RNA"
  source: /note="5' tri-ethylene glycol (TEG)"
  modified_base (19)..(19): bicyclic nucleic acid (BNA)
  modified_base (20)..(20): bicyclic nucleic acid (BNA)
aucaaggaagauggcauutc

SEQ ID NO: 10286 - DNA, 19 bp, Artificial Sequence
  source: /note="Description of Artificial Sequence: Synthetic oligonucleotide"
  source: /note="Description of Combined DNA/RNA Molecule: Synthetic oligonucleotide"
  source: /note="DNA/RNA"
  source: /note="5' tri-ethylene glycol (TEG)"
  modified_base (18)..(18): bicyclic nucleic acid (BNA)
  modified_base (19)..(19): bicyclic nucleic acid (BNA)
aucaaggaagauggcautt

SEQ ID NO: 10287 - DNA, 18 bp, Artificial Sequence
  source: /note="Description of Artificial Sequence: Synthetic oligonucleotide"
  source: /note="Description of Combined DNA/RNA Molecule: Synthetic oligonucleotide"
  source: /note="DNA/RNA"
  source: /note="5' tri-ethylene glycol (TEG)"
  modified_base (17)..(17): bicyclic nucleic acid (BNA)
  modified_base (18)..(18): bicyclic nucleic acid (BNA)
aucaaggaagauggcatt

SEQ ID NO: 10288 - DNA, 17 bp, Artificial Sequence
  source: /note="Description of Artificial Sequence: Synthetic oligonucleotide"
  source: /note="Description of Combined DNA/RNA Molecule: Synthetic oligonucleotide"
  source: /note="DNA/RNA"
  source: /note="5' tri-ethylene glycol (TEG)"
  modified_base (16)..(16): bicyclic nucleic acid (BNA)
  modified_base (17)..(17): bicyclic nucleic acid (BNA)
aucaaggaagauggcat

SEQ ID NO: 10289 - RNA, 16 nt, Artificial Sequence
  source: /note="Description of Artificial Sequence: Synthetic oligonucleotide"
  source: /note="RNA"
  source: /note="5' tri-ethylene glycol (TEG)"
  modified_base (15)..(15): bicyclic nucleic acid (BNA)
  modified_base (16)..(16): bicyclic nucleic acid (BNA)
aucaaggaagauggca

SEQ ID NO: 10290 - RNA, 15 nt, Artificial Sequence
  source: /note="Description of Artificial Sequence: Synthetic oligonucleotide"
  source: /note="RNA"
  source: /note="5' tri-ethylene glycol (TEG)"
  modified_base (14)..(14): bicyclic nucleic acid (BNA)
  modified_base (15)..(15): bicyclic nucleic acid (BNA)
aucaaggaagauggc

SEQ ID NO: 10291 - RNA, 14 nt, Artificial Sequence
  source: /note="Description of Artificial Sequence: Synthetic oligonucleotide"
  source: /note="RNA"
  source: /note="5' tri-ethylene glycol (TEG)"
  modified_base (13)..(13): bicyclic nucleic acid (BNA)
  modified_base (14)..(14): bicyclic nucleic acid (BNA)
aucaaggaagaugg

SEQ ID NO: 10292 - DNA, 13 bp, Artificial Sequence
  source: /note="Description of Artificial Sequence: Synthetic oligonucleotide"
  source: /note="Description of Combined DNA/RNA Molecule: Synthetic oligonucleotide"
  source: /note="DNA/RNA"
  source: /note="5' tri-ethylene glycol (TEG)"
  modified_base (12)..(12): bicyclic nucleic acid (BNA)
  modified_base (13)..(13): bicyclic nucleic acid (BNA)
aucaaggaagatg

SEQ ID NO: 10293 - DNA, 12 bp, Artificial Sequence
  source: /note="Description of Artificial Sequence: Synthetic oligonucleotide"
  source: /note="Description of Combined DNA/RNA Molecule: Synthetic oligonucleotide"
  source: /note="DNA/RNA"
  source: /note="5' tri-ethylene glycol (TEG)"
  modified_base (11)..(11): bicyclic nucleic acid (BNA)
  modified_base (12)..(12): bicyclic nucleic acid (BNA)
aucaaggaagat

SEQ ID NO: 10294 - RNA, 11 nt, Artificial Sequence
  source: /note="Description of Artificial Sequence: Synthetic oligonucleotide"
  source: /note="RNA"
  source: /note="5' tri-ethylene glycol (TEG)"
  modified_base (10)..(10): bicyclic nucleic acid (BNA)
  modified_base (11)..(11): bicyclic nucleic acid (BNA)
aucaaggaaga

SEQ ID NO: 10295 - RNA, 10 nt, Artificial Sequence
  source: /note="Description of Artificial Sequence: Synthetic oligonucleotide"
  source: /note="RNA"
  source: /note="5' tri-ethylene glycol (TEG)"
  modified_base (9)..(9): bicyclic nucleic acid (BNA)
  modified_base (10)..(10): bicyclic nucleic acid (BNA)
aucaaggaag

SEQ ID NO: 10296 - DNA, 23 bp, Artificial Sequence
  source: /note="Description of Artificial Sequence: Synthetic oligonucleotide"
  source: /note="Description of Combined DNA/RNA Molecule: Synthetic oligonucleotide"
  source: /note="DNA/RNA"
  source: /note="5' tri-ethylene glycol (TEG)"
  modified_base (22)..(22): bicyclic nucleic acid (BNA)
  modified_base (23)..(23): bicyclic nucleic acid (BNA)
ccagagcagguaccuccaacatc

SEQ ID NO: 10297 - RNA, 18 nt, Artificial Sequence
  source: /note="Description of Artificial Sequence: Synthetic oligonucleotide"
  source: /note="RNA"
  source: /note="5' tri-ethylene glycol (TEG)"
  modified_base (17)..(17): bicyclic nucleic acid (BNA)
  modified_base (18)..(18): bicyclic nucleic acid (BNA)
ccagagcagguaccucca

SEQ ID NO: 10298 - DNA, 23 bp, Artificial Sequence
  source: /note="Description of Artificial Sequence: Synthetic oligonucleotide"
  source: /note="Description of Combined DNA/RNA Molecule: Synthetic oligonucleotide"
  source: /note="DNA/RNA"
  source: /note="5' tri-ethylene glycol (TEG)"
  modified_base (22)..(22): bicyclic nucleic acid (BNA)
  modified_base (23)..(23): bicyclic nucleic acid (BNA)
ccucugugauuuuauaacuugat

SEQ ID NO: 10299 - DNA, 17 bp, Artificial Sequence
  source: /note="Description of Artificial Sequence: Synthetic oligonucleotide"
  source: /note="Description of Combined DNA/RNA Molecule: Synthetic oligonucleotide"
  source: /note="DNA/RNA"
  source: /note="5' tri-ethylene glycol (TEG)"
  modified_base (16)..(16): bicyclic nucleic acid (BNA)
  modified_base (17)..(17): bicyclic nucleic acid (BNA)
ucacccaccaucaccct

SEQ ID NO: 10300 - RNA, 20 nt, Artificial Sequence
  source: /note="Description of Artificial Sequence: Synthetic oligonucleotide"
  source: /note="RNA"
  source: /note="5' tri-ethylene glycol (TEG)"
  modified_base (19)..(19): bicyclic nucleic acid (BNA)
  modified_base (20)..(20): bicyclic nucleic acid (BNA)
ugauauccucaaggucaccc

SEQ ID NO: 10301 - DNA, 22 bp, Artificial Sequence
  source: /note="Description of Artificial Sequence: Synthetic oligonucleotide"
  source: /note="Description of Combined DNA/RNA Molecule: Synthetic oligonucleotide"
  source: /note="DNA/RNA"
  source: /note="5' tri-ethylene glycol (TEG)"
  modified_base (21)..(21): bicyclic nucleic acid (BNA)
  modified_base (22)..(22): bicyclic nucleic acid (BNA)
cugcuugaugaucaucucgutg

SEQ ID NO: 10302 - DNA, 18 bp, Artificial Sequence
  source: /note="Description of Artificial Sequence: Synthetic oligonucleotide"
  source: /note="Description of Combined DNA/RNA Molecule: Synthetic oligonucleotide"
  source: /note="DNA/RNA"
  source: /note="5' tri-ethylene glycol (TEG)"
  modified_base (17)..(17): bicyclic nucleic acid (BNA)
  modified_base (18)..(18): bicyclic nucleic acid (BNA)
cugcuugaugaucauctc

SEQ ID NO: 10303 - RNA, 19 nt, Artificial Sequence
  source: /note="Description of Artificial Sequence: Synthetic oligonucleotide"
  source: /note="RNA"
  source: /note="5' tri-ethylene glycol (TEG)"
  modified_base (18)..(18): bicyclic nucleic acid (BNA)
  modified_base (19)..(19): bicyclic nucleic acid (BNA)
guuuccuuaguaaccacag

SEQ ID NO: 10304 - RNA, 17 nt, Artificial Sequence
  source: /note="Description of Artificial Sequence: Synthetic oligonucleotide"
  source: /note="RNA"
  source: /note="5' tri-ethylene glycol (TEG)"
  modified_base (16)..(16): bicyclic nucleic acid (BNA)
  modified_base (17)..(17): bicyclic nucleic acid (BNA)
guuuccuuaguaaccac

SEQ ID NO: 10305 - DNA, 20 bp, Artificial Sequence
  source: /note="Description of Artificial Sequence: Synthetic oligonucleotide"
  source: /note="Description of Combined DNA/RNA Molecule: Synthetic oligonucleotide"
  source: /note="DNA/RNA"
  modified_base (19)..(19): bicyclic nucleic acid (BNA)
  modified_base (20)..(20): bicyclic nucleic acid (BNA)
  source: /note="3' tri-ethylene glycol (TEG)"
ucaaggaagauggcauuuct

SEQ ID NO: 10306 - RNA, 22 nt, Artificial Sequence
  source: /note="Description of Artificial Sequence: Synthetic oligonucleotide"
  source: /note="RNA"
  modified_base (21)..(21): bicyclic nucleic acid (BNA)
  modified_base (22)..(22): bicyclic nucleic acid (BNA)
  source: /note="3' tri-ethylene glycol (TEG)"
ucaaggaagauggcauuucuag

SEQ ID NO: 10307 - RNA, 18 nt, Artificial Sequence
  source: /note="Description of Artificial Sequence: Synthetic oligonucleotide"
  source: /note="RNA"
  modified_base (17)..(17): bicyclic nucleic acid (BNA)
  modified_base (18)..(18): bicyclic nucleic acid (BNA)
  source: /note="3' tri-ethylene glycol (TEG)"
gguaaguucuguccaagc

SEQ ID NO: 10308 - RNA, 18 nt, Artificial Sequence
  source: /note="Description of Artificial Sequence: Synthetic oligonucleotide"
  source: /note="RNA"
  modified_base (17)..(17): bicyclic nucleic acid (BNA)
  modified_base (18)..(18): bicyclic nucleic acid (BNA)
  source: /note="3' tri-ethylene glycol (TEG)"
guaaguucuguccaagcc

SEQ ID NO: 10309 - RNA, 18 nt, Artificial Sequence
  source: /note="Description of Artificial Sequence: Synthetic oligonucleotide"
  source: /note="RNA"
  modified_base (17)..(17): bicyclic nucleic acid (BNA)
  modified_base (18)..(18): bicyclic nucleic acid (BNA)
  source: /note="3' tri-ethylene glycol (TEG)"
agucgguaaguucugucc

SEQ ID NO: 10310 - RNA, 18 nt, Artificial Sequence
  source: /note="Description of Artificial Sequence: Synthetic oligonucleotide"
  source: /note="RNA"
  modified_base (17)..(17): bicyclic nucleic acid (BNA)
  modified_base (18)..(18): bicyclic nucleic acid (BNA)
  source: /note="3' tri-ethylene glycol (TEG)"
cuguccaagcccgguuga

SEQ ID NO: 10311 - RNA, 15 nt, Artificial Sequence
  source: /note="Description of Artificial Sequence: Synthetic oligonucleotide"
  source: /note="RNA"
  modified_base (14)..(14): bicyclic nucleic acid (BNA)
  modified_base (15)..(15): bicyclic nucleic acid (BNA)
  source: /note="3' tri-ethylene glycol (TEG)"
uaaguucuguccaag

SEQ ID NO: 10312 - RNA, 20 nt, Artificial Sequence
  source: /note="Description of Artificial Sequence: Synthetic oligonucleotide"
  source: /note="RNA"
  modified_base (19)..(19): bicyclic nucleic acid (BNA)
  modified_base (20)..(20): bicyclic nucleic acid (BNA)
  source: /note="3' tri-ethylene glycol (TEG)"
uucuguccaagcccgguuga

SEQ ID NO: 10313 - DNA, 19 bp, Artificial Sequence
  source: /note="Description of Artificial Sequence: Synthetic oligonucleotide"
  source: /note="Description of Combined DNA/RNA Molecule: Synthetic oligonucleotide"
  source: /note="DNA/RNA"
  modified_base (18)..(18): bicyclic nucleic acid (BNA)
  modified_base (19)..(19): bicyclic nucleic acid (BNA)
  source: /note="3' tri-ethylene glycol (TEG)"
uucuguccaagcccggutg

SEQ ID NO: 10314 - DNA, 18 bp, Artificial Sequence
  source: /note="Description of Artificial Sequence: Synthetic oligonucleotide"
  source: /note="Description of Combined DNA/RNA Molecule: Synthetic oligonucleotide"
  source: /note="DNA/RNA"
  modified_base (17)..(17): bicyclic nucleic acid (BNA)
  modified_base (18)..(18): bicyclic nucleic acid (BNA)
  source: /note="3' tri-ethylene glycol (TEG)"
uucuguccaagcccggtt

SEQ ID NO: 10315 - DNA, 17 bp, Artificial Sequence
  source: /note="Description of Artificial Sequence: Synthetic oligonucleotide"
  source: /note="Description of Combined DNA/RNA Molecule: Synthetic oligonucleotide"
  source: /note="DNA/RNA"
  modified_base (16)..(16): bicyclic nucleic acid (BNA)
  modified_base (17)..(17): bicyclic nucleic acid (BNA)
  source: /note="3' tri-ethylene glycol (TEG)"
uucuguccaagcccggt

SEQ ID NO: 10316 - RNA, 16 nt, Artificial Sequence
  source: /note="Description of Artificial Sequence: Synthetic oligonucleotide"
  source: /note="RNA"
  modified_base (15)..(15): bicyclic nucleic acid (BNA)
  modified_base (16)..(16): bicyclic nucleic acid (BNA)
  source: /note="3' tri-ethylene glycol (TEG)"
uucuguccaagcccgg

SEQ ID NO: 10317 - RNA, 15 nt, Artificial Sequence
  source: /note="Description of Artificial Sequence: Synthetic oligonucleotide"
  source: /note="RNA"
  modified_base (14)..(14): bicyclic nucleic acid (BNA)
  modified_base (15)..(15): bicyclic nucleic acid (BNA)
  source: /note="3' tri-ethylene glycol (TEG)"
uucuguccaagcccg

SEQ ID NO: 10318 - RNA, 14 nt, Artificial Sequence
  source: /note="Description of Artificial Sequence: Synthetic oligonucleotide"
  source: /note="RNA"
  modified_base (13)..(13): bicyclic nucleic acid (BNA)
  modified_base (14)..(14): bicyclic nucleic acid (BNA)
  source: /note="3' tri-ethylene glycol (TEG)"
uucuguccaagccc

SEQ ID NO: 10319 - RNA, 13 nt, Artificial Sequence
  source: /note="Description of Artificial Sequence: Synthetic oligonucleotide"
  source: /note="RNA"
  modified_base (12)..(12): bicyclic nucleic acid (BNA)
  modified_base (13)..(13): bicyclic nucleic acid (BNA)
  source: /note="3' tri-ethylene glycol (TEG)"
uucuguccaagcc

SEQ ID NO: 10320 - RNA, 12 nt, Artificial Sequence
  source: /note="Description of Artificial Sequence: Synthetic oligonucleotide"
  source: /note="RNA"
  modified_base (11)..(11): bicyclic nucleic acid (BNA)
  modified_base (12)..(12): bicyclic nucleic acid (BNA)
  source: /note="3' tri-ethylene glycol (TEG)"
uucuguccaagc

SEQ ID NO: 10321 - RNA, 11 nt, Artificial Sequence
  source: /note="Description of Artificial Sequence: Synthetic oligonucleotide"
  source: /note="RNA"
  modified_base (10)..(10): bicyclic nucleic acid (BNA)
  modified_base (11)..(11): bicyclic nucleic acid (BNA)
  source: /note="3' tri-ethylene glycol (TEG)"
uucuguccaag

SEQ ID NO: 10322 - RNA, 10 nt, Artificial Sequence
  source: /note="Description of Artificial Sequence: Synthetic oligonucleotide"
  source: /note="RNA"
  modified_base (9)..(9): bicyclic nucleic acid (BNA)
  modified_base (10)..(10): bicyclic nucleic acid (BNA)
  source: /note="3' tri-ethylene glycol (TEG)"
uucuguccaa

SEQ ID NO: 10323 - RNA, 9 nt, Artificial Sequence
  source: /note="Description of Artificial Sequence: Synthetic oligonucleotide"
  source: /note="RNA"
  modified_base (8)..(8): bicyclic nucleic acid (BNA)
  modified_base (9)..(9): bicyclic nucleic acid (BNA)
  source: /note="3' tri-ethylene glycol (TEG)"
uucugucca

SEQ ID NO: 10324 - RNA, 8 nt, Artificial Sequence
  source: /note="Description of Artificial Sequence: Synthetic oligonucleotide"
  source: /note="RNA"
  modified_base (7)..(7): bicyclic nucleic acid (BNA)
  modified_base (8)..(8): bicyclic nucleic acid (BNA)
  source: /note="3' tri-ethylene glycol (TEG)"
uucugucc

SEQ ID NO: 10325 - RNA, 19 nt, Artificial Sequence
  source: /note="Description of Artificial Sequence: Synthetic oligonucleotide"
  source: /note="RNA"
  modified_base (18)..(18): bicyclic nucleic acid (BNA)
  modified_base (19)..(19): bicyclic nucleic acid (BNA)
  source: /note="3' tri-ethylene glycol (TEG)"
ucuguccaagcccgguuga

SEQ ID NO: 10326 - DNA, 18 bp, Artificial Sequence
  source: /note="Description of Artificial Sequence: Synthetic oligonucleotide"
  source: /note="Description of Combined DNA/RNA Molecule: Synthetic oligonucleotide"
  source: /note="DNA/RNA"
  modified_base (17)..(17): bicyclic nucleic acid (BNA)
  modified_base (18)..(18): bicyclic nucleic acid (BNA)
  source: /note="3' tri-ethylene glycol (TEG)"
ucuguccaagcccggutg

SEQ ID NO: 10327 - DNA, 17 bp, Artificial Sequence
  source: /note="Description of Artificial Sequence: Synthetic oligonucleotide"
  source: /note="Description of Combined DNA/RNA Molecule: Synthetic oligonucleotide"
  source: /note="DNA/RNA"
  modified_base (16)..(16): bicyclic nucleic acid (BNA)
  modified_base (17)..(17): bicyclic nucleic acid (BNA)
  source: /note="3' tri-ethylene glycol (TEG)"
ucuguccaagcccggtt

SEQ ID NO: 10328 - DNA, 16 bp, Artificial Sequence
  source: /note="Description of Artificial Sequence: Synthetic oligonucleotide"
  source: /note="Description of Combined DNA/RNA Molecule: Synthetic oligonucleotide"
  source: /note="DNA/RNA"
  modified_base (15)..(15): bicyclic nucleic acid (BNA)
  modified_base (16)..(16): bicyclic nucleic acid (BNA)
  source: /note="3' tri-ethylene glycol (TEG)"
ucuguccaagcccggt

SEQ ID NO: 10329 - RNA, 15 nt, Artificial Sequence
  source: /note="Description of Artificial Sequence: Synthetic oligonucleotide"
  source: /note="RNA"
  modified_base (14)..(14): bicyclic nucleic acid (BNA)
  modified_base (15)..(15): bicyclic nucleic acid (BNA)
  source: /note="3' tri-ethylene glycol (TEG)"
ucuguccaagcccgg

SEQ ID NO: 10330 - RNA, 14 nt, Artificial Sequence
  source: /note="Description of Artificial Sequence: Synthetic oligonucleotide"
  source: /note="RNA"
  modified_base (13)..(13): bicyclic nucleic acid (BNA)
  modified_base (14)..(14): bicyclic nucleic acid (BNA)
  source: /note="3' tri-ethylene glycol (TEG)"
ucuguccaagcccg

SEQ ID NO: 10331 - RNA, 13 nt, Artificial Sequence
  source: /note="Description of Artificial Sequence: Synthetic oligonucleotide"
  source: /note="RNA"
  modified_base (12)..(12): bicyclic nucleic acid (BNA)
  modified_base (13)..(13): bicyclic nucleic acid (BNA)
  source: /note="3' tri-ethylene glycol (TEG)"
ucuguccaagccc

SEQ ID NO: 10332 - RNA, 12 nt, Artificial Sequence
  source: /note="Description of Artificial Sequence: Synthetic oligonucleotide"
  source: /note="RNA"
  modified_base (11)..(11): bicyclic nucleic acid (BNA)
  modified_base (12)..(12): bicyclic nucleic acid (BNA)
  source: /note="3' tri-ethylene glycol (TEG)"
ucuguccaagcc

SEQ ID NO: 10333 - RNA, 11 nt, Artificial Sequence
  source: /note="Description of Artificial Sequence: Synthetic oligonucleotide"
  source: /note="RNA"
  modified_base (10)..(10): bicyclic nucleic acid (BNA)
  modified_base (11)..(11): bicyclic nucleic acid (BNA)
  source: /note="3' tri-ethylene glycol (TEG)"
ucuguccaagc

SEQ ID NO: 10334 - RNA, 10 nt, Artificial Sequence
  source: /note="Description of Artificial Sequence: Synthetic oligonucleotide"
  source: /note="RNA"
  modified_base (9)..(9): bicyclic nucleic acid (BNA)
  modified_base (10)..(10): bicyclic nucleic acid (BNA)
  source: /note="3' tri-ethylene glycol (TEG)"
ucuguccaag

SEQ ID NO: 10335 - RNA, 9 nt, Artificial Sequence
  source: /note="Description of Artificial Sequence: Synthetic oligonucleotide"
  source: /note="RNA"
  modified_base (8)..(8): bicyclic nucleic acid (BNA)
  modified_base (9)..(9): bicyclic nucleic acid (BNA)
  source: /note="3' tri-ethylene glycol (TEG)"
ucuguccaa

SEQ ID NO: 10336 - RNA, 8 nt, Artificial Sequence
  source: /note="Description of Artificial Sequence: Synthetic oligonucleotide"
  source: /note="RNA"
  modified_base (7)..(7): bicyclic nucleic acid (BNA)
  modified_base (8)..(8): bicyclic nucleic acid (BNA)
  source: /note="3' tri-ethylene glycol (TEG)"
ucugucca

SEQ ID NO: 10337 - DNA, 17 bp, Artificial Sequence
  source: /note="Description of Artificial Sequence: Synthetic oligonucleotide"
  source: /note="Description of Combined DNA/RNA Molecule: Synthetic oligonucleotide"
  source: /note="DNA/RNA"
  modified_base (16)..(16): bicyclic nucleic acid (BNA)
  modified_base (17)..(17): bicyclic nucleic acid (BNA)
  source: /note="3' tri-ethylene glycol (TEG)"
cuguccaagcccggutg

SEQ ID NO: 10338 - DNA, 16 bp, Artificial Sequence
  source: /note="Description of Artificial Sequence: Synthetic oligonucleotide"
  source: /note="Description of Combined DNA/RNA Molecule: Synthetic oligonucleotide"
  source: /note="DNA/RNA"
  modified_base (15)..(15): bicyclic nucleic acid (BNA)
  modified_base (16)..(16): bicyclic nucleic acid (BNA)
  source: /note="3' tri-ethylene glycol (TEG)"
cuguccaagcccggtt

SEQ ID NO: 10339 - DNA, 15 bp, Artificial Sequence
  source: /note="Description of Artificial Sequence: Synthetic oligonucleotide"
  source: /note="Description of Combined DNA/RNA Molecule: Synthetic oligonucleotide"
  source: /note="DNA/RNA"
  modified_base (14)..(14): bicyclic nucleic acid (BNA)
  modified_base (15)..(15): bicyclic nucleic acid (BNA)
  source: /note="3' tri-ethylene glycol (TEG)"
cuguccaagcccggt

SEQ ID NO: 10340 - RNA, 14 nt, Artificial Sequence
  source: /note="Description of Artificial Sequence: Synthetic oligonucleotide"
  source: /note="RNA"
  modified_base (13)..(13): bicyclic nucleic acid (BNA)
  modified_base (14)..(14): bicyclic nucleic acid (BNA)
  source: /note="3' tri-ethylene glycol (TEG)"
cuguccaagcccgg

SEQ ID NO: 10341 - RNA, 13 nt, Artificial Sequence
  source: /note="Description of Artificial Sequence: Synthetic oligonucleotide"
  source: /note="RNA"
  modified_base (12)..(12): bicyclic nucleic acid (BNA)
  modified_base (13)..(13): bicyclic nucleic acid (BNA)
  source: /note="3' tri-ethylene glycol (TEG)"
cuguccaagcccg

SEQ ID NO: 10342 - RNA, 12 nt, Artificial Sequence
  source: /note="Description of Artificial Sequence: Synthetic oligonucleotide"
  source: /note="RNA"
  modified_base (11)..(11): bicyclic nucleic acid (BNA)
  modified_base (12)..(12): bicyclic nucleic acid (BNA)
  source: /note="3' tri-ethylene glycol (TEG)"
cuguccaagccc

SEQ ID NO: 10343 - RNA, 11 nt, Artificial Sequence
  source: /note="Description of Artificial Sequence: Synthetic oligonucleotide"
  source: /note="RNA"
  modified_base (10)..(10): bicyclic nucleic acid (BNA)
  modified_base (11)..(11): bicyclic nucleic acid (BNA)
  source: /note="3' tri-ethylene glycol (TEG)"
cuguccaagcc

SEQ ID NO: 10344 - RNA, 10 nt, Artificial Sequence
  source: /note="Description of Artificial Sequence: Synthetic oligonucleotide"
  source: /note="RNA"
  modified_base (9)..(9): bicyclic nucleic acid (BNA)
  modified_base (10)..(10): bicyclic nucleic acid (BNA)
  source: /note="3' tri-ethylene glycol (TEG)"
cuguccaagc

SEQ ID NO: 10345 - RNA, 9 nt, Artificial Sequence
  source: /note="Description of Artificial Sequence: Synthetic oligonucleotide"
  source: /note="RNA"
  modified_base (8)..(8): bicyclic nucleic acid (BNA)
  modified_base (9)..(9): bicyclic nucleic acid (BNA)
  source: /note="3' tri-ethylene glycol (TEG)"
cuguccaag

SEQ ID NO: 10346 - RNA, 8 nt, Artificial Sequence
  source: /note="Description of Artificial Sequence: Synthetic oligonucleotide"
  source: /note="RNA"
  modified_base (7)..(7): bicyclic nucleic acid (BNA)
  modified_base (8)..(8): bicyclic nucleic acid (BNA)
  source: /note="3' tri-ethylene glycol (TEG)"
cuguccaa

SEQ ID NO: 10347 - DNA, 20 bp, Artificial Sequence
  source: /note="Description of Artificial Sequence: Synthetic oligonucleotide"
  source: /note="Description of Combined DNA/RNA Molecule: Synthetic oligonucleotide"
  source: /note="DNA/RNA"
  modified_base (19)..(19): bicyclic nucleic acid (BNA)
  modified_base (20)..(20): bicyclic nucleic acid (BNA)
  source: /note="3' tri-ethylene glycol (TEG)"
guucuguccaagcccggutg

SEQ ID NO: 10348 - DNA, 19 bp, Artificial Sequence
  source: /note="Description of Artificial Sequence: Synthetic oligonucleotide"
  source: /note="Description of Combined DNA/RNA Molecule: Synthetic oligonucleotide"
  source: /note="DNA/RNA"
  modified_base (18)..(18): bicyclic nucleic acid (BNA)
  modified_base (19)..(19): bicyclic nucleic acid (BNA)
  source: /note="3' tri-ethylene glycol (TEG)"
guucuguccaagcccggtt

SEQ ID NO: 10349 - DNA, 18 bp, Artificial Sequence
  source: /note="Description of Artificial Sequence: Synthetic oligonucleotide"
  source: /note="Description of Combined DNA/RNA Molecule: Synthetic oligonucleotide"
  source: /note="DNA/RNA"
  modified_base (17)..(17): bicyclic nucleic acid (BNA)
  modified_base (18)..(18): bicyclic nucleic acid (BNA)
  source: /note="3' tri-ethylene glycol (TEG)"
guucuguccaagcccggt

SEQ ID NO: 10350 - RNA, 17 nt, Artificial Sequence
  source: /note="Description of Artificial Sequence: Synthetic oligonucleotide"
  source: /note="RNA"
  modified_base (16)..(16): bicyclic nucleic acid (BNA)
  modified_base (17)..(17): bicyclic nucleic acid (BNA)
  source: /note="3' tri-ethylene glycol (TEG)"
guucuguccaagcccgg

SEQ ID NO: 10351 - RNA, 16 nt, Artificial Sequence
  source: /note="Description of Artificial Sequence: Synthetic oligonucleotide"
  source: /note="RNA"
  modified_base (15)..(15): bicyclic nucleic acid (BNA)
  modified_base (16)..(16): bicyclic nucleic acid (BNA)
  source: /note="3' tri-ethylene glycol (TEG)"
guucuguccaagcccg

SEQ ID NO: 10352 - RNA, 15 nt, Artificial Sequence
  source: /note="Description of Artificial Sequence: Synthetic oligonucleotide"
  source: /note="RNA"
  modified_base (14)..(14): bicyclic nucleic acid (BNA)
  modified_base (15)..(15): bicyclic nucleic acid (BNA)
  source: /note="3' tri-ethylene glycol (TEG)"
guucuguccaagccc

SEQ ID NO: 10353 - RNA, 14 nt, Artificial Sequence
  source: /note="Description of Artificial Sequence: Synthetic oligonucleotide"
  source: /note="RNA"
  modified_base (13)..(13): bicyclic nucleic acid (BNA)
  modified_base (14)..(14): bicyclic nucleic acid (BNA)
  source: /note="3' tri-ethylene glycol (TEG)"
guucuguccaagcc

SEQ ID NO: 10354 - RNA, 13 nt, Artificial Sequence
  source: /note="Description of Artificial Sequence: Synthetic oligonucleotide"
  source: /note="RNA"
  modified_base (12)..(12): bicyclic nucleic acid (BNA)
  modified_base (13)..(13): bicyclic nucleic acid (BNA)
  source: /note="3' tri-ethylene glycol (TEG)"
guucuguccaagc

SEQ ID NO: 10355 - RNA, 12 nt, Artificial Sequence
  source: /note="Description of Artificial Sequence: Synthetic oligonucleotide"
  source: /note="RNA"
  modified_base (11)..(11): bicyclic nucleic acid (BNA)
  modified_base (12)..(12): bicyclic nucleic acid (BNA)
  source: /note="3' tri-ethylene glycol (TEG)"
guucuguccaag

SEQ ID NO: 10356 - RNA, 11 nt, Artificial Sequence
  source: /note="Description of Artificial Sequence: Synthetic oligonucleotide"
  source: /note="RNA"
  modified_base (10)..(10): bicyclic nucleic acid (BNA)
  modified_base (11)..(11): bicyclic nucleic acid (BNA)
  source: /note="3' tri-ethylene glycol (TEG)"
guucuguccaa

SEQ ID NO: 10357 - RNA, 10 nt, Artificial Sequence
  source: /note="Description of Artificial Sequence: Synthetic oligonucleotide"
  source: /note="RNA"
  modified_base (9)..(9): bicyclic nucleic acid (BNA)
  modified_base (10)..(10): bicyclic nucleic acid (BNA)
  source: /note="3' tri-ethylene glycol (TEG)"
guucugucca

SEQ ID NO: 10358 - RNA, 9 nt, Artificial Sequence
  source: /note="Description of Artificial Sequence: Synthetic oligonucleotide"
  source: /note="RNA"
  modified_base (8)..(8): bicyclic nucleic acid (BNA)
  modified_base (9)..(9): bicyclic nucleic acid (BNA)
  source: /note="3' tri-ethylene glycol (TEG)"
guucugucc

SEQ ID NO: 10359 - DNA, 8 bp, Artificial Sequence
  source: /note="Description of Artificial Sequence: Synthetic oligonucleotide"
  source: /note="Description of Combined DNA/RNA Molecule: Synthetic oligonucleotide"
  source: /note="DNA/RNA"
  modified_base (7)..(7): bicyclic nucleic acid (BNA)
  modified_base (8)..(8): bicyclic nucleic acid (BNA)
  source: /note="3' tri-ethylene glycol (TEG)"
guucugtc

SEQ ID NO: 10360 - DNA, 20 bp, Artificial Sequence
  source: /note="Description of Artificial Sequence: Synthetic oligonucleotide"
  source: /note="Description of Combined DNA/RNA Molecule: Synthetic oligonucleotide"
  source: /note="DNA/RNA"
  modified_base (19)..(19): bicyclic nucleic acid (BNA)
  modified_base (20)..(20): bicyclic nucleic acid (BNA)
  source: /note="3' tri-ethylene glycol (TEG)"
aguucuguccaagcccggtt

SEQ ID NO: 10361 - DNA, 19 bp, Artificial Sequence
  source: /note="Description of Artificial Sequence: Synthetic oligonucleotide"
  source: /note="Description of Combined DNA/RNA Molecule: Synthetic oligonucleotide"
  source: /note="DNA/RNA"
  modified_base (18)..(18): bicyclic nucleic acid (BNA)
  modified_base (19)..(19): bicyclic nucleic acid (BNA)
  source: /note="3' tri-ethylene glycol (TEG)"
aguucuguccaagcccggt

SEQ ID NO: 10362 - RNA, 18 nt, Artificial Sequence
  source: /note="Description of Artificial Sequence: Synthetic oligonucleotide"
  source: /note="RNA"
  modified_base (17)..(17): bicyclic nucleic acid (BNA)
  modified_base (18)..(18): bicyclic nucleic acid (BNA)
  source: /note="3' tri-ethylene glycol (TEG)"
aguucuguccaagcccgg

SEQ ID NO: 10363 - RNA, 17 nt, Artificial Sequence
  source: /note="Description of Artificial Sequence: Synthetic oligonucleotide"
  source: /note="RNA"
  modified_base (16)..(16): bicyclic nucleic acid (BNA)
  modified_base (17)..(17): bicyclic nucleic acid (BNA)
  source: /note="3' tri-ethylene glycol (TEG)"
aguucuguccaagcccg

SEQ ID NO: 10364 - RNA, 16 nt, Artificial Sequence
  source: /note="Description of Artificial Sequence: Synthetic oligonucleotide"
  source: /note="RNA"
  modified_base (15)..(15): bicyclic nucleic acid (BNA)
  modified_base (16)..(16): bicyclic nucleic acid (BNA)
  source: /note="3' tri-ethylene glycol (TEG)"
aguucuguccaagccc

SEQ ID NO: 10365 - RNA, 15 nt, Artificial Sequence
  source: /note="Description of Artificial Sequence: Synthetic oligonucleotide"
  source: /note="RNA"
  modified_base (14)..(14): bicyclic nucleic acid (BNA)
  modified_base (15)..(15): bicyclic nucleic acid (BNA)
  source: /note="3' tri-ethylene glycol (TEG)"
aguucuguccaagcc

SEQ ID NO: 10366 - RNA, 14 nt, Artificial Sequence
  source: /note="Description of Artificial Sequence: Synthetic oligonucleotide"
  source: /note="RNA"
  modified_base (13)..(13): bicyclic nucleic acid (BNA)
  modified_base (14)..(14): bicyclic nucleic acid (BNA)
  source: /note="3' tri-ethylene glycol (TEG)"
aguucuguccaagc

SEQ ID NO: 10367 - RNA, 13 nt, Artificial Sequence
  source: /note="Description of Artificial Sequence: Synthetic oligonucleotide"
  source: /note="RNA"
  modified_base (12)..(12): bicyclic nucleic acid (BNA)
  modified_base (13)..(13): bicyclic nucleic acid (BNA)
  source: /note="3' tri-ethylene glycol (TEG)"
aguucuguccaag

SEQ ID NO: 10368 - RNA, 12 nt, Artificial Sequence
  source: /note="Description of Artificial Sequence: Synthetic oligonucleotide"
  source: /note="RNA"
  modified_base (11)..(11): bicyclic nucleic acid (BNA)
  modified_base (12)..(12): bicyclic nucleic acid (BNA)
  source: /note="3' tri-ethylene glycol (TEG)"
aguucuguccaa

SEQ ID NO: 10369 - RNA, 11 nt, Artificial Sequence
  source: /note="Description of Artificial Sequence: Synthetic oligonucleotide"
  source: /note="RNA"
  modified_base (10)..(10): bicyclic nucleic acid (BNA)
  modified_base (11)..(11): bicyclic nucleic acid (BNA)
  source: /note="3' tri-ethylene glycol (TEG)"
aguucugucca

SEQ ID NO: 10370 - RNA, 10 nt, Artificial Sequence
  source: /note="Description of Artificial Sequence: Synthetic oligonucleotide"
  source: /note="RNA"
  modified_base (9)..(9): bicyclic nucleic acid (BNA)
  modified_base (10)..(10): bicyclic nucleic acid (BNA)
  source: /note="3' tri-ethylene glycol (TEG)"
aguucugucc

SEQ ID NO: 10371 - DNA, 9 bp, Artificial Sequence
  source: /note="Description of Artificial Sequence: Synthetic oligonucleotide"
  source: /note="Description of Combined DNA/RNA Molecule: Synthetic oligonucleotide"
  source: /note="DNA/RNA"
  modified_base (8)..(8): bicyclic nucleic acid (BNA)
  modified_base (9)..(9): bicyclic nucleic acid (BNA)
  source: /note="3' tri-ethylene glycol (TEG)"
aguucugtc

SEQ ID NO: 10372 - DNA, 8 bp, Artificial Sequence
  source: /note="Description of Artificial Sequence: Synthetic oligonucleotide"
  source: /note="Description of Combined DNA/RNA Molecule: Synthetic oligonucleotide"
  source: /note="DNA/RNA"
  modified_base (7)..(7): bicyclic nucleic acid (BNA)
  modified_base (8)..(8): bicyclic nucleic acid (BNA)
  source: /note="3' tri-ethylene glycol (TEG)"
aguucugt

SEQ ID NO: 10373 - DNA, 20 bp, Artificial Sequence
  source: /note="Description of Artificial Sequence: Synthetic oligonucleotide"
  source: /note="Description of Combined DNA/RNA Molecule: Synthetic oligonucleotide"
  source: /note="DNA/RNA"
  modified_base (19)..(19): bicyclic nucleic acid (BNA)
  modified_base (20)..(20): bicyclic nucleic acid (BNA)
  source: /note="3' tri-ethylene glycol (TEG)"
aaguucuguccaagcccggt

SEQ ID NO: 10374 - RNA, 19 nt, Artificial Sequence
  source: /note="Description of Artificial Sequence: Synthetic oligonucleotide"
  source: /note="RNA"
  modified_base (18)..(18): bicyclic nucleic acid (BNA)
  modified_base (19)..(19): bicyclic nucleic acid (BNA)
  source: /note="3' tri-ethylene glycol (TEG)"
aaguucuguccaagcccgg

SEQ ID NO: 10375 - RNA, 18 nt, Artificial Sequence
  source: /note="Description of Artificial Sequence: Synthetic oligonucleotide"
  source: /note="RNA"
  modified_base (17)..(17): bicyclic nucleic acid (BNA)
  modified_base (18)..(18): bicyclic nucleic acid (BNA)
  source: /note="3' tri-ethylene glycol (TEG)"
aaguucuguccaagcccg

SEQ ID NO: 10376 - RNA, 17 nt, Artificial Sequence
  source: /note="Description of Artificial Sequence: Synthetic oligonucleotide"
  source: /note="RNA"
  modified_base (16)..(16): bicyclic nucleic acid (BNA)
  modified_base (17)..(17): bicyclic nucleic acid (BNA)
  source: /note="3' tri-ethylene glycol (TEG)"
aaguucuguccaagccc

SEQ ID NO: 10377 - RNA, 16 nt, Artificial Sequence
  source: /note="Description of Artificial Sequence: Synthetic oligonucleotide"
  source: /note="RNA"
  modified_base (15)..(15): bicyclic nucleic acid (BNA)
  modified_base (16)..(16): bicyclic nucleic acid (BNA)
  source: /note="3' tri-ethylene glycol (TEG)"
aaguucuguccaagcc

SEQ ID NO: 10378 - RNA, 15 nt, Artificial Sequence
  source: /note="Description of Artificial Sequence: Synthetic oligonucleotide"
  source: /note="RNA"
  modified_base (14)..(14): bicyclic nucleic acid (BNA)
  modified_base (15)..(15): bicyclic nucleic acid (BNA)
  source: /note="3' tri-ethylene glycol (TEG)"
aaguucuguccaagc

SEQ ID NO: 10379 - RNA, 14 nt, Artificial Sequence
  source: /note="Description of Artificial Sequence: Synthetic oligonucleotide"
  source: /note="RNA"
  modified_base (13)..(13): bicyclic nucleic acid (BNA)
  modified_base (14)..(14): bicyclic nucleic acid (BNA)
  source: /note="3' tri-ethylene glycol (TEG)"
aaguucuguccaag

SEQ ID NO: 10380 - RNA, 13 nt, Artificial Sequence
  source: /note="Description of Artificial Sequence: Synthetic oligonucleotide"
  source: /note="RNA"
  modified_base (12)..(12): bicyclic nucleic acid (BNA)
  modified_base (13)..(13): bicyclic nucleic acid (BNA)
  source: /note="3' tri-ethylene glycol (TEG)"
aaguucuguccaa

SEQ ID NO: 10381 - RNA, 12 nt, Artificial Sequence
  source: /note="Description of Artificial Sequence: Synthetic oligonucleotide"
  source: /note="RNA"
  modified_base (11)..(11): bicyclic nucleic acid (BNA)
  modified_base (12)..(12): bicyclic nucleic acid (BNA)
  source: /note="3' tri-ethylene glycol (TEG)"
aaguucugucca

SEQ ID NO: 10382 - RNA, 11 nt, Artificial Sequence
  source: /note="Description of Artificial Sequence: Synthetic oligonucleotide"
  source: /note="RNA"
  modified_base (10)..(10): bicyclic nucleic acid (BNA)
  modified_base (11)..(11): bicyclic nucleic acid (BNA)
  source: /note="3' tri-ethylene glycol (TEG)"
aaguucugucc

SEQ ID NO: 10383 - DNA, 10 bp, Artificial Sequence
  source: /note="Description of Artificial Sequence: Synthetic oligonucleotide"
  source: /note="Description of Combined DNA/RNA Molecule: Synthetic oligonucleotide"
  source: /note="DNA/RNA"
  modified_base (9)..(9): bicyclic nucleic acid (BNA)
  modified_base (10)..(10): bicyclic nucleic acid (BNA)
  source: /note="3' tri-ethylene glycol (TEG)"
aaguucugtc

SEQ ID NO: 10384 - DNA, 9 bp, Artificial Sequence
  source: /note="Description of Artificial Sequence: Synthetic oligonucleotide"
  source: /note="Description of Combined DNA/RNA Molecule: Synthetic oligonucleotide"
  source: /note="DNA/RNA"
  modified_base (8)..(8): bicyclic nucleic acid (BNA)
  modified_base (9)..(9): bicyclic nucleic acid (BNA)
  source: /note="3' tri-ethylene glycol (TEG)"
aaguucugt

SEQ ID NO: 10385 - DNA, 8 bp, Artificial Sequence
  source: /note="Description of Artificial Sequence: Synthetic oligonucleotide"
  source: /note="Description of Combined DNA/RNA Molecule: Synthetic oligonucleotide"
  source: /note="DNA/RNA"
  modified_base (7)..(7): bicyclic nucleic acid (BNA)
  modified_base (8)..(8): bicyclic nucleic acid (BNA)
  source: /note="3' tri-ethylene glycol (TEG)"
aaguuctg

SEQ ID NO: 10386 - RNA, 20 nt, Artificial Sequence
  source: /note="Description of Artificial Sequence: Synthetic oligonucleotide"
  source: /note="RNA"
  modified_base (19)..(19): bicyclic nucleic acid (BNA)
  modified_base (20)..(20): bicyclic nucleic acid (BNA)
  source: /note="3' tri-ethylene glycol (TEG)"
uaaguucuguccaagcccgg

SEQ ID NO: 10387 - RNA, 19 nt, Artificial Sequence
  source: /note="Description of Artificial Sequence: Synthetic oligonucleotide"
  source: /note="RNA"
  modified_base (18)..(18): bicyclic nucleic acid (BNA)
  modified_base (19)..(19): bicyclic nucleic acid (BNA)
  source: /note="3' tri-ethylene glycol (TEG)"
uaaguucuguccaagcccg

SEQ ID NO: 10388 - RNA, 18 nt, Artificial Sequence
  source: /note="Description of Artificial Sequence: Synthetic oligonucleotide"
  source: /note="RNA"
  modified_base (17)..(17): bicyclic nucleic acid (BNA)
  modified_base (18)..(18): bicyclic nucleic acid (BNA)
  source: /note="3' tri-ethylene glycol (TEG)"
uaaguucuguccaagccc

SEQ ID NO: 10389 - RNA, 17 nt, Artificial Sequence
  source: /note="Description of Artificial Sequence: Synthetic oligonucleotide"
  source: /note="RNA"
  modified_base (16)..(16): bicyclic nucleic acid (BNA)
  modified_base (17)..(17): bicyclic nucleic acid (BNA)
  source: /note="3' tri-ethylene glycol (TEG)"
uaaguucuguccaagcc

SEQ ID NO: 10390 - RNA, 16 nt, Artificial Sequence
  source: /note="Description of Artificial Sequence: Synthetic oligonucleotide"
  source: /note="RNA"
  modified_base (15)..(15): bicyclic nucleic acid (BNA)
  modified_base (16)..(16): bicyclic nucleic acid (BNA)
  source: /note="3' tri-ethylene glycol (TEG)"
uaaguucuguccaagc

SEQ ID NO: 10391 - RNA, 14 nt, Artificial Sequence
  source: /note="Description of Artificial Sequence: Synthetic oligonucleotide"
  source: /note="RNA"
  modified_base (13)..(13): bicyclic nucleic acid (BNA)
  modified_base (14)..(14): bicyclic nucleic acid (BNA)
  source: /note="3' tri-ethylene glycol (TEG)"
uaaguucuguccaa

SEQ ID NO: 10392 - RNA, 13 nt, Artificial Sequence
  source: /note="Description of Artificial Sequence: Synthetic oligonucleotide"
  source: /note="RNA"
  modified_base (12)..(12): bicyclic nucleic acid (BNA)
  modified_base (13)..(13): bicyclic nucleic acid (BNA)
  source: /note="3' tri-ethylene glycol (TEG)"
uaaguucugucca

SEQ ID NO: 10393 - RNA, 12 nt, Artificial Sequence
  source: /note="Description of Artificial Sequence: Synthetic oligonucleotide"
  source: /note="RNA"
  modified_base (11)..(11): bicyclic nucleic acid (BNA)
  modified_base (12)..(12): bicyclic nucleic acid (BNA)
  source: /note="3' tri-ethylene glycol (TEG)"
uaaguucugucc

SEQ ID NO: 10394 - DNA, 11 bp, Artificial Sequence
  source: /note="Description of Artificial Sequence: Synthetic oligonucleotide"
  source: /note="Description of Combined DNA/RNA Molecule: Synthetic oligonucleotide"
  source: /note="DNA/RNA"
  modified_base (10)..(10): bicyclic nucleic acid (BNA)
  modified_base (11)..(11): bicyclic nucleic acid (BNA)
  source: /note="3' tri-ethylene glycol (TEG)"
uaaguucugtc

SEQ ID NO: 10395 - DNA, 10 bp, Artificial Sequence
  source: /note="Description of Artificial Sequence: Synthetic oligonucleotide"
  source: /note="Description of Combined DNA/RNA Molecule: Synthetic oligonucleotide"
  source: /note="DNA/RNA"
  modified_base (9)..(9): bicyclic nucleic acid (BNA)
  modified_base (10)..(10): bicyclic nucleic acid (BNA)
  source: /note="3' tri-ethylene glycol (TEG)"
uaaguucugt

SEQ ID NO: 10396 - DNA, 9 bp, Artificial Sequence
  source: /note="Description of Artificial Sequence: Synthetic oligonucleotide"
  source: /note="Description of Combined DNA/RNA Molecule: Synthetic oligonucleotide"
  source: /note="DNA/RNA"
  modified_base (8)..(8): bicyclic nucleic acid (BNA)
  modified_base (9)..(9): bicyclic nucleic acid (BNA)
  source: /note="3' tri-ethylene glycol (TEG)"
uaaguuctg

SEQ ID NO: 10397 - DNA, 8 bp, Artificial Sequence
  source: /note="Description of Artificial Sequence: Synthetic oligonucleotide"
  source: /note="Description of Combined DNA/RNA Molecule: Synthetic oligonucleotide"
  source: /note="DNA/RNA"
  modified_base (7)..(7): bicyclic nucleic acid (BNA)
  modified_base (8)..(8): bicyclic nucleic acid (BNA)
  source: /note="3' tri-ethylene glycol (TEG)"
uaaguuct

SEQ ID NO: 10398 - RNA, 20 nt, Artificial Sequence
  source: /note="Description of Artificial Sequence: Synthetic oligonucleotide"
  source: /note="RNA"
  modified_base (19)..(19): bicyclic nucleic acid (BNA)
  modified_base (20)..(20): bicyclic nucleic acid (BNA)
  source: /note="3' tri-ethylene glycol (TEG)"
guaaguucuguccaagcccg

SEQ ID NO: 10399 - RNA, 19 nt, Artificial Sequence
  source: /note="Description of Artificial Sequence: Synthetic oligonucleotide"
  source: /note="RNA"
  modified_base (18)..(18): bicyclic nucleic acid (BNA)
  modified_base (19)..(19): bicyclic nucleic acid (BNA)
  source: /note="3' tri-ethylene glycol (TEG)"
guaaguucuguccaagccc

SEQ ID NO: 10400 - RNA, 17 nt, Artificial Sequence
  source: /note="Description of Artificial Sequence: Synthetic oligonucleotide"
  source: /note="RNA"
  modified_base (16)..(16): bicyclic nucleic acid (BNA)
  modified_base (17)..(17): bicyclic nucleic acid (BNA)
  source: /note="3' tri-ethylene glycol (TEG)"
guaaguucuguccaagc

SEQ ID NO: 10401 - RNA, 16 nt, Artificial Sequence
  source: /note="Description of Artificial Sequence: Synthetic oligonucleotide"
  source: /note="RNA"
  modified_base (15)..(15): bicyclic nucleic acid (BNA)
  modified_base (16)..(16): bicyclic nucleic acid (BNA)
  source: /note="3' tri-ethylene glycol (TEG)"
guaaguucuguccaag

SEQ ID NO: 10402 - RNA, 15 nt, Artificial Sequence
  source: /note="Description of Artificial Sequence: Synthetic oligonucleotide"
  source: /note="RNA"
  modified_base (14)..(14): bicyclic nucleic acid (BNA)
  modified_base (15)..(15): bicyclic nucleic acid (BNA)
  source: /note="3' tri-ethylene glycol (TEG)"
guaaguucuguccaa

SEQ ID NO: 10403 - RNA, 14 nt, Artificial Sequence
  source: /note="Description of Artificial Sequence: Synthetic oligonucleotide"
  source: /note="RNA"
  modified_base (13)..(13): bicyclic nucleic acid (BNA)
  modified_base (14)..(14): bicyclic nucleic acid (BNA)
  source: /note="3' tri-ethylene glycol (TEG)"
guaaguucugucca

SEQ ID NO: 10404 - RNA, 13 nt, Artificial Sequence
  source: /note="Description of Artificial Sequence: Synthetic oligonucleotide"
  source: /note="RNA"
  modified_base (12)..(12): bicyclic nucleic acid (BNA)
  modified_base (13)..(13): bicyclic nucleic acid (BNA)
  source: /note="3' tri-ethylene glycol (TEG)"
guaaguucugucc

SEQ ID NO: 10405 - DNA, 12 bp, Artificial Sequence
  source: /note="Description of Artificial Sequence: Synthetic oligonucleotide"
  source: /note="Description of Combined DNA/RNA Molecule: Synthetic oligonucleotide"
  source: /note="DNA/RNA"
  modified_base (11)..(11): bicyclic nucleic acid (BNA)
  modified_base (12)..(12): bicyclic nucleic acid (BNA)
  source: /note="3' tri-ethylene glycol (TEG)"
guaaguucugtc

SEQ ID NO: 10406 - DNA, 11 bp, Artificial Sequence
  source: /note="Description of Artificial Sequence: Synthetic oligonucleotide"
  source: /note="Description of Combined DNA/RNA Molecule: Synthetic oligonucleotide"
  source: /note="DNA/RNA"
  modified_base (10)..(10): bicyclic nucleic acid (BNA)
  modified_base (11)..(11): bicyclic nucleic acid (BNA)
  source: /note="3' tri-ethylene glycol (TEG)"
guaaguucugt

SEQ ID NO: 10407 - DNA, 10 bp, Artificial Sequence
  source: /note="Description of Artificial Sequence: Synthetic oligonucleotide"
  source: /note="Description of Combined DNA/RNA Molecule: Synthetic oligonucleotide"
  source: /note="DNA/RNA"
  modified_base (9)..(9): bicyclic nucleic acid (BNA)
  modified_base (10)..(10): bicyclic nucleic acid (BNA)
  source: /note="3' tri-ethylene glycol (TEG)"
guaaguuctg

SEQ ID NO: 10408 - DNA, 9 bp, Artificial Sequence
  source: /note="Description of Artificial Sequence: Synthetic oligonucleotide"
  source: /note="Description of Combined DNA/RNA Molecule: Synthetic oligonucleotide"
  source: /note="DNA/RNA"
  modified_base (8)..(8): bicyclic nucleic acid (BNA)
  modified_base (9)..(9): bicyclic nucleic acid (BNA)
  source: /note="3' tri-ethylene glycol (TEG)"
guaaguuct

SEQ ID NO: 10409 - DNA, 8 bp, Artificial Sequence
  source: /note="Description of Artificial Sequence: Synthetic oligonucleotide"
  source: /note="Description of Combined DNA/RNA Molecule: Synthetic oligonucleotide"
  source: /note="DNA/RNA"
  modified_base (7)..(7): bicyclic nucleic acid (BNA)
  modified_base (8)..(8): bicyclic nucleic acid (BNA)
  source: /note="3' tri-ethylene glycol (TEG)"
guaagutc

SEQ ID NO: 10410 - RNA, 20 nt, Artificial Sequence
  source: /note="Description of Artificial Sequence: Synthetic oligonucleotide"
  source: /note="RNA"
  modified_base (19)..(19): bicyclic nucleic acid (BNA)
  modified_base (20)..(20): bicyclic nucleic acid (BNA)
  source: /note="3' tri-ethylene glycol (TEG)"
gguaaguucuguccaagccc

SEQ ID NO: 10411 - RNA, 19 nt, Artificial Sequence
  source: /note="Description of Artificial Sequence: Synthetic oligonucleotide"
  source: /note="RNA"
  modified_base (18)..(18): bicyclic nucleic acid (BNA)
  modified_base (19)..(19): bicyclic nucleic acid (BNA)
  source: /note="3' tri-ethylene glycol (TEG)"
gguaaguucuguccaagcc

SEQ ID NO: 10412 - RNA, 17 nt, Artificial Sequence
  source: /note="Description of Artificial Sequence: Synthetic oligonucleotide"
  source: /note="RNA"
  modified_base (16)..(16): bicyclic nucleic acid (BNA)
  modified_base (17)..(17): bicyclic nucleic acid (BNA)
  source: /note="3' tri-ethylene glycol (TEG)"
gguaaguucuguccaag

SEQ ID NO: 10413 - RNA, 16 nt, Artificial Sequence
  source: /note="Description of Artificial Sequence: Synthetic oligonucleotide"
  source: /note="RNA"
  modified_base (15)..(15): bicyclic nucleic acid (BNA)
  modified_base (16)..(16): bicyclic nucleic acid (BNA)
  source: /note="3' tri-ethylene glycol (TEG)"
gguaaguucuguccaa

SEQ ID NO: 10414 - RNA, 15 nt, Artificial Sequence
  source: /note="Description of Artificial Sequence: Synthetic oligonucleotide"
  source: /note="RNA"
  modified_base (14)..(14): bicyclic nucleic acid (BNA)
  modified_base (15)..(15): bicyclic nucleic acid (BNA)
  source: /note="3' tri-ethylene glycol (TEG)"
gguaaguucugucca

SEQ ID NO: 10415 - RNA, 14 nt, Artificial Sequence
  source: /note="Description of Artificial Sequence: Synthetic oligonucleotide"
  source: /note="RNA"
  modified_base (13)..(13): bicyclic nucleic acid (BNA)
  modified_base (14)..(14): bicyclic nucleic acid (BNA)
  source: /note="3' tri-ethylene glycol (TEG)"
gguaaguucugucc

SEQ ID NO: 10416 - DNA, 13 bp, Artificial Sequence
  source: /note="Description of Artificial Sequence: Synthetic oligonucleotide"
  source: /note="Description of Combined DNA/RNA Molecule: Synthetic oligonucleotide"
  source: /note="DNA/RNA"
  modified_base (12)..(12): bicyclic nucleic acid (BNA)
  modified_base (13)..(13): bicyclic nucleic acid (BNA)
  source: /note="3' tri-ethylene glycol (TEG)"
gguaaguucugtc

SEQ ID NO: 10417 - DNA, 12 bp, Artificial Sequence
  source: /note="Description of Artificial Sequence: Synthetic oligonucleotide"
  source: /note="Description of Combined DNA/RNA Molecule: Synthetic oligonucleotide"
  source: /note="DNA/RNA"
  modified_base (11)..(11): bicyclic nucleic acid (BNA)
  modified_base (12)..(12): bicyclic nucleic acid (BNA)
  source: /note="3' tri-ethylene glycol (TEG)"
gguaaguucugt

SEQ ID NO: 10418 - DNA, 11 bp, Artificial Sequence
  source: /note="Description of Artificial Sequence: Synthetic oligonucleotide"
  source: /note="Description of Combined DNA/RNA Molecule: Synthetic oligonucleotide"
  source: /note="DNA/RNA"
  modified_base (10)..(10): bicyclic nucleic acid (BNA)
  modified_base (11)..(11): bicyclic nucleic acid (BNA)
  source: /note="3' tri-ethylene glycol (TEG)"
gguaaguuctg

SEQ ID NO: 10419 - DNA, 10 bp, Artificial Sequence
  source: /note="Description of Artificial Sequence: Synthetic oligonucleotide"
  source: /note="Description of Combined DNA/RNA Molecule: Synthetic oligonucleotide"
  source: /note="DNA/RNA"
  modified_base (9)..(9): bicyclic nucleic acid (BNA)
  modified_base (10)..(10): bicyclic nucleic acid (BNA)
  source: /note="3' tri-ethylene glycol (TEG)"
gguaaguuct

SEQ ID NO: 10420 - DNA, 9 bp, Artificial Sequence
  source: /note="Description of Artificial Sequence: Synthetic oligonucleotide"
  source: /note="Description of Combined DNA/RNA Molecule: Synthetic oligonucleotide"
  source: /note="DNA/RNA"
  modified_base (8)..(8): bicyclic nucleic acid (BNA)
  modified_base (9)..(9): bicyclic nucleic acid (BNA)
  source: /note="3' tri-ethylene glycol (TEG)"
gguaagutc

SEQ ID NO: 10421 - DNA, 8 bp, Artificial Sequence
  source: /note="Description of Artificial Sequence: Synthetic oligonucleotide"
  source: /note="Description of Combined DNA/RNA Molecule: Synthetic oligonucleotide"
  source: /note="DNA/RNA"
  modified_base (7)..(7): bicyclic nucleic acid (BNA)
  modified_base (8)..(8): bicyclic nucleic acid (BNA)
  source: /note="3' tri-ethylene glycol (TEG)"
gguaagtt

SEQ ID NO: 10422 - RNA, 20 nt, Artificial Sequence
  source: /note="Description of Artificial Sequence: Synthetic oligonucleotide"
  source: /note="RNA"
  modified_base (19)..(19): bicyclic nucleic acid (BNA)
  modified_base (20)..(20): bicyclic nucleic acid (BNA)
  source: /note="3' tri-ethylene glycol (TEG)"
cgguaaguucuguccaagcc

SEQ ID NO: 10423 - RNA, 19 nt, Artificial Sequence
  source: /note="Description of Artificial Sequence: Synthetic oligonucleotide"
  source: /note="RNA"
  modified_base (18)..(18): bicyclic nucleic acid (BNA)
  modified_base (19)..(19): bicyclic nucleic acid (BNA)
  source: /note="3' tri-ethylene glycol (TEG)"
cgguaaguucuguccaagc

SEQ ID NO: 10424 - RNA, 18 nt, Artificial Sequence
  source: /note="Description of Artificial Sequence: Synthetic oligonucleotide"
  source: /note="RNA"
  modified_base (17)..(17): bicyclic nucleic acid (BNA)
  modified_base (18)..(18): bicyclic nucleic acid (BNA)
  source: /note="3' tri-ethylene glycol (TEG)"
cgguaaguucuguccaag

SEQ ID NO: 10425 - RNA, 17 nt, Artificial Sequence
  source: /note="Description of Artificial Sequence: Synthetic oligonucleotide"
  source: /note="RNA"
  modified_base (16)..(16): bicyclic nucleic acid (BNA)
  modified_base (17)..(17): bicyclic nucleic acid (BNA)
  source: /note="3' tri-ethylene glycol (TEG)"
cgguaaguucuguccaa

SEQ ID NO: 10426 - RNA, 16 nt, Artificial Sequence
  source: /note="Description of Artificial Sequence: Synthetic oligonucleotide"
  source: /note="RNA"
  modified_base (15)..(15): bicyclic nucleic acid (BNA)
  modified_base (16)..(16): bicyclic nucleic acid (BNA)
  source: /note="3' tri-ethylene glycol (TEG)"
cgguaaguucugucca

SEQ ID NO: 10427 - RNA, 15 nt, Artificial Sequence
  source: /note="Description of Artificial Sequence: Synthetic oligonucleotide"
  source: /note="RNA"
  modified_base (14)..(14): bicyclic nucleic acid (BNA)
  modified_base (15)..(15): bicyclic nucleic acid (BNA)
  source: /note="3' tri-ethylene glycol (TEG)"
cgguaaguucugucc

SEQ ID NO: 10428 - DNA, 14 bp, Artificial Sequence
  source: /note="Description of Artificial Sequence: Synthetic oligonucleotide"
  source: /note="Description of Combined DNA/RNA Molecule: Synthetic oligonucleotide"
  source: /note="DNA/RNA"
  modified_base (13)..(13): bicyclic nucleic acid (BNA)
  modified_base (14)..(14): bicyclic nucleic acid (BNA)
  source: /note="3' tri-ethylene glycol (TEG)"
cgguaaguucugtc

SEQ ID NO: 10429 - DNA, 13 bp, Artificial Sequence
  source: /note="Description of Artificial Sequence: Synthetic oligonucleotide"
  source: /note="Description of Combined DNA/RNA Molecule: Synthetic oligonucleotide"
  source: /note="DNA/RNA"
  modified_base (12)..(12): bicyclic nucleic acid (BNA)
  modified_base (13)..(13): bicyclic nucleic acid (BNA)
  source: /note="3' tri-ethylene glycol (TEG)"
cgguaaguucugt

SEQ ID NO: 10430 - DNA, 12 bp, Artificial Sequence
  source: /note="Description of Artificial Sequence: Synthetic oligonucleotide"
  source: /note="Description of Combined DNA/RNA Molecule: Synthetic oligonucleotide"
  source: /note="DNA/RNA"
  modified_base (11)..(11): bicyclic nucleic acid (BNA)
  modified_base (12)..(12): bicyclic nucleic acid (BNA)
  source: /note="3' tri-ethylene glycol (TEG)"
cgguaaguuctg

SEQ ID NO: 10431 - DNA, 11 bp, Artificial Sequence
  source: /note="Description of Artificial Sequence: Synthetic oligonucleotide"
  source: /note="Description of Combined DNA/RNA Molecule: Synthetic oligonucleotide"
  source: /note="DNA/RNA"
  modified_base (10)..(10): bicyclic nucleic acid (BNA)
  modified_base (11)..(11): bicyclic nucleic acid (BNA)
  source: /note="3' tri-ethylene glycol (TEG)"
cgguaaguuct

SEQ ID NO: 10432 - DNA, 10 bp, Artificial Sequence
  source: /note="Description of Artificial Sequence: Synthetic oligonucleotide"
  source: /note="Description of Combined DNA/RNA Molecule: Synthetic oligonucleotide"
  source: /note="DNA/RNA"
  modified_base (9)..(9): bicyclic nucleic acid (BNA)
  modified_base (10)..(10): bicyclic nucleic acid (BNA)
  source: /note="3' tri-ethylene glycol (TEG)"
cgguaagutc

SEQ ID NO: 10433 - DNA, 9 bp, Artificial Sequence
  source: /note="Description of Artificial Sequence: Synthetic oligonucleotide"
  source: /note="Description of Combined DNA/RNA Molecule: Synthetic oligonucleotide"
  source: /note="DNA/RNA"
  modified_base (8)..(8): bicyclic nucleic acid (BNA)
  modified_base (9)..(9): bicyclic nucleic acid (BNA)
  source: /note="3' tri-ethylene glycol (TEG)"
cgguaagtt

SEQ ID NO: 10434 - DNA, 8 bp, Artificial Sequence
  source: /note="Description of Artificial Sequence: Synthetic oligonucleotide"
  source: /note="Description of Combined DNA/RNA Molecule: Synthetic oligonucleotide"
  source: /note="DNA/RNA"
  modified_base (7)..(7): bicyclic nucleic acid (BNA)
  modified_base (8)..(8): bicyclic nucleic acid (BNA)
  source: /note="3' tri-ethylene glycol (TEG)"
cgguaagt

SEQ ID NO: 10435 - RNA, 20 nt, Artificial Sequence
  source: /note="Description of Artificial Sequence: Synthetic oligonucleotide"
  source: /note="RNA"
  modified_base (19)..(19): bicyclic nucleic acid (BNA)
  modified_base (20)..(20): bicyclic nucleic acid (BNA)
  source: /note="3' tri-ethylene glycol (TEG)"
ucgguaaguucuguccaagc

SEQ ID NO: 10436 - RNA, 19 nt, Artificial Sequence
  source: /note="Description of Artificial Sequence: Synthetic oligonucleotide"
  source: /note="RNA"
  modified_base (18)..(18): bicyclic nucleic acid (BNA)
  modified_base (19)..(19): bicyclic nucleic acid (BNA)
  source: /note="3' tri-ethylene glycol (TEG)"
ucgguaaguucuguccaag

SEQ ID NO: 10437 - RNA, 18 nt, Artificial Sequence
  source: /note="Description of Artificial Sequence: Synthetic oligonucleotide"
  source: /note="RNA"
  modified_base (17)..(17): bicyclic nucleic acid (BNA)
  modified_base (18)..(18): bicyclic nucleic acid (BNA)
  source: /note="3' tri-ethylene glycol (TEG)"
ucgguaaguucuguccaa

SEQ ID NO: 10438 - RNA, 17 nt, Artificial Sequence
  source: /note="Description of Artificial Sequence: Synthetic oligonucleotide"
  source: /note="RNA"
  modified_base (16)..(16): bicyclic nucleic acid (BNA)
  modified_base (17)..(17): bicyclic nucleic acid (BNA)
  source: /note="3' tri-ethylene glycol (TEG)"
ucgguaaguucugucca

SEQ ID NO: 10439 - RNA, 16 nt, Artificial Sequence
  source: /note="Description of Artificial Sequence: Synthetic oligonucleotide"
  source: /note="RNA"
  modified_base (15)..(15): bicyclic nucleic acid (BNA)
  modified_base (16)..(16): bicyclic nucleic acid (BNA)
  source: /note="3' tri-ethylene glycol (TEG)"
ucgguaaguucugucc

SEQ ID NO: 10440 - DNA, 15 bp, Artificial Sequence
  source: /note="Description of Artificial Sequence: Synthetic oligonucleotide"
  source: /note="Description of Combined DNA/RNA Molecule: Synthetic oligonucleotide"
  source: /note="DNA/RNA"
  modified_base (14)..(14): bicyclic nucleic acid (BNA)
  modified_base (15)..(15): bicyclic nucleic acid (BNA)
  source: /note="3' tri-ethylene glycol (TEG)"
ucgguaaguucugtc

SEQ ID NO: 10441 - DNA, 14 bp, Artificial Sequence
  source: /note="Description of Artificial Sequence: Synthetic oligonucleotide"
  source: /note="Description of Combined DNA/RNA Molecule: Synthetic oligonucleotide"
  source: /note="DNA/RNA"
  modified_base (13)..(13): bicyclic nucleic acid (BNA)
  modified_base (14)..(14): bicyclic nucleic acid (BNA)
  source: /note="3' tri-ethylene glycol (TEG)"
ucgguaaguucugt

SEQ ID NO: 10442 - DNA, 13 bp, Artificial Sequence
  source: /note="Description of Artificial Sequence: Synthetic oligonucleotide"
  source: /note="Description of Combined DNA/RNA Molecule: Synthetic oligonucleotide"
  source: /note="DNA/RNA"
  modified_base (12)..(12): bicyclic nucleic acid (BNA)
  modified_base (13)..(13): bicyclic nucleic acid (BNA)
  source: /note="3' tri-ethylene glycol (TEG)"
ucgguaaguuctg

SEQ ID NO: 10443 - DNA, 12 bp, Artificial Sequence
  source: /note="Description of Artificial Sequence: Synthetic oligonucleotide"
  source: /note="Description of Combined DNA/RNA Molecule: Synthetic oligonucleotide"
  source: /note="DNA/RNA"
  modified_base (11)..(11): bicyclic nucleic acid (BNA)
  modified_base (12)..(12): bicyclic nucleic acid (BNA)
  source: /note="3' tri-ethylene glycol (TEG)"
ucgguaaguuct

SEQ ID NO: 10444 - DNA, 11 bp, Artificial Sequence
  source: /note="Description of Artificial Sequence: Synthetic oligonucleotide"
  source: /note="Description of Combined DNA/RNA Molecule: Synthetic oligonucleotide"
  source: /note="DNA/RNA"
  modified_base (10)..(10): bicyclic nucleic acid (BNA)
  modified_base (11)..(11): bicyclic nucleic acid (BNA)
  source: /note="3' tri-ethylene glycol (TEG)"
ucgguaagutc

SEQ ID NO: 10445 - DNA, 10 bp, Artificial Sequence
  source: /note="Description of Artificial Sequence: Synthetic oligonucleotide"
  source: /note="Description of Combined DNA/RNA Molecule: Synthetic oligonucleotide"
  source: /note="DNA/RNA"
  modified_base (9)..(9): bicyclic nucleic acid (BNA)
  modified_base (10)..(10): bicyclic nucleic acid (BNA)
  source: /note="3' tri-ethylene glycol (TEG)"
ucgguaagtt

SEQ ID NO: 10446 - DNA, 9 bp, Artificial Sequence
  source: /note="Description of Artificial Sequence: Synthetic oligonucleotide"
  source: /note="Description of Combined DNA/RNA Molecule: Synthetic oligonucleotide"
  source: /note="DNA/RNA"
  modified_base (8)..(8): bicyclic nucleic acid (BNA)
  modified_base (9)..(9): bicyclic nucleic acid (BNA)
  source: /note="3' tri-ethylene glycol (TEG)"
ucgguaagt

SEQ ID NO: 10447 - RNA, 20 nt, Artificial Sequence
  source: /note="Description of Artificial Sequence: Synthetic oligonucleotide"
  source: /note="RNA"
  modified_base (19)..(19): bicyclic nucleic acid (BNA)
  modified_base (20)..(20): bicyclic nucleic acid (BNA)
  source: /note="3' tri-ethylene glycol (TEG)"
gucgguaaguucuguccaag

SEQ ID NO: 10448 - RNA, 19 nt, Artificial Sequence
  source: /note="Description of Artificial Sequence: Synthetic oligonucleotide"
  source: /note="RNA"
  modified_base (18)..(18): bicyclic nucleic acid (BNA)
  modified_base (19)..(19): bicyclic nucleic acid (BNA)
  source: /note="3' tri-ethylene glycol (TEG)"
gucgguaaguucuguccaa

SEQ ID NO: 10449 - RNA, 18 nt, Artificial Sequence
  source: /note="Description of Artificial Sequence: Synthetic oligonucleotide"
  source: /note="RNA"
  modified_base (17)..(17): bicyclic nucleic acid (BNA)
  modified_base (18)..(18): bicyclic nucleic acid (BNA)
  source: /note="3' tri-ethylene glycol (TEG)"
gucgguaaguucugucca

SEQ ID NO: 10450 - RNA, 17 nt, Artificial Sequence
  source: /note="Description of Artificial Sequence: Synthetic oligonucleotide"
  source: /note="RNA"
  modified_base (16)..(16): bicyclic nucleic acid (BNA)
  modified_base (17)..(17): bicyclic nucleic acid (BNA)
  source: /note="3' tri-ethylene glycol (TEG)"
gucgguaaguucugucc

SEQ ID NO: 10451 - DNA, 16 bp, Artificial Sequence
  source: /note="Description of Artificial Sequence: Synthetic oligonucleotide"
  source: /note="Description of Combined DNA/RNA Molecule: Synthetic oligonucleotide"
  source: /note="DNA/RNA"
  modified_base (15)..(15): bicyclic nucleic acid (BNA)
  modified_base (16)..(16): bicyclic nucleic acid (BNA)
  source: /note="3' tri-ethylene glycol (TEG)"
gucgguaaguucugtc

SEQ ID NO: 10452 - DNA, 15 bp, Artificial Sequence
  source: /note="Description of Artificial Sequence: Synthetic oligonucleotide"
  source: /note="Description of Combined DNA/RNA Molecule: Synthetic oligonucleotide"
  source: /note="DNA/RNA"
  modified_base (14)..(14): bicyclic nucleic acid (BNA)
  modified_base (15)..(15): bicyclic nucleic acid (BNA)
  source: /note="3' tri-ethylene glycol (TEG)"
gucgguaaguucugt

SEQ ID NO: 10453 - DNA, 14 bp, Artificial Sequence
  source: /note="Description of Artificial Sequence: Synthetic oligonucleotide"
  source: /note="Description of Combined DNA/RNA Molecule: Synthetic oligonucleotide"
  source: /note="DNA/RNA"
  modified_base (13)..(13): bicyclic nucleic acid (BNA)
  modified_base (14)..(14): bicyclic nucleic acid (BNA)
  source: /note="3' tri-ethylene glycol (TEG)"
gucgguaaguuctg

SEQ ID NO: 10454 - DNA, 13 bp, Artificial Sequence
  source: /note="Description of Artificial Sequence: Synthetic oligonucleotide"
  source: /note="Description of Combined DNA/RNA Molecule: Synthetic oligonucleotide"
  source: /note="DNA/RNA"
  modified_base (12)..(12): bicyclic nucleic acid (BNA)
  modified_base (13)..(13): bicyclic nucleic acid (BNA)
  source: /note="3' tri-ethylene glycol (TEG)"
gucgguaaguuct

SEQ ID NO: 10455 - DNA, 12 bp, Artificial Sequence
  source: /note="Description of Artificial Sequence: Synthetic oligonucleotide"
  source: /note="Description of Combined DNA/RNA Molecule: Synthetic oligonucleotide"
  source: /note="DNA/RNA"
  modified_base (11)..(11): bicyclic nucleic acid (BNA)
  modified_base (12)..(12): bicyclic nucleic acid (BNA)
  source: /note="3' tri-ethylene glycol (TEG)"
gucgguaagutc

SEQ ID NO: 10456 - DNA, 11 bp, Artificial Sequence
  source: /note="Description of Artificial Sequence: Synthetic oligonucleotide"
  source: /note="Description of Combined DNA/RNA Molecule: Synthetic oligonucleotide"
  source: /note="DNA/RNA"
  modified_base (10)..(10): bicyclic nucleic acid (BNA)
  modified_base (11)..(11): bicyclic nucleic acid (BNA)
  source: /note="3' tri-ethylene glycol (TEG)"
gucgguaagtt

SEQ ID NO: 10457 - DNA, 10 bp, Artificial Sequence
  source: /note="Description of Artificial Sequence: Synthetic oligonucleotide"
  source: /note="Description of Combined DNA/RNA Molecule: Synthetic oligonucleotide"
  source: /note="DNA/RNA"
  modified_base (9)..(9): bicyclic nucleic acid (BNA)
  modified_base (10)..(10): bicyclic nucleic acid (BNA)
  source: /note="3' tri-ethylene glycol (TEG)"
gucgguaagt

SEQ ID NO: 10458 - RNA, 20 nt, Artificial Sequence
  source: /note="Description of Artificial Sequence: Synthetic oligonucleotide"
  source: /note="RNA"
  modified_base (19)..(19): bicyclic nucleic acid (BNA)
  modified_base (20)..(20): bicyclic nucleic acid (BNA)
  source: /note="3' tri-ethylene glycol (TEG)"
agucgguaaguucuguccaa

SEQ ID NO: 10459 - RNA, 19 nt, Artificial Sequence
  source: /note="Description of Artificial Sequence: Synthetic oligonucleotide"
  source: /note="RNA"
  modified_base (18)..(18): bicyclic nucleic acid (BNA)
  modified_base (19)..(19): bicyclic nucleic acid (BNA)
  source: /note="3' tri-ethylene glycol (TEG)"
agucgguaaguucugucca

SEQ ID NO: 10460 - DNA, 17 bp, Artificial Sequence
  source: /note="Description of Artificial Sequence: Synthetic oligonucleotide"
  source: /note="Description of Combined DNA/RNA Molecule: Synthetic oligonucleotide"
  source: /note="DNA/RNA"
  modified_base (16)..(16): bicyclic nucleic acid (BNA)
  modified_base (17)..(17): bicyclic nucleic acid (BNA)
  source: /note="3' tri-ethylene glycol (TEG)"
agucgguaaguucugtc

SEQ ID NO: 10461 - DNA, 16 bp, Artificial Sequence
  source: /note="Description of Artificial Sequence: Synthetic oligonucleotide"
  source: /note="Description of Combined DNA/RNA Molecule: Synthetic oligonucleotide"
  source: /note="DNA/RNA"
  modified_base (15)..(15): bicyclic nucleic acid (BNA)
  modified_base (16)..(16): bicyclic nucleic acid (BNA)
  source: /note="3' tri-ethylene glycol (TEG)"
agucgguaaguucugt

SEQ ID NO: 10462 - DNA, 15 bp, Artificial Sequence
  source: /note="Description of Artificial Sequence: Synthetic oligonucleotide"
  source: /note="Description of Combined DNA/RNA Molecule: Synthetic oligonucleotide"
  source: /note="DNA/RNA"
  modified_base (14)..(14): bicyclic nucleic acid (BNA)
  modified_base (15)..(15): bicyclic nucleic acid (BNA)
  source: /note="3' tri-ethylene glycol (TEG)"
agucgguaaguuctg

SEQ ID NO: 10463 - DNA, 14 bp, Artificial Sequence
  source: /note="Description of Artificial Sequence: Synthetic oligonucleotide"
  source: /note="Description of Combined DNA/RNA Molecule: Synthetic oligonucleotide"
  source: /note="DNA/RNA"
  modified_base (13)..(13): bicyclic nucleic acid (BNA)
  modified_base (14)..(14): bicyclic nucleic acid (BNA)
  source: /note="3' tri-ethylene glycol (TEG)"
agucgguaaguuct

SEQ ID NO: 10464 - DNA, 13 bp, Artificial Sequence
  source: /note="Description of Artificial Sequence: Synthetic oligonucleotide"
  source: /note="Description of Combined DNA/RNA Molecule: Synthetic oligonucleotide"
  source: /note="DNA/RNA"
  modified_base (12)..(12): bicyclic nucleic acid (BNA)
  modified_base (13)..(13): bicyclic nucleic acid (BNA)
  source: /note="3' tri-ethylene glycol (TEG)"
agucgguaagutc

SEQ ID NO: 10465 - DNA, 12 bp, Artificial Sequence
  source: /note="Description of Artificial Sequence: Synthetic oligonucleotide"
  source: /note="Description of Combined DNA/RNA Molecule: Synthetic oligonucleotide"
  source: /note="DNA/RNA"
  modified_base (11)..(11): bicyclic nucleic acid (BNA)
  modified_base (12)..(12): bicyclic nucleic acid (BNA)
  source: /note="3' tri-ethylene glycol (TEG)"
agucgguaagtt

SEQ ID NO: 10466 - DNA, 11 bp, Artificial Sequence
  source: /note="Description of Artificial Sequence: Synthetic oligonucleotide"
  source: /note="Description of Combined DNA/RNA Molecule: Synthetic oligonucleotide"
  source: /note="DNA/RNA"
  modified_base (10)..(10): bicyclic nucleic acid (BNA)
  modified_base (11)..(11): bicyclic nucleic acid (BNA)
  source: /note="3' tri-ethylene glycol (TEG)"
agucgguaagt

SEQ ID NO: 10467 - RNA, 20 nt, Artificial Sequence
  source: /note="Description of Artificial Sequence: Synthetic oligonucleotide"
  source: /note="RNA"
  modified_base (19)..(19): bicyclic nucleic acid (BNA)
  modified_base (20)..(20): bicyclic nucleic acid (BNA)
  source: /note="3' tri-ethylene glycol (TEG)"
cagucgguaaguucugucca

SEQ ID NO: 10468 - RNA, 19 nt, Artificial Sequence
  source: /note="Description of Artificial Sequence: Synthetic oligonucleotide"
  source: /note="RNA"
  modified_base (18)..(18): bicyclic nucleic acid (BNA)
  modified_base (19)..(19): bicyclic nucleic acid (BNA)
  source: /note="3' tri-ethylene glycol (TEG)"
cagucgguaaguucugucc

SEQ ID NO: 10469 - DNA, 18 bp, Artificial Sequence
  source: /note="Description of Artificial Sequence: Synthetic oligonucleotide"
  source: /note="Description of Combined DNA/RNA Molecule: Synthetic oligonucleotide"
  source: /note="DNA/RNA"
  modified_base (17)..(17): bicyclic nucleic acid (BNA)
  modified_base (18)..(18): bicyclic nucleic acid (BNA)
  source: /note="3' tri-ethylene glycol (TEG)"
cagucgguaaguucugtc

SEQ ID NO: 10470 - DNA, 17 bp, Artificial Sequence
  source: /note="Description of Artificial Sequence: Synthetic oligonucleotide"
  source: /note="Description of Combined DNA/RNA Molecule: Synthetic oligonucleotide"
  source: /note="DNA/RNA"
  modified_base (16)..(16): bicyclic nucleic acid (BNA)
  modified_base (17)..(17): bicyclic nucleic acid (BNA)
  source: /note="3' tri-ethylene glycol (TEG)"
cagucgguaaguucugt

SEQ ID NO: 10471 - DNA, 16 bp, Artificial Sequence
  source: /note="Description of Artificial Sequence: Synthetic oligonucleotide"
  source: /note="Description of Combined DNA/RNA Molecule: Synthetic oligonucleotide"
  source: /note="DNA/RNA"
  modified_base (15)..(15): bicyclic nucleic acid (BNA)
  modified_base (16)..(16): bicyclic nucleic acid (BNA)
  source: /note="3' tri-ethylene glycol (TEG)"
cagucgguaaguuctg

SEQ ID NO: 10472 - DNA, 15 bp, Artificial Sequence
  source: /note="Description of Artificial Sequence: Synthetic oligonucleotide"
  source: /note="Description of Combined DNA/RNA Molecule: Synthetic oligonucleotide"
  source: /note="DNA/RNA"
  modified_base (14)..(14): bicyclic nucleic acid (BNA)
  modified_base (15)..(15): bicyclic nucleic acid (BNA)
  source: /note="3' tri-ethylene glycol (TEG)"
cagucgguaaguuct

SEQ ID NO: 10473 - DNA, 14 bp, Artificial Sequence
  source: /note="Description of Artificial Sequence: Synthetic oligonucleotide"
  source: /note="Description of Combined DNA/RNA Molecule: Synthetic oligonucleotide"
  source: /note="DNA/RNA"
  modified_base (13)..(13): bicyclic nucleic acid (BNA)
  modified_base (14)..(14): bicyclic nucleic acid (BNA)
  source: /note="3' tri-ethylene glycol (TEG)"
cagucgguaagutc

SEQ ID NO: 10474 - DNA, 13 bp, Artificial Sequence
  source: /note="Description of Artificial Sequence: Synthetic oligonucleotide"
  source: /note="Description of Combined DNA/RNA Molecule: Synthetic oligonucleotide"
  source: /note="DNA/RNA"
  modified_base (12)..(12): bicyclic nucleic acid (BNA)
  modified_base (13)..(13): bicyclic nucleic acid (BNA)
  source: /note="3' tri-ethylene glycol (TEG)"
cagucgguaagtt

SEQ ID NO: 10475 - DNA, 12 bp, Artificial Sequence
  source: /note="Description of Artificial Sequence: Synthetic oligonucleotide"
  source: /note="Description of Combined DNA/RNA Molecule: Synthetic oligonucleotide"
  source: /note="DNA/RNA"
  modified_base (11)..(11): bicyclic nucleic acid (BNA)
  modified_base (12)..(12): bicyclic nucleic acid (BNA)
  source: /note="3' tri-ethylene glycol (TEG)"
cagucgguaagt

SEQ ID NO: 10476 - RNA, 20 nt, Artificial Sequence
  source: /note="Description of Artificial Sequence: Synthetic oligonucleotide"
  source: /note="RNA"
  modified_base (19)..(19): bicyclic nucleic acid (BNA)
  modified_base (20)..(20): bicyclic nucleic acid (BNA)
  source: /note="3' tri-ethylene glycol (TEG)"
ccagucgguaaguucugucc

SEQ ID NO: 10477 - DNA, 19 bp, Artificial Sequence
  source: /note="Description of Artificial Sequence: Synthetic oligonucleotide"
  source: /note="Description of Combined DNA/RNA Molecule: Synthetic oligonucleotide"
  source: /note="DNA/RNA"
  modified_base (18)..(18): bicyclic nucleic acid (BNA)
  modified_base (19)..(19): bicyclic nucleic acid (BNA)
  source: /note="3' tri-ethylene glycol (TEG)"
ccagucgguaaguucugtc

SEQ ID NO: 10478 - DNA, 18 bp, Artificial Sequence
  source: /note="Description of Artificial Sequence: Synthetic oligonucleotide"
  source: /note="Description of Combined DNA/RNA Molecule: Synthetic oligonucleotide"
  source: /note="DNA/RNA"
  modified_base (17)..(17): bicyclic nucleic acid (BNA)
  modified_base (18)..(18): bicyclic nucleic acid (BNA)
  source: /note="3' tri-ethylene glycol (TEG)"
ccagucgguaaguucugt

SEQ ID NO: 10479 - DNA, 17 bp, Artificial Sequence
  source: /note="Description of Artificial Sequence: Synthetic oligonucleotide"
  source: /note="Description of Combined DNA/RNA Molecule: Synthetic oligonucleotide"
  source: /note="DNA/RNA"
  modified_base (16)..(16): bicyclic nucleic acid (BNA)
  modified_base (17)..(17): bicyclic nucleic acid (BNA)
  source: /note="3' tri-ethylene glycol (TEG)"
ccagucgguaaguuctg

SEQ ID NO: 10480 - DNA, 16 bp, Artificial Sequence
  source: /note="Description of Artificial Sequence: Synthetic oligonucleotide"
  source: /note="Description of Combined DNA/RNA Molecule: Synthetic oligonucleotide"
  source: /note="DNA/RNA"
  modified_base (15)..(15): bicyclic nucleic acid (BNA)
  modified_base (16)..(16): bicyclic nucleic acid (BNA)
  source: /note="3' tri-ethylene glycol (TEG)"
ccagucgguaaguuct

SEQ ID NO: 10481 - DNA, 15 bp, Artificial Sequence
  source: /note="Description of Artificial Sequence: Synthetic oligonucleotide"
  source: /note="Description of Combined DNA/RNA Molecule: Synthetic oligonucleotide"
  source: /note="DNA/RNA"
  modified_base (14)..(14): bicyclic nucleic acid (BNA)
  modified_base (15)..(15): bicyclic nucleic acid (BNA)
  source: /note="3' tri-ethylene glycol (TEG)"
ccagucgguaagutc

SEQ ID NO: 10482 - DNA, 14 bp, Artificial Sequence
  source: /note="Description of Artificial Sequence: Synthetic oligonucleotide"
  source: /note="Description of Combined DNA/RNA Molecule: Synthetic oligonucleotide"
  source: /note="DNA/RNA"
  modified_base (13)..(13): bicyclic nucleic acid (BNA)
  modified_base (14)..(14): bicyclic nucleic acid (BNA)
  source: /note="3' tri-ethylene glycol (TEG)"
ccagucgguaagtt

SEQ ID NO: 10483 - DNA, 13 bp, Artificial Sequence
  source: /note="Description of Artificial Sequence: Synthetic oligonucleotide"
  source: /note="Description of Combined DNA/RNA Molecule: Synthetic oligonucleotide"
  source: /note="DNA/RNA"
  modified_base (12)..(12): bicyclic nucleic acid (BNA)
  modified_base (13)..(13): bicyclic nucleic acid (BNA)
  source: /note="3' tri-ethylene glycol (TEG)"
ccagucgguaagt

SEQ ID NO: 10484 - DNA, 20 bp, Artificial Sequence
  source: /note="Description of Artificial Sequence: Synthetic oligonucleotide"
  source: /note="Description of Combined DNA/RNA Molecule: Synthetic oligonucleotide"
  source: /note="DNA/RNA"
  modified_base (19)..(19): bicyclic nucleic acid (BNA)
  modified_base (20)..(20): bicyclic nucleic acid (BNA)
  source: /note="3' tri-ethylene glycol (TEG)"
gccagucgguaaguucugtc

SEQ ID NO: 10485 - DNA, 19 bp, Artificial Sequence
  source: /note="Description of Artificial Sequence: Synthetic oligonucleotide"
  source: /note="Description of Combined DNA/RNA Molecule: Synthetic oligonucleotide"
  source: /note="DNA/RNA"
  modified_base (18)..(18): bicyclic nucleic acid (BNA)
  modified_base (19)..(19): bicyclic nucleic acid (BNA)
  source: /note="3' tri-ethylene glycol (TEG)"
gccagucgguaaguucugt

SEQ ID NO: 10486 - DNA, 18 bp, Artificial Sequence
  source: /note="Description of Artificial Sequence: Synthetic oligonucleotide"
  source: /note="Description of Combined DNA/RNA Molecule: Synthetic oligonucleotide"
  source: /note="DNA/RNA"
  modified_base (17)..(17): bicyclic nucleic acid (BNA)
  modified_base (18)..(18): bicyclic nucleic acid (BNA)
  source: /note="3' tri-ethylene glycol (TEG)"
gccagucgguaaguuctg

SEQ ID NO: 10487 - DNA, 17 bp, Artificial Sequence
  source: /note="Description of Artificial Sequence: Synthetic oligonucleotide"
  source: /note="Description of Combined DNA/RNA Molecule: Synthetic oligonucleotide"
  source: /note="DNA/RNA"
  modified_base (16)..(16): bicyclic nucleic acid (BNA)
  modified_base (17)..(17): bicyclic nucleic acid (BNA)
  source: /note="3' tri-ethylene glycol (TEG)"
gccagucgguaaguuct

SEQ ID NO: 10488 - DNA, 16 bp, Artificial Sequence
  source: /note="Description of Artificial Sequence: Synthetic oligonucleotide"
  source: /note="Description of Combined DNA/RNA Molecule: Synthetic oligonucleotide"
  source: /note="DNA/RNA"
  modified_base (15)..(15): bicyclic nucleic acid (BNA)
  modified_base (16)..(16): bicyclic nucleic acid (BNA)
  source: /note="3' tri-ethylene glycol (TEG)"
gccagucgguaagutc

SEQ ID NO: 10489 - DNA, 15 bp, Artificial Sequence
  source: /note="Description of Artificial Sequence: Synthetic oligonucleotide"
  source: /note="Description of Combined DNA/RNA Molecule: Synthetic oligonucleotide"
  source: /note="DNA/RNA"
  modified_base (14)..(14): bicyclic nucleic acid (BNA)
  modified_base (15)..(15): bicyclic nucleic acid (BNA)
  source: /note="3' tri-ethylene glycol (TEG)"
gccagucgguaagtt

SEQ ID NO: 10490 - DNA, 14 bp, Artificial Sequence
  source: /note="Description of Artificial Sequence: Synthetic oligonucleotide"
  source: /note="Description of Combined DNA/RNA Molecule: Synthetic oligonucleotide"
  source: /note="DNA/RNA"
  modified_base (13)..(13): bicyclic nucleic acid (BNA)
  modified_base (14)..(14): bicyclic nucleic acid (BNA)
  source: /note="3' tri-ethylene glycol (TEG)"
gccagucgguaagt

SEQ ID NO: 10491 - DNA, 20 bp, Artificial Sequence
  source: /note="Description of Artificial Sequence: Synthetic oligonucleotide"
  source: /note="Description of Combined DNA/RNA Molecule: Synthetic oligonucleotide"
  source: /note="DNA/RNA"
  modified_base (19)..(19): bicyclic nucleic acid (BNA)
  modified_base (20)..(20): bicyclic nucleic acid (BNA)
  source: /note="3' tri-ethylene glycol (TEG)"
ucaaggaagauggcauuuct

SEQ ID NO: 10492 - RNA, 22 nt, Artificial Sequence
  source: /note="Description of Artificial Sequence: Synthetic oligonucleotide"
  source: /note="RNA"
  modified_base (21)..(21): bicyclic nucleic acid (BNA)
  modified_base (22)..(22): bicyclic nucleic acid (BNA)
  source: /note="3' tri-ethylene glycol (TEG)"
ucaaggaagauggcauuucuag

SEQ ID NO: 10493 - DNA, 16 bp, Artificial Sequence
  source: /note="Description of Artificial Sequence: Synthetic oligonucleotide"
  source: /note="Description of Combined DNA/RNA Molecule: Synthetic oligonucleotide"
  source: /note="DNA/RNA"
  modified_base (15)..(15): bicyclic nucleic acid (BNA)
  modified_base (16)..(16): bicyclic nucleic acid (BNA)
  source: /note="3' tri-ethylene glycol (TEG)"
ucaaggaagauggcat

SEQ ID NO: 10494 - DNA, 15 bp, Artificial Sequence
  source: /note="Description of Artificial Sequence: Synthetic oligonucleotide"
  source: /note="Description of Combined DNA/RNA Molecule: Synthetic oligonucleotide"
  source: /note="DNA/RNA"
  modified_base (14)..(14): bicyclic nucleic acid (BNA)
  modified_base (15)..(15): bicyclic nucleic acid (BNA)
  source: /note="3' tri-ethylene glycol (TEG)"
gaagauggcauuuct

SEQ ID NO: 10495 - DNA, 21 bp, Artificial Sequence
  source: /note="Description of Artificial Sequence: Synthetic oligonucleotide"
  source: /note="Description of Combined DNA/RNA Molecule: Synthetic oligonucleotide"
  source: /note="DNA/RNA"
  modified_base (20)..(20): bicyclic nucleic acid (BNA)
  modified_base (21)..(21): bicyclic nucleic acid (BNA)
  source: /note="3' tri-ethylene glycol (TEG)"
ucaaggaagauggcauuucta

SEQ ID NO: 10496 - DNA, 19 bp, Artificial Sequence
  source: /note="Description of Artificial Sequence: Synthetic oligonucleotide"
  source: /note="Description of Combined DNA/RNA Molecule: Synthetic oligonucleotide"
  source: /note="DNA/RNA"
  modified_base (18)..(18): bicyclic nucleic acid (BNA)
  modified_base (19)..(19): bicyclic nucleic acid (BNA)
  source: /note="3' tri-ethylene glycol (TEG)"
ucaaggaagauggcauutc

SEQ ID NO: 10497 - DNA, 18 bp, Artificial Sequence
  source: /note="Description of Artificial Sequence: Synthetic oligonucleotide"
  source: /note="Description of Combined DNA/RNA Molecule: Synthetic oligonucleotide"
  source: /note="DNA/RNA"
  modified_base (17)..(17): bicyclic nucleic acid (BNA)
  modified_base (18)..(18): bicyclic nucleic acid (BNA)
  source: /note="3' tri-ethylene glycol (TEG)"
ucaaggaagauggcautt

SEQ ID NO: 10498 - DNA, 17 bp, Artificial Sequence
  source: /note="Description of Artificial Sequence: Synthetic oligonucleotide"
  source: /note="Description of Combined DNA/RNA Molecule: Synthetic oligonucleotide"
  source: /note="DNA/RNA"
  modified_base (16)..(16): bicyclic nucleic acid (BNA)
  modified_base (17)..(17): bicyclic nucleic acid (BNA)
  source: /note="3' tri-ethylene glycol (TEG)"
ucaaggaagauggcatt

SEQ ID NO: 10499 - RNA, 15 nt, Artificial Sequence
  source: /note="Description of Artificial Sequence: Synthetic oligonucleotide"
  source: /note="RNA"
  modified_base (14)..(14): bicyclic nucleic acid (BNA)
  modified_base (15)..(15): bicyclic nucleic acid (BNA)
  source: /note="3' tri-ethylene glycol (TEG)"
ucaaggaagauggca

SEQ ID NO: 10500 - RNA, 14 nt, Artificial Sequence
  source: /note="Description of Artificial Sequence: Synthetic oligonucleotide"
  source: /note="RNA"
  modified_base (13)..(13): bicyclic nucleic acid (BNA)
  modified_base (14)..(14): bicyclic nucleic acid (BNA)
  source: /note="3' tri-ethylene glycol (TEG)"
ucaaggaagauggc

SEQ ID NO: 10501 - RNA, 13 nt, Artificial Sequence
  source: /note="Description of Artificial Sequence: Synthetic oligonucleotide"
  source: /note="RNA"
  modified_base (12)..(12): bicyclic nucleic acid (BNA)
  modified_base (13)..(13): bicyclic nucleic acid (BNA)
  source: /note="3' tri-ethylene glycol (TEG)"
ucaaggaagaugg

SEQ ID NO: 10502 - DNA, 12 bp, Artificial Sequence
  source: /note="Description of Artificial Sequence: Synthetic oligonucleotide"
  source: /note="Description of Combined DNA/RNA Molecule: Synthetic oligonucleotide"
  source: /note="DNA/RNA"
  modified_base (11)..(11): bicyclic nucleic acid (BNA)
  modified_base (12)..(12): bicyclic nucleic acid (BNA)
  source: /note="3' tri-ethylene glycol (TEG)"
ucaaggaagatg

SEQ ID NO: 10503 - DNA, 11 bp, Artificial Sequence
  source: /note="Description of Artificial Sequence: Synthetic oligonucleotide"
  source: /note="Description of Combined DNA/RNA Molecule: Synthetic oligonucleotide"
  source: /note="DNA/RNA"
  modified_base (10)..(10): bicyclic nucleic acid (BNA)
  modified_base (11)..(11): bicyclic nucleic acid (BNA)
  source: /note="3' tri-ethylene glycol (TEG)"
ucaaggaagat

SEQ ID NO: 10504 - RNA, 10 nt, Artificial Sequence
  source: /note="Description of Artificial Sequence: Synthetic oligonucleotide"
  source: /note="RNA"
  modified_base (9)..(9): bicyclic nucleic acid (BNA)
  modified_base (10)..(10): bicyclic nucleic acid (BNA)
  source: /note="3' tri-ethylene glycol (TEG)"
ucaaggaaga

SEQ ID NO: 10505 - RNA, 9 nt, Artificial Sequence
  source: /note="Description of Artificial Sequence: Synthetic oligonucleotide"
  source: /note="RNA"
  modified_base (8)..(8): bicyclic nucleic acid (BNA)
  modified_base (9)..(9): bicyclic nucleic acid (BNA)
  source: /note="3' tri-ethylene glycol (TEG)"
ucaaggaag

SEQ ID NO: 10506 - RNA, 21 nt, Artificial Sequence
  source: /note="Description of Artificial Sequence: Synthetic oligonucleotide"
  source: /note="RNA"
  modified_base (20)..(20): bicyclic nucleic acid (BNA)
  modified_base (21)..(21): bicyclic nucleic acid (BNA)
  source: /note="3' tri-ethylene glycol (TEG)"
caaggaagauggcauuucuag

SEQ ID NO: 10507 - DNA, 20 bp, Artificial Sequence
  source: /note="Description of Artificial Sequence: Synthetic oligonucleotide"
  source: /note="Description of Combined DNA/RNA Molecule: Synthetic oligonucleotide"
  source: /note="DNA/RNA"
  modified_base (19)..(19): bicyclic nucleic acid (BNA)
  modified_base (20)..(20): bicyclic nucleic acid (BNA)
  source: /note="3' tri-ethylene glycol (TEG)"
caaggaagauggcauuucta

SEQ ID NO: 10508 - DNA, 19 bp, Artificial Sequence
  source: /note="Description of Artificial Sequence: Synthetic oligonucleotide"
  source: /note="Description of Combined DNA/RNA Molecule: Synthetic oligonucleotide"
  source: /note="DNA/RNA"
  modified_base (18)..(18): bicyclic nucleic acid (BNA)
  modified_base (19)..(19): bicyclic nucleic acid (BNA)
  source: /note="3' tri-ethylene glycol (TEG)"
caaggaagauggcauuuct

SEQ ID NO: 10509 - DNA, 18 bp, Artificial Sequence
  source: /note="Description of Artificial Sequence: Synthetic oligonucleotide"
  source: /note="Description of Combined DNA/RNA Molecule: Synthetic oligonucleotide"
  source: /note="DNA/RNA"
  modified_base (17)..(17): bicyclic nucleic acid (BNA)
  modified_base (18)..(18): bicyclic nucleic acid (BNA)
  source: /note="3' tri-ethylene glycol (TEG)"
caaggaagauggcauutc

SEQ ID NO: 10510 - DNA, 17 bp, Artificial Sequence
  source: /note="Description of Artificial Sequence: Synthetic oligonucleotide"
  source: /note="Description of Combined DNA/RNA Molecule: Synthetic oligonucleotide"
  source: /note="DNA/RNA"
  modified_base (16)..(16): bicyclic nucleic acid (BNA)
  modified_base (17)..(17): bicyclic nucleic acid (BNA)
  source: /note="3' tri-ethylene glycol (TEG)"
caaggaagauggcautt

SEQ ID NO: 10511 - DNA, 16 bp, Artificial Sequence
  source: /note="Description of Artificial Sequence: Synthetic oligonucleotide"
  source: /note="Description of Combined DNA/RNA Molecule: Synthetic oligonucleotide"
  source: /note="DNA/RNA"
  modified_base (15)..(15): bicyclic nucleic acid (BNA)
  modified_base (16)..(16): bicyclic nucleic acid (BNA)
  source: /note="3' tri-ethylene glycol (TEG)"
caaggaagauggcatt

SEQ ID NO: 10512 - DNA, 15 bp, Artificial Sequence
  source: /note="Description of Artificial Sequence: Synthetic oligonucleotide"
  source: /note="Description of Combined DNA/RNA Molecule: Synthetic oligonucleotide"
  source: /note="DNA/RNA"
  modified_base (14)..(14): bicyclic nucleic acid (BNA)
  modified_base (15)..(15): bicyclic nucleic acid (BNA)
  source: /note="3' tri-ethylene glycol (TEG)"
caaggaagauggcat

SEQ ID NO: 10513 - RNA, 14 nt, Artificial Sequence
  source: /note="Description of Artificial Sequence: Synthetic oligonucleotide"
  source: /note="RNA"
  modified_base (13)..(13): bicyclic nucleic acid (BNA)
  modified_base (14)..(14): bicyclic nucleic acid (BNA)
  source: /note="3' tri-ethylene glycol (TEG)"
caaggaagauggca

SEQ ID NO: 10514 - RNA, 13 nt, Artificial Sequence
  source: /note="Description of Artificial Sequence: Synthetic oligonucleotide"
  source: /note="RNA"
  modified_base (12)..(12): bicyclic nucleic acid (BNA)
  modified_base (13)..(13): bicyclic nucleic acid (BNA)
  source: /note="3' tri-ethylene glycol (TEG)"
caaggaagauggc

SEQ ID NO: 10515 - RNA, 12 nt, Artificial Sequence
  source: /note="Description of Artificial Sequence: Synthetic oligonucleotide"
  source: /note="RNA"
  modified_base (11)..(11): bicyclic nucleic acid (BNA)
  modified_base (12)..(12): bicyclic nucleic acid (BNA)
  source: /note="3' tri-ethylene glycol (TEG)"
caaggaagaugg

SEQ ID NO: 10516 - DNA, 11 bp, Artificial Sequence
  source: /note="Description of Artificial Sequence: Synthetic oligonucleotide"
  source: /note="DNA/RNA"
  modified_base (10)..(10): bicyclic nucleic acid (BNA)
  modified_base (11)..(11): bicyclic nucleic acid (BNA)
  source: /note="3' tri-ethylene glycol (TEG)"
caaggaagatg

SEQ ID NO: 10517 - DNA, 10 bp, Artificial Sequence
  source: /note="Description of Artificial Sequence: Synthetic oligonucleotide"
  source: /note="DNA/RNA"
  modified_base (9)..(9): bicyclic nucleic acid (BNA)
  modified_base (10)..(10): bicyclic nucleic acid (BNA)
  source: /note="3' tri-ethylene glycol (TEG)"
caaggaagat

SEQ ID NO: 10518 - RNA, 9 nt, Artificial Sequence
  source: /note="Description of Artificial Sequence: Synthetic oligonucleotide"
  source: /note="RNA/Antisense Oligonucleotide"
  modified_base (8)..(8): bicyclic nucleic acid (BNA)
  modified_base (9)..(9): bicyclic nucleic acid (BNA)
  source: /note="3' tri-ethylene glycol (TEG)"
caaggaaga

SEQ ID NO: 10519 - RNA, 8 nt, Artificial Sequence
  source: /note="Description of Artificial Sequence: Synthetic oligonucleotide"
  source: /note="RNA/Antisense Oligonucleotide"
  modified_base (7)..(7): bicyclic nucleic acid (BNA)
  modified_base (8)..(8): bicyclic nucleic acid (BNA)
  source: /note="3' tri-ethylene glycol (TEG)"
caaggaag

SEQ ID NO: 10520 - RNA, 20 nt, Artificial Sequence
  source: /note="Description of Artificial Sequence: Synthetic oligonucleotide"
  source: /note="RNA"
  modified_base (19)..(19): bicyclic nucleic acid (BNA)
  modified_base (20)..(20): bicyclic nucleic acid (BNA)
  source: /note="3' tri-ethylene glycol (TEG)"
aaggaagauggcauuucuag

SEQ ID NO: 10521 - DNA, 19 bp, Artificial Sequence
  source: /note="Description of Artificial Sequence: Synthetic oligonucleotide"
  source: /note="Description of Combined DNA/RNA Molecule: Synthetic oligonucleotide"
  source: /note="DNA/RNA"
  modified_base (18)..(18): bicyclic nucleic acid (BNA)
  modified_base (19)..(19): bicyclic nucleic acid (BNA)
  source: /note="3' tri-ethylene glycol (TEG)"
aaggaagauggcauuucta

SEQ ID NO: 10522 - DNA, 18 bp, Artificial Sequence
  source: /note="Description of Artificial Sequence: Synthetic oligonucleotide"
  source: /note="Description of Combined DNA/RNA Molecule: Synthetic oligonucleotide"
  source: /note="DNA/RNA"
  modified_base (17)..(17): bicyclic nucleic acid (BNA)
  modified_base (18)..(18): bicyclic nucleic acid (BNA)
  source: /note="3' tri-ethylene glycol (TEG)"
aaggaagauggcauuuct

SEQ ID NO: 10523 - DNA, 17 bp, Artificial Sequence
  source: /note="Description of Artificial Sequence: Synthetic oligonucleotide"
  source: /note="Description of Combined DNA/RNA Molecule: Synthetic oligonucleotide"
  source: /note="DNA/RNA"
  modified_base (16)..(16): bicyclic nucleic acid (BNA)
  modified_base (17)..(17): bicyclic nucleic acid (BNA)
  source: /note="3' tri-ethylene glycol (TEG)"
aaggaagauggcauutc

SEQ ID NO: 10524 - DNA, 16 bp, Artificial Sequence
  source: /note="Description of Artificial Sequence: Synthetic oligonucleotide"
  source: /note="Description of Combined DNA/RNA Molecule: Synthetic oligonucleotide"
  source: /note="DNA/RNA"
  modified_base (15)..(15): bicyclic nucleic acid (BNA)
  modified_base (16)..(16): bicyclic nucleic acid (BNA)
  source: /note="3' tri-ethylene glycol (TEG)"
aaggaagauggcautt

SEQ ID NO: 10525 - DNA, 15 bp, Artificial Sequence
  source: /note="Description of Artificial Sequence: Synthetic oligonucleotide"
  source: /note="Description of Combined DNA/RNA Molecule: Synthetic oligonucleotide"
  source: /note="DNA/RNA"
  modified_base (14)..(14): bicyclic nucleic acid (BNA)
  modified_base (15)..(15): bicyclic nucleic acid (BNA)
  source: /note="3' tri-ethylene glycol (TEG)"
aaggaagauggcatt

SEQ ID NO: 10526 - DNA, 14 bp, Artificial Sequence
  source: /note="Description of Artificial Sequence: Synthetic oligonucleotide"
  source: /note="Description of Combined DNA/RNA Molecule: Synthetic oligonucleotide"
  source: /note="DNA/RNA"
  modified_base (13)..(13): bicyclic nucleic acid (BNA)
  modified_base (14)..(14): bicyclic nucleic acid (BNA)
  source: /note="3' tri-ethylene glycol (TEG)"
aaggaagauggcat

SEQ ID NO: 10527 - RNA, 13 nt, Artificial Sequence
  source: /note="Description of Artificial Sequence: Synthetic oligonucleotide"
  source: /note="RNA"
  modified_base (12)..(12): bicyclic nucleic acid (BNA)
  modified_base (13)..(13): bicyclic nucleic acid (BNA)
  source: /note="3' tri-ethylene glycol (TEG)"
aaggaagauggca

SEQ ID NO: 10528 - RNA, 12 nt, Artificial Sequence
  source: /note="Description of Artificial Sequence: Synthetic oligonucleotide"
  source: /note="RNA"
  modified_base (11)..(11): bicyclic nucleic acid (BNA)
  modified_base (12)..(12): bicyclic nucleic acid (BNA)
  source: /note="3' tri-ethylene glycol (TEG)"
aaggaagauggc

SEQ ID NO: 10529 - RNA, 11 nt, Artificial Sequence
  source: /note="Description of Artificial Sequence: Synthetic oligonucleotide"
  source: /note="RNA"
  modified_base (10)..(10): bicyclic nucleic acid (BNA)
  modified_base (11)..(11): bicyclic nucleic acid (BNA)
  source: /note="3' tri-ethylene glycol (TEG)"
aaggaagaugg

SEQ ID NO: 10530 - DNA, 10 bp, Artificial Sequence
  source: /note="Description of Artificial Sequence: Synthetic oligonucleotide"
  source: /note="DNA/RNA"
  modified_base (9)..(9): bicyclic nucleic acid (BNA)
  modified_base (10)..(10): bicyclic nucleic acid (BNA)
  source: /note="3' tri-ethylene glycol (TEG)"
aaggaagatg

SEQ ID NO: 10531 - DNA, 9 bp, Artificial Sequence
  source: /note="Description of Artificial Sequence: Synthetic oligonucleotide"
  source: /note="DNA/RNA"
  modified_base (8)..(8): bicyclic nucleic acid (BNA)
  modified_base (9)..(9): bicyclic nucleic acid (BNA)
  source: /note="3' tri-ethylene glycol (TEG)"
aaggaagat

SEQ ID NO: 10532 - RNA, 8 nt, Artificial Sequence
  source: /note="Description of Artificial Sequence: Synthetic oligonucleotide"
  source: /note="RNA/Antisense Oligonucleotide"
  modified_base (7)..(7): bicyclic nucleic acid (BNA)
  modified_base (8)..(8): bicyclic nucleic acid (BNA)
  source: /note="3' tri-ethylene glycol (TEG)"
aaggaaga

SEQ ID NO: 10533 - RNA, 19 nt, Artificial Sequence
  source: /note="Description of Artificial Sequence: Synthetic oligonucleotide"
  source: /note="RNA"
  modified_base (18)..(18): bicyclic nucleic acid (BNA)
  modified_base (19)..(19): bicyclic nucleic acid (BNA)
  source: /note="3' tri-ethylene glycol (TEG)"
aggaagauggcauuucuag

SEQ ID NO: 10534 - DNA, 18 bp, Artificial Sequence
  source: /note="Description of Artificial Sequence: Synthetic oligonucleotide"
  source: /note="Description of Combined DNA/RNA Molecule: Synthetic oligonucleotide"
  source: /note="DNA/RNA"
  modified_base (17)..(17): bicyclic nucleic acid (BNA)
  modified_base (18)..(18): bicyclic nucleic acid (BNA)
  source: /note="3' tri-ethylene glycol (TEG)"
aggaagauggcauuucta

SEQ ID NO: 10535 - DNA, 17 bp, Artificial Sequence
  source: /note="Description of Artificial Sequence: Synthetic oligonucleotide"
  source: /note="Description of Combined DNA/RNA Molecule: Synthetic oligonucleotide"
  source: /note="DNA/RNA"
  modified_base (16)..(16): bicyclic nucleic acid (BNA)
  modified_base (17)..(17): bicyclic nucleic acid (BNA)
  source: /note="3' tri-ethylene glycol (TEG)"
aggaagauggcauuuct

SEQ ID NO: 10536 - DNA, 16 bp, Artificial Sequence
  source: /note="Description of Artificial Sequence: Synthetic oligonucleotide"
  source: /note="Description of Combined DNA/RNA Molecule: Synthetic oligonucleotide"
  source: /note="DNA/RNA"
  modified_base (15)..(15): bicyclic nucleic acid (BNA)
  modified_base (16)..(16): bicyclic nucleic acid (BNA)
  source: /note="3' tri-ethylene glycol (TEG)"
aggaagauggcauutc

SEQ ID NO: 10537 - DNA, 15 bp, Artificial Sequence
  source: /note="Description of Artificial Sequence: Synthetic oligonucleotide"
  source: /note="Description of Combined DNA/RNA Molecule: Synthetic oligonucleotide"
  source: /note="DNA/RNA"
  modified_base (14)..(14): bicyclic nucleic acid (BNA)
  modified_base (15)..(15): bicyclic nucleic acid (BNA)
  source: /note="3' tri-ethylene glycol (TEG)"
aggaagauggcautt

SEQ ID NO: 10538 - DNA, 14 bp, Artificial Sequence
  source: /note="Description of Artificial Sequence: Synthetic oligonucleotide"
  source: /note="Description of Combined DNA/RNA Molecule: Synthetic oligonucleotide"
  source: /note="DNA/RNA"
  modified_base (13)..(13): bicyclic nucleic acid (BNA)
  modified_base (14)..(14): bicyclic nucleic acid (BNA)
  source: /note="3' tri-ethylene glycol (TEG)"
aggaagauggcatt

SEQ ID NO: 10539 - DNA, 13 bp, Artificial Sequence
  source: /note="Description of Artificial Sequence: Synthetic oligonucleotide"
  source: /note="Description of Combined DNA/RNA Molecule: Synthetic oligonucleotide"
  source: /note="DNA/RNA"
  modified_base (12)..(12): bicyclic nucleic acid (BNA)
  modified_base (13)..(13): bicyclic nucleic acid (BNA)
  source: /note="3' tri-ethylene glycol (TEG)"
aggaagauggcat

SEQ ID NO: 10540 - RNA, 12 nt, Artificial Sequence
  source: /note="Description of Artificial Sequence: Synthetic oligonucleotide"
  source: /note="RNA"
  modified_base (11)..(11): bicyclic nucleic acid (BNA)
  modified_base (12)..(12): bicyclic nucleic acid (BNA)
  source: /note="3' tri-ethylene glycol (TEG)"
aggaagauggca

SEQ ID NO: 10541 - RNA, 10 nt, Artificial Sequence
  source: /note="Description of Artificial Sequence: Synthetic oligonucleotide"
  source: /note="RNA"
  modified_base (9)..(9): bicyclic nucleic acid (BNA)
  modified_base (10)..(10): bicyclic nucleic acid (BNA)
  source: /note="3' tri-ethylene glycol (TEG)"
aggaagaugg

SEQ ID NO: 10542 - DNA, 9 bp, Artificial Sequence
  source: /note="Description of Artificial Sequence: Synthetic oligonucleotide"
  source: /note="DNA/RNA"
  modified_base (8)..(8): bicyclic nucleic acid (BNA)
  modified_base (9)..(9): bicyclic nucleic acid (BNA)
  source: /note="3' tri-ethylene glycol (TEG)"
aggaagatg

SEQ ID NO: 10543 - DNA, 8 bp, Artificial Sequence
  source: /note="Description of Artificial Sequence: Synthetic oligonucleotide"
  source: /note="DNA/RNA"
  modified_base (7)..(7): bicyclic nucleic acid (BNA)
  modified_base (8)..(8): bicyclic nucleic acid (BNA)
  source: /note="3' tri-ethylene glycol (TEG)"
aggaagat

SEQ ID NO: 10544 - RNA, 18 nt, Artificial Sequence
  source: /note="Description of Artificial Sequence: Synthetic oligonucleotide"
  source: /note="RNA"
  modified_base (17)..(17): bicyclic nucleic acid (BNA)
  modified_base (18)..(18): bicyclic nucleic acid (BNA)
  source: /note="3' tri-ethylene glycol (TEG)"
ggaagauggcauuucuag

SEQ ID NO: 10545 - DNA, 17 bp, Artificial Sequence
  source: /note="Description of Artificial Sequence: Synthetic oligonucleotide"
  source: /note="Description of Combined DNA/RNA Molecule: Synthetic oligonucleotide"
  source: /note="DNA/RNA"
  modified_base (16)..(16): bicyclic nucleic acid (BNA)
  modified_base (17)..(17): bicyclic nucleic acid (BNA)
  source: /note="3' tri-ethylene glycol (TEG)"
ggaagauggcauuucta

SEQ ID NO: 10546 - DNA, 16 bp, Artificial Sequence
  source: /note="Description of Artificial Sequence: Synthetic oligonucleotide"
  source: /note="Description of Combined DNA/RNA Molecule: Synthetic oligonucleotide"
  source: /note="DNA/RNA"
  modified_base (15)..(15): bicyclic nucleic acid (BNA)
  modified_base (16)..(16): bicyclic nucleic acid (BNA)
  source: /note="3' tri-ethylene glycol (TEG)"
ggaagauggcauuuct

SEQ ID NO: 10547 - DNA, 15 bp, Artificial Sequence
  source: /note="Description of Artificial Sequence: Synthetic oligonucleotide"
  source: /note="Description of Combined DNA/RNA Molecule: Synthetic oligonucleotide"
  source: /note="DNA/RNA"
  modified_base (14)..(14): bicyclic nucleic acid (BNA)
  modified_base (15)..(15): bicyclic nucleic acid (BNA)
  source: /note="3' tri-ethylene glycol (TEG)"
ggaagauggcauutc

SEQ ID NO: 10548 - DNA, 14 bp, Artificial Sequence
  source: /note="Description of Artificial Sequence: Synthetic oligonucleotide"
  source: /note="Description of Combined DNA/RNA Molecule: Synthetic oligonucleotide"
  source: /note="DNA/RNA"
  modified_base (13)..(13): bicyclic nucleic acid (BNA)
  modified_base (14)..(14): bicyclic nucleic acid (BNA)
  source: /note="3' tri-ethylene glycol (TEG)"
ggaagauggcautt

SEQ ID NO: 10549 - DNA, 13 bp, Artificial Sequence
  source: /note="Description of Artificial Sequence: Synthetic oligonucleotide"
  source: /note="Description of Combined DNA/RNA Molecule: Synthetic oligonucleotide"
  source: /note="DNA/RNA"
  modified_base (12)..(12): bicyclic nucleic acid (BNA)
  modified_base (13)..(13): bicyclic nucleic acid (BNA)
  source: /note="3' tri-ethylene glycol (TEG)"
ggaagauggcatt

SEQ ID NO: 10550 - DNA, 12 bp, Artificial Sequence
  source: /note="Description of Artificial Sequence: Synthetic oligonucleotide"
  source: /note="Description of Combined DNA/RNA Molecule: Synthetic oligonucleotide"
  source: /note="DNA/RNA"
  modified_base (11)..(11): bicyclic nucleic acid (BNA)
  modified_base (12)..(12): bicyclic nucleic acid (BNA)
  source: /note="3' tri-ethylene glycol (TEG)"
ggaagauggcat

SEQ ID NO: 10551 - RNA, 11 nt, Artificial Sequence
  source: /note="Description of Artificial Sequence: Synthetic oligonucleotide"
  source: /note="RNA"
  modified_base (10)..(10): bicyclic nucleic acid (BNA)
  modified_base (11)..(11): bicyclic nucleic acid (BNA)
  source: /note="3' tri-ethylene glycol (TEG)"
ggaagauggca

SEQ ID NO: 10552 - RNA, 10 nt, Artificial Sequence
  source: /note="Description of Artificial Sequence: Synthetic oligonucleotide"
  source: /note="RNA"
  modified_base (9)..(9): bicyclic nucleic acid (BNA)
  modified_base (10)..(10): bicyclic nucleic acid (BNA)
  source: /note="3' tri-ethylene glycol (TEG)"
ggaagauggc

SEQ ID NO: 10553 - DNA, 8 bp, Artificial Sequence
  source: /note="Description of Artificial Sequence: Synthetic oligonucleotide"
  source: /note="DNA/RNA"
  modified_base (7)..(7): bicyclic nucleic acid (BNA)
  modified_base (8)..(8): bicyclic nucleic acid (BNA)
  source: /note="3' tri-ethylene glycol (TEG)"
ggaagatg

SEQ ID NO: 10554 - RNA, 17 nt, Artificial Sequence
  source: /note="Description of Artificial Sequence: Synthetic oligonucleotide"
  source: /note="RNA"
  modified_base (16)..(16): bicyclic nucleic acid (BNA)
  modified_base (17)..(17): bicyclic nucleic acid (BNA)
  source: /note="3' tri-ethylene glycol (TEG)"
gaagauggcauuucuag

SEQ ID NO: 10555 - DNA, 16 bp, Artificial Sequence
  source: /note="Description of Artificial Sequence: Synthetic oligonucleotide"
  source: /note="Description of Combined DNA/RNA Molecule: Synthetic oligonucleotide"
  source: /note="DNA/RNA"
  modified_base (15)..(15): bicyclic nucleic acid (BNA)
  modified_base (16)..(16): bicyclic nucleic acid (BNA)
  source: /note="3' tri-ethylene glycol (TEG)"
gaagauggcauuucta

SEQ ID NO: 10556 - DNA, 14 bp, Artificial Sequence
  source: /note="Description of Artificial Sequence: Synthetic oligonucleotide"
  source: /note="Description of Combined DNA/RNA Molecule: Synthetic oligonucleotide"
  source: /note="DNA/RNA"
  modified_base (13)..(13): bicyclic nucleic acid (BNA)
  modified_base (14)..(14): bicyclic nucleic acid (BNA)
  source: /note="3' tri-ethylene glycol (TEG)"
gaagauggcauutc

SEQ ID NO: 10557 - DNA, 13 bp, Artificial Sequence
  source: /note="Description of Artificial Sequence: Synthetic oligonucleotide"
  source: /note="Description of Combined DNA/RNA Molecule: Synthetic oligonucleotide"
  source: /note="DNA/RNA"
  modified_base (12)..(12): bicyclic nucleic acid (BNA)
  modified_base (13)..(13): bicyclic nucleic acid (BNA)
  source: /note="3' tri-ethylene glycol (TEG)"
gaagauggcautt

SEQ ID NO: 10558 - DNA, 12 bp, Artificial Sequence
  source: /note="Description of Artificial Sequence: Synthetic oligonucleotide"
  source: /note="Description of Combined DNA/RNA Molecule: Synthetic oligonucleotide"
  source: /note="DNA/RNA"
  modified_base (11)..(11): bicyclic nucleic acid (BNA)
  modified_base (12)..(12): bicyclic nucleic acid (BNA)
  source: /note="3' tri-ethylene glycol (TEG)"
gaagauggcatt

SEQ ID NO: 10559 - DNA, 11 bp, Artificial Sequence
  source: /note="Description of Artificial Sequence: Synthetic oligonucleotide"
  source: /note="Description of Combined DNA/RNA Molecule: Synthetic oligonucleotide"
  source: /note="DNA/RNA"
  modified_base (10)..(10): bicyclic nucleic acid (BNA)
  modified_base (11)..(11): bicyclic nucleic acid (BNA)
  source: /note="3' tri-ethylene glycol (TEG)"
gaagauggcat

SEQ ID NO: 10560 - RNA, 10 nt, Artificial Sequence
  source: /note="Description of Artificial Sequence: Synthetic oligonucleotide"
  source: /note="RNA"
  modified_base (9)..(9): bicyclic nucleic acid (BNA)
  modified_base (10)..(10): bicyclic nucleic acid (BNA)
  source: /note="3' tri-ethylene glycol (TEG)"
gaagauggca

SEQ ID NO: 10561 - RNA, 9 nt, Artificial Sequence
  source: /note="Description of Artificial Sequence: Synthetic oligonucleotide"
  source: /note="RNA"
  modified_base (8)..(8): bicyclic nucleic acid (BNA)
  modified_base (9)..(9): bicyclic nucleic acid (BNA)
  source: /note="3' tri-ethylene glycol (TEG)"
gaagauggc

SEQ ID NO: 10562 - RNA, 8 nt, Artificial Sequence
  source: /note="Description of Artificial Sequence: Synthetic oligonucleotide"
  source: /note="RNA"
  modified_base (7)..(7): bicyclic nucleic acid (BNA)
  modified_base (8)..(8): bicyclic nucleic acid (BNA)
  source: /note="3' tri-ethylene glycol (TEG)"
gaagaugg

SEQ ID NO: 10563 - RNA, 16 nt, Artificial Sequence
  source: /note="Description of Artificial Sequence: Synthetic oligonucleotide"
  source: /note="RNA"
  modified_base (15)..(15): bicyclic nucleic acid (BNA)
  modified_base (16)..(16): bicyclic nucleic acid (BNA)
  source: /note="3' tri-ethylene glycol (TEG)"
aagauggcauuucuag

SEQ ID NO: 10564 - DNA, 15 bp, Artificial Sequence
  source: /note="Description of Artificial Sequence: Synthetic oligonucleotide"
  source: /note="Description of Combined DNA/RNA Molecule: Synthetic oligonucleotide"
  source: /note="DNA/RNA"
  modified_base (14)..(14): bicyclic nucleic acid (BNA)
  modified_base (15)..(15): bicyclic nucleic acid (BNA)
  source: /note="3' tri-ethylene glycol (TEG)"
aagauggcauuucta

SEQ ID NO: 10565 - DNA, 14 bp, Artificial Sequence
  source: /note="Description of Artificial Sequence: Synthetic oligonucleotide"
  source: /note="Description of Combined DNA/RNA Molecule: Synthetic oligonucleotide"
  source: /note="DNA/RNA"
  modified_base (13)..(13): bicyclic nucleic acid (BNA)
  modified_base (14)..(14): bicyclic nucleic acid (BNA)
  source: /note="3' tri-ethylene glycol (TEG)"
aagauggcauuuct

SEQ ID NO: 10566 - DNA, 13 bp, Artificial Sequence
  source: /note="Description of Artificial Sequence: Synthetic oligonucleotide"
  source: /note="Description of Combined DNA/RNA Molecule: Synthetic oligonucleotide"
  source: /note="DNA/RNA"
  modified_base (12)..(12): bicyclic nucleic acid (BNA)
  modified_base (13)..(13): bicyclic nucleic acid (BNA)
  source: /note="3' tri-ethylene glycol (TEG)"
aagauggcauutc

SEQ ID NO: 10567 - DNA, 12 bp, Artificial Sequence
  source: /note="Description of Artificial Sequence: Synthetic oligonucleotide"
  source: /note="Description of Combined DNA/RNA Molecule: Synthetic oligonucleotide"
  source: /note="DNA/RNA"
  modified_base (11)..(11): bicyclic nucleic acid (BNA)
  modified_base (12)..(12): bicyclic nucleic acid (BNA)
  source: /note="3' tri-ethylene glycol (TEG)"
aagauggcautt

SEQ ID NO: 10568 - DNA, 11 bp, Artificial Sequence
  source: /note="Description of Artificial Sequence: Synthetic oligonucleotide"
  source: /note="Description of Combined DNA/RNA Molecule: Synthetic oligonucleotide"
  source: /note="DNA/RNA"
  modified_base (10)..(10): bicyclic nucleic acid (BNA)
  modified_base (11)..(11): bicyclic nucleic acid (BNA)
  source: /note="3' tri-ethylene glycol (TEG)"
aagauggcatt

SEQ ID NO: 10569 - DNA, 10 bp, Artificial Sequence
  source: /note="Description of Artificial Sequence: Synthetic oligonucleotide"
  source: /note="Description of Combined DNA/RNA Molecule: Synthetic oligonucleotide"
  source: /note="DNA/RNA"
  modified_base (9)..(9): bicyclic nucleic acid (BNA)
  modified_base (10)..(10): bicyclic nucleic acid (BNA)
  source: /note="3' tri-ethylene glycol (TEG)"
aagauggcat

SEQ ID NO: 10570 - RNA, 9 nt, Artificial Sequence
  source: /note="Description of Artificial Sequence: Synthetic oligonucleotide"
  source: /note="RNA"
  modified_base (8)..(8): bicyclic nucleic acid (BNA)
  modified_base (9)..(9): bicyclic nucleic acid (BNA)
  source: /note="3' tri-ethylene glycol (TEG)"
aagauggca

SEQ ID NO: 10571 - RNA, 8 nt, Artificial Sequence
  source: /note="Description of Artificial Sequence: Synthetic oligonucleotide"
  source: /note="RNA"
  modified_base (7)..(7): bicyclic nucleic acid (BNA)
  modified_base (8)..(8): bicyclic nucleic acid (BNA)
  source: /note="3' tri-ethylene glycol (TEG)"
aagauggc

SEQ ID NO: 10572 - RNA, 15 nt, Artificial Sequence
  source: /note="Description of Artificial Sequence: Synthetic oligonucleotide"
  source: /note="RNA"
  modified_base (14)..(14): bicyclic nucleic acid (BNA)
  modified_base (15)..(15): bicyclic nucleic acid (BNA)
  source: /note="3' tri-ethylene glycol (TEG)"
agauggcauuucuag

SEQ ID NO: 10573 - DNA, 14 bp, Artificial Sequence
  source: /note="Description of Artificial Sequence: Synthetic oligonucleotide"
  source: /note="Description of Combined DNA/RNA Molecule: Synthetic oligonucleotide"
  source: /note="DNA/RNA"
  modified_base (13)..(13): bicyclic nucleic acid (BNA)
  modified_base (14)..(14): bicyclic nucleic acid (BNA)
  source: /note="3' tri-ethylene glycol (TEG)"
agauggcauuucta

SEQ ID NO: 10574 - DNA, 13 bp, Artificial Sequence
  source: /note="Description of Artificial Sequence: Synthetic oligonucleotide"
  source: /note="Description of Combined DNA/RNA Molecule: Synthetic oligonucleotide"
  source: /note="DNA/RNA"
  modified_base (12)..(12): bicyclic nucleic acid (BNA)
  modified_base (13)..(13): bicyclic nucleic acid (BNA)
  source: /note="3' tri-ethylene glycol (TEG)"
agauggcauuuct

SEQ ID NO: 10575 - DNA, 12 bp, Artificial Sequence
  source: /note="Description of Artificial Sequence: Synthetic oligonucleotide"
  source: /note="Description of Combined DNA/RNA Molecule: Synthetic oligonucleotide"
  source: /note="DNA/RNA"
  modified_base (11)..(11): bicyclic nucleic acid (BNA)
  modified_base (12)..(12): bicyclic nucleic acid (BNA)
  source: /note="3' tri-ethylene glycol (TEG)"
agauggcauutc

SEQ ID NO: 10576 - DNA, 11 bp, Artificial Sequence
  source: /note="Description of Artificial Sequence: Synthetic oligonucleotide"
  source: /note="Description of Combined DNA/RNA Molecule: Synthetic oligonucleotide"
  source: /note="DNA/RNA"
  modified_base (10)..(10): bicyclic nucleic acid (BNA)
  modified_base (11)..(11): bicyclic nucleic acid (BNA)
  source: /note="3' tri-ethylene glycol (TEG)"
agauggcautt

SEQ ID NO: 10577 - DNA, 10 bp, Artificial Sequence
  source: /note="Description of Artificial Sequence: Synthetic oligonucleotide"
  source: /note="Description of Combined DNA/RNA Molecule: Synthetic oligonucleotide"
  source: /note="DNA/RNA"
  modified_base (9)..(9): bicyclic nucleic acid (BNA)
  modified_base (10)..(10): bicyclic nucleic acid (BNA)
  source: /note="3' tri-ethylene glycol (TEG)"
agauggcatt

SEQ ID NO: 10578 - DNA, 9 bp, Artificial Sequence
  source: /note="Description of Artificial Sequence: Synthetic oligonucleotide"
  source: /note="Description of Combined DNA/RNA Molecule: Synthetic oligonucleotide"
  source: /note="DNA/RNA"
  modified_base (8)..(8): bicyclic nucleic acid (BNA)
  modified_base (9)..(9): bicyclic nucleic acid (BNA)
  source: /note="3' tri-ethylene glycol (TEG)"
agauggcat

SEQ ID NO: 10579 - RNA, 8 nt, Artificial Sequence
  source: /note="Description of Artificial Sequence: Synthetic oligonucleotide"
  source: /note="RNA"
  modified_base (7)..(7): bicyclic nucleic acid (BNA)
  modified_base (8)..(8): bicyclic nucleic acid (BNA)
  source: /note="3' tri-ethylene glycol (TEG)"
agauggca

SEQ ID NO: 10580 - RNA, 30 nt, Artificial Sequence; identical to SEQ ID NO: 284
  source: /note="Description of Artificial Sequence: Synthetic oligonucleotide"
  source: /note="RNA"
  modified_base (29)..(29): bicyclic nucleic acid (BNA)
  modified_base (30)..(30): bicyclic nucleic acid (BNA)
  source: /note="3' tri-ethylene glycol (TEG)"

SEQ ID NO: 10581 - DNA, 29 bp, Artificial Sequence
  source: /note="Description of Artificial Sequence: Synthetic oligonucleotide"
  source: /note="Description of Combined DNA/RNA Molecule: Synthetic oligonucleotide"
  source: /note="DNA/RNA"
  modified_base (28)..(28): bicyclic nucleic acid (BNA)
  modified_base (29)..(29): bicyclic nucleic acid (BNA)
  source: /note="3' tri-ethylene glycol (TEG)"
cuccaacaucaaggaagauggcauuucta

SEQ ID NO: 10582 - DNA, 28 bp, Artificial Sequence
  source: /note="Description of Artificial Sequence: Synthetic oligonucleotide"
  source: /note="Description of Combined DNA/RNA Molecule: Synthetic oligonucleotide"
  source: /note="DNA/RNA"
  modified_base (27)..(27): bicyclic nucleic acid (BNA)
  modified_base (28)..(28): bicyclic nucleic acid (BNA)
  source: /note="3' tri-ethylene glycol (TEG)"
cuccaacaucaaggaagauggcauuuct

SEQ ID NO: 10583 - DNA, 27 bp, Artificial Sequence
  source: /note="Description of Artificial Sequence: Synthetic oligonucleotide"
  source: /note="Description of Combined DNA/RNA Molecule: Synthetic oligonucleotide"
  source: /note="DNA/RNA"
  modified_base (26)..(26): bicyclic nucleic acid (BNA)
  modified_base (27)..(27): bicyclic nucleic acid (BNA)
  source: /note="3' tri-ethylene glycol (TEG)"
cuccaacaucaaggaagauggcauutc

SEQ ID NO: 10584 - DNA, 26 bp, Artificial Sequence
  source: /note="Description of Artificial Sequence: Synthetic oligonucleotide"
  source: /note="Description of Combined DNA/RNA Molecule: Synthetic oligonucleotide"
  source: /note="DNA/RNA"
  modified_base (25)..(25): bicyclic nucleic acid (BNA)
  modified_base (26)..(26): bicyclic nucleic acid (BNA)
  source: /note="3' tri-ethylene glycol (TEG)"
cuccaacaucaaggaagauggcautt

SEQ ID NO: 10585 - DNA, 25 bp, Artificial Sequence
  source: /note="Description of Artificial Sequence: Synthetic oligonucleotide"
  source: /note="Description of Combined DNA/RNA Molecule: Synthetic oligonucleotide"
  source: /note="DNA/RNA"
  modified_base (24)..(24): bicyclic nucleic acid (BNA)
  modified_base (25)..(25): bicyclic nucleic acid (BNA)
  source: /note="3' tri-ethylene glycol (TEG)"
cuccaacaucaaggaagauggcatt

SEQ ID NO: 10586 - DNA, 24 bp, Artificial Sequence
  source: /note="Description of Artificial Sequence: Synthetic oligonucleotide"
  source: /note="Description of Combined DNA/RNA Molecule: Synthetic oligonucleotide"
  source: /note="DNA/RNA"
  modified_base (23)..(23): bicyclic nucleic acid (BNA)
  modified_base (24)..(24): bicyclic nucleic acid (BNA)
  source: /note="3' tri-ethylene glycol (TEG)"
cuccaacaucaaggaagauggcat

SEQ ID NO: 10587 - RNA, 23 nt, Artificial Sequence
  source: /note="Description of Artificial Sequence: Synthetic oligonucleotide"
  source: /note="RNA"
  modified_base (22)..(22): bicyclic nucleic acid (BNA)
  modified_base (23)..(23): bicyclic nucleic acid (BNA)
  source: /note="3' tri-ethylene glycol (TEG)"
cuccaacaucaaggaagauggca

SEQ ID NO: 10588 - RNA, 22 nt, Artificial Sequence
  source: /note="Description of Artificial Sequence: Synthetic oligonucleotide"
  source: /note="RNA"
  modified_base (21)..(21): bicyclic nucleic acid (BNA)
  modified_base (22)..(22): bicyclic nucleic acid (BNA)
  source: /note="3' tri-ethylene glycol (TEG)"
cuccaacaucaaggaagauggc

SEQ ID NO: 10589 - RNA, 21 nt, Artificial Sequence
  source: /note="Description of Artificial Sequence: Synthetic oligonucleotide"
  source: /note="RNA"
  modified_base (20)..(20): bicyclic nucleic acid (BNA)
  modified_base (21)..(21): bicyclic nucleic acid (BNA)
  source: /note="3' tri-ethylene glycol (TEG)"
cuccaacaucaaggaagaugg

SEQ ID NO: 10590 - DNA, 20 bp, Artificial Sequence
  source: /note="Description of Artificial Sequence: Synthetic oligonucleotide"
  source: /note="Description of Combined DNA/RNA Molecule: Synthetic oligonucleotide"
  source: /note="DNA/RNA"
  modified_base (19)..(19): bicyclic nucleic acid (BNA)
  modified_base (20)..(20): bicyclic nucleic acid (BNA)
  source: /note="3' tri-ethylene glycol (TEG)"
cuccaacaucaaggaagatg

SEQ ID NO: 10591 - DNA, 19 bp, Artificial Sequence
  source: /note="Description of Artificial Sequence: Synthetic oligonucleotide"
  source: /note="Description of Combined DNA/RNA Molecule: Synthetic oligonucleotide"
  source: /note="DNA/RNA"
  modified_base (18)..(18): bicyclic nucleic acid (BNA)
  modified_base (19)..(19): bicyclic nucleic acid (BNA)
  source: /note="3' tri-ethylene glycol (TEG)"
cuccaacaucaaggaagat

SEQ ID NO: 10592 - RNA, 18 nt, Artificial Sequence
  source: /note="Description of Artificial Sequence: Synthetic oligonucleotide"
  source: /note="RNA"
  modified_base (17)..(17): bicyclic nucleic acid (BNA)
  modified_base (18)..(18): bicyclic nucleic acid (BNA)
  source: /note="3' tri-ethylene glycol (TEG)"
cuccaacaucaaggaaga

SEQ ID NO: 10593 - RNA, 17 nt, Artificial Sequence
  source: /note="Description of Artificial Sequence: Synthetic oligonucleotide"
  source: /note="RNA"
  modified_base (16)..(16): bicyclic nucleic acid (BNA)
  modified_base (17)..(17): bicyclic nucleic acid (BNA)
  source: /note="3' tri-ethylene glycol (TEG)"
cuccaacaucaaggaag

SEQ ID NO: 10594 - RNA, 29 nt, Artificial Sequence
  source: /note="Description of Artificial Sequence: Synthetic oligonucleotide"
  source: /note="RNA"
  modified_base (28)..(28): bicyclic nucleic acid (BNA)
  modified_base (29)..(29): bicyclic nucleic acid (BNA)
  source: /note="3' tri-ethylene glycol (TEG)"
uccaacaucaaggaagauggcauuucuag

SEQ ID NO: 10595 - DNA, 28 bp, Artificial Sequence
  source: /note="Description of Artificial Sequence: Synthetic oligonucleotide"
  source: /note="Description of Combined DNA/RNA Molecule: Synthetic oligonucleotide"
  source: /note="DNA/RNA"
  modified_base (27)..(27): bicyclic nucleic acid (BNA)
  modified_base (28)..(28): bicyclic nucleic acid (BNA)
  source: /note="3' tri-ethylene glycol (TEG)"
uccaacaucaaggaagauggcauuucta

SEQ ID NO: 10596 - DNA, 27 bp, Artificial Sequence
  source: /note="Description of Artificial Sequence: Synthetic oligonucleotide"
  source: /note="Description of Combined DNA/RNA Molecule: Synthetic oligonucleotide"
  source: /note="DNA/RNA"
  modified_base (26)..(26): bicyclic nucleic acid (BNA)
  modified_base (27)..(27): bicyclic nucleic acid (BNA)
  source: /note="3' tri-ethylene glycol (TEG)"
uccaacaucaaggaagauggcauuuct

SEQ ID NO: 10597 - DNA, 26 bp, Artificial Sequence
  source: /note="Description of Artificial Sequence: Synthetic oligonucleotide"
  source: /note="Description of Combined DNA/RNA Molecule: Synthetic oligonucleotide"
  source: /note="DNA/RNA"
  modified_base (25)..(25): bicyclic nucleic acid (BNA)
  modified_base (26)..(26): bicyclic nucleic acid (BNA)
  source: /note="3' tri-ethylene glycol (TEG)"
uccaacaucaaggaagauggcauutc

SEQ ID NO: 10598 - DNA, 25 bp, Artificial Sequence
  source: /note="Description of Artificial Sequence: Synthetic oligonucleotide"
  source: /note="Description of Combined DNA/RNA Molecule: Synthetic oligonucleotide"
  source: /note="DNA/RNA"
  modified_base (24)..(24): bicyclic nucleic acid (BNA)
  modified_base (25)..(25): bicyclic nucleic acid (BNA)
  source: /note="3' tri-ethylene glycol (TEG)"
uccaacaucaaggaagauggcautt

SEQ ID NO: 10599 - DNA, 24 bp, Artificial Sequence
  source: /note="Description of Artificial Sequence: Synthetic oligonucleotide"
  source: /note="Description of Combined DNA/RNA Molecule: Synthetic oligonucleotide"
  source: /note="DNA/RNA"
  modified_base (23)..(23): bicyclic nucleic acid (BNA)
  modified_base (24)..(24): bicyclic nucleic acid (BNA)
  source: /note="3' tri-ethylene glycol (TEG)"
uccaacaucaaggaagauggcatt

SEQ ID NO: 10600 - DNA, 23 bp, Artificial Sequence
  source: /note="Description of Artificial Sequence: Synthetic oligonucleotide"
  source: /note="Description of Combined DNA/RNA Molecule: Synthetic oligonucleotide"
  source: /note="DNA/RNA"
  modified_base (22)..(22): bicyclic nucleic acid (BNA)
  modified_base (23)..(23): bicyclic nucleic acid (BNA)
  source: /note="3' tri-ethylene glycol (TEG)"
uccaacaucaaggaagauggcat

SEQ ID NO: 10601 - RNA, 22 nt, Artificial Sequence
  source: /note="Description of Artificial Sequence: Synthetic oligonucleotide"
  source: /note="RNA"
  modified_base (21)..(21): bicyclic nucleic acid (BNA)
  modified_base (22)..(22): bicyclic nucleic acid (BNA)
  source: /note="3' tri-ethylene glycol (TEG)"
uccaacaucaaggaagauggca

SEQ ID NO: 10602 - RNA, 21 nt, Artificial Sequence
  source: /note="Description of Artificial Sequence: Synthetic oligonucleotide"
  source: /note="RNA"
  modified_base (20)..(20): bicyclic nucleic acid (BNA)
  modified_base (21)..(21): bicyclic nucleic acid (BNA)
  source: /note="3' tri-ethylene glycol (TEG)"
uccaacaucaaggaagauggc

SEQ ID NO: 10603 - RNA, 20 nt, Artificial Sequence
  source: /note="Description of Artificial Sequence: Synthetic oligonucleotide"
  source: /note="RNA"
  modified_base (19)..(19): bicyclic nucleic acid (BNA)
  modified_base (20)..(20): bicyclic nucleic acid (BNA)
  source: /note="3' tri-ethylene glycol (TEG)"
uccaacaucaaggaagaugg

SEQ ID NO: 10604 - DNA, 19 bp, Artificial Sequence
  source: /note="Description of Artificial Sequence: Synthetic oligonucleotide"
  source: /note="Description of Combined DNA/RNA Molecule: Synthetic oligonucleotide"
  source: /note="DNA/RNA"
  modified_base (18)..(18): bicyclic nucleic acid (BNA)
  modified_base (19)..(19): bicyclic nucleic acid (BNA)
  source: /note="3' tri-ethylene glycol (TEG)"
uccaacaucaaggaagatg

SEQ ID NO: 10605 - DNA, 18 bp, Artificial Sequence
  source: /note="Description of Artificial Sequence: Synthetic oligonucleotide"
  source: /note="Description of Combined DNA/RNA Molecule: Synthetic oligonucleotide"
  source: /note="DNA/RNA"
  modified_base (17)..(17): bicyclic nucleic acid (BNA)
  modified_base (18)..(18): bicyclic nucleic acid (BNA)
  source: /note="3' tri-ethylene glycol (TEG)"
uccaacaucaaggaagat

SEQ ID NO: 10606 - RNA, 17 nt, Artificial Sequence
  source: /note="Description of Artificial Sequence: Synthetic oligonucleotide"
  source: /note="RNA"
  modified_base (16)..(16): bicyclic nucleic acid (BNA)
  modified_base (17)..(17): bicyclic nucleic acid (BNA)
  source: /note="3' tri-ethylene glycol (TEG)"
uccaacaucaaggaaga

SEQ ID NO: 10607 - RNA, 16 nt, Artificial Sequence
  source: /note="Description of Artificial Sequence: Synthetic oligonucleotide"
  source: /note="RNA"
  modified_base (15)..(15): bicyclic nucleic acid (BNA)
  modified_base (16)..(16): bicyclic nucleic acid (BNA)
  source: /note="3' tri-ethylene glycol (TEG)"
uccaacaucaaggaag

SEQ ID NO: 10608 - RNA, 28 nt, Artificial Sequence
  source: /note="Description of Artificial Sequence: Synthetic oligonucleotide"
  source: /note="RNA"
  modified_base (27)..(27): bicyclic nucleic acid (BNA)
  modified_base (28)..(28): bicyclic nucleic acid (BNA)
  source: /note="3' tri-ethylene glycol (TEG)"
ccaacaucaaggaagauggcauuucuag

SEQ ID NO: 10609 - DNA, 27 bp, Artificial Sequence
  source: /note="Description of Artificial Sequence: Synthetic oligonucleotide"
  source: /note="Description of Combined DNA/RNA Molecule: Synthetic oligonucleotide"
  source: /note="DNA/RNA"
  modified_base (26)..(26): bicyclic nucleic acid (BNA)
  modified_base (27)..(27): bicyclic nucleic acid (BNA)
  source: /note="3' tri-ethylene glycol (TEG)"
ccaacaucaaggaagauggcauuucta

SEQ ID NO: 10610 - DNA, 26 bp, Artificial Sequence
  source: /note="Description of Artificial Sequence: Synthetic oligonucleotide"
  source: /note="Description of Combined DNA/RNA Molecule: Synthetic oligonucleotide"
  source: /note="DNA/RNA"
  modified_base (25)..(25): bicyclic nucleic acid (BNA)
  modified_base (26)..(26): bicyclic nucleic acid (BNA)
  source: /note="3' tri-ethylene glycol (TEG)"
ccaacaucaaggaagauggcauuuct

SEQ ID NO: 10611 - DNA, 25 bp, Artificial Sequence
  source: /note="Description of Artificial Sequence: Synthetic oligonucleotide"
  source: /note="Description of Combined DNA/RNA Molecule: Synthetic oligonucleotide"
  source: /note="DNA/RNA"
  modified_base (24)..(24): bicyclic nucleic acid (BNA)
  modified_base (25)..(25): bicyclic nucleic acid (BNA)
  source: /note="3' tri-ethylene glycol (TEG)"
ccaacaucaaggaagauggcauutc

SEQ ID NO: 10612 - DNA, 24 bp, Artificial Sequence
  source: /note="Description of Artificial Sequence: Synthetic oligonucleotide"
  source: /note="Description of Combined DNA/RNA Molecule: Synthetic oligonucleotide"
  source: /note="DNA/RNA"
  modified_base (23)..(23): bicyclic nucleic acid (BNA)
  modified_base (24)..(24): bicyclic nucleic acid (BNA)
  source: /note="3' tri-ethylene glycol (TEG)"
ccaacaucaaggaagauggcautt

SEQ ID NO: 10613 - DNA, 23 bp, Artificial Sequence
  source: /note="Description of Artificial Sequence: Synthetic oligonucleotide"
  source: /note="Description of Combined DNA/RNA Molecule: Synthetic oligonucleotide"
  source: /note="DNA/RNA"
  modified_base (22)..(22): bicyclic nucleic acid (BNA)
  modified_base (23)..(23): bicyclic nucleic acid (BNA)
  source: /note="3' tri-ethylene glycol (TEG)"
ccaacaucaaggaagauggcatt

SEQ ID NO: 10614 - DNA, 22 bp, Artificial Sequence
  source: /note="Description of Artificial Sequence: Synthetic oligonucleotide"
  source: /note="Description of Combined DNA/RNA Molecule: Synthetic oligonucleotide"
  source: /note="DNA/RNA"
  modified_base (21)..(21): bicyclic nucleic acid (BNA)
  modified_base (22)..(22): bicyclic nucleic acid (BNA)
  source: /note="3' tri-ethylene glycol (TEG)"
ccaacaucaaggaagauggcat

SEQ ID NO: 10615 - RNA, 21 nt, Artificial Sequence
  source: /note="Description of Artificial Sequence: Synthetic oligonucleotide"
  source: /note="RNA"
  modified_base (20)..(20): bicyclic nucleic acid (BNA)
  modified_base (21)..(21): bicyclic nucleic acid (BNA)
  source: /note="3' tri-ethylene glycol (TEG)"
ccaacaucaaggaagauggca

SEQ ID NO: 10616 - RNA, 20 nt, Artificial Sequence
  source: /note="Description of Artificial Sequence: Synthetic oligonucleotide"
  source: /note="RNA"
  modified_base (19)..(19): bicyclic nucleic acid (BNA)
  modified_base (20)..(20): bicyclic nucleic acid (BNA)
  source: /note="3' tri-ethylene glycol (TEG)"
ccaacaucaaggaagauggc

SEQ ID NO: 10617 - RNA, 19 nt, Artificial Sequence
  source: /note="Description of Artificial Sequence: Synthetic oligonucleotide"
  source: /note="RNA"
  modified_base (18)..(18): bicyclic nucleic acid (BNA)
  modified_base (19)..(19): bicyclic nucleic acid (BNA)
  source: /note="3' tri-ethylene glycol (TEG)"
ccaacaucaaggaagaugg

SEQ ID NO: 10618 - DNA, 18 bp, Artificial Sequence
  source: /note="Description of Artificial Sequence: Synthetic oligonucleotide"
  source: /note="Description of Combined DNA/RNA Molecule: Synthetic oligonucleotide"
  source: /note="DNA/RNA"
  modified_base (17)..(17): bicyclic nucleic acid (BNA)
  modified_base (18)..(18): bicyclic nucleic acid (BNA)
  source: /note="3' tri-ethylene glycol (TEG)"
ccaacaucaaggaagatg

SEQ ID NO: 10619 - DNA, 17 bp, Artificial Sequence
  source: /note="Description of Artificial Sequence: Synthetic oligonucleotide"
  source: /note="Description of Combined DNA/RNA Molecule: Synthetic oligonucleotide"
  source: /note="DNA/RNA"
  modified_base (16)..(16): bicyclic nucleic acid (BNA)
  modified_base (17)..(17): bicyclic nucleic acid (BNA)
  source: /note="3' tri-ethylene glycol (TEG)"
ccaacaucaaggaagat

SEQ ID NO: 10620 - RNA, 16 nt, Artificial Sequence
  source: /note="Description of Artificial Sequence: Synthetic oligonucleotide"
  source: /note="RNA"
  modified_base (15)..(15): bicyclic nucleic acid (BNA)
  modified_base (16)..(16): bicyclic nucleic acid (BNA)
  source: /note="3' tri-ethylene glycol (TEG)"
ccaacaucaaggaaga

SEQ ID NO: 10621 - RNA, 15 nt, Artificial Sequence
  source: /note="Description of Artificial Sequence: Synthetic oligonucleotide"
  source: /note="RNA"
  modified_base (14)..(14): bicyclic nucleic acid (BNA)
  modified_base (15)..(15): bicyclic nucleic acid (BNA)
  source: /note="3' tri-ethylene glycol (TEG)"
ccaacaucaaggaag

SEQ ID NO: 10622 - RNA, 27 nt, Artificial Sequence
  source: /note="Description of Artificial Sequence: Synthetic oligonucleotide"
  source: /note="RNA"
  modified_base (26)..(26): bicyclic nucleic acid (BNA)
  modified_base (27)..(27): bicyclic nucleic acid (BNA)
  source: /note="3' tri-ethylene glycol (TEG)"
caacaucaaggaagauggcauuucuag

SEQ ID NO: 10623 - DNA, 26 bp, Artificial Sequence
  source: /note="Description of Artificial Sequence: Synthetic oligonucleotide"
  source: /note="Description of Combined DNA/RNA Molecule: Synthetic oligonucleotide"
  source: /note="DNA/RNA"
  modified_base (25)..(25): bicyclic nucleic acid (BNA)
  modified_base (26)..(26): bicyclic nucleic acid (BNA)
  source: /note="3' tri-ethylene glycol (TEG)"
caacaucaaggaagauggcauuucta

SEQ ID NO: 10624 - DNA, 25 bp, Artificial Sequence
  source: /note="Description of Artificial Sequence: Synthetic oligonucleotide"
  source: /note="Description of Combined DNA/RNA Molecule: Synthetic oligonucleotide"
  source: /note="DNA/RNA"
  modified_base (24)..(24): bicyclic nucleic acid (BNA)
  modified_base (25)..(25): bicyclic nucleic acid (BNA)
  source: /note="3' tri-ethylene glycol (TEG)"
caacaucaaggaagauggcauuuct

SEQ ID NO: 10625 - DNA, 24 bp, Artificial Sequence
  source: /note="Description of Artificial Sequence: Synthetic oligonucleotide"
  source: /note="Description of Combined DNA/RNA Molecule: Synthetic oligonucleotide"
  source: /note="DNA/RNA"
  modified_base (23)..(23): bicyclic nucleic acid (BNA)
  modified_base (24)..(24): bicyclic nucleic acid (BNA)
  source: /note="3' tri-ethylene glycol (TEG)"
caacaucaaggaagauggcauutc

SEQ ID NO: 10626 - DNA, 23 bp, Artificial Sequence
  source: /note="Description of Artificial Sequence: Synthetic oligonucleotide"
  source: /note="Description of Combined DNA/RNA Molecule: Synthetic oligonucleotide"
  source: /note="DNA/RNA"
  modified_base (22)..(22): bicyclic nucleic acid (BNA)
  modified_base (23)..(23): bicyclic nucleic acid (BNA)
  source: /note="3' tri-ethylene glycol (TEG)"
caacaucaaggaagauggcautt

SEQ ID NO: 10627 - DNA, 22 bp, Artificial Sequence
  source: /note="Description of Artificial Sequence: Synthetic oligonucleotide"
  source: /note="Description of Combined DNA/RNA Molecule: Synthetic oligonucleotide"
  source: /note="DNA/RNA"
  modified_base (21)..(21): bicyclic nucleic acid (BNA)
  modified_base (22)..(22): bicyclic nucleic acid (BNA)
  source: /note="3' tri-ethylene glycol (TEG)"
caacaucaaggaagauggcatt

SEQ ID NO: 10628 - DNA, 21 bp, Artificial Sequence
  source: /note="Description of Artificial Sequence: Synthetic oligonucleotide"
  source: /note="Description of Combined DNA/RNA Molecule: Synthetic oligonucleotide"
  source: /note="DNA/RNA"
  modified_base (20)..(20): bicyclic nucleic acid (BNA)
  modified_base (21)..(21): bicyclic nucleic acid (BNA)
  source: /note="3' tri-ethylene glycol (TEG)"
caacaucaaggaagauggcat

SEQ ID NO: 10629 - RNA, 20 nt, Artificial Sequence
  source: /note="Description of Artificial Sequence: Synthetic oligonucleotide"
  source: /note="RNA"
  modified_base (19)..(19): bicyclic nucleic acid (BNA)
  modified_base (20)..(20): bicyclic nucleic acid (BNA)
  source: /note="3' tri-ethylene glycol (TEG)"
caacaucaaggaagauggca

SEQ ID NO: 10630 - RNA, 19 nt, Artificial Sequence
  source: /note="Description of Artificial Sequence: Synthetic oligonucleotide"
  source: /note="RNA"
  modified_base (18)..(18): bicyclic nucleic acid (BNA)
  modified_base (19)..(19): bicyclic nucleic acid (BNA)
  source: /note="3' tri-ethylene glycol (TEG)"
caacaucaaggaagauggc

SEQ ID NO: 10631 - RNA, 18 nt, Artificial Sequence
  source: /note="Description of Artificial Sequence: Synthetic oligonucleotide"
  source: /note="RNA"
  modified_base (17)..(17): bicyclic nucleic acid (BNA)
  modified_base (18)..(18): bicyclic nucleic acid (BNA)
  source: /note="3' tri-ethylene glycol (TEG)"
caacaucaaggaagaugg

SEQ ID NO: 10632 - DNA, 17 bp, Artificial Sequence
  source: /note="Description of Artificial Sequence: Synthetic oligonucleotide"
  source: /note="Description of Combined DNA/RNA Molecule: Synthetic oligonucleotide"
  source: /note="DNA/RNA"
  modified_base (16)..(16): bicyclic nucleic acid (BNA)
  modified_base (17)..(17): bicyclic nucleic acid (BNA)
  source: /note="3' tri-ethylene glycol (TEG)"
caacaucaaggaagatg

SEQ ID NO: 10633 - DNA, 16 bp, Artificial Sequence
  source: /note="Description of Artificial Sequence: Synthetic oligonucleotide"
  source: /note="Description of Combined DNA/RNA Molecule: Synthetic oligonucleotide"
  source: /note="DNA/RNA"
  modified_base (15)..(15): bicyclic nucleic acid (BNA)
  modified_base (16)..(16): bicyclic nucleic acid (BNA)
  source: /note="3' tri-ethylene glycol (TEG)"
caacaucaaggaagat

SEQ ID NO: 10634 - RNA, 15 nt, Artificial Sequence
  source: /note="Description of Artificial Sequence: Synthetic oligonucleotide"
  source: /note="RNA"
  modified_base (14)..(14): bicyclic nucleic acid (BNA)
  modified_base (15)..(15): bicyclic nucleic acid (BNA)
  source: /note="3' tri-ethylene glycol (TEG)"
caacaucaaggaaga

SEQ ID NO: 10635 - RNA, 14 nt, Artificial Sequence
  source: /note="Description of Artificial Sequence: Synthetic oligonucleotide"
  source: /note="RNA"
  modified_base (13)..(13): bicyclic nucleic acid (BNA)
  modified_base (14)..(14): bicyclic nucleic acid (BNA)
  source: /note="3' tri-ethylene glycol (TEG)"
caacaucaaggaag

SEQ ID NO: 10636 - RNA, 26 nt, Artificial Sequence
  source: /note="Description of Artificial Sequence: Synthetic oligonucleotide"
  source: /note="RNA"
  modified_base (25)..(25): bicyclic nucleic acid (BNA)
  modified_base (26)..(26): bicyclic nucleic acid (BNA)
  source: /note="3' tri-ethylene glycol (TEG)"
aacaucaaggaagauggcauuucuag

SEQ ID NO: 10637 - DNA, 25 bp, Artificial Sequence
  source: /note="Description of Artificial Sequence: Synthetic oligonucleotide"
  source: /note="Description of Combined DNA/RNA Molecule: Synthetic oligonucleotide"
  source: /note="DNA/RNA"
  modified_base (24)..(24): bicyclic nucleic acid (BNA)
  modified_base (25)..(25): bicyclic nucleic acid (BNA)
  source: /note="3' tri-ethylene glycol (TEG)"
aacaucaaggaagauggcauuucta

SEQ ID NO: 10638 - DNA, 24 bp, Artificial Sequence
  source: /note="Description of Artificial Sequence: Synthetic oligonucleotide"
  source: /note="Description of Combined DNA/RNA Molecule: Synthetic oligonucleotide"
  source: /note="DNA/RNA"
  modified_base (23)..(23): bicyclic nucleic acid (BNA)
  modified_base (24)..(24): bicyclic nucleic acid (BNA)
  source: /note="3' tri-ethylene glycol (TEG)"
aacaucaaggaagauggcauuuct

SEQ ID NO: 10639 - DNA, 23 bp, Artificial Sequence
  source: /note="Description of Artificial Sequence: Synthetic oligonucleotide"
  source: /note="Description of Combined DNA/RNA Molecule: Synthetic oligonucleotide"
  source: /note="DNA/RNA"
  modified_base (22)..(22): bicyclic nucleic acid (BNA)
  modified_base (23)..(23): bicyclic nucleic acid (BNA)
  source: /note="3' tri-ethylene glycol (TEG)"
aacaucaaggaagauggcauutc

SEQ ID NO: 10640 - DNA, 22 bp, Artificial Sequence
  source: /note="Description of Artificial Sequence: Synthetic oligonucleotide"
  source: /note="Description of Combined DNA/RNA Molecule: Synthetic oligonucleotide"
  source: /note="DNA/RNA"
  modified_base (21)..(21): bicyclic nucleic acid (BNA)
  modified_base (22)..(22): bicyclic nucleic acid (BNA)
  source: /note="3' tri-ethylene glycol (TEG)"
aacaucaaggaagauggcautt

SEQ ID NO: 10641 - DNA, 21 bp, Artificial Sequence
  source: /note="Description of Artificial Sequence: Synthetic oligonucleotide"
  source: /note="Description of Combined DNA/RNA Molecule: Synthetic oligonucleotide"
  source: /note="DNA/RNA"
  modified_base (20)..(20): bicyclic nucleic acid (BNA)
  modified_base (21)..(21): bicyclic nucleic acid (BNA)
  source: /note="3' tri-ethylene glycol (TEG)"
aacaucaaggaagauggcatt

SEQ ID NO: 10642 - DNA, 20 bp, Artificial Sequence
  source: /note="Description of Artificial Sequence: Synthetic oligonucleotide"
  source: /note="Description of Combined DNA/RNA Molecule: Synthetic oligonucleotide"
  source: /note="DNA/RNA"
  modified_base (19)..(19): bicyclic nucleic acid (BNA)
  modified_base (20)..(20): bicyclic nucleic acid (BNA)
  source: /note="3' tri-ethylene glycol (TEG)"
aacaucaaggaagauggcat

SEQ ID NO: 10643 - RNA, 19 nt, Artificial Sequence
  source: /note="Description of Artificial Sequence: Synthetic oligonucleotide"
  source: /note="RNA"
  modified_base (18)..(18): bicyclic nucleic acid (BNA)
  modified_base (19)..(19): bicyclic nucleic acid (BNA)
  source: /note="3' tri-ethylene glycol (TEG)"
aacaucaaggaagauggca

SEQ ID NO: 10644 - RNA, 18 nt, Artificial Sequence
  source: /note="Description of Artificial Sequence: Synthetic oligonucleotide"
  source: /note="RNA"
  modified_base (17)..(17): bicyclic nucleic acid (BNA)
  modified_base (18)..(18): bicyclic nucleic acid (BNA)
  source: /note="3' tri-ethylene glycol (TEG)"
aacaucaaggaagauggc

SEQ ID NO: 10645 - RNA, 17 nt, Artificial Sequence
  source: /note="Description of Artificial Sequence: Synthetic oligonucleotide"
  source: /note="RNA"
  modified_base (16)..(16): bicyclic nucleic acid (BNA)
  modified_base (17)..(17): bicyclic nucleic acid (BNA)
  source: /note="3' tri-ethylene glycol (TEG)"
aacaucaaggaagaugg

SEQ ID NO: 10646 - DNA, 16 bp, Artificial Sequence
  source: /note="Description of Artificial Sequence: Synthetic oligonucleotide"
  source: /note="Description of Combined DNA/RNA Molecule: Synthetic oligonucleotide"
  source: /note="DNA/RNA"
  modified_base (15)..(15): bicyclic nucleic acid (BNA)
  modified_base (16)..(16): bicyclic nucleic acid (BNA)
  source: /note="3' tri-ethylene glycol (TEG)"
aacaucaaggaagatg

SEQ ID NO: 10647 - DNA, 15 bp, Artificial Sequence
  source: /note="Description of Artificial Sequence: Synthetic oligonucleotide"
  source: /note="Description of Combined DNA/RNA Molecule: Synthetic oligonucleotide"
  source: /note="DNA/RNA"
  modified_base (14)..(14): bicyclic nucleic acid (BNA)
  modified_base (15)..(15): bicyclic nucleic acid (BNA)
  source: /note="3' tri-ethylene glycol (TEG)"
aacaucaaggaagat

SEQ ID NO: 10648 - RNA, 14 nt, Artificial Sequence
  source: /note="Description of Artificial Sequence: Synthetic oligonucleotide"
  source: /note="RNA"
  modified_base (13)..(13): bicyclic nucleic acid (BNA)
  modified_base (14)..(14): bicyclic nucleic acid (BNA)
  source: /note="3' tri-ethylene glycol (TEG)"
aacaucaaggaaga

SEQ ID NO: 10649 - RNA, 13 nt, Artificial Sequence
  source: /note="Description of Artificial Sequence: Synthetic oligonucleotide"
  source: /note="RNA"
  modified_base (12)..(12): bicyclic nucleic acid (BNA)
  modified_base (13)..(13): bicyclic nucleic acid (BNA)
  source: /note="3' tri-ethylene glycol (TEG)"
aacaucaaggaag

SEQ ID NO: 10650 - RNA, 25 nt, Artificial Sequence
  source: /note="Description of Artificial Sequence: Synthetic oligonucleotide"
  source: /note="RNA"
  modified_base (24)..(24): bicyclic nucleic acid (BNA)
  modified_base (25)..(25): bicyclic nucleic acid (BNA)
  source: /note="3' tri-ethylene glycol (TEG)"
acaucaaggaagauggcauuucuag

SEQ ID NO: 10651 - DNA, 24 bp, Artificial Sequence
  source: /note="Description of Artificial Sequence: Synthetic oligonucleotide"
  source: /note="Description of Combined DNA/RNA Molecule: Synthetic oligonucleotide"
  source: /note="DNA/RNA"
  modified_base (23)..(23): bicyclic nucleic acid (BNA)
  modified_base (24)..(24): bicyclic nucleic acid (BNA)
  source: /note="3' tri-ethylene glycol (TEG)"
acaucaaggaagauggcauuucta

SEQ ID NO: 10652 - DNA, 23 bp, Artificial Sequence
  source: /note="Description of Artificial Sequence: Synthetic oligonucleotide"
  source: /note="Description of Combined DNA/RNA Molecule: Synthetic oligonucleotide"
  source: /note="DNA/RNA"
  modified_base (22)..(22): bicyclic nucleic acid (BNA)
  modified_base (23)..(23): bicyclic nucleic acid (BNA)
  source: /note="3' tri-ethylene glycol (TEG)"
acaucaaggaagauggcauuuct

SEQ ID NO: 10653 - DNA, 22 bp, Artificial Sequence
  source: /note="Description of Artificial Sequence: Synthetic oligonucleotide"
  source: /note="Description of Combined DNA/RNA Molecule: Synthetic oligonucleotide"
  source: /note="DNA/RNA"
  modified_base (21)..(21): bicyclic nucleic acid (BNA)
  modified_base (22)..(22): bicyclic nucleic acid (BNA)
  source: /note="3' tri-ethylene glycol (TEG)"
acaucaaggaagauggcauutc

SEQ ID NO: 10654 - DNA, 21 bp, Artificial Sequence
  source: /note="Description of Artificial Sequence: Synthetic oligonucleotide"
  source: /note="Description of Combined DNA/RNA Molecule: Synthetic oligonucleotide"
  source: /note="DNA/RNA"
  modified_base (20)..(20): bicyclic nucleic acid (BNA)
  modified_base (21)..(21): bicyclic nucleic acid (BNA)
  source: /note="3' tri-ethylene glycol (TEG)"
acaucaaggaagauggcautt

SEQ ID NO: 10655 - DNA, 20 bp, Artificial Sequence
  source: /note="Description of Artificial Sequence: Synthetic oligonucleotide"
  source: /note="Description of Combined DNA/RNA Molecule: Synthetic oligonucleotide"
  source: /note="DNA/RNA"
  modified_base (19)..(19): bicyclic nucleic acid (BNA)
  modified_base (20)..(20): bicyclic nucleic acid (BNA)
  source: /note="3' tri-ethylene glycol (TEG)"
acaucaaggaagauggcatt

SEQ ID NO: 10656 - DNA, 19 bp, Artificial Sequence
  source: /note="Description of Artificial Sequence: Synthetic oligonucleotide"
  source: /note="Description of Combined DNA/RNA Molecule: Synthetic oligonucleotide"
  source: /note="DNA/RNA"
  modified_base (18)..(18): bicyclic nucleic acid (BNA)
  modified_base (19)..(19): bicyclic nucleic acid (BNA)
  source: /note="3' tri-ethylene glycol (TEG)"
acaucaaggaagauggcat

SEQ ID NO: 10657 - RNA, 18 nt, Artificial Sequence
  source: /note="Description of Artificial Sequence: Synthetic oligonucleotide"
  source: /note="RNA"
  modified_base (17)..(17): bicyclic nucleic acid (BNA)
  modified_base (18)..(18): bicyclic nucleic acid (BNA)
  source: /note="3' tri-ethylene glycol (TEG)"
acaucaaggaagauggca

SEQ ID NO: 10658 - RNA, 17 nt, Artificial Sequence
  source: /note="Description of Artificial Sequence: Synthetic oligonucleotide"
  source: /note="RNA"
  modified_base (16)..(16): bicyclic nucleic acid (BNA)
  modified_base (17)..(17): bicyclic nucleic acid (BNA)
  source: /note="3' tri-ethylene glycol (TEG)"
acaucaaggaagauggc

SEQ ID NO: 10659 - RNA, 16 nt, Artificial Sequence
  source: /note="Description of Artificial Sequence: Synthetic oligonucleotide"
  source: /note="RNA"
  modified_base (15)..(15): bicyclic nucleic acid (BNA)
  modified_base (16)..(16): bicyclic nucleic acid (BNA)
  source: /note="3' tri-ethylene glycol (TEG)"
acaucaaggaagaugg

SEQ ID NO: 10660 - DNA, 15 bp, Artificial Sequence
  source: /note="Description of Artificial Sequence: Synthetic oligonucleotide"
  source: /note="Description of Combined DNA/RNA Molecule: Synthetic oligonucleotide"
  source: /note="DNA/RNA"
  modified_base (14)..(14): bicyclic nucleic acid (BNA)
  modified_base (15)..(15): bicyclic nucleic acid (BNA)
  source: /note="3' tri-ethylene glycol (TEG)"
acaucaaggaagatg

SEQ ID NO: 10661 - DNA, 14 bp, Artificial Sequence
  source: /note="Description of Artificial Sequence: Synthetic oligonucleotide"
  source: /note="Description of Combined DNA/RNA Molecule: Synthetic oligonucleotide"
  source: /note="DNA/RNA"
  modified_base (13)..(13): bicyclic nucleic acid (BNA)
  modified_base (14)..(14): bicyclic nucleic acid (BNA)
  source: /note="3' tri-ethylene glycol (TEG)"
acaucaaggaagat

SEQ ID NO: 10662 - RNA, 13 nt, Artificial Sequence
  source: /note="Description of Artificial Sequence: Synthetic oligonucleotide"
  source: /note="RNA"
  modified_base (12)..(12): bicyclic nucleic acid (BNA)
  modified_base (13)..(13): bicyclic nucleic acid (BNA)
  source: /note="3' tri-ethylene glycol (TEG)"
acaucaaggaaga

SEQ ID NO: 10663 - RNA, 12 nt, Artificial Sequence
  source: /note="Description of Artificial Sequence: Synthetic oligonucleotide"
  source: /note="RNA"
  modified_base (11)..(11): bicyclic nucleic acid (BNA)
  modified_base (12)..(12): bicyclic nucleic acid (BNA)
  source: /note="3' tri-ethylene glycol (TEG)"
acaucaaggaag

SEQ ID NO: 10664 - RNA, 24 nt, Artificial Sequence
  source: /note="Description of Artificial Sequence: Synthetic oligonucleotide"
  source: /note="RNA"
  modified_base (23)..(23): bicyclic nucleic acid (BNA)
  modified_base (24)..(24): bicyclic nucleic acid (BNA)
  source: /note="3' tri-ethylene glycol (TEG)"
caucaaggaagauggcauuucuag

SEQ ID NO: 10665 - DNA, 23 bp, Artificial Sequence
  source: /note="Description of Artificial Sequence: Synthetic oligonucleotide"
  source: /note="Description of Combined DNA/RNA Molecule: Synthetic oligonucleotide"
  source: /note="DNA/RNA"
  modified_base (22)..(22): bicyclic nucleic acid (BNA)
  modified_base (23)..(23): bicyclic nucleic acid (BNA)
  source: /note="3' tri-ethylene glycol (TEG)"
caucaaggaagauggcauuucta

SEQ ID NO: 10666 - DNA, 22 bp, Artificial Sequence
  source: /note="Description of Artificial Sequence: Synthetic oligonucleotide"
  source: /note="Description of Combined DNA/RNA Molecule: Synthetic oligonucleotide"
  source: /note="DNA/RNA"
  modified_base (21)..(21): bicyclic nucleic acid (BNA)
  modified_base (22)..(22): bicyclic nucleic acid (BNA)
  source: /note="3' tri-ethylene glycol (TEG)"
caucaaggaagauggcauuuct

SEQ ID NO: 10667 - DNA, 21 bp, Artificial Sequence
  source: /note="Description of Artificial Sequence: Synthetic oligonucleotide"
  source: /note="Description of Combined DNA/RNA Molecule: Synthetic oligonucleotide"
  source: /note="DNA/RNA"
  modified_base (20)..(20): bicyclic nucleic acid (BNA)
  modified_base (21)..(21): bicyclic nucleic acid (BNA)
  source: /note="3' tri-ethylene glycol (TEG)"
caucaaggaagauggcauutc

SEQ ID NO: 10668 - DNA, 20 bp, Artificial Sequence
  source: /note="Description of Artificial Sequence: Synthetic oligonucleotide"
  source: /note="Description of Combined DNA/RNA Molecule: Synthetic oligonucleotide"
  source: /note="DNA/RNA"
  modified_base (19)..(19): bicyclic nucleic acid (BNA)
  modified_base (20)..(20): bicyclic nucleic acid (BNA)
  source: /note="3' tri-ethylene glycol (TEG)"
caucaaggaagauggcautt

SEQ ID NO: 10669 - DNA, 19 bp, Artificial Sequence
  source: /note="Description of Artificial Sequence: Synthetic oligonucleotide"
  source: /note="Description of Combined DNA/RNA Molecule: Synthetic oligonucleotide"
  source: /note="DNA/RNA"
  modified_base (18)..(18): bicyclic nucleic acid (BNA)
  modified_base (19)..(19): bicyclic nucleic acid (BNA)
  source: /note="3' tri-ethylene glycol (TEG)"
caucaaggaagauggcatt

SEQ ID NO: 10670 - DNA, 18 bp, Artificial Sequence
  source: /note="Description of Artificial Sequence: Synthetic oligonucleotide"
  source: /note="Description of Combined DNA/RNA Molecule: Synthetic oligonucleotide"
  source: /note="DNA/RNA"
  modified_base (17)..(17): bicyclic nucleic acid (BNA)
  modified_base (18)..(18): bicyclic nucleic acid (BNA)
  source: /note="3' tri-ethylene glycol (TEG)"
caucaaggaagauggcat

SEQ ID NO: 10671 - RNA, 17 nt, Artificial Sequence
  source: /note="Description of Artificial Sequence: Synthetic oligonucleotide"
  source: /note="RNA"
  modified_base (16)..(16): bicyclic nucleic acid (BNA)
  modified_base (17)..(17): bicyclic nucleic acid (BNA)
  source: /note="3' tri-ethylene glycol (TEG)"
caucaaggaagauggca

SEQ ID NO: 10672 - RNA, 16 nt, Artificial Sequence
  source: /note="Description of Artificial Sequence: Synthetic oligonucleotide"
  source: /note="RNA"
  modified_base (15)..(15): bicyclic nucleic acid (BNA)
  modified_base (16)..(16): bicyclic nucleic acid (BNA)
  source: /note="3' tri-ethylene glycol (TEG)"
caucaaggaagauggc

SEQ ID NO: 10673 - RNA, 15 nt, Artificial Sequence
  source: /note="Description of Artificial Sequence: Synthetic oligonucleotide"
  source: /note="RNA"
  modified_base (14)..(14): bicyclic nucleic acid (BNA)
  modified_base (15)..(15): bicyclic nucleic acid (BNA)
  source: /note="3' tri-ethylene glycol (TEG)"
caucaaggaagaugg

SEQ ID NO: 10674 - DNA, 14 bp, Artificial Sequence
  source: /note="Description of Artificial Sequence: Synthetic oligonucleotide"
  source: /note="Description of Combined DNA/RNA Molecule: Synthetic oligonucleotide"
  source: /note="DNA/RNA"
  modified_base (13)..(13): bicyclic nucleic acid (BNA)
  modified_base (14)..(14): bicyclic nucleic acid (BNA)
  source: /note="3' tri-ethylene glycol (TEG)"
caucaaggaagatg

SEQ ID NO: 10675 - DNA, 13 bp, Artificial Sequence
  source: /note="Description of Artificial Sequence: Synthetic oligonucleotide"
  source: /note="Description of Combined DNA/RNA Molecule: Synthetic oligonucleotide"
  source: /note="DNA/RNA"
  modified_base (12)..(12): bicyclic nucleic acid (BNA)
  modified_base (13)..(13): bicyclic nucleic acid (BNA)
  source: /note="3' tri-ethylene glycol (TEG)"
caucaaggaagat

SEQ ID NO: 10676 - RNA, 12 nt, Artificial Sequence
  source: /note="Description of Artificial Sequence: Synthetic oligonucleotide"
  source: /note="RNA"
  modified_base (11)..(11): bicyclic nucleic acid (BNA)
  modified_base (12)..(12): bicyclic nucleic acid (BNA)
  source: /note="3' tri-ethylene glycol (TEG)"
caucaaggaaga

SEQ ID NO: 10677 - RNA, 11 nt, Artificial Sequence
  source: /note="Description of Artificial Sequence: Synthetic oligonucleotide"
  source: /note="RNA"
  modified_base (10)..(10): bicyclic nucleic acid (BNA)
  modified_base (11)..(11): bicyclic nucleic acid (BNA)
  source: /note="3' tri-ethylene glycol (TEG)"
caucaaggaag

SEQ ID NO: 10678 - RNA, 23 nt, Artificial Sequence
  source: /note="Description of Artificial Sequence: Synthetic oligonucleotide"
  source: /note="RNA"
  modified_base (22)..(22): bicyclic nucleic acid (BNA)
  modified_base (23)..(23): bicyclic nucleic acid (BNA)
  source: /note="3' tri-ethylene glycol (TEG)"
aucaaggaagauggcauuucuag

SEQ ID NO: 10679 - DNA, 22 bp, Artificial Sequence
  source: /note="Description of Artificial Sequence: Synthetic oligonucleotide"
  source: /note="Description of Combined DNA/RNA Molecule: Synthetic oligonucleotide"
  source: /note="DNA/RNA"
  modified_base (21)..(21): bicyclic nucleic acid (BNA)
  modified_base (22)..(22): bicyclic nucleic acid (BNA)
  source: /note="3' tri-ethylene glycol (TEG)"
aucaaggaagauggcauuucta

SEQ ID NO: 10680 - DNA, 21 bp, Artificial Sequence
  source: /note="Description of Artificial Sequence: Synthetic oligonucleotide"
  source: /note="Description of Combined DNA/RNA Molecule: Synthetic oligonucleotide"
  source: /note="DNA/RNA"
  modified_base (20)..(20): bicyclic nucleic acid (BNA)
  modified_base (21)..(21): bicyclic nucleic acid (BNA)
  source: /note="3' tri-ethylene glycol (TEG)"
aucaaggaagauggcauuuct

SEQ ID NO: 10681 - DNA, 20 bp, Artificial Sequence
  source: /note="Description of Artificial Sequence: Synthetic oligonucleotide"
  source: /note="Description of Combined DNA/RNA Molecule: Synthetic oligonucleotide"
  source: /note="DNA/RNA"
  modified_base (19)..(19): bicyclic nucleic acid (BNA)
  modified_base (20)..(20): bicyclic nucleic acid (BNA)
  source: /note="3' tri-ethylene glycol (TEG)"
aucaaggaagauggcauutc

SEQ ID NO: 10682 - DNA, 19 bp, Artificial Sequence
  source: /note="Description of Artificial Sequence: Synthetic oligonucleotide"
  source: /note="Description of Combined DNA/RNA Molecule: Synthetic oligonucleotide"
  source: /note="DNA/RNA"
  modified_base (18)..(18): bicyclic nucleic acid (BNA)
  modified_base (19)..(19): bicyclic nucleic acid (BNA)
  source: /note="3' tri-ethylene glycol (TEG)"
aucaaggaagauggcautt

SEQ ID NO: 10683 - DNA, 18 bp, Artificial Sequence
  source: /note="Description of Artificial Sequence: Synthetic oligonucleotide"
  source: /note="Description of Combined DNA/RNA Molecule: Synthetic oligonucleotide"
  source: /note="DNA/RNA"
  modified_base (17)..(17): bicyclic nucleic acid (BNA)
  modified_base (18)..(18): bicyclic nucleic acid (BNA)
  source: /note="3' tri-ethylene glycol (TEG)"
aucaaggaagauggcatt

SEQ ID NO: 10684 - DNA, 17 bp, Artificial Sequence
  source: /note="Description of Artificial Sequence: Synthetic oligonucleotide"
  source: /note="Description of Combined DNA/RNA Molecule: Synthetic oligonucleotide"
  source: /note="DNA/RNA"
  modified_base (16)..(16): bicyclic nucleic acid (BNA)
  modified_base (17)..(17): bicyclic nucleic acid (BNA)
  source: /note="3' tri-ethylene glycol (TEG)"
aucaaggaagauggcat

SEQ ID NO: 10685 - RNA, 16 nt, Artificial Sequence
  source: /note="Description of Artificial Sequence: Synthetic oligonucleotide"
  source: /note="RNA"
  modified_base (15)..(15): bicyclic nucleic acid (BNA)
  modified_base (16)..(16): bicyclic nucleic acid (BNA)
  source: /note="3' tri-ethylene glycol (TEG)"
aucaaggaagauggca

SEQ ID NO: 10686 - RNA, 15 nt, Artificial Sequence
  source: /note="Description of Artificial Sequence: Synthetic oligonucleotide"
  source: /note="RNA"
  modified_base (14)..(14): bicyclic nucleic acid (BNA)
  modified_base (15)..(15): bicyclic nucleic acid (BNA)
  source: /note="3' tri-ethylene glycol (TEG)"
aucaaggaagauggc

SEQ ID NO: 10687 - RNA, 14 nt, Artificial Sequence
  source: /note="Description of Artificial Sequence: Synthetic oligonucleotide"
  source: /note="RNA"
  modified_base (13)..(13): bicyclic nucleic acid (BNA)
  modified_base (14)..(14): bicyclic nucleic acid (BNA)
  source: /note="3' tri-ethylene glycol (TEG)"
aucaaggaagaugg

SEQ ID NO: 10688 - DNA, 13 bp, Artificial Sequence
  source: /note="Description of Artificial Sequence: Synthetic oligonucleotide"
  source: /note="Description of Combined DNA/RNA Molecule: Synthetic oligonucleotide"
  source: /note="DNA/RNA"
  modified_base (12)..(12): bicyclic nucleic acid (BNA)
  modified_base (13)..(13): bicyclic nucleic acid (BNA)
  source: /note="3' tri-ethylene glycol (TEG)"
aucaaggaagatg

SEQ ID NO: 10689 - DNA, 12 bp, Artificial Sequence
  source: /note="Description of Artificial Sequence: Synthetic oligonucleotide"
  source: /note="Description of Combined DNA/RNA Molecule: Synthetic oligonucleotide"
  source: /note="DNA/RNA"
  modified_base (11)..(11): bicyclic nucleic acid (BNA)
  modified_base (12)..(12): bicyclic nucleic acid (BNA)
  source: /note="3' tri-ethylene glycol (TEG)"
aucaaggaagat

SEQ ID NO: 10690 - RNA, 11 nt, Artificial Sequence
  source: /note="Description of Artificial Sequence: Synthetic oligonucleotide"
  source: /note="RNA"
  modified_base (10)..(10): bicyclic nucleic acid (BNA)
  modified_base (11)..(11): bicyclic nucleic acid (BNA)
  source: /note="3' tri-ethylene glycol (TEG)"
aucaaggaaga

SEQ ID NO: 10691 - RNA, 10 nt, Artificial Sequence
  source: /note="Description of Artificial Sequence: Synthetic oligonucleotide"
  source: /note="RNA"
  modified_base (9)..(9): bicyclic nucleic acid (BNA)
  modified_base (10)..(10): bicyclic nucleic acid (BNA)
  source: /note="3' tri-ethylene glycol (TEG)"
aucaaggaag

SEQ ID NO: 10692 - DNA, 23 bp, Artificial Sequence
  source: /note="Description of Artificial Sequence: Synthetic oligonucleotide"
  source: /note="Description of Combined DNA/RNA Molecule: Synthetic oligonucleotide"
  source: /note="DNA/RNA"
  modified_base (22)..(22): bicyclic nucleic acid (BNA)
  modified_base (23)..(23): bicyclic nucleic acid (BNA)
  source: /note="3' tri-ethylene glycol (TEG)"
ccagagcagguaccuccaacatc

SEQ ID NO: 10693 - RNA, 18 nt, Artificial Sequence
  source: /note="Description of Artificial Sequence: Synthetic oligonucleotide"
  source: /note="RNA"
  modified_base (17)..(17): bicyclic nucleic acid (BNA)
  modified_base (18)..(18): bicyclic nucleic acid (BNA)
  source: /note="3' tri-ethylene glycol (TEG)"
ccagagcagguaccucca

SEQ ID NO: 10694 - DNA, 23 bp, Artificial Sequence
  source: /note="Description of Artificial Sequence: Synthetic oligonucleotide"
  source: /note="Description of Combined DNA/RNA Molecule: Synthetic oligonucleotide"
  source: /note="DNA/RNA"
  modified_base (22)..(22): bicyclic nucleic acid (BNA)
  modified_base (23)..(23): bicyclic nucleic acid (BNA)
  source: /note="3' tri-ethylene glycol (TEG)"
ccucugugauuuuauaacuugat

SEQ ID NO: 10695 - DNA, 17 bp, Artificial Sequence
  source: /note="Description of Artificial Sequence: Synthetic oligonucleotide"
  source: /note="Description of Combined DNA/RNA Molecule: Synthetic oligonucleotide"
  source: /note="DNA/RNA"
  modified_base (16)..(16): bicyclic nucleic acid (BNA)
  modified_base (17)..(17): bicyclic nucleic acid (BNA)
  source: /note="3' tri-ethylene glycol (TEG)"
ucacccaccaucaccct

SEQ ID NO: 10696 - RNA, 20 nt, Artificial Sequence
  source: /note="Description of Artificial Sequence: Synthetic oligonucleotide"
  source: /note="RNA"
  modified_base (19)..(19): bicyclic nucleic acid (BNA)
  modified_base (20)..(20): bicyclic nucleic acid (BNA)
  source: /note="3' tri-ethylene glycol (TEG)"
ugauauccucaaggucaccc

SEQ ID NO: 10697 - DNA, 22 bp, Artificial Sequence
  source: /note="Description of Artificial Sequence: Synthetic oligonucleotide"
  source: /note="Description of Combined DNA/RNA Molecule: Synthetic oligonucleotide"
  source: /note="DNA/RNA"
  modified_base (21)..(21): bicyclic nucleic acid (BNA)
  modified_base (22)..(22): bicyclic nucleic acid (BNA)
  source: /note="3' tri-ethylene glycol (TEG)"
cugcuugaugaucaucucgutg

SEQ ID NO: 10698 - DNA, 18 bp, Artificial Sequence
  source: /note="Description of Artificial Sequence: Synthetic oligonucleotide"
  source: /note="Description of Combined DNA/RNA Molecule: Synthetic oligonucleotide"
  source: /note="DNA/RNA"
  modified_base (17)..(17): bicyclic nucleic acid (BNA)
  modified_base (18)..(18): bicyclic nucleic acid (BNA)
  source: /note="3' tri-ethylene glycol (TEG)"
cugcuugaugaucauctc

SEQ ID NO: 10699 - RNA, 19 nt, Artificial Sequence
  source: /note="Description of Artificial Sequence: Synthetic oligonucleotide"
  source: /note="RNA"
  modified_base (18)..(18): bicyclic nucleic acid (BNA)
  modified_base (19)..(19): bicyclic nucleic acid (BNA)
  source: /note="3' tri-ethylene glycol (TEG)"
guuuccuuaguaaccacag

SEQ ID NO: 10700 - RNA, 17 nt, Artificial Sequence
  source: /note="Description of Artificial Sequence: Synthetic oligonucleotide"
  source: /note="RNA"
  modified_base (16)..(16): bicyclic nucleic acid (BNA)
  modified_base (17)..(17): bicyclic nucleic acid (BNA)
  source: /note="3' tri-ethylene glycol (TEG)"
guuuccuuaguaaccac

SEQ ID NO: 10701 - DNA, 20 bp, Artificial Sequence
  source: /note="Description of Artificial Sequence: Synthetic oligonucleotide"
  source: /note="Description of Combined DNA/RNA Molecule: Synthetic oligonucleotide"
  source: /note="DNA/RNA"
  source: /note="5' tri-ethylene glycol (TEG)"
  modified_base (19)..(19): bicyclic nucleic acid (BNA)
  modified_base (20)..(20): bicyclic nucleic acid (BNA)
  source: /note="3' tri-ethylene glycol (TEG)"
ucaaggaagauggcauuuct

SEQ ID NO: 10702 - RNA, 22 nt, Artificial Sequence
  source: /note="Description of Artificial Sequence: Synthetic oligonucleotide"
  source: /note="RNA"
  source: /note="5' tri-ethylene glycol (TEG)"
  modified_base (21)..(21): bicyclic nucleic acid (BNA)
  modified_base (22)..(22): bicyclic nucleic acid (BNA)
  source: /note="3' tri-ethylene glycol (TEG)"
ucaaggaagauggcauuucuag

SEQ ID NO: 10703 - RNA, 18 nt, Artificial Sequence
  source: /note="Description of Artificial Sequence: Synthetic oligonucleotide"
  source: /note="RNA"
  source: /note="5' tri-ethylene glycol (TEG)"
  modified_base (17)..(17): bicyclic nucleic acid (BNA)
  modified_base (18)..(18): bicyclic nucleic acid (BNA)
  source: /note="3' tri-ethylene glycol (TEG)"
gguaaguucuguccaagc

SEQ ID NO: 10704 - RNA, 18 nt, Artificial Sequence
  source: /note="Description of Artificial Sequence: Synthetic oligonucleotide"
  source: /note="RNA"
  source: /note="5' tri-ethylene glycol (TEG)"
  modified_base (17)..(17): bicyclic nucleic acid (BNA)
  modified_base (18)..(18): bicyclic nucleic acid (BNA)
  source: /note="3' tri-ethylene glycol (TEG)"
guaaguucuguccaagcc

SEQ ID NO: 10705 - RNA, 18 nt, Artificial Sequence
  source: /note="Description of Artificial Sequence: Synthetic oligonucleotide"
  source: /note="RNA"
  source: /note="5' tri-ethylene glycol (TEG)"
  modified_base (17)..(17): bicyclic nucleic acid (BNA)
  modified_base (18)..(18): bicyclic nucleic acid (BNA)
  source: /note="3' tri-ethylene glycol (TEG)"
agucgguaaguucugucc

SEQ ID NO: 10706 - RNA, 18 nt, Artificial Sequence
  source: /note="Description of Artificial Sequence: Synthetic oligonucleotide"
  source: /note="RNA"
  source: /note="5' tri-ethylene glycol (TEG)"
  modified_base (17)..(17): bicyclic nucleic acid (BNA)
  modified_base (18)..(18): bicyclic nucleic acid (BNA)
  source: /note="3' tri-ethylene glycol (TEG)"
cuguccaagcccgguuga

SEQ ID NO: 10707 - RNA, 15 nt, Artificial Sequence
  source: /note="Description of Artificial Sequence: Synthetic oligonucleotide"
  source: /note="RNA"
  source: /note="5' tri-ethylene glycol (TEG)"
  modified_base (14)..(14): bicyclic nucleic acid (BNA)
  modified_base (15)..(15): bicyclic nucleic acid (BNA)
  source: /note="3' tri-ethylene glycol (TEG)"
uaaguucuguccaag

SEQ ID NO: 10708 - RNA, 20 nt, Artificial Sequence
  source: /note="Description of Artificial Sequence: Synthetic oligonucleotide"
  source: /note="RNA"
  source: /note="5' tri-ethylene glycol (TEG)"
  modified_base (19)..(19): bicyclic nucleic acid (BNA)
  modified_base (20)..(20): bicyclic nucleic acid (BNA)
  source: /note="3' tri-ethylene glycol (TEG)"
uucuguccaagcccgguuga

SEQ ID NO: 10709 - DNA, 19 bp, Artificial Sequence
  source: /note="Description of Artificial Sequence: Synthetic oligonucleotide"
  source: /note="Description of Combined DNA/RNA Molecule: Synthetic oligonucleotide"
  source: /note="DNA/RNA"
  source: /note="5' tri-ethylene glycol (TEG)"
  modified_base (18)..(18): bicyclic nucleic acid (BNA)
  modified_base (19)..(19): bicyclic nucleic acid (BNA)
  source: /note="3' tri-ethylene glycol (TEG)"
uucuguccaagcccggutg

SEQ ID NO: 10710 - DNA, 18 bp, Artificial Sequence
  source: /note="Description of Artificial Sequence: Synthetic oligonucleotide"
  source: /note="Description of Combined DNA/RNA Molecule: Synthetic oligonucleotide"
  source: /note="DNA/RNA"
  source: /note="5' tri-ethylene glycol (TEG)"
  modified_base (17)..(17): bicyclic nucleic acid (BNA)
  modified_base (18)..(18): bicyclic nucleic acid (BNA)
  source: /note="3' tri-ethylene glycol (TEG)"
uucuguccaagcccggtt

SEQ ID NO: 10711 - DNA, 17 bp, Artificial Sequence
  source: /note="Description of Artificial Sequence: Synthetic oligonucleotide"
  source: /note="Description of Combined DNA/RNA Molecule: Synthetic oligonucleotide"
  source: /note="DNA/RNA"
  source: /note="5' tri-ethylene glycol (TEG)"
  modified_base (16)..(16): bicyclic nucleic acid (BNA)
  modified_base (17)..(17): bicyclic nucleic acid (BNA)
  source: /note="3' tri-ethylene glycol (TEG)"
uucuguccaagcccggt

SEQ ID NO: 10712 - RNA, 16 nt, Artificial Sequence
  source: /note="Description of Artificial Sequence: Synthetic oligonucleotide"
  source: /note="RNA"
  source: /note="5' tri-ethylene glycol (TEG)"
  modified_base (15)..(15): bicyclic nucleic acid (BNA)
  modified_base (16)..(16): bicyclic nucleic acid (BNA)
  source: /note="3' tri-ethylene glycol (TEG)"
uucuguccaagcccgg

SEQ ID NO: 10713 - RNA, 15 nt, Artificial Sequence
  source: /note="Description of Artificial Sequence: Synthetic oligonucleotide"
  source: /note="RNA"
  source: /note="5' tri-ethylene glycol (TEG)"
  modified_base (14)..(14): bicyclic nucleic acid (BNA)
  modified_base (15)..(15): bicyclic nucleic acid (BNA)
  source: /note="3' tri-ethylene glycol (TEG)"
uucuguccaagcccg

SEQ ID NO: 10714 - RNA, 14 nt, Artificial Sequence
  source: /note="Description of Artificial Sequence: Synthetic oligonucleotide"
  source: /note="RNA"
  source: /note="5' tri-ethylene glycol (TEG)"
  modified_base (13)..(13): bicyclic nucleic acid (BNA)
  modified_base (14)..(14): bicyclic nucleic acid (BNA)
  source: /note="3' tri-ethylene glycol (TEG)"
uucuguccaagccc

SEQ ID NO: 10715 - RNA, 13 nt, Artificial Sequence
  source: /note="Description of Artificial Sequence: Synthetic oligonucleotide"
  source: /note="RNA"
  source: /note="5' tri-ethylene glycol (TEG)"
  modified_base (12)..(12): bicyclic nucleic acid (BNA)
  modified_base (13)..(13): bicyclic nucleic acid (BNA)
  source: /note="3' tri-ethylene glycol (TEG)"
uucuguccaagcc

SEQ ID NO: 10716 - RNA, 12 nt, Artificial Sequence
  source: /note="Description of Artificial Sequence: Synthetic oligonucleotide"
  source: /note="RNA"
  source: /note="5' tri-ethylene glycol (TEG)"
  modified_base (11)..(11): bicyclic nucleic acid (BNA)
  modified_base (12)..(12): bicyclic nucleic acid (BNA)
  source: /note="3' tri-ethylene glycol (TEG)"
uucuguccaagc

SEQ ID NO: 10717 - RNA, 11 nt, Artificial Sequence
  source: /note="Description of Artificial Sequence: Synthetic oligonucleotide"
  source: /note="RNA"
  source: /note="5' tri-ethylene glycol (TEG)"
  modified_base (10)..(10): bicyclic nucleic acid (BNA)
  modified_base (11)..(11): bicyclic nucleic acid (BNA)
  source: /note="3' tri-ethylene glycol (TEG)"
uucuguccaag

SEQ ID NO: 10718 - RNA, 10 nt, Artificial Sequence
  source: /note="Description of Artificial Sequence: Synthetic oligonucleotide"
  source: /note="RNA"
  source: /note="5' tri-ethylene glycol (TEG)"
  modified_base (9)..(9): bicyclic nucleic acid (BNA)
  modified_base (10)..(10): bicyclic nucleic acid (BNA)
  source: /note="3' tri-ethylene glycol (TEG)"
uucuguccaa

SEQ ID NO: 10719 - RNA, 9 nt, Artificial Sequence
  source: /note="Description of Artificial Sequence: Synthetic oligonucleotide"
  source: /note="RNA"
  source: /note="5' tri-ethylene glycol (TEG)"
  modified_base (8)..(8): bicyclic nucleic acid (BNA)
  modified_base (9)..(9): bicyclic nucleic acid (BNA)
  source: /note="3' tri-ethylene glycol (TEG)"
uucugucca

SEQ ID NO: 10720 - RNA, 8 nt, Artificial Sequence
  source: /note="Description of Artificial Sequence: Synthetic oligonucleotide"
  source: /note="RNA"
  source: /note="5' tri-ethylene glycol (TEG)"
  modified_base (7)..(7): bicyclic nucleic acid (BNA)
  modified_base (8)..(8): bicyclic nucleic acid (BNA)
  source: /note="3' tri-ethylene glycol (TEG)"
uucugucc

SEQ ID NO: 10721 - RNA, 19 nt, Artificial Sequence
  source: /note="Description of Artificial Sequence: Synthetic oligonucleotide"
  source: /note="RNA"
  source: /note="5' tri-ethylene glycol (TEG)"
  modified_base (18)..(18): bicyclic nucleic acid (BNA)
  modified_base (19)..(19): bicyclic nucleic acid (BNA)
  source: /note="3' tri-ethylene glycol (TEG)"
ucuguccaagcccgguuga

SEQ ID NO: 10722 - DNA, 18 bp, Artificial Sequence
  source: /note="Description of Artificial Sequence: Synthetic oligonucleotide"
  source: /note="Description of Combined DNA/RNA Molecule: Synthetic oligonucleotide"
  source: /note="DNA/RNA"
  source: /note="5' tri-ethylene glycol (TEG)"
  modified_base (17)..(17): bicyclic nucleic acid (BNA)
  modified_base (18)..(18): bicyclic nucleic acid (BNA)
  source: /note="3' tri-ethylene glycol (TEG)"
ucuguccaagcccggutg

SEQ ID NO: 10723 - DNA, 17 bp, Artificial Sequence
  source: /note="Description of Artificial Sequence: Synthetic oligonucleotide"
  source: /note="Description of Combined DNA/RNA Molecule: Synthetic oligonucleotide"
  source: /note="DNA/RNA"
  source: /note="5' tri-ethylene glycol (TEG)"
  modified_base (16)..(16): bicyclic nucleic acid (BNA)
  modified_base (17)..(17): bicyclic nucleic acid (BNA)
  source: /note="3' tri-ethylene glycol (TEG)"
ucuguccaagcccggtt

SEQ ID NO: 10724 - DNA, 16 bp, Artificial Sequence
  source: /note="Description of Artificial Sequence: Synthetic oligonucleotide"
  source: /note="Description of Combined DNA/RNA Molecule: Synthetic oligonucleotide"
  source: /note="DNA/RNA"
  source: /note="5' tri-ethylene glycol (TEG)"
  modified_base (15)..(15): bicyclic nucleic acid (BNA)
  modified_base (16)..(16): bicyclic nucleic acid (BNA)
  source: /note="3' tri-ethylene glycol (TEG)"
ucuguccaagcccggt

SEQ ID NO: 10725 - RNA, 15 nt, Artificial Sequence
  source: /note="Description of Artificial Sequence: Synthetic oligonucleotide"
  source: /note="RNA"
  source: /note="5' tri-ethylene glycol (TEG)"
  modified_base (14)..(14): bicyclic nucleic acid (BNA)
  modified_base (15)..(15): bicyclic nucleic acid (BNA)
  source: /note="3' tri-ethylene glycol (TEG)"
ucuguccaagcccgg

SEQ ID NO: 10726 - RNA, 14 nt, Artificial Sequence
  source: /note="Description of Artificial Sequence: Synthetic oligonucleotide"
  source: /note="RNA"
  source: /note="5' tri-ethylene glycol (TEG)"
  modified_base (13)..(13): bicyclic nucleic acid (BNA)
  modified_base (14)..(14): bicyclic nucleic acid (BNA)
  source: /note="3' tri-ethylene glycol (TEG)"
ucuguccaagcccg

SEQ ID NO: 10727 - RNA, 13 nt, Artificial Sequence
  source: /note="Description of Artificial Sequence: Synthetic oligonucleotide"
  source: /note="RNA"
  source: /note="5' tri-ethylene glycol (TEG)"
  modified_base (12)..(12): bicyclic nucleic acid (BNA)
  modified_base (13)..(13): bicyclic nucleic acid (BNA)
  source: /note="3' tri-ethylene glycol (TEG)"
ucuguccaagccc

SEQ ID NO: 10728 - RNA, 12 nt, Artificial Sequence
  source: /note="Description of Artificial Sequence: Synthetic oligonucleotide"
  source: /note="RNA"
  source: /note="5' tri-ethylene glycol (TEG)"
  modified_base (11)..(11): bicyclic nucleic acid (BNA)
  modified_base (12)..(12): bicyclic nucleic acid (BNA)
  source: /note="3' tri-ethylene glycol (TEG)"
ucuguccaagcc

SEQ ID NO: 10729 - RNA, 11 nt, Artificial Sequence
  source: /note="Description of Artificial Sequence: Synthetic oligonucleotide"
  source: /note="RNA"
  source: /note="5' tri-ethylene glycol (TEG)"
  modified_base (10)..(10): bicyclic nucleic acid (BNA)
  modified_base (11)..(11): bicyclic nucleic acid (BNA)
  source: /note="3' tri-ethylene glycol (TEG)"
ucuguccaagc

SEQ ID NO: 10730 - RNA, 10 nt, Artificial Sequence
  source: /note="Description of Artificial Sequence: Synthetic oligonucleotide"
  source: /note="RNA"
  source: /note="5' tri-ethylene glycol (TEG)"
  modified_base (9)..(9): bicyclic nucleic acid (BNA)
  modified_base (10)..(10): bicyclic nucleic acid (BNA)
  source: /note="3' tri-ethylene glycol (TEG)"
ucuguccaag

SEQ ID NO: 10731 - RNA, 9 nt, Artificial Sequence
  source: /note="Description of Artificial Sequence: Synthetic oligonucleotide"
  source: /note="RNA"
  source: /note="5' tri-ethylene glycol (TEG)"
  modified_base (8)..(8): bicyclic nucleic acid (BNA)
  modified_base (9)..(9): bicyclic nucleic acid (BNA)
  source: /note="3' tri-ethylene glycol (TEG)"
ucuguccaa

SEQ ID NO: 10732 - RNA, 8 nt, Artificial Sequence
  source: /note="Description of Artificial Sequence: Synthetic oligonucleotide"
  source: /note="RNA"
  source: /note="5' tri-ethylene glycol (TEG)"
  modified_base (7)..(7): bicyclic nucleic acid (BNA)
  modified_base (8)..(8): bicyclic nucleic acid (BNA)
  source: /note="3' tri-ethylene glycol (TEG)"
ucugucca

SEQ ID NO: 10733 - DNA, 17 bp, Artificial Sequence
  source: /note="Description of Artificial Sequence: Synthetic oligonucleotide"
  source: /note="Description of Combined DNA/RNA Molecule: Synthetic oligonucleotide"
  source: /note="DNA/RNA"
  source: /note="5' tri-ethylene glycol (TEG)"
  modified_base (16)..(16): bicyclic nucleic acid (BNA)
  modified_base (17)..(17): bicyclic nucleic acid (BNA)
  source: /note="3' tri-ethylene glycol (TEG)"
cuguccaagcccggutg

SEQ ID NO: 10734 - DNA, 16 bp, Artificial Sequence
  source: /note="Description of Artificial Sequence: Synthetic oligonucleotide"
  source: /note="Description of Combined DNA/RNA Molecule: Synthetic oligonucleotide"
  source: /note="DNA/RNA"
  source: /note="5' tri-ethylene glycol (TEG)"
  modified_base (15)..(15): bicyclic nucleic acid (BNA)
  modified_base (16)..(16): bicyclic nucleic acid (BNA)
  source: /note="3' tri-ethylene glycol (TEG)"
cuguccaagcccggtt

SEQ ID NO: 10735 - DNA, 15 bp, Artificial Sequence
  source: /note="Description of Artificial Sequence: Synthetic oligonucleotide"
  source: /note="Description of Combined DNA/RNA Molecule: Synthetic oligonucleotide"
  source: /note="DNA/RNA"
  source: /note="5' tri-ethylene glycol (TEG)"
  modified_base (14)..(14): bicyclic nucleic acid (BNA)
  modified_base (15)..(15): bicyclic nucleic acid (BNA)
  source: /note="3' tri-ethylene glycol (TEG)"
cuguccaagcccggt

SEQ ID NO: 10736 - RNA, 14 nt, Artificial Sequence
  source: /note="Description of Artificial Sequence: Synthetic oligonucleotide"
  source: /note="RNA"
  source: /note="5' tri-ethylene glycol (TEG)"
  modified_base (13)..(13): bicyclic nucleic acid (BNA)
  modified_base (14)..(14): bicyclic nucleic acid (BNA)
  source: /note="3' tri-ethylene glycol (TEG)"
cuguccaagcccgg

SEQ ID NO: 10737 - RNA, 13 nt, Artificial Sequence
  source: /note="Description of Artificial Sequence: Synthetic oligonucleotide"
  source: /note="RNA"
  source: /note="5' tri-ethylene glycol (TEG)"
  modified_base (12)..(12): bicyclic nucleic acid (BNA)
  modified_base (13)..(13): bicyclic nucleic acid (BNA)
  source: /note="3' tri-ethylene glycol (TEG)"
cuguccaagcccg

SEQ ID NO: 10738 - RNA, 12 nt, Artificial Sequence
  source: /note="Description of Artificial Sequence: Synthetic oligonucleotide"
  source: /note="RNA"
  source: /note="5' tri-ethylene glycol (TEG)"
  modified_base (11)..(11): bicyclic nucleic acid (BNA)
  modified_base (12)..(12): bicyclic nucleic acid (BNA)
  source: /note="3' tri-ethylene glycol (TEG)"
cuguccaagccc

SEQ ID NO: 10739 - RNA, 11 nt, Artificial Sequence
  source: /note="Description of Artificial Sequence: Synthetic oligonucleotide"
  source: /note="RNA"
  source: /note="5' tri-ethylene glycol (TEG)"
  modified_base (10)..(10): bicyclic nucleic acid (BNA)
  modified_base (11)..(11): bicyclic nucleic acid (BNA)
  source: /note="3' tri-ethylene glycol (TEG)"
cuguccaagcc

SEQ ID NO: 10740 - RNA, 10 nt, Artificial Sequence
  source: /note="Description of Artificial Sequence: Synthetic oligonucleotide"
  source: /note="RNA"
  source: /note="5' tri-ethylene glycol (TEG)"
  modified_base (9)..(9): bicyclic nucleic acid (BNA)
  modified_base (10)..(10): bicyclic nucleic acid (BNA)
  source: /note="3' tri-ethylene glycol (TEG)"
cuguccaagc

SEQ ID NO: 10741 - RNA, 9 nt, Artificial Sequence
  source: /note="Description of Artificial Sequence: Synthetic oligonucleotide"
  source: /note="RNA"
  source: /note="5' tri-ethylene glycol (TEG)"
  modified_base (8)..(8): bicyclic nucleic acid (BNA)
  modified_base (9)..(9): bicyclic nucleic acid (BNA)
  source: /note="3' tri-ethylene glycol (TEG)"
cuguccaag

SEQ ID NO: 10742 - RNA, 8 nt, Artificial Sequence
  source: /note="Description of Artificial Sequence: Synthetic oligonucleotide"
  source: /note="RNA"
  source: /note="5' tri-ethylene glycol (TEG)"
  modified_base (7)..(7): bicyclic nucleic acid (BNA)
  modified_base (8)..(8): bicyclic nucleic acid (BNA)
  source: /note="3' tri-ethylene glycol (TEG)"
cuguccaa

SEQ ID NO: 10743 - DNA, 20 bp, Artificial Sequence
  source: /note="Description of Artificial Sequence: Synthetic oligonucleotide"
  source: /note="Description of Combined DNA/RNA Molecule: Synthetic oligonucleotide"
  source: /note="DNA/RNA"
  source: /note="5' tri-ethylene glycol (TEG)"
  modified_base (19)..(19): bicyclic nucleic acid (BNA)
  modified_base (20)..(20): bicyclic nucleic acid (BNA)
  source: /note="3' tri-ethylene glycol (TEG)"
guucuguccaagcccggutg

SEQ ID NO: 10744 - DNA, 19 bp, Artificial Sequence
  source: /note="Description of Artificial Sequence: Synthetic oligonucleotide"
  source: /note="Description of Combined DNA/RNA Molecule: Synthetic oligonucleotide"
  source: /note="DNA/RNA"
  source: /note="5' tri-ethylene glycol (TEG)"
  modified_base (18)..(18): bicyclic nucleic acid (BNA)
  modified_base (19)..(19): bicyclic nucleic acid (BNA)
  source: /note="3' tri-ethylene glycol (TEG)"
guucuguccaagcccggtt

SEQ ID NO: 10745 - DNA, 18 bp, Artificial Sequence
  source: /note="Description of Artificial Sequence: Synthetic oligonucleotide"
  source: /note="Description of Combined DNA/RNA Molecule: Synthetic oligonucleotide"
  source: /note="DNA/RNA"
  source: /note="5' tri-ethylene glycol (TEG)"
  modified_base (17)..(17): bicyclic nucleic acid (BNA)
  modified_base (18)..(18): bicyclic nucleic acid (BNA)
  source: /note="3' tri-ethylene glycol (TEG)"
guucuguccaagcccggt

SEQ ID NO: 10746 - RNA, 17 nt, Artificial Sequence
  source: /note="Description of Artificial Sequence: Synthetic oligonucleotide"
  source: /note="RNA"
  source: /note="5' tri-ethylene glycol (TEG)"
  modified_base (16)..(16): bicyclic nucleic acid (BNA)
  modified_base (17)..(17): bicyclic nucleic acid (BNA)
  source: /note="3' tri-ethylene glycol (TEG)"
guucuguccaagcccgg

SEQ ID NO: 10747 - RNA, 16 nt, Artificial Sequence
  source: /note="Description of Artificial Sequence: Synthetic oligonucleotide"
  source: /note="RNA"
  source: /note="5' tri-ethylene glycol (TEG)"
  modified_base (15)..(15): bicyclic nucleic acid (BNA)
  modified_base (16)..(16): bicyclic nucleic acid (BNA)
  source: /note="3' tri-ethylene glycol (TEG)"
guucuguccaagcccg

SEQ ID NO: 10748 - RNA, 15 nt, Artificial Sequence
  source: /note="Description of Artificial Sequence: Synthetic oligonucleotide"
  source: /note="RNA"
  source: /note="5' tri-ethylene glycol (TEG)"
  modified_base (14)..(14): bicyclic nucleic acid (BNA)
  modified_base (15)..(15): bicyclic nucleic acid (BNA)
  source: /note="3' tri-ethylene glycol (TEG)"
guucuguccaagccc

SEQ ID NO: 10749 - RNA, 14 nt, Artificial Sequence
  source: /note="Description of Artificial Sequence: Synthetic oligonucleotide"
  source: /note="RNA"
  source: /note="5' tri-ethylene glycol (TEG)"
  modified_base (13)..(13): bicyclic nucleic acid (BNA)
  modified_base (14)..(14): bicyclic nucleic acid (BNA)
  source: /note="3' tri-ethylene glycol (TEG)"
guucuguccaagcc

SEQ ID NO: 10750 - RNA, 13 nt, Artificial Sequence
  source: /note="Description of Artificial Sequence: Synthetic oligonucleotide"
  source: /note="RNA"
  source: /note="5' tri-ethylene glycol (TEG)"
  modified_base (12)..(12): bicyclic nucleic acid (BNA)
  modified_base (13)..(13): bicyclic nucleic acid (BNA)
  source: /note="3' tri-ethylene glycol (TEG)"
guucuguccaagc

SEQ ID NO: 10751 - RNA, 12 nt, Artificial Sequence
  source: /note="Description of Artificial Sequence: Synthetic oligonucleotide"
  source: /note="RNA"
  source: /note="5' tri-ethylene glycol (TEG)"
  modified_base (11)..(11): bicyclic nucleic acid (BNA)
  modified_base (12)..(12): bicyclic nucleic acid (BNA)
  source: /note="3' tri-ethylene glycol (TEG)"
guucuguccaag

SEQ ID NO: 10752 - RNA, 11 nt, Artificial Sequence
  source: /note="Description of Artificial Sequence: Synthetic oligonucleotide"
  source: /note="RNA"
  source: /note="5' tri-ethylene glycol (TEG)"
  modified_base (10)..(10): bicyclic nucleic acid (BNA)
  modified_base (11)..(11): bicyclic nucleic acid (BNA)
  source: /note="3' tri-ethylene glycol (TEG)"
guucuguccaa

SEQ ID NO: 10753 - RNA, 10 nt, Artificial Sequence
  source: /note="Description of Artificial Sequence: Synthetic oligonucleotide"
  source: /note="RNA"
  source: /note="5' tri-ethylene glycol (TEG)"
  modified_base (9)..(9): bicyclic nucleic acid (BNA)
  modified_base (10)..(10): bicyclic nucleic acid (BNA)
  source: /note="3' tri-ethylene glycol (TEG)"
guucugucca

SEQ ID NO: 10754 - RNA, 9 nt, Artificial Sequence
  source: /note="Description of Artificial Sequence: Synthetic oligonucleotide"
  source: /note="RNA"
  source: /note="5' tri-ethylene glycol (TEG)"
  modified_base (8)..(8): bicyclic nucleic acid (BNA)
  modified_base (9)..(9): bicyclic nucleic acid (BNA)
  source: /note="3' tri-ethylene glycol (TEG)"
guucugucc

SEQ ID NO: 10755 - DNA, 8 bp, Artificial Sequence
  source: /note="Description of Artificial Sequence: Synthetic oligonucleotide"
  source: /note="Description of Combined DNA/RNA Molecule: Synthetic oligonucleotide"
  source: /note="DNA/RNA"
  source: /note="5' tri-ethylene glycol (TEG)"
  modified_base (7)..(7): bicyclic nucleic acid (BNA)
  modified_base (8)..(8): bicyclic nucleic acid (BNA)
  source: /note="3' tri-ethylene glycol (TEG)"
guucugtc

SEQ ID NO: 10756 - DNA, 20 bp, Artificial Sequence
  source: /note="Description of Artificial Sequence: Synthetic oligonucleotide"
  source: /note="Description of Combined DNA/RNA Molecule: Synthetic oligonucleotide"
  source: /note="DNA/RNA"
  source: /note="5' tri-ethylene glycol (TEG)"
  modified_base (19)..(19): bicyclic nucleic acid (BNA)
  modified_base (20)..(20): bicyclic nucleic acid (BNA)
  source: /note="3' tri-ethylene glycol (TEG)"
aguucuguccaagcccggtt

SEQ ID NO: 10757 - DNA, 19 bp, Artificial Sequence
  source: /note="Description of Artificial Sequence: Synthetic oligonucleotide"
  source: /note="Description of Combined DNA/RNA Molecule: Synthetic oligonucleotide"
  source: /note="DNA/RNA"
  source: /note="5' tri-ethylene glycol (TEG)"
  modified_base (18)..(18): bicyclic nucleic acid (BNA)
  modified_base (19)..(19): bicyclic nucleic acid (BNA)
  source: /note="3' tri-ethylene glycol (TEG)"
aguucuguccaagcccggt

SEQ ID NO: 10758 - RNA, 18 nt, Artificial Sequence
  source: /note="Description of Artificial Sequence: Synthetic oligonucleotide"
  source: /note="RNA"
  source: /note="5' tri-ethylene glycol (TEG)"
  modified_base (17)..(17): bicyclic nucleic acid (BNA)
  modified_base (18)..(18): bicyclic nucleic acid (BNA)
  source: /note="3' tri-ethylene glycol (TEG)"
aguucuguccaagcccgg

SEQ ID NO: 10759 - RNA, 17 nt, Artificial Sequence
  source: /note="Description of Artificial Sequence: Synthetic oligonucleotide"
  source: /note="RNA"
  source: /note="5' tri-ethylene glycol (TEG)"
  modified_base (16)..(16): bicyclic nucleic acid (BNA)
  modified_base (17)..(17): bicyclic nucleic acid (BNA)
  source: /note="3' tri-ethylene glycol (TEG)"
aguucuguccaagcccg

SEQ ID NO: 10760 - RNA, 16 nt, Artificial Sequence
  source: /note="Description of Artificial Sequence: Synthetic oligonucleotide"
  source: /note="RNA"
  source: /note="5' tri-ethylene glycol (TEG)"
  modified_base (15)..(15): bicyclic nucleic acid (BNA)
  modified_base (16)..(16): bicyclic nucleic acid (BNA)
  source: /note="3' tri-ethylene glycol (TEG)"
aguucuguccaagccc

SEQ ID NO: 10761 - RNA, 15 nt, Artificial Sequence
  source: /note="Description of Artificial Sequence: Synthetic oligonucleotide"
  source: /note="RNA"
  source: /note="5' tri-ethylene glycol (TEG)"
  modified_base (14)..(14): bicyclic nucleic acid (BNA)
  modified_base (15)..(15): bicyclic nucleic acid (BNA)
  source: /note="3' tri-ethylene glycol (TEG)"
aguucuguccaagcc

SEQ ID NO: 10762 - RNA, 14 nt, Artificial Sequence
  source: /note="Description of Artificial Sequence: Synthetic oligonucleotide"
  source: /note="RNA"
  source: /note="5' tri-ethylene glycol (TEG)"
  modified_base (13)..(13): bicyclic nucleic acid (BNA)
  modified_base (14)..(14): bicyclic nucleic acid (BNA)
  source: /note="3' tri-ethylene glycol (TEG)"
aguucuguccaagc

SEQ ID NO: 10763 - RNA, 13 nt, Artificial Sequence
  source: /note="Description of Artificial Sequence: Synthetic oligonucleotide"
  source: /note="RNA"
  source: /note="5' tri-ethylene glycol (TEG)"
  modified_base (12)..(12): bicyclic nucleic acid (BNA)
  modified_base (13)..(13): bicyclic nucleic acid (BNA)
  source: /note="3' tri-ethylene glycol (TEG)"
aguucuguccaag

SEQ ID NO: 10764 - RNA, 12 nt, Artificial Sequence
  source: /note="Description of Artificial Sequence: Synthetic oligonucleotide"
  source: /note="RNA"
  source: /note="5' tri-ethylene glycol (TEG)"
  modified_base (11)..(11): bicyclic nucleic acid (BNA)
  modified_base (12)..(12): bicyclic nucleic acid (BNA)
  source: /note="3' tri-ethylene glycol (TEG)"
aguucuguccaa

SEQ ID NO: 10765 - RNA, 11 nt, Artificial Sequence
  source: /note="Description of Artificial Sequence: Synthetic oligonucleotide"
  source: /note="RNA"
  source: /note="5' tri-ethylene glycol (TEG)"
  modified_base (10)..(10): bicyclic nucleic acid (BNA)
  modified_base (11)..(11): bicyclic nucleic acid (BNA)
  source: /note="3' tri-ethylene glycol (TEG)"
aguucugucca

SEQ ID NO: 10766 - RNA, 10 nt, Artificial Sequence
  source: /note="Description of Artificial Sequence: Synthetic oligonucleotide"
  source: /note="RNA"
  source: /note="5' tri-ethylene glycol (TEG)"
  modified_base (9)..(9): bicyclic nucleic acid (BNA)
  modified_base (10)..(10): bicyclic nucleic acid (BNA)
  source: /note="3' tri-ethylene glycol (TEG)"
aguucugucc

SEQ ID NO: 10767 - DNA, 9 bp, Artificial Sequence
  source: /note="Description of Artificial Sequence: Synthetic oligonucleotide"
  source: /note="Description of Combined DNA/RNA Molecule: Synthetic oligonucleotide"
  source: /note="DNA/RNA"
  source: /note="5' tri-ethylene glycol (TEG)"
  modified_base (8)..(8): bicyclic nucleic acid (BNA)
  modified_base (9)..(9): bicyclic nucleic acid (BNA)
  source: /note="3' tri-ethylene glycol (TEG)"
aguucugtc

SEQ ID NO: 10768 - DNA, 8 bp, Artificial Sequence
  source: /note="Description of Artificial Sequence: Synthetic oligonucleotide"
  source: /note="Description of Combined DNA/RNA Molecule: Synthetic oligonucleotide"
  source: /note="DNA/RNA"
  source: /note="5' tri-ethylene glycol (TEG)"
  modified_base (7)..(7): bicyclic nucleic acid (BNA)
  modified_base (8)..(8): bicyclic nucleic acid (BNA)
  source: /note="3' tri-ethylene glycol (TEG)"
aguucugt

SEQ ID NO: 10769 - DNA, 20 bp, Artificial Sequence
  source: /note="Description of Artificial Sequence: Synthetic oligonucleotide"
  source: /note="Description of Combined DNA/RNA Molecule: Synthetic oligonucleotide"
  source: /note="DNA/RNA"
  source: /note="5' tri-ethylene glycol (TEG)"
  modified_base (19)..(19): bicyclic nucleic acid (BNA)
  modified_base (20)..(20): bicyclic nucleic acid (BNA)
  source: /note="3' tri-ethylene glycol (TEG)"
aaguucuguccaagcccggt

SEQ ID NO: 10770 - RNA, 19 nt, Artificial Sequence
  source: /note="Description of Artificial Sequence: Synthetic oligonucleotide"
  source: /note="RNA"
  source: /note="5' tri-ethylene glycol (TEG)"
  modified_base (18)..(18): bicyclic nucleic acid (BNA)
  modified_base (19)..(19): bicyclic nucleic acid (BNA)
  source: /note="3' tri-ethylene glycol (TEG)"
aaguucuguccaagcccgg

SEQ ID NO: 10771 - RNA, 18 nt, Artificial Sequence
  source: /note="Description of Artificial Sequence: Synthetic oligonucleotide"
  source: /note="RNA"
  source: /note="5' tri-ethylene glycol (TEG)"
  modified_base (17)..(17): bicyclic nucleic acid (BNA)
  modified_base (18)..(18): bicyclic nucleic acid (BNA)
  source: /note="3' tri-ethylene glycol (TEG)"
aaguucuguccaagcccg

SEQ ID NO: 10772 - RNA, 17 nt, Artificial Sequence
  source: /note="Description of Artificial Sequence: Synthetic oligonucleotide"
  source: /note="RNA"
  source: /note="5' tri-ethylene glycol (TEG)"
  modified_base (16)..(16): bicyclic nucleic acid (BNA)
  modified_base (17)..(17): bicyclic nucleic acid (BNA)
  source: /note="3' tri-ethylene glycol (TEG)"
aaguucuguccaagccc

SEQ ID NO: 10773 - RNA, 16 nt, Artificial Sequence
  source: /note="Description of Artificial Sequence: Synthetic oligonucleotide"
  source: /note="RNA"
  source: /note="5' tri-ethylene glycol (TEG)"
  modified_base (15)..(15): bicyclic nucleic acid (BNA)
  modified_base (16)..(16): bicyclic nucleic acid (BNA)
  source: /note="3' tri-ethylene glycol (TEG)"
aaguucuguccaagcc

SEQ ID NO: 10774 - RNA, 15 nt, Artificial Sequence
  source: /note="Description of Artificial Sequence: Synthetic oligonucleotide"
  source: /note="RNA"
  source: /note="5' tri-ethylene glycol (TEG)"
  modified_base (14)..(14): bicyclic nucleic acid (BNA)
  modified_base (15)..(15): bicyclic nucleic acid (BNA)
  source: /note="3' tri-ethylene glycol (TEG)"
aaguucuguccaagc

SEQ ID NO: 10775 - RNA, 14 nt, Artificial Sequence
  source: /note="Description of Artificial Sequence: Synthetic oligonucleotide"
  source: /note="RNA"
  source: /note="5' tri-ethylene glycol (TEG)"
  modified_base (13)..(13): bicyclic nucleic acid (BNA)
  modified_base (14)..(14): bicyclic nucleic acid (BNA)
  source: /note="3' tri-ethylene glycol (TEG)"
aaguucuguccaag

SEQ ID NO: 10776 - RNA, 13 nt, Artificial Sequence
  source: /note="Description of Artificial Sequence: Synthetic oligonucleotide"
  source: /note="RNA"
  source: /note="5' tri-ethylene glycol (TEG)"
  modified_base (12)..(12): bicyclic nucleic acid (BNA)
  modified_base (13)..(13): bicyclic nucleic acid (BNA)
  source: /note="3' tri-ethylene glycol (TEG)"
aaguucuguccaa

SEQ ID NO: 10777 - RNA, 12 nt, Artificial Sequence
  source: /note="Description of Artificial Sequence: Synthetic oligonucleotide"
  source: /note="RNA"
  source: /note="5' tri-ethylene glycol (TEG)"
  modified_base (11)..(11): bicyclic nucleic acid (BNA)
  modified_base (12)..(12): bicyclic nucleic acid (BNA)
  source: /note="3' tri-ethylene glycol (TEG)"
aaguucugucca

SEQ ID NO: 10778 - RNA, 11 nt, Artificial Sequence
  source: /note="Description of Artificial Sequence: Synthetic oligonucleotide"
  source: /note="RNA"
  source: /note="5' tri-ethylene glycol (TEG)"
  modified_base (10)..(10): bicyclic nucleic acid (BNA)
  modified_base (11)..(11): bicyclic nucleic acid (BNA)
  source: /note="3' tri-ethylene glycol (TEG)"
aaguucugucc

SEQ ID NO: 10779 - DNA, 10 bp, Artificial Sequence
  source: /note="Description of Artificial Sequence: Synthetic oligonucleotide"
  source: /note="Description of Combined DNA/RNA Molecule: Synthetic oligonucleotide"
  source: /note="DNA/RNA"
  source: /note="5' tri-ethylene glycol (TEG)"
  modified_base (9)..(9): bicyclic nucleic acid (BNA)
  modified_base (10)..(10): bicyclic nucleic acid (BNA)
  source: /note="3' tri-ethylene glycol (TEG)"
aaguucugtc

SEQ ID NO: 10780 - DNA, 9 bp, Artificial Sequence
  source: /note="Description of Artificial Sequence: Synthetic oligonucleotide"
  source: /note="Description of Combined DNA/RNA Molecule: Synthetic oligonucleotide"
  source: /note="DNA/RNA"
  source: /note="5' tri-ethylene glycol (TEG)"
  modified_base (8)..(8): bicyclic nucleic acid (BNA)
  modified_base (9)..(9): bicyclic nucleic acid (BNA)
  source: /note="3' tri-ethylene glycol (TEG)"
aaguucugt

SEQ ID NO: 10781 - DNA, 8 bp, Artificial Sequence
  source: /note="Description of Artificial Sequence: Synthetic oligonucleotide"
  source: /note="Description of Combined DNA/RNA Molecule: Synthetic oligonucleotide"
  source: /note="DNA/RNA"
  source: /note="5' tri-ethylene glycol (TEG)"
  modified_base (7)..(7): bicyclic nucleic acid (BNA)
  modified_base (8)..(8): bicyclic nucleic acid (BNA)
  source: /note="3' tri-ethylene glycol (TEG)"
aaguuctg

SEQ ID NO: 10782 - RNA, 20 nt, Artificial Sequence
  source: /note="Description of Artificial Sequence: Synthetic oligonucleotide"
  source: /note="RNA"
  source: /note="5' tri-ethylene glycol (TEG)"
  modified_base (19)..(19): bicyclic nucleic acid (BNA)
  modified_base (20)..(20): bicyclic nucleic acid (BNA)
  source: /note="3' tri-ethylene glycol (TEG)"
uaaguucuguccaagcccgg

SEQ ID NO: 10783 - RNA, 19 nt, Artificial Sequence
  source: /note="Description of Artificial Sequence: Synthetic oligonucleotide"
  source: /note="RNA"
  source: /note="5' tri-ethylene glycol (TEG)"
  modified_base (18)..(18): bicyclic nucleic acid (BNA)
  modified_base (19)..(19): bicyclic nucleic acid (BNA)
  source: /note="3' tri-ethylene glycol (TEG)"
uaaguucuguccaagcccg

SEQ ID NO: 10784 - RNA, 18 nt, Artificial Sequence
  source: /note="Description of Artificial Sequence: Synthetic oligonucleotide"
  source: /note="RNA"
  source: /note="5' tri-ethylene glycol (TEG)"
  modified_base (17)..(17): bicyclic nucleic acid (BNA)
  modified_base (18)..(18): bicyclic nucleic acid (BNA)
  source: /note="3' tri-ethylene glycol (TEG)"
uaaguucuguccaagccc

SEQ ID NO: 10785 - RNA, 17 nt, Artificial Sequence
  source: /note="Description of Artificial Sequence: Synthetic oligonucleotide"
  source: /note="RNA"
  source: /note="5' tri-ethylene glycol (TEG)"
  modified_base (16)..(16): bicyclic nucleic acid (BNA)
  modified_base (17)..(17): bicyclic nucleic acid (BNA)
  source: /note="3' tri-ethylene glycol (TEG)"
uaaguucuguccaagcc

SEQ ID NO: 10786 - RNA, 16 nt, Artificial Sequence
  source: /note="Description of Artificial Sequence: Synthetic oligonucleotide"
  source: /note="RNA"
  source: /note="5' tri-ethylene glycol (TEG)"
  modified_base (15)..(15): bicyclic nucleic acid (BNA)
  modified_base (16)..(16): bicyclic nucleic acid (BNA)
  source: /note="3' tri-ethylene glycol (TEG)"
uaaguucuguccaagc

SEQ ID NO: 10787 - RNA, 14 nt, Artificial Sequence
  source: /note="Description of Artificial Sequence: Synthetic oligonucleotide"
  source: /note="RNA"
  source: /note="5' tri-ethylene glycol (TEG)"
  modified_base (13)..(13): bicyclic nucleic acid (BNA)
  modified_base (14)..(14): bicyclic nucleic acid (BNA)
  source: /note="3' tri-ethylene glycol (TEG)"
uaaguucuguccaa

SEQ ID NO: 10788 - RNA, 13 nt, Artificial Sequence
  source: /note="Description of Artificial Sequence: Synthetic oligonucleotide"
  source: /note="RNA"
  source: /note="5' tri-ethylene glycol (TEG)"
  modified_base (12)..(12): bicyclic nucleic acid (BNA)
  modified_base (13)..(13): bicyclic nucleic acid (BNA)
  source: /note="3' tri-ethylene glycol (TEG)"
uaaguucugucca

SEQ ID NO: 10789 - RNA, 12 nt, Artificial Sequence
  source: /note="Description of Artificial Sequence: Synthetic oligonucleotide"
  source: /note="RNA"
  source: /note="5' tri-ethylene glycol (TEG)"
  modified_base (11)..(11): bicyclic nucleic acid (BNA)
  modified_base (12)..(12): bicyclic nucleic acid (BNA)
  source: /note="3' tri-ethylene glycol (TEG)"
uaaguucugucc

SEQ ID NO: 10790 - DNA, 11 bp, Artificial Sequence
  source: /note="Description of Artificial Sequence: Synthetic oligonucleotide"
  source: /note="Description of Combined DNA/RNA Molecule: Synthetic oligonucleotide"
  source: /note="DNA/RNA"
  source: /note="5' tri-ethylene glycol (TEG)"
  modified_base (10)..(10): bicyclic nucleic acid (BNA)
  modified_base (11)..(11): bicyclic nucleic acid (BNA)
  source: /note="3' tri-ethylene glycol (TEG)"
uaaguucugtc

SEQ ID NO: 10791 - DNA, 10 bp, Artificial Sequence
  source: /note="Description of Artificial Sequence: Synthetic oligonucleotide"
  source: /note="Description of Combined DNA/RNA Molecule: Synthetic oligonucleotide"
  source: /note="DNA/RNA"
  source: /note="5' tri-ethylene glycol (TEG)"
  modified_base (9)..(9): bicyclic nucleic acid (BNA)
  modified_base (10)..(10): bicyclic nucleic acid (BNA)
  source: /note="3' tri-ethylene glycol (TEG)"
uaaguucugt

SEQ ID NO: 10792 - DNA, 9 bp, Artificial Sequence
  source: /note="Description of Artificial Sequence: Synthetic oligonucleotide"
  source: /note="Description of Combined DNA/RNA Molecule: Synthetic oligonucleotide"
  source: /note="DNA/RNA"
  source: /note="5' tri-ethylene glycol (TEG)"
  modified_base (8)..(8): bicyclic nucleic acid (BNA)
  modified_base (9)..(9): bicyclic nucleic acid (BNA)
  source: /note="3' tri-ethylene glycol (TEG)"
uaaguuctg

SEQ ID NO: 10793 - DNA, 8 bp, Artificial Sequence
  source: /note="Description of Artificial Sequence: Synthetic oligonucleotide"
  source: /note="Description of Combined DNA/RNA Molecule: Synthetic oligonucleotide"
  source: /note="DNA/RNA"
  source: /note="5' tri-ethylene glycol (TEG)"
  modified_base (7)..(7): bicyclic nucleic acid (BNA)
  modified_base (8)..(8): bicyclic nucleic acid (BNA)
  source: /note="3' tri-ethylene glycol (TEG)"
uaaguuct

SEQ ID NO: 10794 - RNA, 20 nt, Artificial Sequence
  source: /note="Description of Artificial Sequence: Synthetic oligonucleotide"
  source: /note="RNA"
  source: /note="5' tri-ethylene glycol (TEG)"
  modified_base (19)..(19): bicyclic nucleic acid (BNA)
  modified_base (20)..(20): bicyclic nucleic acid (BNA)
  source: /note="3' tri-ethylene glycol (TEG)"
guaaguucuguccaagcccg

SEQ ID NO: 10795 - RNA, 19 nt, Artificial Sequence
  source: /note="Description of Artificial Sequence: Synthetic oligonucleotide"
  source: /note="RNA"
  source: /note="5' tri-ethylene glycol (TEG)"
  modified_base (18)..(18): bicyclic nucleic acid (BNA)
  modified_base (19)..(19): bicyclic nucleic acid (BNA)
  source: /note="3' tri-ethylene glycol (TEG)"
guaaguucuguccaagccc

SEQ ID NO: 10796 - RNA, 17 nt, Artificial Sequence
  source: /note="Description of Artificial Sequence: Synthetic oligonucleotide"
  source: /note="RNA"
  source: /note="5' tri-ethylene glycol (TEG)"
  modified_base (16)..(16): bicyclic nucleic acid (BNA)
  modified_base (17)..(17): bicyclic nucleic acid (BNA)
  source: /note="3' tri-ethylene glycol (TEG)"
guaaguucuguccaagc

SEQ ID NO: 10797 - RNA, 16 nt, Artificial Sequence
  source: /note="Description of Artificial Sequence: Synthetic oligonucleotide"
  source: /note="RNA"
  source: /note="5' tri-ethylene glycol (TEG)"
  modified_base (15)..(15): bicyclic nucleic acid (BNA)
  modified_base (16)..(16): bicyclic nucleic acid (BNA)
  source: /note="3' tri-ethylene glycol (TEG)"
guaaguucuguccaag

SEQ ID NO: 10798 - RNA, 15 nt, Artificial Sequence
  source: /note="Description of Artificial Sequence: Synthetic oligonucleotide"
  source: /note="RNA"
  source: /note="5' tri-ethylene glycol (TEG)"
  modified_base (14)..(14): bicyclic nucleic acid (BNA)
  modified_base (15)..(15): bicyclic nucleic acid (BNA)
  source: /note="3' tri-ethylene glycol (TEG)"
guaaguucuguccaa

SEQ ID NO: 10799 - RNA, 14 nt, Artificial Sequence
  source: /note="Description of Artificial Sequence: Synthetic oligonucleotide"
  source: /note="RNA"
  source: /note="5' tri-ethylene glycol (TEG)"
  modified_base (13)..(13): bicyclic nucleic acid (BNA)
  modified_base (14)..(14): bicyclic nucleic acid (BNA)
  source: /note="3' tri-ethylene glycol (TEG)"
guaaguucugucca

SEQ ID NO: 10800 - RNA, 13 nt, Artificial Sequence
  source: /note="Description of Artificial Sequence: Synthetic oligonucleotide"
  source: /note="RNA"
  source: /note="5' tri-ethylene glycol (TEG)"
  modified_base (12)..(12): bicyclic nucleic acid (BNA)
  modified_base (13)..(13): bicyclic nucleic acid (BNA)
  source: /note="3' tri-ethylene glycol (TEG)"
guaaguucugucc

SEQ ID NO: 10801 - DNA, 12 bp, Artificial Sequence
  source: /note="Description of Artificial Sequence: Synthetic oligonucleotide"
  source: /note="Description of Combined DNA/RNA Molecule: Synthetic oligonucleotide"
  source: /note="DNA/RNA"
  source: /note="5' tri-ethylene glycol (TEG)"
  modified_base (11)..(11): bicyclic nucleic acid (BNA)
  modified_base (12)..(12): bicyclic nucleic acid (BNA)
  source: /note="3' tri-ethylene glycol (TEG)"
guaaguucugtc

SEQ ID NO: 10802 - DNA, 11 bp, Artificial Sequence
  source: /note="Description of Artificial Sequence: Synthetic oligonucleotide"
  source: /note="Description of Combined DNA/RNA Molecule: Synthetic oligonucleotide"
  source: /note="DNA/RNA"
  source: /note="5' tri-ethylene glycol (TEG)"
  modified_base (10)..(10): bicyclic nucleic acid (BNA)
  modified_base (11)..(11): bicyclic nucleic acid (BNA)
  source: /note="3' tri-ethylene glycol (TEG)"
guaaguucugt

SEQ ID NO: 10803 - DNA, 10 bp, Artificial Sequence
  source: /note="Description of Artificial Sequence: Synthetic oligonucleotide"
  source: /note="Description of Combined DNA/RNA Molecule: Synthetic oligonucleotide"
  source: /note="DNA/RNA"
  source: /note="5' tri-ethylene glycol (TEG)"
  modified_base (9)..(9): bicyclic nucleic acid (BNA)
  modified_base (10)..(10): bicyclic nucleic acid (BNA)
  source: /note="3' tri-ethylene glycol (TEG)"
guaaguuctg

SEQ ID NO: 10804 - DNA, 9 bp, Artificial Sequence
  source: /note="Description of Artificial Sequence: Synthetic oligonucleotide"
  source: /note="Description of Combined DNA/RNA Molecule: Synthetic oligonucleotide"
  source: /note="DNA/RNA"
  source: /note="5' tri-ethylene glycol (TEG)"
  modified_base (8)..(8): bicyclic nucleic acid (BNA)
  modified_base (9)..(9): bicyclic nucleic acid (BNA)
  source: /note="3' tri-ethylene glycol (TEG)"
guaaguuct

SEQ ID NO: 10805 - DNA, 8 bp, Artificial Sequence
  source: /note="Description of Artificial Sequence: Synthetic oligonucleotide"
  source: /note="Description of Combined DNA/RNA Molecule: Synthetic oligonucleotide"
  source: /note="DNA/RNA"
  source: /note="5' tri-ethylene glycol (TEG)"
  modified_base (7)..(7): bicyclic nucleic acid (BNA)
  modified_base (8)..(8): bicyclic nucleic acid (BNA)
  source: /note="3' tri-ethylene glycol (TEG)"
guaagutc

SEQ ID NO: 10806 - RNA, 20 nt, Artificial Sequence
  source: /note="Description of Artificial Sequence: Synthetic oligonucleotide"
  source: /note="RNA"
  source: /note="5' tri-ethylene glycol (TEG)"
  modified_base (19)..(19): bicyclic nucleic acid (BNA)
  modified_base (20)..(20): bicyclic nucleic acid (BNA)
  source: /note="3' tri-ethylene glycol (TEG)"
gguaaguucuguccaagccc

SEQ ID NO: 10807 - RNA, 19 nt, Artificial Sequence
  source: /note="Description of Artificial Sequence: Synthetic oligonucleotide"
  source: /note="RNA"
  source: /note="5' tri-ethylene glycol (TEG)"
  modified_base (18)..(18): bicyclic nucleic acid (BNA)
  modified_base (19)..(19): bicyclic nucleic acid (BNA)
  source: /note="3' tri-ethylene glycol (TEG)"
gguaaguucuguccaagcc

SEQ ID NO: 10808 - RNA, 17 nt, Artificial Sequence
  source: /note="Description of Artificial Sequence: Synthetic oligonucleotide"
  source: /note="RNA"
  source: /note="5' tri-ethylene glycol (TEG)"
  modified_base (16)..(16): bicyclic nucleic acid (BNA)
  modified_base (17)..(17): bicyclic nucleic acid (BNA)
  source: /note="3' tri-ethylene glycol (TEG)"
gguaaguucuguccaag

SEQ ID NO: 10809 - RNA, 16 nt, Artificial Sequence
  source: /note="Description of Artificial Sequence: Synthetic oligonucleotide"
  source: /note="RNA"
  source: /note="5' tri-ethylene glycol (TEG)"
  modified_base (15)..(15): bicyclic nucleic acid (BNA)
  modified_base (16)..(16): bicyclic nucleic acid (BNA)
  source: /note="3' tri-ethylene glycol (TEG)"
gguaaguucuguccaa

SEQ ID NO: 10810 - RNA, 15 nt, Artificial Sequence
  source: /note="Description of Artificial Sequence: Synthetic oligonucleotide"
  source: /note="RNA"
  source: /note="5' tri-ethylene glycol (TEG)"
  modified_base (14)..(14): bicyclic nucleic acid (BNA)
  modified_base (15)..(15): bicyclic nucleic acid (BNA)
  source: /note="3' tri-ethylene glycol (TEG)"
gguaaguucugucca

SEQ ID NO: 10811 - RNA, 14 nt, Artificial Sequence
  source: /note="Description of Artificial Sequence: Synthetic oligonucleotide"
  source: /note="RNA"
  source: /note="5' tri-ethylene glycol (TEG)"
  modified_base (13)..(13): bicyclic nucleic acid (BNA)
  modified_base (14)..(14): bicyclic nucleic acid (BNA)
  source: /note="3' tri-ethylene glycol (TEG)"
gguaaguucugucc

SEQ ID NO: 10812 - DNA, 13 bp, Artificial Sequence
  source: /note="Description of Artificial Sequence: Synthetic oligonucleotide"
  source: /note="Description of Combined DNA/RNA Molecule: Synthetic oligonucleotide"
  source: /note="DNA/RNA"
  source: /note="5' tri-ethylene glycol (TEG)"
  modified_base (12)..(12): bicyclic nucleic acid (BNA)
  modified_base (13)..(13): bicyclic nucleic acid (BNA)
  source: /note="3' tri-ethylene glycol (TEG)"
gguaaguucugtc

SEQ ID NO: 10813 - DNA, 12 bp, Artificial Sequence
  source: /note="Description of Artificial Sequence: Synthetic oligonucleotide"
  source: /note="Description of Combined DNA/RNA Molecule: Synthetic oligonucleotide"
  source: /note="DNA/RNA"
  source: /note="5' tri-ethylene glycol (TEG)"
  modified_base (11)..(11): bicyclic nucleic acid (BNA)
  modified_base (12)..(12): bicyclic nucleic acid (BNA)
  source: /note="3' tri-ethylene glycol (TEG)"
gguaaguucugt

SEQ ID NO: 10814 - DNA, 11 bp, Artificial Sequence
  source: /note="Description of Artificial Sequence: Synthetic oligonucleotide"
  source: /note="Description of Combined DNA/RNA Molecule: Synthetic oligonucleotide"
  source: /note="DNA/RNA"
  source: /note="5' tri-ethylene glycol (TEG)"
  modified_base (10)..(10): bicyclic nucleic acid (BNA)
  modified_base (11)..(11): bicyclic nucleic acid (BNA)
  source: /note="3' tri-ethylene glycol (TEG)"
gguaaguuctg

SEQ ID NO: 10815 - DNA, 10 bp, Artificial Sequence
  source: /note="Description of Artificial Sequence: Synthetic oligonucleotide"
  source: /note="Description of Combined DNA/RNA Molecule: Synthetic oligonucleotide"
  source: /note="DNA/RNA"
  source: /note="5' tri-ethylene glycol (TEG)"
  modified_base (9)..(9): bicyclic nucleic acid (BNA)
  modified_base (10)..(10): bicyclic nucleic acid (BNA)
  source: /note="3' tri-ethylene glycol (TEG)"
gguaaguuct

SEQ ID NO: 10816 - DNA, 9 bp, Artificial Sequence
  source: /note="Description of Artificial Sequence: Synthetic oligonucleotide"
  source: /note="Description of Combined DNA/RNA Molecule: Synthetic oligonucleotide"
  source: /note="DNA/RNA"
  source: /note="5' tri-ethylene glycol (TEG)"
  modified_base (8)..(8): bicyclic nucleic acid (BNA)
  modified_base (9)..(9): bicyclic nucleic acid (BNA)
  source: /note="3' tri-ethylene glycol (TEG)"
gguaagutc

SEQ ID NO: 10817 - DNA, 8 bp, Artificial Sequence
  source: /note="Description of Artificial Sequence: Synthetic oligonucleotide"
  source: /note="Description of Combined DNA/RNA Molecule: Synthetic oligonucleotide"
  source: /note="DNA/RNA"
  source: /note="5' tri-ethylene glycol (TEG)"
  modified_base (7)..(7): bicyclic nucleic acid (BNA)
  modified_base (8)..(8): bicyclic nucleic acid (BNA)
  source: /note="3' tri-ethylene glycol (TEG)"
gguaagtt

SEQ ID NO: 10818 - RNA, 20 nt, Artificial Sequence
  source: /note="Description of Artificial Sequence: Synthetic oligonucleotide"
  source: /note="RNA"
  source: /note="5' tri-ethylene glycol (TEG)"
  modified_base (19)..(19): bicyclic nucleic acid (BNA)
  modified_base (20)..(20): bicyclic nucleic acid (BNA)
  source: /note="3' tri-ethylene glycol (TEG)"
cgguaaguucuguccaagcc

SEQ ID NO: 10819 - RNA, 19 nt, Artificial Sequence
  source: /note="Description of Artificial Sequence: Synthetic oligonucleotide"
  source: /note="RNA"
  source: /note="5' tri-ethylene glycol (TEG)"
  modified_base (18)..(18): bicyclic nucleic acid (BNA)
  modified_base (19)..(19): bicyclic nucleic acid (BNA)
  source: /note="3' tri-ethylene glycol (TEG)"
cgguaaguucuguccaagc

SEQ ID NO: 10820 - RNA, 18 nt, Artificial Sequence
  source: /note="Description of Artificial Sequence: Synthetic oligonucleotide"
  source: /note="RNA"
  source: /note="5' tri-ethylene glycol (TEG)"
  modified_base (17)..(17): bicyclic nucleic acid (BNA)
  modified_base (18)..(18): bicyclic nucleic acid (BNA)
  source: /note="3' tri-ethylene glycol (TEG)"
cgguaaguucuguccaag

SEQ ID NO: 10821 - RNA, 17 nt, Artificial Sequence
  source: /note="Description of Artificial Sequence: Synthetic oligonucleotide"
  source: /note="RNA"
  source: /note="5' tri-ethylene glycol (TEG)"
  modified_base (16)..(16): bicyclic nucleic acid (BNA)
  modified_base (17)..(17): bicyclic nucleic acid (BNA)
  source: /note="3' tri-ethylene glycol (TEG)"
cgguaaguucuguccaa

SEQ ID NO: 10822 - RNA, 16 nt, Artificial Sequence
  source: /note="Description of Artificial Sequence: Synthetic oligonucleotide"
  source: /note="RNA"
  source: /note="5' tri-ethylene glycol (TEG)"
  modified_base (15)..(15): bicyclic nucleic acid (BNA)
  modified_base (16)..(16): bicyclic nucleic acid (BNA)
  source: /note="3' tri-ethylene glycol (TEG)"
cgguaaguucugucca

SEQ ID NO: 10823 - RNA, 15 nt, Artificial Sequence
  source: /note="Description of Artificial Sequence: Synthetic oligonucleotide"
  source: /note="RNA"
  source: /note="5' tri-ethylene glycol (TEG)"
  modified_base (14)..(14): bicyclic nucleic acid (BNA)
  modified_base (15)..(15): bicyclic nucleic acid (BNA)
  source: /note="3' tri-ethylene glycol (TEG)"
cgguaaguucugucc

SEQ ID NO: 10824 - DNA, 14 bp, Artificial Sequence
  source: /note="Description of Artificial Sequence: Synthetic oligonucleotide"
  source: /note="Description of Combined DNA/RNA Molecule: Synthetic oligonucleotide"
  source: /note="DNA/RNA"
  source: /note="5' tri-ethylene glycol (TEG)"
  modified_base (13)..(13): bicyclic nucleic acid (BNA)
  modified_base (14)..(14): bicyclic nucleic acid (BNA)
  source: /note="3' tri-ethylene glycol (TEG)"
cgguaaguucugtc

SEQ ID NO: 10825 - DNA, 13 bp, Artificial Sequence
  source: /note="Description of Artificial Sequence: Synthetic oligonucleotide"
  source: /note="Description of Combined DNA/RNA Molecule: Synthetic oligonucleotide"
  source: /note="DNA/RNA"
  source: /note="5' tri-ethylene glycol (TEG)"
  modified_base (12)..(12): bicyclic nucleic acid (BNA)
  modified_base (13)..(13): bicyclic nucleic acid (BNA)
  source: /note="3' tri-ethylene glycol (TEG)"
cgguaaguucugt

SEQ ID NO: 10826 - DNA, 12 bp, Artificial Sequence
  source: /note="Description of Artificial Sequence: Synthetic oligonucleotide"
  source: /note="Description of Combined DNA/RNA Molecule: Synthetic oligonucleotide"
  source: /note="DNA/RNA"
  source: /note="5' tri-ethylene glycol (TEG)"
  modified_base (11)..(11): bicyclic nucleic acid (BNA)
  modified_base (12)..(12): bicyclic nucleic acid (BNA)
  source: /note="3' tri-ethylene glycol (TEG)"
cgguaaguuctg

SEQ ID NO: 10827 - DNA, 11 bp, Artificial Sequence
  source: /note="Description of Artificial Sequence: Synthetic oligonucleotide"
  source: /note="Description of Combined DNA/RNA Molecule: Synthetic oligonucleotide"
  source: /note="DNA/RNA"
  source: /note="5' tri-ethylene glycol (TEG)"
  modified_base (10)..(10): bicyclic nucleic acid (BNA)
  modified_base (11)..(11): bicyclic nucleic acid (BNA)
  source: /note="3' tri-ethylene glycol (TEG)"
cgguaaguuct

SEQ ID NO: 10828 - DNA, 10 bp, Artificial Sequence
  source: /note="Description of Artificial Sequence: Synthetic oligonucleotide"
  source: /note="Description of Combined DNA/RNA Molecule: Synthetic oligonucleotide"
  source: /note="DNA/RNA"
  source: /note="5' tri-ethylene glycol (TEG)"
  modified_base (9)..(9): bicyclic nucleic acid (BNA)
  modified_base (10)..(10): bicyclic nucleic acid (BNA)
  source: /note="3' tri-ethylene glycol (TEG)"
cgguaagutc

SEQ ID NO: 10829 - DNA, 9 bp, Artificial Sequence
  source: /note="Description of Artificial Sequence: Synthetic oligonucleotide"
  source: /note="Description of Combined DNA/RNA Molecule: Synthetic oligonucleotide"
  source: /note="DNA/RNA"
  source: /note="5' tri-ethylene glycol (TEG)"
  modified_base (8)..(8): bicyclic nucleic acid (BNA)
  modified_base (9)..(9): bicyclic nucleic acid (BNA)
  source: /note="3' tri-ethylene glycol (TEG)"
cgguaagtt

SEQ ID NO: 10830 - DNA, 8 bp, Artificial Sequence
  source: /note="Description of Artificial Sequence: Synthetic oligonucleotide"
  source: /note="Description of Combined DNA/RNA Molecule: Synthetic oligonucleotide"
  source: /note="DNA/RNA"
  source: /note="5' tri-ethylene glycol (TEG)"
  modified_base (7)..(7): bicyclic nucleic acid (BNA)
  modified_base (8)..(8): bicyclic nucleic acid (BNA)
  source: /note="3' tri-ethylene glycol (TEG)"
cgguaagt

SEQ ID NO: 10831 - RNA, 20 nt, Artificial Sequence
  source: /note="Description of Artificial Sequence: Synthetic oligonucleotide"
  source: /note="RNA"
  source: /note="5' tri-ethylene glycol (TEG)"
  modified_base (19)..(19): bicyclic nucleic acid (BNA)
  modified_base (20)..(20): bicyclic nucleic acid (BNA)
  source: /note="3' tri-ethylene glycol (TEG)"
ucgguaaguucuguccaagc

SEQ ID NO: 10832 - RNA, 19 nt, Artificial Sequence
  source: /note="Description of Artificial Sequence: Synthetic oligonucleotide"
  source: /note="RNA"
  source: /note="5' tri-ethylene glycol (TEG)"
  modified_base (18)..(18): bicyclic nucleic acid (BNA)
  modified_base (19)..(19): bicyclic nucleic acid (BNA)
  source: /note="3' tri-ethylene glycol (TEG)"
ucgguaaguucuguccaag

SEQ ID NO: 10833 - RNA, 18 nt, Artificial Sequence
  source: /note="Description of Artificial Sequence: Synthetic oligonucleotide"
  source: /note="RNA"
  source: /note="5' tri-ethylene glycol (TEG)"
  modified_base (17)..(17): bicyclic nucleic acid (BNA)
  modified_base (18)..(18): bicyclic nucleic acid (BNA)
  source: /note="3' tri-ethylene glycol (TEG)"
ucgguaaguucuguccaa

SEQ ID NO: 10834 - RNA, 17 nt, Artificial Sequence
  source: /note="Description of Artificial Sequence: Synthetic oligonucleotide"
  source: /note="RNA"
  source: /note="5' tri-ethylene glycol (TEG)"
  modified_base (16)..(16): bicyclic nucleic acid (BNA)
  modified_base (17)..(17): bicyclic nucleic acid (BNA)
  source: /note="3' tri-ethylene glycol (TEG)"
ucgguaaguucugucca

SEQ ID NO: 10835 - RNA, 16 nt, Artificial Sequence
  source: /note="Description of Artificial Sequence: Synthetic oligonucleotide"
  source: /note="RNA"
  source: /note="5' tri-ethylene glycol (TEG)"
  modified_base (15)..(15): bicyclic nucleic acid (BNA)
  modified_base (16)..(16): bicyclic nucleic acid (BNA)
  source: /note="3' tri-ethylene glycol (TEG)"
ucgguaaguucugucc

SEQ ID NO: 10836 - DNA, 15 bp, Artificial Sequence
  source: /note="Description of Artificial Sequence: Synthetic oligonucleotide"
  source: /note="Description of Combined DNA/RNA Molecule: Synthetic oligonucleotide"
  source: /note="DNA/RNA"
  source: /note="5' tri-ethylene glycol (TEG)"
  modified_base (14)..(14): bicyclic nucleic acid (BNA)
  modified_base (15)..(15): bicyclic nucleic acid (BNA)
  source: /note="3' tri-ethylene glycol (TEG)"
ucgguaaguucugtc

SEQ ID NO: 10837 - DNA, 14 bp, Artificial Sequence
  source: /note="Description of Artificial Sequence: Synthetic oligonucleotide"
  source: /note="Description of Combined DNA/RNA Molecule: Synthetic oligonucleotide"
  source: /note="DNA/RNA"
  source: /note="5' tri-ethylene glycol (TEG)"
  modified_base (13)..(13): bicyclic nucleic acid (BNA)
  modified_base (14)..(14): bicyclic nucleic acid (BNA)
  source: /note="3' tri-ethylene glycol (TEG)"
ucgguaaguucugt

SEQ ID NO: 10838 - DNA, 13 bp, Artificial Sequence
  source: /note="Description of Artificial Sequence: Synthetic oligonucleotide"
  source: /note="Description of Combined DNA/RNA Molecule: Synthetic oligonucleotide"
  source: /note="DNA/RNA"
  source: /note="5' tri-ethylene glycol (TEG)"
  modified_base (12)..(12): bicyclic nucleic acid (BNA)
  modified_base (13)..(13): bicyclic nucleic acid (BNA)
  source: /note="3' tri-ethylene glycol (TEG)"
ucgguaaguuctg

SEQ ID NO: 10839 - DNA, 12 bp, Artificial Sequence
  source: /note="Description of Artificial Sequence: Synthetic oligonucleotide"
  source: /note="Description of Combined DNA/RNA Molecule: Synthetic oligonucleotide"
  source: /note="DNA/RNA"
  source: /note="5' tri-ethylene glycol (TEG)"
  modified_base (11)..(11): bicyclic nucleic acid (BNA)
  modified_base (12)..(12): bicyclic nucleic acid (BNA)
  source: /note="3' tri-ethylene glycol (TEG)"
ucgguaaguuct

SEQ ID NO: 10840 - DNA, 11 bp, Artificial Sequence
  source: /note="Description of Artificial Sequence: Synthetic oligonucleotide"
  source: /note="Description of Combined DNA/RNA Molecule: Synthetic oligonucleotide"
  source: /note="DNA/RNA"
  source: /note="5' tri-ethylene glycol (TEG)"
  modified_base (10)..(10): bicyclic nucleic acid (BNA)
  modified_base (11)..(11): bicyclic nucleic acid (BNA)
  source: /note="3' tri-ethylene glycol (TEG)"
ucgguaagutc

SEQ ID NO: 10841 - DNA, 10 bp, Artificial Sequence
  source: /note="Description of Artificial Sequence: Synthetic oligonucleotide"
  source: /note="Description of Combined DNA/RNA Molecule: Synthetic oligonucleotide"
  source: /note="DNA/RNA"
  source: /note="5' tri-ethylene glycol (TEG)"
  modified_base (9)..(9): bicyclic nucleic acid (BNA)
  modified_base (10)..(10): bicyclic nucleic acid (BNA)
  source: /note="3' tri-ethylene glycol (TEG)"
ucgguaagtt

SEQ ID NO: 10842 - DNA, 9 bp, Artificial Sequence
  source: /note="Description of Artificial Sequence: Synthetic oligonucleotide"
  source: /note="Description of Combined DNA/RNA Molecule: Synthetic oligonucleotide"
  source: /note="DNA/RNA"
  source: /note="5' tri-ethylene glycol (TEG)"
  modified_base (8)..(8): bicyclic nucleic acid (BNA)
  modified_base (9)..(9): bicyclic nucleic acid (BNA)
  source: /note="3' tri-ethylene glycol (TEG)"
ucgguaagt

SEQ ID NO: 10843 - RNA, 20 nt, Artificial Sequence
  source: /note="Description of Artificial Sequence: Synthetic oligonucleotide"
  source: /note="RNA"
  source: /note="5' tri-ethylene glycol (TEG)"
  modified_base (19)..(19): bicyclic nucleic acid (BNA)
  modified_base (20)..(20): bicyclic nucleic acid (BNA)
  source: /note="3' tri-ethylene glycol (TEG)"
gucgguaaguucuguccaag

SEQ ID NO: 10844 - RNA, 19 nt, Artificial Sequence
  source: /note="Description of Artificial Sequence: Synthetic oligonucleotide"
  source: /note="RNA"
  source: /note="5' tri-ethylene glycol (TEG)"
  modified_base (18)..(18): bicyclic nucleic acid (BNA)
  modified_base (19)..(19): bicyclic nucleic acid (BNA)
  source: /note="3' tri-ethylene glycol (TEG)"
gucgguaaguucuguccaa

SEQ ID NO: 10845 - RNA, 18 nt, Artificial Sequence
  source: /note="Description of Artificial Sequence: Synthetic oligonucleotide"
  source: /note="RNA"
  source: /note="5' tri-ethylene glycol (TEG)"
  modified_base (17)..(17): bicyclic nucleic acid (BNA)
  modified_base (18)..(18): bicyclic nucleic acid (BNA)
  source: /note="3' tri-ethylene glycol (TEG)"
gucgguaaguucugucca

SEQ ID NO: 10846 - RNA, 17 nt, Artificial Sequence
  source: /note="Description of Artificial Sequence: Synthetic oligonucleotide"
  source: /note="RNA"
  source: /note="5' tri-ethylene glycol (TEG)"
  modified_base (16)..(16): bicyclic nucleic acid (BNA)
  modified_base (17)..(17): bicyclic nucleic acid (BNA)
  source: /note="3' tri-ethylene glycol (TEG)"
gucgguaaguucugucc

SEQ ID NO: 10847 - DNA, 16 bp, Artificial Sequence
  source: /note="Description of Artificial Sequence: Synthetic oligonucleotide"
  source: /note="Description of Combined DNA/RNA Molecule: Synthetic oligonucleotide"
  source: /note="DNA/RNA"
  source: /note="5' tri-ethylene glycol (TEG)"
  modified_base (15)..(15): bicyclic nucleic acid (BNA)
  modified_base (16)..(16): bicyclic nucleic acid (BNA)
  source: /note="3' tri-ethylene glycol (TEG)"
gucgguaaguucugtc

SEQ ID NO: 10848 - DNA, 15 bp, Artificial Sequence
  source: /note="Description of Artificial Sequence: Synthetic oligonucleotide"
  source: /note="Description of Combined DNA/RNA Molecule: Synthetic oligonucleotide"
  source: /note="DNA/RNA"
  source: /note="5' tri-ethylene glycol (TEG)"
  modified_base (14)..(14): bicyclic nucleic acid (BNA)
  modified_base (15)..(15): bicyclic nucleic acid (BNA)
  source: /note="3' tri-ethylene glycol (TEG)"
gucgguaaguucugt

SEQ ID NO: 10849 - DNA, 14 bp, Artificial Sequence
  source: /note="Description of Artificial Sequence: Synthetic oligonucleotide"
  source: /note="Description of Combined DNA/RNA Molecule: Synthetic oligonucleotide"
  source: /note="DNA/RNA"
  source: /note="5' tri-ethylene glycol (TEG)"
  modified_base (13)..(13): bicyclic nucleic acid (BNA)
  modified_base (14)..(14): bicyclic nucleic acid (BNA)
  source: /note="3' tri-ethylene glycol (TEG)"
gucgguaaguuctg

SEQ ID NO: 10850 - DNA, 13 bp, Artificial Sequence
  source: /note="Description of Artificial Sequence: Synthetic oligonucleotide"
  source: /note="Description of Combined DNA/RNA Molecule: Synthetic oligonucleotide"
  source: /note="DNA/RNA"
  source: /note="5' tri-ethylene glycol (TEG)"
  modified_base (12)..(12): bicyclic nucleic acid (BNA)
  modified_base (13)..(13): bicyclic nucleic acid (BNA)
  source: /note="3' tri-ethylene glycol (TEG)"
gucgguaaguuct

SEQ ID NO: 10851 - DNA, 12 bp, Artificial Sequence
  source: /note="Description of Artificial Sequence: Synthetic oligonucleotide"
  source: /note="Description of Combined DNA/RNA Molecule: Synthetic oligonucleotide"
  source: /note="DNA/RNA"
  source: /note="5' tri-ethylene glycol (TEG)"
  modified_base (11)..(11): bicyclic nucleic acid (BNA)
  modified_base (12)..(12): bicyclic nucleic acid (BNA)
  source: /note="3' tri-ethylene glycol (TEG)"
gucgguaagutc

SEQ ID NO: 10852 - DNA, 11 bp, Artificial Sequence
  source: /note="Description of Artificial Sequence: Synthetic oligonucleotide"
  source: /note="Description of Combined DNA/RNA Molecule: Synthetic oligonucleotide"
  source: /note="DNA/RNA"
  source: /note="5' tri-ethylene glycol (TEG)"
  modified_base (10)..(10): bicyclic nucleic acid (BNA)
  modified_base (11)..(11): bicyclic nucleic acid (BNA)
  source: /note="3' tri-ethylene glycol (TEG)"
gucgguaagtt

SEQ ID NO: 10853 - DNA, 10 bp, Artificial Sequence
  source: /note="Description of Artificial Sequence: Synthetic oligonucleotide"
  source: /note="Description of Combined DNA/RNA Molecule: Synthetic oligonucleotide"
  source: /note="DNA/RNA"
  source: /note="5' tri-ethylene glycol (TEG)"
  modified_base (9)..(9): bicyclic nucleic acid (BNA)
  modified_base (10)..(10): bicyclic nucleic acid (BNA)
  source: /note="3' tri-ethylene glycol (TEG)"
gucgguaagt

SEQ ID NO: 10854 - RNA, 20 nt, Artificial Sequence
  source: /note="Description of Artificial Sequence: Synthetic oligonucleotide"
  source: /note="RNA"
  source: /note="5' tri-ethylene glycol (TEG)"
  modified_base (19)..(19): bicyclic nucleic acid (BNA)
  modified_base (20)..(20): bicyclic nucleic acid (BNA)
  source: /note="3' tri-ethylene glycol (TEG)"
agucgguaaguucuguccaa

SEQ ID NO: 10855 - RNA, 19 nt, Artificial Sequence
  source: /note="Description of Artificial Sequence: Synthetic oligonucleotide"
  source: /note="RNA"
  source: /note="5' tri-ethylene glycol (TEG)"
  modified_base (18)..(18): bicyclic nucleic acid (BNA)
  modified_base (19)..(19): bicyclic nucleic acid (BNA)
  source: /note="3' tri-ethylene glycol (TEG)"
agucgguaaguucugucca

SEQ ID NO: 10856 - DNA, 17 bp, Artificial Sequence
  source: /note="Description of Artificial Sequence: Synthetic oligonucleotide"
  source: /note="Description of Combined DNA/RNA Molecule: Synthetic oligonucleotide"
  source: /note="DNA/RNA"
  source: /note="5' tri-ethylene glycol (TEG)"
  modified_base (16)..(16): bicyclic nucleic acid (BNA)
  modified_base (17)..(17): bicyclic nucleic acid (BNA)
  source: /note="3' tri-ethylene glycol (TEG)"
agucgguaaguucugtc

SEQ ID NO: 10857 - DNA, 16 bp, Artificial Sequence
  source: /note="Description of Artificial Sequence: Synthetic oligonucleotide"
  source: /note="Description of Combined DNA/RNA Molecule: Synthetic oligonucleotide"
  source: /note="DNA/RNA"
  source: /note="5' tri-ethylene glycol (TEG)"
  modified_base (15)..(15): bicyclic nucleic acid (BNA)
  modified_base (16)..(16): bicyclic nucleic acid (BNA)
  source: /note="3' tri-ethylene glycol (TEG)"
agucgguaaguucugt

SEQ ID NO: 10858 - DNA, 15 bp, Artificial Sequence
  source: /note="Description of Artificial Sequence: Synthetic oligonucleotide"
  source: /note="Description of Combined DNA/RNA Molecule: Synthetic oligonucleotide"
  source: /note="DNA/RNA"
  source: /note="5' tri-ethylene glycol (TEG)"
  modified_base (14)..(14): bicyclic nucleic acid (BNA)
  modified_base (15)..(15): bicyclic nucleic acid (BNA)
  source: /note="3' tri-ethylene glycol (TEG)"
agucgguaaguuctg

SEQ ID NO: 10859 - DNA, 14 bp, Artificial Sequence
  source: /note="Description of Artificial Sequence: Synthetic oligonucleotide"
  source: /note="Description of Combined DNA/RNA Molecule: Synthetic oligonucleotide"
  source: /note="DNA/RNA"
  source: /note="5' tri-ethylene glycol (TEG)"
  modified_base (13)..(13): bicyclic nucleic acid (BNA)
  modified_base (14)..(14): bicyclic nucleic acid (BNA)
  source: /note="3' tri-ethylene glycol (TEG)"
agucgguaaguuct

SEQ ID NO: 10860 - DNA, 13 bp, Artificial Sequence
  source: /note="Description of Artificial Sequence: Synthetic oligonucleotide"
  source: /note="Description of Combined DNA/RNA Molecule: Synthetic oligonucleotide"
  source: /note="DNA/RNA"
  source: /note="5' tri-ethylene glycol (TEG)"
  modified_base (12)..(12): bicyclic nucleic acid (BNA)
  modified_base (13)..(13): bicyclic nucleic acid (BNA)
  source: /note="3' tri-ethylene glycol (TEG)"
agucgguaagutc

SEQ ID NO: 10861 - DNA, 12 bp, Artificial Sequence
  source: /note="Description of Artificial Sequence: Synthetic oligonucleotide"
  source: /note="Description of Combined DNA/RNA Molecule: Synthetic oligonucleotide"
  source: /note="DNA/RNA"
  source: /note="5' tri-ethylene glycol (TEG)"
  modified_base (11)..(11): bicyclic nucleic acid (BNA)
  modified_base (12)..(12): bicyclic nucleic acid (BNA)
  source: /note="3' tri-ethylene glycol (TEG)"
agucgguaagtt

SEQ ID NO: 10862 - DNA, 11 bp, Artificial Sequence
  source: /note="Description of Artificial Sequence: Synthetic oligonucleotide"
  source: /note="Description of Combined DNA/RNA Molecule: Synthetic oligonucleotide"
  source: /note="DNA/RNA"
  source: /note="5' tri-ethylene glycol (TEG)"
  modified_base (10)..(10): bicyclic nucleic acid (BNA)
  modified_base (11)..(11): bicyclic nucleic acid (BNA)
  source: /note="3' tri-ethylene glycol (TEG)"
agucgguaagt

SEQ ID NO: 10863 - RNA, 20 nt, Artificial Sequence
  source: /note="Description of Artificial Sequence: Synthetic oligonucleotide"
  source: /note="RNA"
  source: /note="5' tri-ethylene glycol (TEG)"
  modified_base (19)..(19): bicyclic nucleic acid (BNA)
  modified_base (20)..(20): bicyclic nucleic acid (BNA)
  source: /note="3' tri-ethylene glycol (TEG)"
cagucgguaaguucugucca

SEQ ID NO: 10864 - RNA, 19 nt, Artificial Sequence
  source: /note="Description of Artificial Sequence: Synthetic oligonucleotide"
  source: /note="RNA"
  source: /note="5' tri-ethylene glycol (TEG)"
  modified_base (18)..(18): bicyclic nucleic acid (BNA)
  modified_base (19)..(19): bicyclic nucleic acid (BNA)
  source: /note="3' tri-ethylene glycol (TEG)"
cagucgguaaguucugucc

SEQ ID NO: 10865 - DNA, 18 bp, Artificial Sequence
  source: /note="Description of Artificial Sequence: Synthetic oligonucleotide"
  source: /note="Description of Combined DNA/RNA Molecule: Synthetic oligonucleotide"
  source: /note="DNA/RNA"
  source: /note="5' tri-ethylene glycol (TEG)"
  modified_base (17)..(17): bicyclic nucleic acid (BNA)
  modified_base (18)..(18): bicyclic nucleic acid (BNA)
  source: /note="3' tri-ethylene glycol (TEG)"
cagucgguaaguucugtc

SEQ ID NO: 10866 - DNA, 17 bp, Artificial Sequence
  source: /note="Description of Artificial Sequence: Synthetic oligonucleotide"
  source: /note="Description of Combined DNA/RNA Molecule: Synthetic oligonucleotide"
  source: /note="DNA/RNA"
  source: /note="5' tri-ethylene glycol (TEG)"
  modified_base (16)..(16): bicyclic nucleic acid (BNA)
  modified_base (17)..(17): bicyclic nucleic acid (BNA)
  source: /note="3' tri-ethylene glycol (TEG)"
cagucgguaaguucugt

SEQ ID NO: 10867 - DNA, 16 bp, Artificial Sequence
  source: /note="Description of Artificial Sequence: Synthetic oligonucleotide"
  source: /note="Description of Combined DNA/RNA Molecule: Synthetic oligonucleotide"
  source: /note="DNA/RNA"
  source: /note="5' tri-ethylene glycol (TEG)"
  modified_base (15)..(15): bicyclic nucleic acid (BNA)
  modified_base (16)..(16): bicyclic nucleic acid (BNA)
  source: /note="3' tri-ethylene glycol (TEG)"
cagucgguaaguuctg

SEQ ID NO: 10868 - DNA, 15 bp, Artificial Sequence
  source: /note="Description of Artificial Sequence: Synthetic oligonucleotide"
  source: /note="Description of Combined DNA/RNA Molecule: Synthetic oligonucleotide"
  source: /note="DNA/RNA"
  source: /note="5' tri-ethylene glycol (TEG)"
  modified_base (14)..(14): bicyclic nucleic acid (BNA)
  modified_base (15)..(15): bicyclic nucleic acid (BNA)
  source: /note="3' tri-ethylene glycol (TEG)"
cagucgguaaguuct

SEQ ID NO: 10869 - DNA, 14 bp, Artificial Sequence
  source: /note="Description of Artificial Sequence: Synthetic oligonucleotide"
  source: /note="Description of Combined DNA/RNA Molecule: Synthetic oligonucleotide"
  source: /note="DNA/RNA"
  source: /note="5' tri-ethylene glycol (TEG)"
  modified_base (13)..(13): bicyclic nucleic acid (BNA)
  modified_base (14)..(14): bicyclic nucleic acid (BNA)
  source: /note="3' tri-ethylene glycol (TEG)"
cagucgguaagutc

SEQ ID NO: 10870 - DNA, 13 bp, Artificial Sequence
  source: /note="Description of Artificial Sequence: Synthetic oligonucleotide"
  source: /note="Description of Combined DNA/RNA Molecule: Synthetic oligonucleotide"
  source: /note="DNA/RNA"
  source: /note="5' tri-ethylene glycol (TEG)"
  modified_base (12)..(12): bicyclic nucleic acid (BNA)
  modified_base (13)..(13): bicyclic nucleic acid (BNA)
  source: /note="3' tri-ethylene glycol (TEG)"
cagucgguaagtt

SEQ ID NO: 10871 - DNA, 12 bp, Artificial Sequence
  source: /note="Description of Artificial Sequence: Synthetic oligonucleotide"
  source: /note="Description of Combined DNA/RNA Molecule: Synthetic oligonucleotide"
  source: /note="DNA/RNA"
  source: /note="5' tri-ethylene glycol (TEG)"
  modified_base (11)..(11): bicyclic nucleic acid (BNA)
  modified_base (12)..(12): bicyclic nucleic acid (BNA)
  source: /note="3' tri-ethylene glycol (TEG)"
cagucgguaagt

SEQ ID NO: 10872 - RNA, 20 nt, Artificial Sequence
  source: /note="Description of Artificial Sequence: Synthetic oligonucleotide"
  source: /note="RNA"
  source: /note="5' tri-ethylene glycol (TEG)"
  modified_base (19)..(19): bicyclic nucleic acid (BNA)
  modified_base (20)..(20): bicyclic nucleic acid (BNA)
  source: /note="3' tri-ethylene glycol (TEG)"
ccagucgguaaguucugucc

SEQ ID NO: 10873 - DNA, 19 bp, Artificial Sequence
  source: /note="Description of Artificial Sequence: Synthetic oligonucleotide"
  source: /note="Description of Combined DNA/RNA Molecule: Synthetic oligonucleotide"
  source: /note="DNA/RNA"
  source: /note="5' tri-ethylene glycol (TEG)"
  modified_base (18)..(18): bicyclic nucleic acid (BNA)
  modified_base (19)..(19): bicyclic nucleic acid (BNA)
  source: /note="3' tri-ethylene glycol (TEG)"
ccagucgguaaguucugtc

SEQ ID NO: 10874 - DNA, 18 bp, Artificial Sequence
  source: /note="Description of Artificial Sequence: Synthetic oligonucleotide"
  source: /note="Description of Combined DNA/RNA Molecule: Synthetic oligonucleotide"
  source: /note="DNA/RNA"
  source: /note="5' tri-ethylene glycol (TEG)"
  modified_base (17)..(17): bicyclic nucleic acid (BNA)
  modified_base (18)..(18): bicyclic nucleic acid (BNA)
  source: /note="3' tri-ethylene glycol (TEG)"
ccagucgguaaguucugt

SEQ ID NO: 10875 - DNA, 17 bp, Artificial Sequence
  source: /note="Description of Artificial Sequence: Synthetic oligonucleotide"
  source: /note="Description of Combined DNA/RNA Molecule: Synthetic oligonucleotide"
  source: /note="DNA/RNA"
  source: /note="5' tri-ethylene glycol (TEG)"
  modified_base (16)..(16): bicyclic nucleic acid (BNA)
  modified_base (17)..(17): bicyclic nucleic acid (BNA)
  source: /note="3' tri-ethylene glycol (TEG)"
ccagucgguaaguuctg

SEQ ID NO: 10876 - DNA, 16 bp, Artificial Sequence
  source: /note="Description of Artificial Sequence: Synthetic oligonucleotide"
  source: /note="Description of Combined DNA/RNA Molecule: Synthetic oligonucleotide"
  source: /note="DNA/RNA"
  source: /note="5' tri-ethylene glycol (TEG)"
  modified_base (15)..(15): bicyclic nucleic acid (BNA)
  modified_base (16)..(16): bicyclic nucleic acid (BNA)
  source: /note="3' tri-ethylene glycol (TEG)"
ccagucgguaaguuct

SEQ ID NO: 10877 - DNA, 15 bp, Artificial Sequence
  source: /note="Description of Artificial Sequence: Synthetic oligonucleotide"
  source: /note="Description of Combined DNA/RNA Molecule: Synthetic oligonucleotide"
  source: /note="DNA/RNA"
  source: /note="5' tri-ethylene glycol (TEG)"
  modified_base (14)..(14): bicyclic nucleic acid (BNA)
  modified_base (15)..(15): bicyclic nucleic acid (BNA)
  source: /note="3' tri-ethylene glycol (TEG)"
ccagucgguaagutc

SEQ ID NO: 10878 - DNA, 14 bp, Artificial Sequence
  source: /note="Description of Artificial Sequence: Synthetic oligonucleotide"
  source: /note="Description of Combined DNA/RNA Molecule: Synthetic oligonucleotide"
  source: /note="DNA/RNA"
  source: /note="5' tri-ethylene glycol (TEG)"
  modified_base (13)..(13): bicyclic nucleic acid (BNA)
  modified_base (14)..(14): bicyclic nucleic acid (BNA)
  source: /note="3' tri-ethylene glycol (TEG)"
ccagucgguaagtt

SEQ ID NO: 10879 - DNA, 13 bp, Artificial Sequence
  source: /note="Description of Artificial Sequence: Synthetic oligonucleotide"
  source: /note="Description of Combined DNA/RNA Molecule: Synthetic oligonucleotide"
  source: /note="DNA/RNA"
  source: /note="5' tri-ethylene glycol (TEG)"
  modified_base (12)..(12): bicyclic nucleic acid (BNA)
  modified_base (13)..(13): bicyclic nucleic acid (BNA)
  source: /note="3' tri-ethylene glycol (TEG)"
ccagucgguaagt

SEQ ID NO: 10880 - DNA, 20 bp, Artificial Sequence
  source: /note="Description of Artificial Sequence: Synthetic oligonucleotide"
  source: /note="Description of Combined DNA/RNA Molecule: Synthetic oligonucleotide"
  source: /note="DNA/RNA"
  source: /note="5' tri-ethylene glycol (TEG)"
  modified_base (19)..(19): bicyclic nucleic acid (BNA)
  modified_base (20)..(20): bicyclic nucleic acid (BNA)
  source: /note="3' tri-ethylene glycol (TEG)"
gccagucgguaaguucugtc

SEQ ID NO: 10881 - DNA, 19 bp, Artificial Sequence
  source: /note="Description of Artificial Sequence: Synthetic oligonucleotide"
  source: /note="Description of Combined DNA/RNA Molecule: Synthetic oligonucleotide"
  source: /note="DNA/RNA"
  source: /note="5' tri-ethylene glycol (TEG)"
  modified_base (18)..(18): bicyclic nucleic acid (BNA)
  modified_base (19)..(19): bicyclic nucleic acid (BNA)
  source: /note="3' tri-ethylene glycol (TEG)"
gccagucgguaaguucugt

SEQ ID NO: 10882 - DNA, 18 bp, Artificial Sequence
  source: /note="Description of Artificial Sequence: Synthetic oligonucleotide"
  source: /note="Description of Combined DNA/RNA Molecule: Synthetic oligonucleotide"
  source: /note="DNA/RNA"
  source: /note="5' tri-ethylene glycol (TEG)"
  modified_base (17)..(17): bicyclic nucleic acid (BNA)
  modified_base (18)..(18): bicyclic nucleic acid (BNA)
  source: /note="3' tri-ethylene glycol (TEG)"
gccagucgguaaguuctg

SEQ ID NO: 10883 - DNA, 17 bp, Artificial Sequence
  source: /note="Description of Artificial Sequence: Synthetic oligonucleotide"
  source: /note="Description of Combined DNA/RNA Molecule: Synthetic oligonucleotide"
  source: /note="DNA/RNA"
  source: /note="5' tri-ethylene glycol (TEG)"
  modified_base (16)..(16): bicyclic nucleic acid (BNA)
  modified_base (17)..(17): bicyclic nucleic acid (BNA)
  source: /note="3' tri-ethylene glycol (TEG)"
gccagucgguaaguuct

SEQ ID NO: 10884 - DNA, 16 bp, Artificial Sequence
  source: /note="Description of Artificial Sequence: Synthetic oligonucleotide"
  source: /note="Description of Combined DNA/RNA Molecule: Synthetic oligonucleotide"
  source: /note="DNA/RNA"
  source: /note="5' tri-ethylene glycol (TEG)"
  modified_base (15)..(15): bicyclic nucleic acid (BNA)
  modified_base (16)..(16): bicyclic nucleic acid (BNA)
  source: /note="3' tri-ethylene glycol (TEG)"
gccagucgguaagutc

(The sequence listing continues in the following parts.)
